United States Patent Application Publication US 2013/0034624 A1 - sequence listing, part 2

SEQ ID NO: 4593 - DNA, 600 bp, Bovine  MMBT18935
tttttgtcttaagctacattattaaccaaaacactcctcttcctraaagagcaaaaaatatgcctttgcacctttcactaatgagccccgctgtttgatacggagttgatgatayacctcaaacratggtggccgaagcttctgtagtttctggcaagaggctcactttaaaacaagcgatataagacttaagatttgcctgtattccaacatacagtcattggacttttggggggcaggagarcaaactcgaaaacggatgaattgagatcaagacatwtcaaactttctttrggagtyttcattatgattatttattaaaaacccgaggagctcatgaagtatagatgttgctggtagcttgcgcgttctgtcttactggaacgatgtttctggaaagaggggttgctctctttggctcctggttaaatagcctgttttgggggttgtggggtgcacacacagaggtgcctgcagagcatttggcgggggaagaagcaaggggaccagtcttctgtactgggaagcagagcagtgcagccgtgggttgaagtattttgtgtttgttcttttactgtcattgtattaatacgactgaaa

SEQ ID NO: 4594 - DNA, 600 bp, Bovine  MMBT23029
tcctgtgtggcagctgctgtgtatggaatgttgagtctctttgtgacagttgcatggggtttytgtgttcagtgttaaggaacaatgcgtactggttgcttgagtttggtagtatcacggtcaggacagagtgaggtgtcacagaggtgcctgagggagattggacgcagcaagggcttcacaggatggaaaccctcaaggggtctctstgtttcgaaagtcatttctaaactttgattatatttttttctacgtcagagatgataatctccaaagaactgattcaaggtaacccacttkgtgggaggctgaagcttaaatcagaaaacccsttctttaatacagagtgagaagtggaatctctgcttagtgtgacatgaaaaatccagtctctgtgagtttgctattagagtaagagggattcgttaggtgagactaatgggtagttgctccatggcatacgggatcttcctggaccaggaattgaacccrtgtcycctgcatttcaggcagattctttaccactgagccaccgaggaagccctgtgcttgctcttytgtttgtttttcttggtgctgagagtcacagggatagatctg

SEQ ID NO: 4595 - DNA, 600 bp, Bovine  MMBT20482
  misc_feature (1)..(12): n is a, c, g, or t
nnnnnnnnnnnncgattgctttttgttcaaggttagtcttctgtttcctctgggtgctgtttgttccaatgcaaaagtggagggcagaaaataaccaagtctgtttttatctgtaagtgtattattccctggaaatataattattttgttcatttaaaattgcttttgatcaaacaggttggtataaaccagatttttttggttgcctgcagatggcagtgattattaacttgtcattctaaataaaaggtgttggttttacttagcagttctaaagtgctatattaatggcagtttattgkgttctaataaaaattagtaagatttacatgctgcctttgaagaagagagttgatttatatatttaacgtgatgtcatttaaaatattaggtgactagacaygaaacacaaagacattaaattaacatacttcactggattatgcaaaacattgaacagtgacaaaagcgtttcagagcaggatttgattattgtggccaaatccagtaatgtatcctggaaaatttgattccaaagatatgcaaaacatgataaactttgcactctgttttatctccagaacaagatatagcagtaay

SEQ ID NO: 4596 - DNA, 598 bp, Bovine  MMBT07445; identical to SEQ ID NO: 4545
  misc_feature (1)..(4): n is a, c, g, or t

SEQ ID NO: 4597 - DNA, 600 bp, Bovine  MMBT13304; identical to SEQ ID NO: 4546

SEQ ID NO: 4598 - DNA, 600 bp, Bovine  MMBT21629; identical to SEQ ID NO: 4547

SEQ ID NO: 4599 - DNA, 600 bp, Bovine  MMBT06445
tcccaggattctgattcatgcaacaataagcatttattttcatgttcatagggcagcagcacagatgccaaacaatgatggatctcagctggactttacctggtggccccgcttcaagctgtgggtccatctgtgctccgtttctgtgaactgggctcgggtttattccctgtctgttcattccagagtcccagttggaggaatagcagctagcaggggaagctttctcttggaaatggcaaaaatgcaaaaagtcaagtctgacgacgcaagcagatcacaagcctctgtttgtatcamatatgctaacatcccatcagtcaaaacaagtcacaggaccaagccctaaagcaagtgcagggaaacatacctccttctaatgggaggatctgaaaagctttgtggcaaagggcacaagacagaaaaagtgaacaaggcgggggaaaagtttaatctaccatgatctgccctctcggtcataattacttacagctctaccacatgcaaaatatactcagctttatcccaagtcctcaaagtctcattcaatcagacaaagttcaggatctackttaggtccgggtgaggcacctggaaacc

SEQ ID NO: 4600 - DNA, 600 bp, Bovine  MMBT04222
gcatcctctgtgcttggtattttccatgagaagcaaacccagcattgaagcatcattcttccagattgggatcatttcctgaaagctttcagtacaatgacagtgattagctgccagactaattgctccaccaccaaccttgttgcataagcaaatggtgcccaagggtaaaataacaagcacactgaggcaaactttccagcgtgtgcccctaaaccttccccctcaayggagaaagtgaccttttggtgaacaaatgttctttcaccttcactgtttagaagttgttaacattgggcyagctatgtgattgatgcatgagtttgcctcttttctgtggagtaggttctcctctttccacctcagagctgtgagctttttatattgttttcgtttgataaggtggctggactacccataaatttgaatgtatttttttaatgacctggtggtgctgaaagagtgttattctgcttttgtaggctgctggcttttcttttgtcactcacactgctagttaaaccttttgtgamtgtgctcttctattagtaatctgtttgaaattaaaaaaaaaataatgaaaaaaaatgagtttcttgc

SEQ ID NO: 4601 - DNA, 598 bp, Bovine  MMBT06488
  misc_feature (1)..(59): n is a, c, g, or t
nnnnnnnnnnnnnnnnnnnnnnnnnnnnnnnnnnnnnnnnnnnnnnnnnnnnnnnnnnncttagagtcatataaatggtttataataaaaaaaatactgtattgtatcttaattttcatttaatccttaacactttatgagtaagtcctttattcctatagagatacagcaattttccaagttttgacctctagaggtagagaagagctgggattaggtgtggtccctctaaagagaattggccaactttttatgtcaaaggccagatagtagatatttgtggctttgcagtttgatctrtgcccaactattcagttcttctgatacratgtgagggtgattgtcacctgacacrgcttgataacattaataaataaaactttattaacaaagataggcggycactgtgtaggaccctgaccctacagtcagagttctttcctctccttgggaagtcagcctttcttttcctgtgtcagttttgcttcttaaataactgattttctcaatgcccagtcaaaaatgtaagtggactctgcagaaggctgacaatcgatggatggaaccgatgagacaacttgattagttacctgagtcc

SEQ ID NO: 4602 - DNA, 600 bp, Bovine  MMBT06574
aggcagccacagggtccagatcccaagagcaaggtcctaggccagtgaacccctcccgccaagaccaatcaaggccagggctaattaaacataacccttcagggatcgtcttctcttctggcttttcagatctctccccgtctctcctcagcaccaactcagctcgcgcttccaaacaggcatgcgaaatgtgctcagacatcctagttcactcaggacgccactcgggtcgaaggcacccaggcgtgtaacaccctgtgtcagattaagtctgcagtgctggctggtcatccatatttrattgtcagtctgttaatttttaactatgtttgctatcaagggccattagaggtctccaggagccggagtcggtggagcgagaagcgctcggtggcaaagcggatgaaacttggaagtcggggcgtcccactttcccctcctgtcaccgagttctggccttccccactggcagcgccggccttgaataaaacatgatcccatttggagctcgttttccttttcgcccctgtcaccacgggttttcttcacggagttcacttggtttttatggcgcctgcgtcttttaattccaaagtttct

SEQ ID NO: 4603 - DNA, 598 bp, Bovine  MMBT08752
  misc_feature (1)..(24): n is a, c, g, or t
nnnnnnnnnnnnnnnnnnnnnnnnaagatcagtatattaaaactatgaccactggggactttatagaaagtctctcacatttccctgggaattctcatggaggatctggctgtagaaaaatgactgcatacagaactcagaatttcttgtaaatagatttcaaatgcttccaattgcaactgttcacttcaagccagaagtaacatgtggctatatttttcattgcagaattatataataattttggaatatcaattctcttttgtacaattacttgtaaatttactcaaggatatccaytgaacagattatctgtggatttcaatttcctgtgactggatgttacccatgatctttttatcagttttttccccctatgttgcaatgttaattaaaaaagaattattatttgagatgcagtatagctattttctatttctaagggacagaaaatatcattgccaattgcttcaaaaaagattaaaatgtgtgggatgataaggaatcttcccagcttgctattatwtttaaaagctgcatttaaacattatgttaatggaatgtaactataatcaattaaaatgttattttcaaagca

SEQ ID NO: 4604 - DNA, 598 bp, Bovine  MMBT14032
  misc_feature (1)..(123): n is a, c, g, or t
nnnnnnnnnnnnnnnnnnnnnnnnnnnnnnnnnnnnnnnnnnnnnnnnnnnnnnnnnnnnnnnnnnnnnnnnnnnnnnnnnnnnnnnnnnnnnnnnnnnnnnnnnnnnnnnnnnnnnnnnnnncactgtcatctcgagggctctgaggttagcttgcttaggagcccgactcccataggtgtgtggatggtgggggtgggggaaatgggaggagccacagggcagacgtggagggagggtcagagcagaggtgtgtgaaccaccagagactgggcgcttctgagatactttcctggaagstgctggtggggagtgcagtagaccggtgtggagagggactgctctccgtctgcacttactggccgactgaccctggaaagtaatttcacctgtaaaatgtgggcaataataatacctctgacctagagtcattgtgagagtgtatggagaaactcttagcacggggtcttggcactgaaaattttcttatcaactgagagctgcaatcattatcatcatggcctgttctctaaggcaggctttttcaaactgtaggaggtaacctgtaagtggatcatgaagtaaattgaatagcttg

SEQ ID NO: 4605 - DNA, 600 bp, Bovine  MMBT20331
gctgagacctggaccccagctctgcaagatttggtggagatgcaatccctctcaggcaaagagccaaccagcctgactcattatctgtttggtggttggcttctggcctgtattatcaccactctcttgtctttattctctctgcagttcccagaggttgaagatgctgtctttcaggtcacttcactagaaaactttgggcttcccaggaagtactagtggtgaagaacccacctgccaatgtaaaagacttgagagatatgggtttgattcctgggttgggaagatcccctggaggarggcatagcaactcactccagtattcaaattaaaacattcatagtcatgtaggtggttatgcttcatgaattccacgaagcaaagttggttagctaggatgtgggacagtgagaagtgtcaggcaccttgtctacttagacagtcataggagcggagcttgctctgagccaggcctttgtctactaaggtcaggtctgctgcgaaggatgaatgagggaggagagaaaggattactctcactcctctcctccaaaagaaatgtcttgaaaaatgcactttttaagttataagcaccacttg

SEQ ID NO: 4606 - DNA, 598 bp, Bovine  MMBT02076; identical to SEQ ID NO: 4512
  misc_feature (1)..(104): n is a, c, g, or t

SEQ ID NO: 4607 - DNA, 600 bp, Bovine  MMBT06654
tgacattgaacacgtgggtagtcactgtttcaaccaactggggattgactaagaagcagatgtgttttgagttgagctgaaaaatagactgcaattgagattgctcatttttattttattttgtctgctgtgttgtgttcagttctcaaaggcatattttatgaaggttataggcaaacaaagatgtgcccaaaggcagatggaagaagcctgaatcatgtcacaaagaacatgagatctccctgggtttgtctagcctaaggatgagaaaagcagagaaaacacatcatccatgtccawatatttgaagaatgtttcattcagtttcgagtaactctaagaaacaaatcaaggtatagggaatgtgagaagtgttaacaaatgttgccagcaattgagccatccaaggaaaatggtagtgagtttcctgtcattgaaaatgatgaaatctttgtcctattgacaactttcaacaaattacttattaatacctaatctgtaaagtgaggatcatggcatttatccctgctccagtggatcttcctgatccaggaatcaaaccaaggtctcctgcattgcaggcagattctttaccagctg

SEQ ID NO: 4608 - DNA, 598 bp, Bovine  MMBT04346
  misc_feature (1)..(24): n is a, c, g, or t
nnnnnnnnnnnnnnnnnnnnnnnnaatatggagcttttgacacaactagtaaatccatttatgcctgagatacagccaacaaactgcaatatatagaagttgttcattctagcataagcctgggattactttgtgattttttttttaaattacagaaatcataattactaaatttgcatcttggttactctcaatctgtccatggtataaattaaatttgccctttgacttgtgtctaaatgaaagagcaaattttagtgaggagcagctctgtattcagaggtaaacacattcatcttygcattagttctgatgaaatctatccacaggcaggttatatgccaggacactgatatatgccacgaggatgcactgctatgaactctatctcagcaaagtcctccagatggaaaataaattggaaagcttcctccagagaaaatgagctaacaggaaagatttgagtctctgagtttaggagctttgcctagagttagttcctcttggggaaattcagtgaatgtgttcctagcaattctaggaagtcttgagatcttttaagacaaacattatggtcttatgtaaattcaagtaaact

SEQ ID NO: 4609 - DNA, 600 bp, Bovine  MMBT04211
tccagtagtatgtaaacacagtcaaagaatataaacacgacaaaaagaggcatttccccaacccaactccaacctcaattggtaccaataataaaaataattgctttgagaacgagaatactttttttagtagttttccggcagaggctcttaagtacacatgacctccaattatacatcctacacatcgtagagctccctatgtataaccattcagaccttttcccattatttcctggaattttaaggattcgtttgaaaataagcgcctgcactacttttagtcaagtccaaaagtayaataaacattyctgcccaagacctttttcctccctaaaacaagtgaaacacgagccctccttaaaggcttgaggtattcctaatgtatgtataaaagtccatggacaggccactcatctggaggaaaatgatttaaaatttgccaaagttgccaaatcacatttggagacaaaaaacggaccaattttacttcataagacaaatcattttcaataaacgaacgtgacaccaggaaagtaagtttaatgatccgggcaattattgctggaaagaactttagggacaaagagaatcactcat

SEQ ID NO: 4610 - DNA, 598 bp, Bovine  MMBT07889
  misc_feature (1)..(50): n is a, c, g, or t
nnnnnnnnnnnnnnnnnnnnnnnnnnnnnnnnnnnnnnnnnnnnnnnnnncatggaactgggttcatgggcccaagaaagaaggagcatgattgaaaatgatggtgagagagtatcatcatcttccttagcgtaactatagctggagaacctttgagtcattgctgccaccttcacttaaaacaaggaaacaaaactactattctcccatgaacagacactgcaggagccaacatatctgtggaggaaccagctggacttgatcctgtcctgccacgcatcaaaaaccttgtgaggcccrttacactgcacaatctcctaagcattgatcctcacagaggcagggagagttcagctgggtatttttttttttttttttaatcccacaaggagtcagaggcattggcacttagcaaatcctcttttaatttgctcactgagaaaattcaatcaagacatcattaaaagaaaagagaccagcatggcaccatttgtcaagtctatctttgagctatcactgcttttcaaggggtggtgagtgatgggcagaattatattttctggcttctgaataagcttctgtagaagagctcacaatt

SEQ ID NO: 4611 - DNA, 569 bp, Bovine  MMBT12658
tcggcagtttatagatctttatcttaagaaatgctaataaaatatggctgacagtgaaatcagttcctcgagaaagagactcctgtytgcccaaactaatcattaattacttaacacactggttagaaatgtccatagatcagagttagggggtctcatctgagctacaagtgatgcttaaaatttaaaatgctttaaatgaagaaggtgccagcagtcccccctggacagtcccactggttgtctagaataacgtgagtcctaaactcgggccgtactccgtgttcacacgagttactmactcttcctttaggtctgtgtgtttaccgagcaggttcacagtttgtaacccagtgtgctttcttggtatttgcagaatgtgtttccaccatcctcccaaaatgtgaagattttgtttgtactttaagtgagaaataaagaaatgagctaccccatatatcctatttgtggtataaggaacaagaacaagtttaaaaaaatgttcttggaaaacatgtttagagaacctgtaataaagatctggagaatggagctgccaagtcaatgtg

SEQ ID NO: 4612 - DNA, 600 bp, Bovine  MMBT13103
ttgggaaagcagatggctcgagctagcactggggccactggaactcagacagctttagtgggaagtgaggaaataagcccgtgataggtgcttctgaggcatcttctgaggatccactgggttaggtttccctcaggagcattgtctgcggtcagcccttgacgtcatgcgacttgtcagggtgtgctgaggaaaggtagggacaaaaatcggcttaaaggaacaggaaagagggataggtagtcactgaggtataagcctgaataaactcatttcctcatttctcaccatcctcgcctstctytgctytctcagcgggcagagctgacatctgataaagacatgtaccttgacaacagctccattgaagaagcttcaggagtgtatcctattgacgatgacgactacgcgtctgcatcaggctcgggtaaggctagctgcatccacactcatctctgttctctgtgtttgtgtatgcacgtgccacacacaccctgtcttacacacgcatacactcacactctattggaatgtgcttcagggaagcaagcaggaggcataactgttaagggcacgctctgtggagtcacagtgcctggg

SEQ ID NO: 4613 - DNA, 600 bp, Bovine  MMBT12991
gattgactgatattacagcccagatcatagtctaagcttcttatttaataagccttcaaatgaaagtactcaatgttaaatctgttttcattctgtctttggtgttgtccctcccacgggattttcatcactayttaccttgagtgttgacagtttctgcactaarcttgctgcctaagtccttcacttctaactgttaccccactgactataaacctgcactaggttaagcttcctaaaactctgctttatgggcattgcattcttgatccaaaagtcttcagtggttcctcaacacayagaaaataagatttaaaccaactggcaatcaaggtctatcatagtctaagtcctacatttacccttgtttattactgtactcctatatgacattcctataagacaaattgtcttattggttgctctacattcagcttaatgcatgttcttttaggtacgctttttccccaaatggaatatttttaatgatttttaccctatctattaagtcattatctgttctacatgagcaatttcaaatgttacacaaatctttttcaaattttactaacaacttcttttttaattgcctaatcactc

SEQ ID NO: 4614 - DNA, 598 bp, Bovine  MMBT14263
  misc_feature (1)..(89): n is a, c, g, or t
nnnnnnnnnnnnnnnnnnnnnnnnnnnnnnnnnnnnnnnnnnnnnnnnnnnnnnnnnnnnnnnnnnnnnnnnnnnnnnnnnnnnnnnnntgtttgataccatgttataaaactccaaatcttgctgttgccattattattttattattaaaatattttagcaaagtacattccaagtcaggtacttcgtataactattgatttataaagtcatgaaataaaaagaaattcctttgcagtatctgtgaaaccaatatgccttcattggtaggccaatagcaagccctaaataattttatgygtctttatagaaaygtattcttttttttttttttagttttttttttaattggaggataattactttaccatattatgatggtttttgccctacatcaacatgaatcagccatagatatacatgtgtccccgctgattctgaaccccccttcccacttccctcgctaccctatccctctaggttgtcccagagcaccagctttgggtgccctgcttcatgcatggaactcacactgtcatctagtttacatatagtgatgtatatgtttcaattctattctttcaaatcattccaccct

SEQ ID NO: 4615 - DNA, 600 bp, Bovine  MMBT13519
tgtttttgctttggctccatctcttcattctttctggagttatttcaagagactgacccagacttgcccatgagtgtccaggagtctccggcggaggcgtgggtcggcggtggcctgctgcagggtctggggcactgactgcagcagtgcctgcatgggaccttttgaaggaggaggtcattatcttcattacctctaccatagtttggcctcaggtccaacaaaagggagggaacacggcccagtcccctgagtaatatagcagcaacgtttaatccagaaaattggattaaagrtatrctgagcatggtctggagcatcaaaacaagacccagttccccctcagtcagtctctcccatcaggaagcttccataagcctcttatctttatccttcagagggcagacagaatgaaagccacagtcacagaaaactaaccaatctgatcacatggaccacagccttgtctaactcaatgaaactatgatccatgccatgtagggccacctaagacagatgggtcatggtggagagtccaccctctgtctgactcgtcccataaacaggaggtggaaataacaggaggtcaggcaattcctt

SEQ ID NO: 4616 - DNA, 598 bp, Bovine  MMBT16148
  misc_feature (1)..(25): n is a, c, g, or t
nnnnnnnnnnnnnnnnnnnnnnnnncatatgtataaaatttaatagctcagcttttagtgtgccttattttcaacaacactctactcaggaacatttgctaaatttctcatttaaataaggtgataaagcatccttaagccctgcagggccaaatgtgttgacttccaaagattgttccaacatttgtaaaaacgtcttatcactttcactatgaactcttcccaataagcagataaataataattcagcaagtaatctagacccattatctcttctcccttctgtttaatccaacctgytttgcttcttgggtacttaatcagaagcttgtaagatatctattacagattatgacrctataaatcatgtccttaaagtgcgaaacrtccttgtcagaacattcaaagtagcttttgagggcaagcagagtctatcwctttagaagtattgattgcragaaacagagagcaatacaagctaacctaaaaagaggacttattggaaagattttgkatctcacaagggccagatcttgtcatagcagaacaaggtgtgttccagaggatcacagagcaggaagaaacagagcatttccct

SEQ ID NO: 4617 - DNA, 598 bp, Bovine  MMBT17178
  misc_feature (1)..(156): n is a, c, g, or t
nnnnnnnnnnnnnnnnnnnnnnnnnnnnnnnnnnnnnnnnnnnnnnnnnnnnnnnnnnnnnnnnnnnnnnnnnnnnnnnnnnnnnnnnnnnnnnnnnnnnnnnnnnnnnnnnnnnnnnnnnnnnnnnnnnnnnnnnnnnnnnnnnnnnnnnnnnnncttttattattagcagcctgagttttttggggagtagacaggatatgaaaagatctgcaaaaccagaagtgatatatttttggtttttgtttagcacggagaattggaaatggaatatatttattgcttaagtgatgccatgcytttcaaagaaagaataagtttatttcctccaagtcacagtggaggagcattatgtaatattggctcagtgggtaaaaaatccaactgcaatacaggagagagaggagatgcgagttcgatccttggtttgggaagatccctyagagaaggaaatggcaacccactccagtattcttgcctggagaatcccatgggcagaggagcctggcgggctacagtccatggggtcacaaagagycggacatgactgagcgactaaacacacacacacacacacacacacacagatacagaatca

SEQ ID NO: 4618 - DNA, 600 bp, Bovine  MMBT14616
ctttcctcagactgacaaaacgagtatatttgccaattattttaagaaaggctggtacaactgcttacaaaggaagaaaacaaggctcatgaaagttaggtagcttgtcaaggtgttggaagggtcaaatacaatagtaagtgcaatggaagcttcatgaaccataaaacatgatgaaaataccaggttttaataattactaataaaatattaaattattgttgaaacaacacatttggtaaatgtcaaaggagaagtactgtatgctcattcagtcatatctggttctttgcaaccccrtggactgtagtctatgaggctcctctgttatgggatttcccaggcaaaaatactgttgagaattactcggtgcataaaatatggaggggagagaaagatttcagtttgatgaccttctaaatgaccagaggcaaagtctagcagttgccaacctggctgggcctggatgatgcattcggagactttatcttcacctccccatattccgggtgccacacagtcactgaggatatcccagcattatttgactaagtgcctgagacacaggcctctagaatgtaccagaggaagccaccaaaa

SEQ ID NO: 4619 - DNA, 600 bp, Bovine  MMBT21689
acacggcccgacagaagtgcagtgtggagctgctcttgcctcctgatggggcgtagtctctgggtgttgtcactcagtcctgtctgactctgtgatcctatggactgcagcccgccaggctcctctgtccatgggattctctaggcaagaataaggcaggatgaaagtggtgagtgggggcagctggcgagagtatctgtcgatccactgctccagctccaggatgagccccgcctcgaacatggcgtgttttaaatgagcctctctggctgaggagcgcggagtcgccagggcagagcygaagtcctacagggagcactggattctctgaagctcttccacaaacgggtggtccttttctgcaattaattccatagcaaacccaatggctgaacttaattcatctgtagttcccacagcttcaaacacctggtcgtctttgggtggtctttctccagtgaaggtgctagaaaaccctttgtctcctgttttggtgtagatcttggggacctagggagtcttcgaggaaggctgaggcctgtccccatcttccacaccctgggggctgcgactctggaaatggggacacaatagctcgcg

SEQ ID NO: 4620 - DNA, 600 bp, Bovine  MMBT20253
acctctggagcttggaaaaaagtacagtgtgatggcagaggaagatttgagaatcatctgaaatgtaggtataactaaaatggaagagagcaatagtaagagtaaggatactggacattcaaatacttaagacaaatgatgtagtcagattcactgaagtgaaaacattccaaaagtttagtgataaatattagcagaatcctacgtttagtgattgagaacactggcttctcattgtggtggcttctcttgttgaggtctatggtgcgtggacttccatagttgaggcacacgggctcygtagttacagctcctgggctctagagtgcaggcttagtagttggggtgcaggggcttagttgcttcgcagcgtgtgggatcttcctgggccagggattatcaaaccagtgtctcctgcattggcctccagactctgaaccactggaccacyagcgaatttcttccttaattattaatgaggttaaatatttgtgttttttgagtagctgtgttcctctttaatcaaatgctaatatcctttgcccttgtgatacctattggagttgctttcttttttatatcaagttataggatctcttt

SEQ ID NO: 4621 - DNA, 598 bp, Bovine  MMBT01915
  misc_feature (1)..(57): n is a, c, g, or t
nnnnnnnnnnnnnnnnnnnnnnnnnnnnnnnnnnnnnnnnnnnnnnnnnnnnnnnnncacactaagaggtagagagtttatcacctgtctattcctgagattctaacaagaagcttttcagaagatcaaaatggaaggaacacaggattgtgatggcagggcaatgctcaggtatgcatccacagagagtactttctgggtttgtttaaagaaaatgaaactgtgtgcttccagtgctcctgagactgtggtggggattgtggcttcaaagaacagtgatcacagctccatggttaccaygatgcaggaaccagtgarcctgagaagaaagcaactacctttgtgtgaagaaaaacaaacaatcctggcaacaaatattgttaaccttgggattggattttttaattatatggtataatctgttccagtggaaccctttataaatagaacagcatttaatatgttaatttatattttaaattaaatttttataaatatgtatgtaaatctattataaattactttatatttttaaattaaaatatattaacatgctaatacactctataggagagtagaggtatgactccgcatgagg

SEQ ID NO: 4622 - DNA, 600 bp, Bovine  MMBT17798
aaagcagtttgtttttggacaaaatggtgaaaaatggaaaaccacatcaatcagtctgttctctttgacccagttcctacctacttttcctaaggtctgttcctaaggctgtaaggtctatttctttgctaaaaacatttaaagatgcctatggtatgggggtggggagtgtggggaaggatgcaagccatgatattgtctttcccygggttttcatggagtttcagatgcactggggaacctggaactataacttaggggtaggaatattttgaaacctggggaccatggatatttttrtgcttttttgtgttatgattggacaatagcagcagagtgagtttagccatgacaagccacatcagctcagctgtagtaacctttgtatagtagtatcagtttytgatgtttaaatgatgaaggatagaagtgtgtggaaggtaaaactctaacctgctcttgacttcaggggcagatgacagtggcatgaatttttactacttggaatttggcattggggtttgtttatagctaatgcagctttcctgttattaagacacacctttagattgctgttccaagagttctccaaaggctgtt

SEQ ID NO: 4623 - DNA, 600 bp, Bovine  MMBT22653
cctgcactggcaggcagattctttaccactgagcccacctgggaagttcttattttacaaatgcacaaatgctgtcaaacaactaacatttcccccccscttaaaaatgctaaagctttctcttctagctgggaacaatgaaaaaatttggacctaccctatttagaaataacccagaatgtgattcttacccatggaggaatcttgcagtagtgacatgccttcatgtctagaggagccacgagtttaggataaaggtgtcwcatgtactcagacgggactttwgtgtacttacttcakttcgtttacttgtctcagaatctcatgctgagtgttcacaacagyatccagttcttgttgaaaggtctggaggaaaaacaaaagatgaccagccagcccgagagtccccactccacagagcacaccgcctaacacccagacatggctcctgcttccttccctgccgcaggcacatccacggacctcgcaagctcacctgcccctgctgccctggggctccagctcctctcttagagatctcctctgtcagggaagagacgtatcttctctgttcatcgagaatcatatctaactgtcggt

SEQ ID NO: 4624 - DNA, 600 bp, Bovine  MMBT00607; identical to SEQ ID NO: 4548

SEQ ID NO: 4625 - DNA, 600 bp, Bovine  MMBT00857; identical to SEQ ID NO: 4549

SEQ ID NO: 4626 - DNA, 600 bp, Bovine  MMBT00611; identical to SEQ ID NO: 4550

SEQ ID NO: 4627 - DNA, 600 bp, Bovine  MMBT02444; identical to SEQ ID NO: 4551

SEQ ID NO: 4628 - DNA, 600 bp, Bovine  MMBT00613; identical to SEQ ID NO: 4552

SEQ ID NO: 4629 - DNA, 600 bp, Bovine  MMBT03343; identical to SEQ ID NO: 4553

SEQ ID NO: 4630 - DNA, 598 bp, Bovine  MMBT05864; identical to SEQ ID NO: 4554
  misc_feature (1)..(160): n is a, c, g, or t

SEQ ID NO: 4631 - DNA, 598 bp, Bovine  MMBT12511; identical to SEQ ID NO: 4555
  misc_feature (1)..(159): n is a, c, g, or t

SEQ ID NO: 4632 - DNA, 600 bp, Bovine  MMBT11500; identical to SEQ ID NO: 4556

SEQ ID NO: 4633 - DNA, 600 bp, Bovine  MMBT11487; identical to SEQ ID NO: 4557

SEQ ID NO: 4634 - DNA, 600 bp, Bovine  MMBT16091; identical to SEQ ID NO: 4558

SEQ ID NO: 4635 - DNA, 600 bp, Bovine  MMBT15397; identical to SEQ ID NO: 4559

SEQ ID NO: 4636 - DNA, 600 bp, Bovine  MMBT17508; identical to SEQ ID NO: 4560

SEQ ID NO: 4637 - DNA, 600 bp, Bovine  MMBT23243; identical to SEQ ID NO: 4561

SEQ ID NO: 4638 - DNA, 600 bp, Bovine  MMBT05614
gtgtgaatgtatatcttgtgttcacatttggtgtttatgtatttgtttattacatagctgctccattttcagagggctttctaatcgtgggttcacgttggatcagtaagtgacttcattttaagtgaggagtgaagtacaagaaaggcagaggagggtggtgactgatgtctgaacagtttcattgttaggctgtcccttgaatagtgtcatctctgtgtgtattccatgaaaacaaatgttcattattggctcttaaatagtgctattcttctatgtagaaaaagttaatattgatayaagggcaaaaggaatgtatttttggtagttttgtgcttttttccttctatttatttgtaatagctttatcttgtatttttattttattttatttttaaactttacaaatgtattagttttgccaaatatcaaaatgaatccgccacaggtatacatgtgttccccatcctgaaccctcctccctcctccctccccataccatccctctgggtcgtcccagtgcactagccccaagcatccagtatcatgcattgaacctggactgggaactcatttcatacatgatattgtacatgtttc

SEQ ID NO: 4639 - DNA, 600 bp, Bovine  MMBT09165
aggtggctcgcgtagcagagaacttcagaaagtggggagtccgacataatgtgatgtgtgatttattggagttggtggagacacacactgtaattgtatgcttggtctaatgtctgattgttgtgtctttcaaaccctctggaggccagccccccatgtaagtgataacccactggcgcttttgttgggagtgcaattgaaatatacgaaatgaatagcaactgattaattgaagccggctacatttttggaaaacaaatcaaagtgatttgcatgaatcacaatttgttatataatacrtttggagggcacaaattacctttttaagcctaagacacatatatacacagtggaacaaacgaaactacaataaactgggctataactacataattcatattgaatactggatrccaaaactgatatgaaacaaatgattttccaataaactactcaggcagagccatatctgttctaaactttcaatagaatattatttataataccaataattcttcccaattgttagccatggaatgaaggaacaatctattttacatattagtttgcgggggggcgtgtatttacaagttggaaact

SEQ ID NO: 4640 - DNA, 585 bp, Bovine  MMBT10701
gttagtaatatgaatgagttaaagaaaaagtgcacgctagattctagaaaaagtacaaggataactgtctcttgccttcctcttatgtttcccgcagtgctgctgctgctgctaagtcacttcagtcgtgtccaactctatggctagacaaataactggtcctcaacaaatactgctttatccattttatattcattcctttcttgatgatacaacacagatgtttaaattcagggcagtgtaaatggcaaagatgaaaattagcagacccatgcatcaccgtcctatttatgcttgggragacctctcatttattcagcaaagtcttgatgacttcacaatagacataatctctaaggaactattggttgagcctgagtctctgctctaaatgcagaatgcaaaaattcaaatgtactataatttatatgcatgctgatgtagaaagctgattgtatcagtcaaaatatcttcatttgttgacaacaaaagggttgatcttaattccttaagtgtatgctctgaggcacagttttaggtagcaaacaaatcaaatacaacaagaagagtaaagtaaaagagaaa

SEQ ID NO: 4641 - DNA, 600 bp, Bovine  MMBT07354
ggaaaaaagcaagaggttgagttgtggcagttctttatctttattttctgggatttggggctgcagtttactagtcaaccattgccaaagtctggttggttattttcatgataatcagattatttctttcagcatgttgaggaaacattccttgtttgagtttattttaacttcctattatttgcacacaacaaagtaaatttttccattttaaatggtatgtcaaaatatattgccgaggaaaaactagaactccctactgtaaagcacagctgtcttaccagtaggtatagaggcacrtgagtctgatggctgagtccttggcttgattcattcgttcactttgctccacattgtttccaggacatcattggggaccccaaggtccccaaggcagaagtggaacaagaagtggaacagctgaagacccaggtggcacgcctccaagctgaaaaggcagatctgctgggcatcgtgtctgaattgcaactcaagctgaactcaagcggctcctccgaagactcctttgttgaaatcaggatggctgtaagtgtattggttttggttttgtcttaagcaagttacaaaacctcacctgga

SEQ ID NO: 4642 - DNA, 598 bp, Bovine  MMBT05723
  misc_feature (1)..(120): n is a, c, g, or t
nnnnnnnnnnnnnnnnnnnnnnnnnnnnnnnnnnnnnnnnnnnnnnnnnnnnnnnnnnnnnnnnnnnnnnnnnnnnnnnnnnnnnnnnnnnnnnnnnnnnnnnnnnnnnnnnnnnnnnnncgggggcgcagtaacaggctttactactgagggaagcttcaggttcaccgcaaaatcgaatggaaattacagaatttccataccatataccccctccccccatgcagaccgcctccccccgccccgcatcaacaccctgcatctgtgtgaggcatttgttaaaaccagtaaagcaacacraaacatcaccgttgaccacagtcagccagagcgaggttcatggtgaggtacaggatcagggttctgaccaagcgtccatcattacagcccccrcaaggtcactgccctgaacttcctctgtgtgtgcctcgtaggccctccttcctttcctgagcccccaacaaccactgatctcttaactgtctcaatggtattgccttttccagagagtcagagctggaatcatatgtgtgtgttacagtcactcagtcctgtccaactctgcgayrccatggactgtagcccaacaggctcctcc

SEQ ID NO: 4643 - DNA, 433 bp, Bovine  MMBT08014
  misc_feature (1)..(2): n is a, c, g, or t
nnaattatttaaggttgcttcctaattaggcctaataacatcaataattaacaattccccaaactcacagcamaagtgctttattcttttcaaagggttttttttttttttttccttattagatactcacatcarttctctgaggtaactgagaaaatgttaccctcatttattgggtgagaaaactgaatattggagatgtctgcagatagtttatcatatgagtacagtcatcacagrttacaatggaattggtgttgtattgtaggctcagtgcctatttcatagtctgtgaaacatcrtaacattttattatagtcaccctgcttctttctgagtccatacagcctataataacttgtgaaatcaagcttacaaatgtaccatgattaaatttaaacaacaacaaaaaaagaaataagaaaacagcaaa

SEQ ID NO: 4644 - DNA, 600 bp, Bovine  MMBT00976
tgcttatagcataagatggcagcttgtgataggtgacctccaaaatgaccctcagtgatcacatcttcaccttgacactcttgtgtaatctattatacctgagtgtggattggaccctgtaactcttttccaatatagaatacaacctaaacaatagcatgtcacttccaagattaggttaaagagatctaacctgcaaactttcactctttgtgagtggcaccagctgctattttatgatttgattcacgaagggtcccacagagaaaggaattgagggaggcctccaaataacaaccmctaagaacatgagaacttctgtccaacagctcatgaggaagagaagcctgtcaaggacaatgcaagtgacagtgattggaaatggatttgacctcaggcaagctttcagatgagattgcagccacagccaaaactccaatggaaaccttgtgagggatcataaggcagagacatctaaataactcggagattcctgacccacaaaaatggaaataataaatgctgattgttaaaagccattaaattgcaggggtggtggggtatgtttgcatacaggtaagtaatatagattttggtacc

SEQ ID NO: 4645 - DNA, 600 bp, Bovine  MMBT12907
cagtcattattattaagcaacatttttgtttctttaaagaaattgaaaactgaagaaatgaatcttagttgtctaataatattctaggacaatagtgatttttgtctctaaataattgaagttatgctactggaaagaatgatccaatatgaagagcaatttgaaattacctctcagaaaacagtacaacatacaatcacaatattgtttatgtgactctccacctgtgtactttaaaggataggcattcattaaatggtaacagttagaagctacatgtataaccttaatttcttacaytttaataggtataatgtaagaaaaagcacccccatacatcaataagaaggaaattctgcaacattatcggtctagcaatctctctcccatgtgatcatttatgtgtgttatgagaggatggttctcaacctttagtttgcaaaagaattcaccaacaggttatttaaaaggtggattctccttctcctatcccagatttctgctaaaattatattggtatagttactaaaatttatatgagtaaggactacttcaggagatttggctcaggtggcccatggattccacttaggaacagaa

SEQ ID NO: 4646 - DNA, 600 bp, Bovine  MMBT12780
taaattggatgtagattatatctaaattcccttctagttcaaaagccctctgatctctgatgcaacaccagcccagggagtaataacttcactttctttctatgatcatcctcataagaggaacaatcctgcctggttctattcatttcatgattgctacttgtatcattttcaaaggtgacacgtttgcttactttcactttaaaaaaaagacgaagaaaatataccatgggaaaaaatctgcaccctttattctataaagacacgttgagtgttctatgtgaacttctttcgtgttgkatccgaacttttgaattgtttgaaggtgacgttatacttacccgagcatcacacagcacatgcccagaaccacgtagtacacagtgtagaaaaggatggcacatatgagaaggttctgccaaacaacctgcagagaacacaggggtgagctccaagagcctgggcttttcacattgttgttgktaaggagtctgacaagcaaaagacaatgaatgactgctagatcacattggctagccttgtttcgcctggagacctatggggtggaaggacttcaaactacacaatagaagtgttgcc

SEQ ID NO: 4647 - DNA, 600 bp, Bovine  MMBT17944
tcttagctgtattctctctcccatttttcctcctgttacatacttctcaggttagaagcctagattaaatacttaaccacgctatttacccccaatctcctatttgaccttcatttccactggtccagctgcaaaaccaaaaaaagtcacaatgaacccaaagtcactatctctaagcagacttgtaaaggccctgaggatgacatacctcaggaaatagaaatatgttatccctcaattttcaggtatttttttcctaaaatgttctcatactatttgtttctgaaaaccaggaattcsaaattagtaatgacaggaaagatattctagccaagggaataaatagatatcctttacagtttatgtgccctatttttagtgttatttacttaactctgacgaccaaggactaaagcataacaggaatataaacgtctcacaagtatcagtgtttattaacacatgtaatcagcccatctattctgatttaaatgtgttatttcaaagcaatttacatacacaaaaaatggagaaaataagtttgtagtgaaaaaaatctaattttcataagttgtttggattgtctacaatgtatttgaa

SEQ ID NO: 4648 - DNA, 600 bp, Bovine  MMBT15679
atacattaaaactgtgctacgtacatatacctatcctccttcaaatcatttcatactctgtcctgcaacacgtgatatgattctaactggaataaggtggtgtttttctttctatgcaaacatatagaaattatacatccaaatgagtagggctgtactctttaataaggtaatcacctctagaagtcatatatgccttccaacaaggctgctatcacacatactttttctggaatttctaggttctccacatttcatgtgcataaggatcacactgggaacatgttaataatgctaatycttagagatgtgtatttaactggtcttttgatgggagtccgggaacctgtattcttaagaagcactccagctaagttttacacaggtgatctgtgagaaaaagcactttagaatagtgatgtaagggtatcaaagtaaggactactgagttaacctctgtttacatatacacataacacactggaagtttaattttttttttcaaatcttcatttctcctaatagaatatatcggtacagatatacataagagcatctatttgcaattaacatacctccatgaaagagattcctaagctc

SEQ ID NO: 4649 - DNA, 600 bp, Bovine  MMBT12571
aggaatattattatcccaatattacaggagaggatactagggtccaatcttaattgttcaagttacatagcttgaaagaggcaaaatctgaattacaagaaaacagtgcctttacacatagtactaaaaatgtttattgactagtgtactatgggatgatggtgaaagaactcaatttagaattagaacaccttaatttagtcttaatacatatgcaacacctaccaattaatgaggaaaaagatgactactccaacagaaaagtgaagcaaaaaaacagaaaatttacataaaattttracaagtgactgaaaaaaacacatataaaatctcactagtattcagatatttgaaaattataccaacatgatatgttagcttttgcctatcaaattgaaaaattgtaatatccagagtaggtaagagtatactatcagccactaggggaaaaaatgttgatttatataacatttctgaggggcagcctaataatatatgtcaaaatcttgcaagtggtttatatcttctctggtagttttaaaacaccgatataaattctttgaccctcccttcattgagaggtagcgaatctacattctc

SEQ ID NO: 4650 - DNA, 598 bp, Bovine  MMBT16411
  misc_feature (1)..(27): n is a, c, g, or t
nnnnnnnnnnnnnnnnnnnnnnnnnnncgggggcgcagtaacaggctttactactgagggaagcttcaggttcaccgcaaaatcgaatggaaattacagaatttccataccatataccccctccccccatgcagaccgcctccccccgccccgcatcaacaccctgcatctgtgtgaggcatttgttaaaaccagtaaagcaacacraaacatcaccgttgaccacagtcagccagagcgaggttcatggtgaggtacaggatcagggttctgaccaagcgtccatcattacagcccccrcaaggtcactgccctgaacttcctctgtgtgtgcctcgtaggccctccttcctttcctgagcccccaacaaccactgatctcttaactgtctcaatggtattgccttttccagagagtcagagctggaatcatatgtgtgtgttacagtcactcagtcctgtccaactctgcgayrccatggactgtagcccaacaggctcctccgtccttggggattctccaggcaagaatactggagtgggttgccatgcccttctccaggggatcttcccgacccaggcatcgaacccggggctc

SEQ ID NO: 4651 - DNA, 600 bp, Bovine  MMBT21186
tcccatcactacactgtcttaccctactttctttttcttcagagcgctggcatatattcatatatttcttttgtgtgtgtgtctcctcactatgacattckgttccctccaaacgttccaatatctagaataaagcctagtacagagtagccactcaataaaaacctactggatggatgaaagcctgattccaggggtagaagtataacacaatcgagttgcacatttaaactgaaaacatgatgtaaacgtcacaaatgaaagtacgtaaagtactcgtgtccagggaacaagagtagyagtagagcatagtctcaatgaatagagtcttaactactcagcatacctttggcttccttcattgtctgagagacaattcttcggagggtctgatcagcttgatgaagaatgttagttgaaccgataagtctgtctgtttcctagataataagacattgttattgggacagttacctagttgtacaaaagaaatgagcaaagtgtaggtgatacataggtgaagacactgaaagaaaagtaaaagtggcttttctcttccaggtatccttctctactgaaagtgttattygctcagtygtg

SEQ ID NO: 4652 - DNA, 600 bp, Bovine  MMBT21289
tattggaatgacctgacaaagtgaatattatttcttgtgactataatttattctatttgaccagaggtcaaattgcttcatctcctccacctgaaattgccatataggcctgtttagtgttgtttaactatcaggttttaccccatggtgacttttgtcatgagtgtgtacgccactattgttaacattttgaagtaatatatggtattactgttaaggtcattctagtttttgtgagggaaactgaccagcagcatcttcttatttagactttctgaatttaatttgtaccctcttatragtagtaggttactttayatccttacatttagttaagttcctgagatatagactcatttaatatcagtaagccttttagcttctgtactgaaataaaaaattcaagcagtaatttaaatttgaacaaactaaatctaaaatattttccattattttagtttaggagaaatctccataagaaataataacttctttctgaaccagaggctaataaartattttaactttctgctgccctggaccttattgaatgtcccacacagtcccacttccatcattatgggtattttaaatgaaaaa

SEQ ID NO: 4653 - DNA, 598 bp, Bovine  MMBT21194
  misc_feature (1)..(19): n is a, c, g, or t
nnnnnnnnnnnnnnnnnnnttaaattgtgacatcatcatccttttaacaaaaatggcatatttacattccctattcatctggaaattcattgcacacctggaaaatagggagacaaccagaaacatttaggactctttagctttggttgcagattcatggcttcattcatcaaatgcccttgcttaggggttgggggtcccaggcctgccctcagrgagttcacagtttaggggggatatagaagtatttagggcagccctggaactaggactgtattgattggttgactgattagttcrttcaatgaatatttattgaggatctattatgtgcatgaaattgatacttaaattattcatattttgcactcacgtattggttttaaaattggaaagtgccttgagatgtattctataaaaacccaacagatgtgatttgtacatttctaggacaaagatcatctacaaaccgaaaattagattacgattttgagcatgccccatgatgtcctgttttgagtgagagctagacctgtgcacactgtatctctatcctggctacacsatcatctgggggaggtgtcaagaaggatctatg

SEQ ID NO: 4654 - DNA, 600 bp, Bovine  MMBT19818
atttactgtgtaaaggttatttattggacatccttgcttcttccatagaatttagtatgataaagttaatttagtaagtactcatatttgcttcatattttttactgttcttagtgagaacttttatataatttctcactttacatactcatatatctcaatattaaataagagaatcaaactaaattaagtgatatttaaccaactagatattttctaatttatcatttatatcattacttatattgtttaataattcaaatctgtctagctgtctctagttaacctatatatgaaacrggtctatagtaaattattccttttgtkagactacctaatacaaattaagcttgttttatattaaatatgtattacacataaattgatataactgcttttacaaatctttaatttagatttttctgtagggaaagcgtgccytcctcacatactgactatttaaaatgaatgaaagcatcccttggaagtctcackaagcaccgaaaactaattagcacatctagcggttaagcttttgtttattcctttattctcagaactgactgcttgagtaataaggtcttcacttggatctagcat

SEQ ID NO: 4655 - DNA, 510 bp, Bovine  MMBT20339
tcgtttaatcctgtaatgaccctgtatcacggacggcattgtctccattttgcaggtacagaggctgagacgtagagaaatacaaacttgtgcaaagtcacagagcttgaaggtggtgtgtggattggtacccagggattctgacactggtcrgcattagggaagggcaggaggtggtcctaggaggactcccctctctccctcagtgtccttagtccattcctgacgtcccgctgtgccccttcgcccggggttcgctccaccacccaggtgagctccgccccttcagactctaaggtytgccacctgaggcacccaccgcccttggtcccagcttgtcctccggcaaccccctcccccgcccctgagaggccgggcccccgaggctgtgctctcacctgaggactgcggccgagacgagccactttgcactccaggtggctgttcaccagcacgctgtgggcagagagtgcgcggtgcacgaagccgaagctggataggtactgcata

SEQ ID NO: 4656 - DNA, 600 bp, Bovine  MMBT01190
ctactgatggcccctcgtgtcaacaacctccagttaaggcatatctgacaagttccttgttttctcctgtaacgatttcccacttctgcaggcttttgtcgttcagttgctcagttgtgtccaactcttagagtctctgcagaaatgtgtcgtggtggctgactctctttctataacaagctctgaataaatagctttgcttgatctcttttggttggtcttcatttactccacactgcaaaattaaatgaaagagttaggacagatgattctgaattctagaaactggatgtgctaaakctatctcagaagatccgatctagctgctgctgccttcatgactggaaggggtttgtatggttcctgtgtcaccagctttggattcagaatttgaggtgagcatatcaattggaaatacccaggtgatgtcagtgaaactggacaaggcttccctctgatggaggggtgggctcagaaggcagaggatctcctaaagctacgaatgagatccagctgcagggtggctcaaagaataaaaaagtctgctgaacctttcatttctaccatgccctaggattgccccaacttcttattttcaag

SEQ ID NO: 4657 - DNA, 600 bp, Bovine  MMBT22119
gacctttcatgtgagtaaatacattctggagtctattattagagtaggtttttttgacttttttctttaatgcttcctctcaccaaccaccacccccccatcacaactgtaatgtatacttattgtagagaattcagaacatacagggaaggaaggatgaaaattgcccattgctctgctcatttgaccaccccccacccatagacttgtgtccttctctgtcttttacccacccctacaagggtagaaaattggaagtcgctgggtcccccaagtagggccagcaccatggactcaggrtttcctagtgagtaatggtccatcctccacttacaatagggtctgtgtcccaaggtgagagaagcagtcacctgccctaggtcaggtcagtgacctgattgggaagggaaagctatctcctggtggctgaagatgtgtttctatcatacctctctttatgctgaagtctgatccttcatggatcctggccctgatccaggcatgatgacaaagcatccagcaaaggggagaggcccctctttctcttcagggaaacggggaggtagccacagacaatggctggacctttgaccacctttc

SEQ ID NO: 4658 - DNA, 600 bp, Bovine  MMBT06978; identical to SEQ ID NO: 4506

SEQ ID NO: 4659 - DNA, 600 bp, Bovine  MMBT01037
ctttccaaaaaccattcatgtgtactctgtgcaatgatctagtggcacagagtgctgttaatatttctgccagcaagggcagtggagccactagtaaaggagacttgaaagttattgtactatgtccagtgaacaaaaattttccttctactagcctaaatgttgacagagtgaagggtcagtatgtaccagaagggaacatgatgagattttgaaaacattataagttccagtcctgtatataactccttctgtcttatggattaagcatactgagaattattttttacacctattcaytagatttttgcctacataaattacaaactttgaacattctttatgttgaccttccctttatagtttgacttttgatgacatggctttccttctcttttgcctccatgagttaacccatctattaaaaggcttttaactaagaaatgagagttaaaggaaatgagaacaatttcccctccttttcagaaaattaccacggaaaattaccacaacttattctaccccatcagaaagaggaggagggaatgcaaattggaaggaaaatttaggagaagctatctatgagtactcacattactt

SEQ ID NO: 4660 - DNA, 600 bp, Bovine  MMBT04404
gtctgtcttaggaggaaacagatggcatgttctaactaggatgatttgaggaggttttagtagagagaccctatgtaaagtcatgtcaagggaaggcccaaagcatcacacagtaccccagggaaagctttctcacctttaggcccaaggaaccgaacctgggagaagagagccaagcaacttgaaaggggccgggagctttggttgtggtcagtttttggagacactgtaggtagaaactgggagaataaatactctggtctccttctcctccattcctttgatcttgtattggtgctyagcactggctggaaggcaaggtcacccgctggtgcctcccagggcatggggtaggctggagcgtggtggagagtggatctgcaggggcacgtggaagatatccagtgtaggtctaaccatatgttttccagtgtgtttgtgtatgtatatttatgaatccagtgggttttcattgttgtctttttttttttaatatccttgggatcatatcacatgcctcattcagcaacttgtggttttcactcatcagtgtgctggtgttctttccatggcagtacttcaagatctacctcattctgc

SEQ ID NO: 4661 - DNA, 598 bp, Bovine  MMBT05780
  misc_feature (1)..(91): n is a, c, g, or t
nnnnnnnnnnnnnnnnnnnnnnnnnnnnnnnnnnnnnnnnnnnnnnnnnnnnnnnnnnnnnnnnnnnnnnnnnnnnnnnnnnnnnnnnnnncatcaccgactcgatggacaagagtttgggtgaactctgggagttggtgatggacagggaggcctagtgtgctgcaattcatggggtcacaaagagttggacacaactgagcaactgaactgaactgactgaatgataaccctaactacaatattacaaattattatttctcactttaaaaggtgcccaaagggtgaatgttccctgcyttaggtagagtctaggtcagctaatgaggagatcatgatgggcagaacagagaggccacaggaaattgcactcctggctcttgagtcagctcatgtttaccttccagacttcgcctttctcaggtaggcaaaggatataaaggacwcttgttgctaacatcagggaagaaattgcactctcctatatatactactcatataggagagagatatcaacaacctcagatatgcagatgataccactttaatggcagaaagtgaagaggaactaaagagccttttgaagatgaaagaggag

SEQ ID NO: 4662 - DNA, 600 bp, Bovine  MMBT09020
aatactttaaaaagttacaaatatttaaaagttaaataaaatatatttttcctgtaaccttgataaatacacctccataacaacttataaggtcaggatcaaattttatatcttggaactccttggagttctgtactggaacatggcatggggggagcaccagcccctgccccagtctctggtttttagccaactctccttctcttcccatccctggctccacattgtaccttaagagcccccttacacatggacaccccagcctatatgtgtaaggcctaggtatattcccatgaatgracccagagaagcagaatagggcctggaagcaagatcagagctggttggcagataattctggggttccaggtctaaagggcatggtgggaggggcacatggtttccaggtagacatattcccttggtccctcaaactccacaccctgtgggcaggaatgcagccaaaggaaggccagagagtggtcatctaaaacaaaaggctcccagcctgataatatatattagtctcttcttgttcctggggccttataacccataagtaaatcatcagttcaagatcatctaggtttagcagctttg

SEQ ID NO: 4663 - DNA, 600 bp, Bovine  MMBT10400
ctaagaacaatttgtttttcatttcccatgaactgtttgatgctatcctttaattcattttttwattttattttattttttagctgcaccatgtagcttatgggatcttagttcccccatcagggattgaacccaggccctctgcagtgaacctcagagttttaaccactgactgccagggaattctcctatccattcttrttttgggttagtaatcattttgttattcacagaaactcttctttccccagttttattcagatgtagctgacctacagcgctgtgtgagtttagggtatrcaacataatgatgtgcctcacatacatgtcatgcactgatgaccacaagagatgaatgagcatccgtcatttcatattgatacatttaagaaataggaaaaaattttttttcatgtgataagaatccttaggatgtagtcttttaacaacttttatttgtaacaggcaacagtgttgatcatctttatcatgttgtatattacatctctagtacttattttggagaaggcaatggcaccccactccagtactcttgcctggaaaatcccatggacagaggagcctggtaggctgcagtcc

SEQ ID NO: 4664 - DNA, 600 bp, Bovine  MMBT00719
taaactactttattctggggaataggtatttgatgattaagttagatatggactggatatttattgagataatctggtgtgtttgattagatctaaatcttcatgtatgtataactcagtataaccttaaaggcaacttttcagccaatgcctgatttctattttttgattccatttgctgaaatctaaattagaattctttccatttaaatgcagattcagactttccacctgaggggcaaaagaagccatttcttttgactgaaaacatatataggagatatatatatatatagtttmattcacatgaatgaagtttcatttacatgaatattccttcccaacacaggaaggtattttttcttctgatttctagaatgcttattgcaataattttataacctccttatatttgcttcattgttttgtgctaaaagttcatgtgctaaataaataagctaaataaaaattaaaatttcagtggacattggaaaggtgtgtggaatttttaaatggaagtggtgaattaaatggcactgagtaaccaaaccaaaattgaaatagaggatgctgaaaagctaggcacattcatatgctgac

SEQ ID NO: 4665 - DNA, 600 bp, Bovine  MMBT20352
ctgaacaaaacctgcccgtgacccagcagtcctcgcgggggcagcagtgtggcccacaggccgggcttccgcctctgggggcaggtctgctgggagaggggcaggtcctgttctgctccagggcgctgcctctgctccatgaggacccacccacaacctcggcgccaggaccacctcggcgcgcacccaccgcagccaccgagaagggagcggcaggacagcttttggcacctctccttccccgacggctgggcttcagaaggaaacatggactcacwggggccaccaaggacgagaccrtgcaaatcacctgctcggatcccacactcaccaatcagctttctgatcggtggtctgctgtcctgggcacttggtactggcagctgctgctaggtcacttcagtcgtgtccgactctgtgtgaccccacagagaggagtctgtacatacacactgccttttaaactcatgaactggcattctgaggtagatacatatataaggtcctttttctcatcaagttctttattcttcctagaaatttttaacagctttatagggatgtaacttgcatatcttaaagtttcctgtttaaagtata

SEQ ID NO: 4666 - DNA, 600 bp, Bovine  MMBT20774
tgagaggtgcagacaccagggcgtgcaaactgtggcctgtcataaagcccctttgaatgggaacatggaggagctagagcacctccacctgaggctctcaccccacatttacagatgcttccaggagacttcttccccgaggccctcttcctctctggggagttaccgakccccacccttcaggaaggtgaccaagatgaacaattcccagaaatcaggacagagtgcagggcagccctccctgtgacctaggccttagctgacsttctggagtaacagggyccagagggccaggrtgarttcacagctaagcccaggtgccagagaagtgaatctaagcccaggcctcattctgcttctgtagcttctgtctgtgtttatttgaagttctgcttttggtggtgatggtagtagttttgcatctgcaaatgtaccaaaaacaatgtctttaaacactagaattatactcagtacaatagaaacaccatgaggtgcatcagggaacggagatcaaccaagggagggaggggatccatattacccatttcacacattctccaggacatgtcctttctaagtggagtggcaggtgaaatcacc

SEQ ID NO: 4667 - DNA, 600 bp, Bovine  MMBT09861
ccatggattttcagttcttctggttaagcttgaatttaagtctgaactatatgtcgactggatgactgaatagatgctgggaagagtctgaggagagacggactgggcatctttgtcccctttaaaaaggcagccctgggattttcctgatggtccagtggctaagactccacgccgggtactgcaggggacgtgggttcaatccctggtctgggaactaagatcccgaaagcctcacagcctggccaataaataaataaataaaaataaaccaataaaatagaaaggcagcctcgggayttgcctggtggtccagtggttaggactttgcatttccactacaggagtcatgagtttgatccctggtcagggaactaagtggagaagcaaatggcaacccactccagtgttcttgcctggagactcccagggacggtggagcctggtgggctgccatctatggggtcgcacagagttggacacgacaagcgacttagcagcagcagcagggaactaagatcctacatgtcactcggcgtggccaataaataaataaaaattaaaaaaaataatgcaatgaaatataaaggcagcccatgg

SEQ ID NO: 4668 - DNA, 598 bp, Bovine  MMBT08916
  misc_feature (1)..(186): n is a, c, g, or t
nnnnnnnnnnnnnnnnnnnnnnnnnnnnnnnnnnnnnnnnnnnnnnnnnnnnnnnnnnnnnnnnnnnnnnnnnnnnnnnnnnnnnnnnnnnnnnnnnnnnnnnnnnnnnnnnnnnnnnnnnnnnnnnnnnnnnnnnnnnnnnnnnnnnnnnnnnnnnnnnnnnnnnnnnnnnnnnnnnnnnnnnnnttgcttttagaaactaaaatagtataatcgctttctacccctgggtgtttgcataagataaatgaacacatatgtccacacaaggtctcacacttgaatgcttacagcaaattygggcattacataacacaaacataacacaaaactggaagcgaatagattaacaatgcggtaccgcctagccttaaagaaacaagcaaatgtgacatgaaacgaatcttaagccagtaacatcagatgaatgatgcctctccaagaagcctctaaaatactaaatgttgttttatttcatttttgtaaaattctataaattataaactaacccactgtgacagagagcctagtagccacttgggatggagaagtgtatgtttcccacaatggaaatagcacagggaaatcaccttgagca

SEQ ID NO: 4669 - DNA, 600 bp, Bovine  MMBT05489
cagcctccgtgctctgggagcaaagagggaggatttgctggaaaccttgaaagtggtgtaggagagcaggggaagggcaccctgctgaaggaacagttcgagcaaagacacgaggtatgaagtgcagggctcattctctgaagggcaaacagcgcagtgaggttaactccaagcaagtcccaagggagacagagagcgatgagggtggaaaaagaaggttaagggttgggccagaccatgagggccttgaatgccagaatgaggagtgagatggcctggggaaggaaggaaggatgtgarctctggggacttctacctggggccaattgagggggtgtcctgacccacaccaagagaggacgtgccctgagttcacccttcaaacaagcagtgtcttaccctcaaagctttcccggcttgacgcttccagctctgccatccttccctcccccagccagtcctataagtgagtccagatggtcattcctattttaggtcggggtgtgtgttggggggaggggtaacctatgagctctatcaatcctctcctgagctgtctgttagaggagcttcttccaggacactgctgtgatcctctga

SEQ ID NO: 4670 - DNA, 600 bp, Bovine  MMBT13698
ccatgggattctccaggcaagtcctggagtgggttgccatgaacagcacagagctacagagaagtgtacagcagactggatacagtcaccgcaggaaggcaagcaatctgtcatcagtgaaaagcctaatgacatcccattttagaaaacatttgcccagctggccacttcggagatccagaggtcactcctgccctcagtgtttccagtgtctggctgggcatgagacactagtcattactttccaggaaaccccacgtacagcgtgatgcccagaggccaggaccacagaactggcascatcaccgcagcgcaggttgcaggtggctgcctgamacctctgtactacccgaaatcctaacctacctgaatccaaaatgcagaagcccatctcaaatctaattcctggctaaaaaaactgtggagccagaaaaagaaaattgagcaattagacttcagtagggaatctggacttagtgatagatcatttcattcatcatcctgggcaagtaaactgctttccgaagctaccaacgggctttcggccaaacccccacttattgcagtctccgcaagaggcagaccggggcatgatgtcag

SEQ ID NO: 4671 - DNA, 600 bp, Bovine  MMBT11974; identical to SEQ ID NO: 4507

SEQ ID NO: 4672 - DNA, 600 bp, Bovine  MMBT21760
tgccaaggaaagaagatgcactgagtttttaaaatgagatgcaggacacatctgtcaaacccacagtccccaaaatgatgactttctcgctgaaatagcaaatcaacatttaaagaacctttcctagttcctagtccctttcataggacaagatgatttcttttctccacggatacaaacagattttaaaatcggcttgttcaataaaatcacccagatgcactcctgagtgtatgtaggcccaggccctgcaaaccctggagaggaatgacagataatgtactaataatgtgatgtatygggcgggggggcgattcataaaatatttatcctaaagcagaaaatgtgtctgtctgccttgttcatttatcaaataatagtttaggggaattaggtaccagctgaatcccttagtcagtgtggttggtctcacccagagtccattagaccaggttatgtatctgctgaggacgaggcatcctgtcagcagtggtgcataatggatcatgaaagataaatgggattaggcaattgaataattagaggagcgcccaccagcacggttctaagtaaagggccgcagggatttccattagaaac

SEQ ID NO: 4673 - DNA, 598 bp, Bovine  MMBT23513
  misc_feature (1)..(179): n is a, c, g, or t
nnnnnnnnnnnnnnnnnnnnnnnnnnnnnnnnnnnnnnnnnnnnnnnnnnnnnnnnnnnnnnnnnnnnnnnnnnnnnnnnnnnnnnnnnnnnnnnnnnnnnnnnnnnnnnnnnnnnnnnnnnnnnnnnnnnnnnnnnnnnnnnnnnnnnnnnnnnnnnnnnnnnnnnnnnnnnnnnnnnccgtcaatcaaagtccacatgtgaatgtcgatggcagagatgcttaggtgctagtgccagagtgaaaacagaaggttaatcaggtaaaagggtgactctccaggggtagaagaagcatgayttttcccactcataatcccattaggaaaacctgcctgtcgtccttgactagagctcgatgatgatttaaaactaagactttagaataaattcatcaggagggaaattggatttagtttgatacacacatttgttgttacagtttaattagaaaataatgtactccacatgaggatgaaagaccataattcgaaagatgagctactaggaattctgaatataatcttttctcaaggtttttccctaactgctctatttatgagtccaaagcactcaagaacctgagaaattagtaaaaa

SEQ ID NO: 4674 - DNA, 600 bp, Bovine  MMBT07528
aagactcgactcagccaaaaataaatattttaaaatatcccaggatttaaagaattatttaaaagaaaaaaaaaaaaagaactaccttggctctttaatgtatcctgctgtctactctctaaacctttatacttattgctttttctgcctggaacattcctgaggcctgcttacctccctgccctgcttttgattggctgggtcgtgctcccaagtcaggtctcagcttggccatcacttcctctgggattcatgtgtgctccagctacccagagccccctatacatatgtcaggtggcygactgtatattatattgttagcttgttaactgtttgcttattagttatactggaggctctgtgaagctggtcttgcttatctcattcaaaatggtatgccttgcacccaaaatagtatgaacagcacctgccatggaggacagctactttgtgcacaaactttcttgaatgagtggaagaatgaattcatgaacatttctgtaggagacatatattagttacccttctagaattaatattaagataggtatcctagcataaaactgtaaaaatttgataaacacttaaaaaaatcaccac

SEQ ID NO: 4675 - DNA, 600 bp, Bovine  MMBT03387
cagtattcttacagaggacagaggagcctagagggctagagtccatgaggttgcaaaagagtcgaacatgacttagcaactaaacaacaacaaaatctcttcagaggagcaaacttgtagatacctaccactgtttctttgggacatctggagaagaaatctctaggacaagaagggatggaaagcttgatttaaattttaagagagtaggactcagctgggtcctgtgaggggagaaaacaaagtttgtaaaacagaatttcttggaaaaggtaaagattgtgttttttaaaaactatrgttgatttacaatattaattttaagagtgcagaaaagtgattgattcagttatacgtacatattcttttccagattcttctctgtataggtcattataaggaattgaatatagttccttgtgctatacagtaagttcttgttgtttatccattttgtatagagtagtgtgtatttgttaatcctacattcctaatttactcctccccccttcccctttggaagttacaaatttgttttctttgtccataggtctgttttataaataacttcgcttgtattattttttagattccatatgt

SEQ ID NO: 4676 - DNA, 600 bp, Bovine  MMBT04845
tgaaaaccatccattacagaaagtggtctgatgtcttcatgagggacttgaaaatacatgaagggactcttgcccagtgaaccacagtgctgaggtgcaaaaagtcagaaacacagacggcttagtcaggcttccttagtctaaaaaaaaaaaaaaaatttttcctggaaaaaaaaccagtgcaacatgttgtgcctggaggagagaacaaaagttgttatttttccttaatgacagcactggattctgaaattgagcacagcaggtaggaagagcatgtgtaaatttcaaaagatatcyaaatgttacacaggcacctcccatacggatgagcaacacaaaacgtattagcaattttctttatttttcccaaaacaaaacgttctgagaaaaagaaccccctctttttgcctctctctgccttgatttactgtcagaaaggagagatttggctctgatgaagttaggggctgggaaaggccaacctgcctgtctggtaacttctcaccttcaattaattcccagcctccggggatgcatctcctgatcctctctttgtttctataattgtcacttttgtttgttaaacatatccctgtg

SEQ ID NO: 4677 - DNA, 600 bp, Bovine  MMBT23006
accccatgaatcgcagcacrccaggcctccctgtccatcaccaactcccggagttcactcaaactcatgtccatcgagttggttatgccatccagccatctcatcctctgtcgtccccttctcctcctgyccccaatccctccacttacctggcagattggagcattctgtgtcttggtgtaatgaagcatcatgttggcatagcaaaaaggaaaccgccctcctgacaggaattcggtctcagcggaagcccatggtccggtgcggggcgtcgcctgggagtggacgtgtgtgtctgtrtgggtgtgcagccttgtttctgatgggaagtcaagaccaaactgcccattwyatcgcttaattccacctgatggtttcctgaaacgactgttggagagcaaatccttccctgtttgcaggatcttttattttttaacttgtggtttttctccccccaacttttgctttggaaacatggaaatgatttgtgcagaattattttgatgaagagtaaagaactgaaagggtggagtaaatcagtcaccagatcattactgcagccaaaacccactggagccaaaagctgctggctcatccgga

SEQ ID NO: 4678 - DNA, 548 bp, Bovine  MMBT01611; identical to SEQ ID NO: 4501

SEQ ID NO: 4679 - DNA, 600 bp, Bovine  MMBT13670
gccgtgctgctggctctggccagggcactctggacctctttggagagcctctatgggtgggagtggggacaaagtggaggagacctcaaaacagacaggcacaccctctgcccgagccccaggtctctctggggttttctgtctttagttggtgtcagatctatgcagggagttccagggacaaggggatgagacctagctccccttcctcccccatctccttctagcatgatttgctgagctcagacaacagactccagctgggatttggggggtgagctcctgagcctctatctcctsagggatgggccactgatcgtgaagttatctctagtattcagaggaagttatgcatgaccatacataatcttctcaaaaaacgagtctcgatacctgatcctgagctggcataagagcagggatgctctggatgggttgttcaggttgtatactgcacaagaaacactacctattaaggagtcaccatttacatccagcaacatacattatgtgagagactgaaaactagcacagagattccagaactcttagctgagttctagatggtggtgggaagtcacaggctatgaaatctgccca

SEQ ID NO: 4680 - DNA, 598 bp, Bovine  MMBT08185
  misc_feature (1)..(20): n is a, c, g, or t
nnnnnnnnnnnnnnnnnnnncttagaattcgtcttcgcttcctcttctggattctcagttgggatgaagtcagaggatggagactgaccacgcccttcctccttgacccctgtaaaatttcttggaggctccccagaggcagccagttcctgctggtggaggagcatctgactagaggccctgggaagcccccaggcctgttcaggatgcgccttttcttcactctccaagacttttgccgttatcccctggcttgagtgacaccaggcgctggttcctgcctttcacaccccagcaagyggctatttcccagaggtcttagaagtgattccatcctctttgtggctgtttcgtatttcagttatcttcaggaaggagcatatgtctgggatctttgcctggctgtgaaatttcatttccatttctttacacctgcagttgcagcgtgagtggaagacagagccctgctgatgtcccagacccaggttatcaagatgctttagctgttgtttcccagaaggggctgggkccctagagcagatttcatcagctagggctttgtgggggccatctttttttttttttytctctctctctc

SEQ ID NO: 4681 - DNA, 600 bp, Bovine  MMBT17611; identical to SEQ ID NO: 4503

SEQ ID NO: 4682 - DNA, 598 bp, Bovine  MMBT00898
  misc_feature (1)..(90): n is a, c, g, or t
nnnnnnnnnnnnnnnnnnnnnnnnnnnnnnnnnnnnnnnnnnnnnnnnnnnnnnnnnnnnnnnnnnnnnnnnnnnnnnnnnnnnnnnnnnccatgttacaacataaaataagacggaggctcaaaaccagagtgggcgttaatcagggggtgagagggaaaccgaacacacgcataggcacagagatgtgaaagggcttaatcttttccgggagcagagtggccacactgttctataagagccggaagtaggacaccagctggatgaaaaggaaaggagggcccagagcatctggagagytacatactgggttgtgtactttagcctatagagtaatggtttccaaaactatatccctcaaaaccctattgcctgggatgttcaaatatcayctccttggagagccacgcctgcagacagtatgagttgctctgccttgggtcacttccagtcctttcgccctgccgccaccgttgctattgtgttaaattcctgtctctgcaggcacaaaagctggaagaagatggttctcagagtcagggcactarcctttgaatcatgagtatgctatttagtgtttttgagcctcatctctttt

SEQ ID NO: 4683 - DNA, 600 bp, Bovine  MMBT08830
cggcccccaccccctgcgcccccctccacaaagcagaagggggtctggagtttgcaacttgtcacacggagaagagaaacctttgcgaggaggctgctaatgaattcggattgtatagttttcaaaatctgatgttttgcgatgatgacattagtgtggcaacggagggtctggggcgacaagtctgtgcagctgctcccgctttgagacgctccagacaaaggggccagtgttcccggagctgcggctccgcgccgcatttgcatagtctgttctgcctgattgaccagcggggctgcmgcggggaccagctttgttccccgatcactgggagatgcccggatgacaaggctcaggtgagaggctaagtgggccgggccgcccgccgcacaaagagcagcctgggaaacccggcggggccgccgccgaccccagagtggatttacttgtttgcttttaaagacctcatcaagtcgctggaggggaaagggaaggcttaaggatttcaacaggaatttacaatgccttatttggggggcaatttgggatccttctttatccaacaatccaatgattttatggcacttggtttccctgtat

SEQ ID NO: 4684 - DNA, 506 bp, Bovine  MMBT07100
tatttttgtcttgaaaacagcttcttaatttaataaatctgttatcctaaaaaaaaaaaaagaatttgaaagggaaactaattgctcgctatctctttggggaatctcatgacagtgcaatttgagcacagataaatgctaacagggtacactgtaccactatataggcacatttaacagtaatctacactaatgctaagctttctacgcaaaaacctttccttgaatttttaaccccaaagatccatgctttaggtaaataattctacagattacctgctacaaaaatgtagggaaaamtattttaatggattgttttcatgacgaactggcatttatatctatataggaaaagcttcactaacttagatcttacttattcagaatttgtagttgtttagacattgtccaggctttctgcttttgcaatatctattaaaatagggaacaagttataaaaattaacagtgtaagcaacttttgcaatggagaagcttgatgcagca

SEQ ID NO: 4685 - DNA, 600 bp, Bovine  MMBT03939
aattgattcttaaaactgttttttcattctgaagtccagcatttccctagcaggaagtaataggacatcattttcaaacatgtgacttcctttattacacacttgagatttcagactttaaatggaattatatgcttgcttctggtgaatcatgttcctgcatttaacgggctgctagcatttgaaatcagaaaggaattttcccttagaacactttcaaaaagacatggatagtttcccgccccctgctcttgggaacagggagtggagattaacattagtgaggaatagaataaaatyaatgtgaaaggatggacgttttgatttgtcctttcatctccagctttgtatttcaccctaagacttggcatatggaatatcatttcatcttgaagctcctcagtggttgaatgacttttgactgagttataccctcctcagtacaggaaaattgattgygtcctgggctcatagaaactggtagttatgccaggagacttgtaatgcttgctgggctgtgtaaaaactgtgaaatgtggcaacaggaaagacagtaaaaggaactggacatttctttatggcttgcaacttctatcctag

SEQ ID NO: 4686 - DNA, 598 bp, Bovine  MMBT11002
  misc_feature (1)..(210): n is a, c, g, or t
nnnnnnnnnnnnnnnnnnnnnnnnnnnnnnnnnnnnnnnnnnnnnnnnnnnnnnnnnnnnnnnnnnnnnnnnnnnnnnnnnnnnnnnnnnnnnnnnnnnnnnnnnnnnnnnnnnnnnnnnnnnnnnnnnnnnnnnnnnnnnnnnnnnnnnnnnnnnnnnnnnnnnnnnnnnnnnnnnnnnnnnnnnnnnnnnnnnnnnnnnnnnnnnnnntgggtctcccgtgttagcaggcagattctttacccctgagccaccaggaagcccagatcatcatcattatcgggcagtagtagtggcaayttccgccctccccccagcgtttgggtgcaggtcacaggaagtgctcagtaggtgtttgttgattgactgaaggatgttagtaactgcctccttctgtctcccctaagccatgcatgggacattygtgattctgctgccgctcagcctgatccttatggttttcgggggcatgacgggctttctgagcttcctcctgcgagcctcctgcctccttctgctcacggggaccctcttcctctttggaggtaggtgcccgcctggcatggagccccaggtrccgagagggtctgtgcayggt

SEQ ID NO: 4687 - DNA, 600 bp, Bovine  MMBT11126
ctctgcttgaaggtaacatttggaaccaaagttaccatatataatctattagtggcccatctaagattttactgcagagacataagcacagggaaatcctgatgagtatatgccaggtacgcttatgtaagggtgcttccagtgtatggtactaactacaaaattatgctcttctactctatctcagaggctccaaagattcgcatcccaaggcacctgaagcaaacctatatccgcagagttggagaagccatcaatctggttattcctttccaggtaataattcagggttgttcactktctctttacaatgctggggtgtttaagaagtaaaaggagatacttcagcatttacgttattcatgattcaagattttctcagagaaaaagtaggaaatgatggaccagatttggagaatgactaaacaatttcctgctttagaagtactgaaatctataaaactgtcatagattttccaaatgagacctcaacttgtctgaagctcaatgactgtagtgggccagagagcaaataccaaggacacaccaaaacaagaaatgcttgtttaagatcttaaagatctttttgggtctattcat

SEQ ID NO: 4688 - DNA, 600 bp, Bovine  MMBT14312
gacgcaaaggcagggagttacaggcctgtgcaggcacacagggcaggcccccaccagctcccttggccctgctggccccaccctgcccaggaccgcaccgcagggtcttggccgccatagactggacgatggcgttgctctccatgagcaggtccagggccttggaggcacagccgacagcagcagggggcaggctgttggagaagaggtagggccgggcacgctgccgtagcagggataccagggccccaggcccagtcgtgtagccccctgagaacaagggtgagaacaaggagccasagcttaccccatggtcctcctgagaggaccgtccatgctgtcttcttccctgcagccccaggcctccccttcctacctcccccaagtcccctccagggccgtgcatgcagataaagggagcccaggggcccaagcctgcaggcacctgatgctccrcccagggccttccccagtgtggagttgatgatggtgacttggtccatcacgcccagcagctcatctgtgcccctgcaagggaagctgccactaccaccacggccacctgagcacctaggctcatgggttgggcgtaggggctgg

SEQ ID NO: 4689 - DNA, 452 bp, Bovine  MMBT22366
aaccttagtcttgactgccccctcactcccttctctcaggcctggacagccgtcctgcttctgaactaggtgtgatgataagatgacgagccccatcacagccscctgcctggttgggggcactgagggctgactggccaccttctgcagggatgggccacgcccagggcaccgctgccccgtagaactctgcacccgcagaacagttctgtgtctgtgccatccagcagtagccaccggccacatgtggcagttgagggcttgaagtgtggcccatgggaccgaagaactgagttttcrgttttatttcattgtcacgtgtttaaacgtgagtgtgaatggccgtgcgaggctagtggctaccatmcctgatggcactggtctggagacttgacccatacttctgacagcctccccacgtactgggagtctccgccaagctcctctttggg

SEQ ID NO: 4690 - DNA, 600 bp, Bovine  MMBT05718
caggccgtgtgggttcgatccttggttggggaactaagattctgcatgccatacatcagggtcaaaaaacaaagcattaagaaagaaaggttcagcttgagtaagaggaaaaacaatggcaccacagagacagaaatctccaggtgatgtttccacttctctcctctgagcatgtctaggcctcctctcctaggctcctcctctgatactgaggtttctctgaccttcaggatgcccccacaaggccggggaagagttcatgatccaaacccctcaccctgccctggaaggtcccacacyaccactggactgctctctgcccacttcacggctactgaacagctgagaaycggccagagggaaacctacccrggaggaaagcaccttcacaattcatccagagaatcccaggaatccaggcagggcttttaggagctcgtcaattctctttttctagctggtagctaaagggtgtagacagagaagctaagggcatgcctttccatttcaaatcatttctttttaaaattatttatttatttttggctgtgctggggcttcattgcgtcacccgcgctttctctagctgaggccagcgga

SEQ ID NO: 4691 - DNA, 600 bp, Bovine  MMBT13552
tacaacaaatgaaagccactaaaagtagacacacagagagctgatcatataaaccaggaatccatcagagaatgcaggaaagcacagctgggacaggagggaccagcccagctcctcactctccaaggtgcaaggcatcctctcccgttgcccagccctgtttctgtgcccagcagcaaccaacggctgccccactgggcccctctcctccacaacgcccaacaccagcccacccaactccaagtccaagggccccagccaggggaggtggccaactcagtttaggtcatctgcacaccyttgaatcgatcagctgtggctggcgggctaggagaggcagggcattgatgtgtcagtacattaaagaaagggacttacctacaaatgttatttactgtttcttcaaaggatatgtcaggaaaacagcctgcactagtcagggcagactaaccgctatttacaaaaaccctggaggcttatttcttgctcacatcccagttgacagtgggccagcacggatggtgggggtggggtcaggaggggcactgctgctttgagtcctccccggccttctgggcccacccagtggcaggacgaggg

SEQ ID NO: 4692 - DNA, 600 bp, Bovine  MMBT14869
ttgctcattcttccctctacctgctcaaataaacctttgaatccttctggtaaatttttttcatttcagttattcattcagtacatttcagctccagaatttgtctggtttctttccaggttttctatttttttatttatacttctgttttgttcacatgtcattttcttgacgctctccacatctttagtttttcaagcatctttaagaagggtgttttaaagtctttgtcaagtagatatgctatcaggtctctttgggggacattttctgttgattttttttctttgagtcgacaayactttcctatttcttacatgccttgtaattttttacattgaaaactagacatttgtgtctaataatgtagtaatctagaaatcagattctgtctcttccccagggtgtggtaggtttcgtttttgattgttgtaggctatctctgtgccaaagatcaacctgaggtgtaaacttaaggttttctcaggttttttctgagcctgtgcctttccctgggcatgcacggtcacttttaattttccccatacatgcagttgcttttgaatttcctagcctttaatgtctggctctcaaaagagg

SEQ ID NO: 4693 - DNA, 600 bp, Bovine  MMBT22805
gggttaattaactgttcaactttccatttagtgttctcttcatgtttaaattacattcaataatttttaaaaatgttttaaactttttttttttttcaaatttaaacggagccaaatgaagacgtaagaatctgccttacactgtgttcaagaggccagcagatggcgccccgcaagcccaataggcagaatgagagccttccccgcattgcctgcatccgggttattgtaggcctaatggatagggttttaactgtgtgcatacaagagtaatctgatagccagggccaggttgtttasaattaagtgctctttttgcccttcacgttactgatcagttctatgcagtcaaaaagattatgatattttagtggggcagagatgtaaccagtttttctccattctgctcattaatttctcactatttattcagcactaagaactgagctaaaaaaaaaaaaaaaaaaaatagcggctaaaattagctccactcatccattactagatcatgggtgtgtgtttagaggatatgggcttgtttgccctctcattttggaccaagtggcacaagacctgttaacctctaatgtatcccgctgt

SEQ ID NO: 4694 - DNA, 600 bp, Bovine  MMBT00994
atgcaggttgagaagctgaggcactgggagtttaaatgatttgcccagtgtcacagaactaagaagaggtgaggctagggtcttcccattacactatagcatctcacagggctaacctgtccagtgagagatgcccaattctggctggaataggtacacagcccttgagtaacttatggaccaccagttctcccctctccatttttgtggacagatttgtgcctttyrttgtctgtaaaggagcatggtctttgaagtcaggcagaggtgagttcaaaacccagtgctttatgacctgcrtgttcctcaatttctctgggctcggtgttctcatccataaaaatggatgttgtagtgatgccttagttgggtcgttatgaggattagaaggagttggatgggagatatctcggcatatttctccctactctccctcctgaaaagggttcaggggctgcacaggggttttcagagggcagataccttgaacaatagtggtggtctattgattcagcattttctcacctgcttttttctctcacgcagagacaaagtgaggctaagtcttccatgcaatttgctcagaattctaacactagc

SEQ ID NO: 4695 - DNA, 600 bp, Bovine  MMBT00814
gcatttaataaagattagctctgtttttcttctagtgtcacgtataaacctcatattttgcttgatatttgcagccttccctagcratccagaaattgaaatgagtggyccattagtgagtggaaacccagtcactgtaagctgcagggttcctaatgtgtatccttctgaccrgctggagattgaattgtttaaaggggagagtattatgatgaataaaaccttctcgaaagatktaagtaagaaagccctagagaccaagagtttggagaagaccttcatccccaccactgaagataytggaaatgttcttgtttgtctggctcggttaccaattgatgaaatggaatttgaactcaaacaaaggcagagtacacaaacactttatgttaatggtaagtacatgtgtgatgtattcacaatagattatgatttttttttatcatgtttgccaggtaatagtcaamatgaggttcatagttgaaaccaytgtgaaaaaataattgaaaaraaactacaaaatattgattgtttttttaaaaaaaagcacctccaagcttaaagcaactgtttatttgcttatgattctaagcygacact

SEQ ID NO: 4696 - DNA, 600 bp, Bovine  MMBT05174
cggctgacaaagaggctaaggcatcatccaagccgcctgatggcttccctttgcgaatccagctgacaaccagctcaagcagcatcaaggaaatgaaaaatggagttgcctggaaaggaaatcacagaagagagatgctatttgtgcttggtatgaaattcttccaagtttcctgattagtcattcccgatgtgggaggcccagagtgacagttcatagcagaaaaggtacgaacctatcctcgggggttacttcctcccaacaggcaaagaaatctgtttatttcagacacacactaayaaggtactccaattctatcatctgatttggatacaaaatataaccatagaggcttccctggcagctcagtggtggagaatccgtctgccaatgcgggagacatgggttcgatccctggtccaggaagtgttcacatgctgcaaggcaactaggcctatgtgccacaactattgagcctgtgttcaagagcctaggagccgcaactactgagcccagttgccacaactactgaagcccatgcgccctgtaaccccccagcaaaagaagtcactgcaatgagaagccttcacaccacagcta

SEQ ID NO: 4697 - DNA, 600 bp, Bovine  MMBT07059
ggtaggttctaggagtcctagagcactgaccgagacacaaaaatgggatggggggttttggaggggaaaaatgagtggcttgacaaaaaataggaaccagttatatacagtaacatctgtctgttattttgtcctcatcagagtggagatgagagaggggaaaattaatacaggagctaagaaggcattatgtcatagtaggaaggacatctgactgggagtcaggaggcctagatttgagtcattaaaaaaaacttccagtctctaaagtggtgcaataattcttgccctgtctatctytcggtctgcttgtaacgctcaaattaggtaagaaacttaaaaatatcttagagactctaataaggtaaagtattttcgctagctagattttgagtccttttagggctaagatcatgtctcaatcatatctatatccatggagtctaatacatagcaatagctgctcagtaaacatttaataaacaaatagacttggttcacactcccacccccagccccagccccagccccttgccacactgggcagaatattacctaggaactggaagatgtcggggaacaataagcataagccatcac

SEQ ID NO: 4698 - DNA, 600 bp, Bovine  MMBT08438; identical to SEQ ID NO: 4509

SEQ ID NO: 4699 - DNA, 600 bp, Bovine  MMBT09649
ttttctgcaaagtcagattcctcattgatcctaaactaaggtggccagaaagcctgtgcttcagttttcttctcctccagaaatgcctactcccacgttgtctccttgacacatttggacccttgtttaatcsttcttcattccctgtctgcctttcattgtgttaccatgtttccttgcacagtcagtcacttggaagcatcctccacctcctcagggcarttctaaaccacatcatgaggtctccctggttttctcctcttggcccgtattcctcttctttctggtcacattgactgytccttgcaggagccacttaggcacgtatggagcacttgttctgatggtgacaggacttscctgacactgcagagtgacaggggcagggcttcagagccatttgtgcctctgcacacagtggcacttagtaggctggcattggcacgtgggcacgttgacctcccattcgtgtctgttaggagttgtaatggaatggctttgtatccgagatttgggtatggaggtttgtatcagggtgtggaaagttgccttgagccactgtaaaaggcagtgtagagtgctttggtctgtttagaacag

SEQ ID NO: 4700 - DNA, 600 bp, Bovine  MMBT08542
gatccataatccatccrgggagcagccttctwccatggggaggtacatacccggcatcatgattattaacaacctggtaaacacgatgcrctgtgggtagaatttatcagagcatctcaaagcatgagcaaagccgaggctcctgttctgcaagagtgtgatccctygggaactctgggggctgctaaggaaggtccatcgccccaggcagtgggtggactggggggtcccccagatgagggtgggaagggcaggattcactgctcattcatcagccccaatccagaacatgctcaggaraggactcaggcctgccrttccctcatgacagagccctgggaagctcattatctcgtttttccagactccttgctctcagccagagctaygcctcaccacagagtacatgtggagactttcyttccattgtctctgtcaacctcaaagtaaggtgttttgaacctcattgggaagcagtcctgtgcccactccccccaaaccaagagcaaagtgacagccctgtattcgtgctcaacagagtgtatcactcaggctagaacagggtctgctgtgtaacaaacatcccccctcccaccacac

SEQ ID NO: 4701 - DNA, 600 bp, Bovine  MMBT06711
attgtctgggtttgaatcccaacaccactatttggtgaggcttccctagtggctcagacgataaagagtctgcctgcaatgctgggtcaggaagatcccctggtaaagggaatggctacctactccagtgtttttccctggagaattccatagacagaggagcctggtgggctatagtcagtccatggggtcgaaaagagttggacatgactggtgactttacattttcacatagctatttggtagctttgtgacattgagcaagtgcctgatattttctcatcttttaaatgggagtgrtgatgatgataattatacatttatcttacaggaattttttgtagatttcatgaataaaatatgcagagtgcttaaaataaagcctggaatataataagcactatattggtgttttggttttgttgttttggtaatgatatggtaggaagaaagaagaattaatkggatggtattaatcctctcctattttctttctttaggtgtgaagtgtttttcttactctacaagtctgatcagccttgcgtttctaccatacatttttgcacaaaataatgttatatttggaagtctccctttgca

SEQ ID NO: 4702 - DNA, 600 bp, Bovine  MMBT09384
gtggtccagttactaagaatccgcctgccaatgcagggaacatggattcaatccctrggcccaggaagatttcacctgctgcgggccagctgcaccctwgtgccacaactattaaacaccacagcaagagaagccacctcaacgagaagcctgcacacyacagctcgagtagctcctgctggccacaactcgagaaagcgtgggtgcatcaacaaagacccggctcagccaaaagtaataataataaaatatctgaaagcttcaagaatgctgtggttaacaccattttagagctcatgraattaagayccttggaatggctrtggaggaagatcctaaattgcaaagatttgttgttgccagctttcaacttaagtcaattagttattaatrtcaacctgtcataaaaatgccagcatgttgcatctggctaaatgaggggagaaaagattttatttgccttgtttacccaccctgccctgtaatgcctataatcatgaagatggaataaattgtaacatttagtttctatcattaaaaaaaaaaaaagactagttttgtctttcaggagcttagagtctagtagaggaataggatgtg

SEQ ID NO: 4703 - DNA, 600 bp, Bovine  MMBT06911
ctgcccactgctataaagggaaagcccacccttgacattatcctgcagagattggacccttcactgatctgtcctgctatttcctggatgcctacgctttgttgagaagcttctaaggccccctgagagccagaaattctgtaaaatttgatctgtccatgtagattgctgcccaaagagggttaagagatgaactgtggagaaagttaatttaatctggtgcggagccaggaagtaaatcaggcctgttgccagaagacctactgcagttagaagacaagaccctctcattcaaaatcrcccgtggcaattcgatccttattaaagcgggatgtaaaatcgtaatgtggacattgttgcgattcataaaggattttataaaaaatgtctgctgggtgagttcgctgtccctcttaaatacaggagccattaaactgcctcagtaactctgggaatattaaggaggacttactggggacaataggctacatgggaatccctcatggattttcttctttctcattacttaacccctgccatttaaccccaaagcccagagctccagaaaacgggaaaaagcctacagtgacaaaaaagaaa

SEQ ID NO: 4704 - DNA, 600 bp, Bovine  MMBT10287
ggtgtgcagaatggggagtctggcctctgtttttggaacaaaagctagggttcacagtgtttaggtgggagaggacacccagaaccaaactttgtagtgggtagactggtttctatttcacaagaaggggaattgtacaagtttttattagttggtaacttttgaatatgatttagtataccattactaagagctagccctgggacaataggagctcagcgcagtggaggtggaagaagactttgggcctccttgtgagtggtgggcaggtcttaggattgtctgggaagaggatctgtrtaggtttcagagtattaaggcttctggagaaascaaccagttaagagatacacccaagagtgggcagattttgccaggggtcctagagggtgggggagagcctgaaatgcagccagaggtcagggttccctagccaaggggtctgacaatgaaaatggcccagtgggactacccatggtggcctggcgtatgtgggttacactgaccctccatgggattttgtgtccattgttacttgggctgcaaggccacgcagattctgtgtatttacttttgatgaatggggcaattggttcagaa

SEQ ID NO: 4705 - DNA, 504 bp, Bovine  MMBT09190
ggtcattttacattccgctgtgaactaggaaaagtcctcttagatycttccagggaaagggaaacacagctctgcttccaggaaggtctctagttgggtccctgccattggaaagggaattaaacgttcaatactgggaaagactaatcattacatctgcgtaattatattgatgtgaatctcagagccaagttcctttcagggagctgatgttgggaaacactgccctactcctaggatcatggggaataggatttaggatgtttttaatttctagaaattatcagacatcttcctacrggcaaatttcatgtctctacgtgtttcttctttctctctcagtttttctgatgttcttcctgtctttctataaaacacttcctgacagctggccaagatgcccaggatctttgggctttagatcaacaggagataaataacacaggattgaatacctgccttatcacttgtcacagcttacacaggaagtgggctctggaatgg

SEQ ID NO: 4706 - DNA, 600 bp, Bovine  MMBT09829
caagttgcaccaatagcatgattctggtatttgctttaaagagagagaggaacagtccatgagtcagtaaggaaactgctgtaaaggaattttatttagacatttatttagaattttatttagtgggaaaaccagactagtccgactacattcgtgtaaaataaaggtcttatgtatttagaaaatgctaacaaatgcacaagttgccaagtactggaaatgctaaaagctcagaaaattgatatgaarttcacatgttctactgtcagaaatgtatttgttttcttataggtataaagragagaaattatttatataccagcttgcatattttcttgactcaatataacaycaacaaatcaaatatatgtacataatttttctcatttaaaggacaaacttatgaatccacrtattcataaaatttatcctttaaagcctgagaagagagttatagtcctcactgtctcagctaggatttttttttttttttttttgcctttgattactcaataagaattacacatagaaacagaaaatcaatatgtctacttctgcttattttcaaaattgaacattgctctgtattaatttcagaga

SEQ ID NO: 4707 - DNA, 600 bp, Bovine  MMBT11481
cytggctgcacatttctgcacgaggaagcagcatggaaaggttctgcggagggaaaggttcagaggtgattgattgattggggactgggaccgtggaacaccgcaggcaggagaggccttgtggggtgggtgaaagcaagtcaaagcagaaatccctgggcagtaacccaggtgccctcagattccagggataaagggctgtgtcagacctgggtctgagrggagtgggggacaggcggctctggggagagggcaaactacctacagctcaggctggttccagtcccaagagagctcccrtctctgggagccagtcaagaactaggataataataactactccatcttcactgtccacgttcaccttcacatgaggaacaagatttgagttttattaaaatatgtgacataaatcacacttattatacgcaggcataattctaaagatgtcccaaacattaattcttttaatccttacagccacccattttttttgaaatttgtttatttttaattgaaggataattgctttaccatattgtgttggtttctgccatacatcaacatgaatcagctataggtatcattatgtgcccgccc

SEQ ID NO: 4708 - DNA, 600 bp, Bovine  MMBT21801
cctctgagagcgtgtccagcactcaccaccacccagggggccccacgctgcagctaaagcaggagaggaaacttgagtctgaagagggacaagggacctggtgggccggccgcactctgccttatttccccatctttcctgactctgcccttccggtgattttcacattttctcctcccttttacgttcagaaaacctctggggaaggcagcttttattctgtggcttcatgtaaytcccagggctgggaatgaaagtgatttcctttcacaacccctggctgagtgcctttcacatccyggctgtgttgtggggtgatttatcaatggcaggggccggggctccttccccatcctccctgctcccgccatcacttagaacacgaccatgcccacgaccggctccaaggccagggcgtcctctcaagttggctctgaggccaggactcggtcgaatcaccgtgatgagagccattcgttctcctcccaaagaacaaacacggcctgaagtctccaagtgtcggggctggctttgaaccgagactgtgaaagcacatttttccaaacttgtcgggatcatgtttcctttctagacctttat

SEQ ID NO: 4709 - DNA, 600 bp, Bovine  MMBT01609
acggttagttttcagttccaaggtcactttgttcccgtttccttgaggccagttctcaggattgtgtgagacggaacagtttatatcatggctacagttttatcattatgtagtttacttcttccacctgctgggggtttcagtatctgtaagacagccacaggagatggctcagggctattgtctatatagcccttgagaaggaaccaaagggcctcgattttgcttgataactaaactgtcattatttcgtcctgtttgactcttttcttttgcttctacattttctcacttctcagrttaaacttattctttgactgaagtttttttacagacaaaaggcaggtggaggacatggggggaagggccatagagtcctgctccatttcacaggctataaaaatgttaaccagtaggggtcccctcaaatcacacccaaggaaatcactgcaagatagatctacactaaaggccttgcacaagggggraaaaaaaaatgtttttccatatcttagaatgaggtcccaataacatccctgacttccaccttgagtcataatgcatcatttggtagaatagaaaggcagatcccagaagtgg

SEQ ID NO: 4710 - DNA, 600 bp, Bovine  MMBT01532
gtcacaacagaaaggatcataaacaccacagttaaattttagcctcatattgtatgtttttaaaaagaggctgtttcttcactattgtcaatgaaacgtatataactgaaatgtaacttaatattactctctttaaatcaaatttagcaattaatgaaattgctttataattaacaacaacagaaagagttttacgtggtgatttttctctctgtagaggttaacaaatgctggctggtaagcaaccgtcgacagctttcaaagagagtagttcacgcgactctctgaaaatataatctktccataaaacaaaaaacagtgcctgtacctgaaaatttattcactggatccttactcctgtttgtttctgcttctacacgcttgaattgctgtacaatggcactgagctcagaagagcgctgagagattcgatgttcagctattcggagacgttctttcagagcaagaaattctcgttgataagcaatcactttttctaaaaacaaaactagacgttattagtgcatttcttaaaaaaacacataaaaacaccattataatcaaatctgaactggaacagcagaaattttaaagctgcac

SEQ ID NO: 4711 - DNA, 600 bp, Bovine  MMBT02966
ttattacagtattaattgaccctgaatttttttagcatcaggttgcacatgcctatcataatgtgtctcttagaaatctttatttaatattcaaatatattccttattagaagaataattattctacctcaaaaaaaaaagtaccttagggaagttgaagagaattgcttaaattgatcttaatttgtaaagtaaaatattcagtgggcccattactgttaacccaaatcatgttgagatttaggtagctaggaaataagaatccatagggtaaaagttgaattagtactgaaaaaaatkgcttgcagtgtagccagtatatttctgtgtagmcagaaataattttacattcaaaaaagcatgaattattttagagtaaaagtcataaaagattaaagcaagattcacacatgattagagcaacttcacctatattatttgcaaaattatagatctgttttgtagcagaggaaataataaagatttatcttggccttaggatctttattgtaaaatatttttactttacctttaggtgaggttcttttatctttattatttaattactagattgtatgaaaagaatgtaactcttacttt

SEQ ID NO: 4712 - DNA, 600 bp, Bovine  MMBT02691
gctatcaattaatattttatcctcctgaattttactaccaaaaatcagttctactacttcaaagattggcaagttaaaaaacgttgtaacttctttttaatagtgatatatatatatacttacatatgtatatattatttttcattgaaataatatgctttgaatgatttaaaacctaattattgatgtcagttctacatccaagccattctttattctcaagtgaaaaaatggtgttcctgagacatttgctaataccttccggataaggataagatcttttactgccgagttatttaygcatattcacttctcatattgtgtgtaatgtgggaagatgatgaaaatatttaagcctgcctgtgtttctaatcttcctgacggagttcaggagcttagctaagatgacagcatcccaaactacatccggtatacaggttgttgctgttaatatgttaataatggtcagtgtatcttatctttagaaagtctttccttctacaagtgggtccattagattctactgtttagaccagtgtaagaacatcagaagttctcatgcaattttcatatcttttttttttttttaagtcttctcaa

SEQ ID NO: 4713 - DNA, 600 bp, Bovine  MMBT04380
gcctagttcttaagtttgagggctgatgatgacagagaaatcatttcaaaacttaccgaagcacctccgtccattatcagacaatacaaacccagggggacagatgcactggaagcccccaggagtattggtgcaggaaccaaaaagacagatgttgggatcttcatcacactcatttatatctgcagatcagcaagataatwtaytgatttaatcaattcaatacactgcttaatatctgaaaataatttgtccacattgtacagttcactagccattggatattcaatgtgaaacaawatattacattgtctatataattaaatatgtttaaaataaactgytactgcttcaaaagtcaaaggttatatccagtttcaatgatccatatgacccagacttttaagtcggtctccagttctctggacttgactcctaggaggtgtctgcatgtctgcctgcaggcctgagaggaccacttccatgyctcaggggcatcgcatcctcagcaytggtcctcttctctgatgcccctcgccctcagcaatccacactggggagctggggtcacattctttcctctccttaattgttcaactt

SEQ ID NO: 4714 - DNA, 600 bp, Bovine  MMBT06322
ccctgggtgcaaacctatctcatagttttgggttgttaattattgcatagggtgatctaagaaactagatttaattagctagttaaatgttccactaatattcatggcttgtactaggaacggttccgagttctcaattcagtattttcaccctgggaaaatggggtctttgctctgagcacatttcagaagtgatggaaatgctagtaaaagccatctctactttccaagagatgcagtcttgcctcatctctccaaccccagtgcccttggctttctagaagcattaacacgactgtwgttcctctaaaggaataagcctgctcttctggaaagcgagcatttatctcatcatggctgttgtgctgttgcacaacaaagcagctaatcagatttatgaaggccagcccacccagagcagtggctgygtttttatcacatcagagacaagttagcactaggtttcactctaggattaggtgctgtctcacaaattgggcttttcgccagacaaagaagttgcagcatgcatttgcccttttcaagatcgctaataaaatgctgctattaacctctaggactgcatggatttctcagtga

SEQ ID NO: 4715 - DNA, 600 bp, Bovine  MMBT06377
aacttctgtgtgggaagtggctatactgatcctgagaccttcatgcaggtgatctctgatgtctgctgtgtctttgacataggagctaaggttggtttcaacatgtatcttcttgatattggtggtggctttcctggatctgaggatgtaaagcttaaatctggagatcaccagtgtaatcaagccatcattggacaagtattttccatcagactctggagtgagaatcatacctgagccgggcagatactatgttgcatcagctttcacactcgcagttaatatcattgccaaaaaaamccctcatattaaaggaacagacagactctgatgatgaagaggaatcaagtgaacagttatgtatgacatgaatgatggagtatatgggtcatttaactgcattctttaggatcacacacaygaagcctcttctgcagaagagacccaaaccagatgagaagtattattcatccagcatctggggacccatctgtgatggcctggaccacattgttgagcgctgtaacctgcatgtgggcaattggatgctctttgagaacatgggtgcttacactgccactactgcttctaccttcaatg

SEQ ID NO: 4716 - DNA, 526 bp, Bovine  MMBT04858
atattcttgtcagttgttcaaagtggttgaatttgactctaaatagtttcactgtcttaatacattattctgtgtggcaaaaataaaactggactagaattatctaggccaaatgatacagtggatttctaggaagcctaaggcagattggctattttgcattgagaagaagccattggagagtgatagtttaagaaaaattttgttgtgaaatatttgattggggaaacatttttgaaatgttcagtttaacacattaaggtactattatgcgccctccaaatagatttcctggagatygtctgccaccttcaacacatttactgaatttcaacttgaaagtttattgttgtcaggggatagatgtaacctgaattaaaggtgtaatgttagtaaataattttctaacaacttacaaaaattagaactgaaattttaagctttgttactattggaggtagtattaaagtaaaagtgaaagtctctcagtcgtgtccaattcttttgaccccaggactatagagtc

SEQ ID NO: 4717 - DNA, 600 bp, Bovine  MMBT04975
tgtggggaaaggggaagaatggaaagaggcaaggagataacttaactgaagtaaagaatagaaacaaagtctgttttataagaatgaaatcttttgagatagscacccaggaagagagctggtctgagaacaggttgaggatggagactcagaaagtaytgagttgcccagagagacatttcactctacatcaagagataaatgggtgcattctractaaattcttcacacagtttctcctagagtagaatgtgtagttagatatattttcttcacgtgataacttatttgctttaaagratgatgtgtgagagaagaaaggaaatattatcaaaacacacaaactttatgaagyggtttatagcatttggcaaaggagtgacagtgaagagaggtcacctaaatgtgtcatttcaactcaggagcactcttgtgtgcctggtcatctcctgctatcaaccaggatcacacttaaatattcctgcgagatattgataaattcattgataaattcacagttcttagcaacataccactgtttaagatcatgtaaattaaaaaattcaaggacactagtggtaaagaacccgtctgccaatg

SEQ ID NO: 4718 - DNA, 600 bp, Bovine  MMBT04073
aatttaaatggactgagttgggagatcatgatctaaattcagtcaacaagctggtaggagtccagtgactgctgtgacacatgacatttagagcccagagaaaatacagggattcctggtctggtttctgttattccctaggcctgtaaacactgggaaaagacagcataagagacttgaagcaaaacaggtcaagtaaattttatacagctattacattggaaagtgactccgtgggtgacctgtctaaacatgctgaaggaagtaaatcacattcatggaccatcctgacctcgcctytgatttttggtggtgcattccttaagtctgaaaccaagtttaattgatgactgcattgtttagtagaatataagcattttgtcaaagctagagagttatttccaaagtaaagatcaaattttcaagccgagtgagtttgtttctctttttctatctggattttagtatgtttaggcagcggcactttgggatgacaaaaaaaggaagaaatccatgtcaggcttaagaggtgtatcatcatgcgtcaacacaaattgcttttggaagctgtaagtctttgggggaaattatcctaaatga

SEQ ID NO: 4719 - DNA, 600 bp, Bovine  MMBT04170
agtcctgagacttggaacaggttctttgaaaaagagccttttmttccagtaaaattgttccacatattattattttaatttaattagattttaaaaaggttaaccatgacattttaatagcttaagctcacattaatattctgagaacacagtttagcccaaccaaatgtgattcaaaaaggatgtttttccagaaaaggaattggcttttaggacaattactgaaaaatagctttcatttgattcagacaggtatcttactattaaaagatagttattgaaataaaatacgtataagayattgaaaaatgttaaagccttagcatgacactgtttatctagtagaaagggagtctgggcagtgtgtttatggagattatcccaaaggtggctgatgtccttcggcaatgagcgaattagtgaactgtgcttgtgatgtgctgagtgttgtcaacctaatgttttatttatttggctgagagctgctatcttcattagggagtttagagagcaaagatgatatttattagcctggcaaactaataaactctgctcatgtttcttcttttgctgtcatagctaattctggtggtggttgtt

SEQ ID NO: 4720 - DNA, 600 bp, Bovine  MMBT05810
aggcctcaagggaggcagaaacaatccagtgcttcccatagtctgggtcgctgattcaatctgggtctgcaccaagggctcagcagcatcacgtcaacagaaaacgagagttgacatggagtgacgggtcaattgcaaataccaggctcactccacaggcttccccattgtgcctgagagagaatccaaaccacaccaaggctctctgtagtggatggtgtgatgcaccacccagattgtcctgtgaggctgaaggagcccccctcccccaggtattgggcaggatacttgtagacaacygtcagacctcttyatctgagygaatgaacttgtgagagaagaaatgaatgamgaaagcgcatccttccaatacagcacccattaatatggcactctcaattatggagaargaaatggcaccccactccagtattcttgcctggagaatcccayggatgraggagcctggtaggctgcagtccatggggtcgctaagagtcagacacgactgagtgacttcactttcactttctcaagaatacaactgccgtcacgaatacatgaaaaatgttttttagcatcagttttgggggaaaaaaa

SEQ ID NO: 4721 - DNA, 600 bp, Bovine  MMBT08660
tgttaaacacttaatcttcttgcatagtggttctgtgcttttaagaggattatattattaattgtttaattattcattatgcwgcattttgccattcagtaccaaagctttttttaaattaatttaatgttttatccttcttagccgtcattctttgtactgggctttctgttctttcatgataggatgtcacagcaaagaatcaagaggatggcttgttgaaaactaagcctgtagctctacaaatagatcttttgccagagcaatgactcaacacaccacccggcaagtgagtytcayggagctccagagacagcagttagaaatgtatcaccagcgagagcatcattaatcataattgtgggagtsacagtcagtttcttgacctcactgagacaggcagggaggtcagtgcctcaagcagttcatccttcaggcaaggaaaacttttgggatgatttccctttttgttatcgctggcatttttatttaatccagtcattttccccacagtctgggcagaagtacaacagcttctagcaggcacaatctggcccattttctttttctctctgccaaaagtaaccttggcaattgatg

SEQ ID NO: 4722 - DNA, 600 bp, Bovine  MMBT09406
tccccaatccttgtgggaatacaacactctcatgtttctcgtgttctctgtctagcctgctctaagtcacctgaattaaatgctgaaaatggaacccaccactctcctcaccaaaggtatctgttattcacagctatctgggtgggtggcaaccagttttctctaggattgtaaatcatgacagactaattctctttcctttgttcagtgttccaggacacccggaagacctggggatatgcatttgtacactgacagttgctcgcggtgtccttgaggcaaggaaaatgtggaccaggygcactgggtgcaacgcagctaatctgctcagcagctggctttacactygtaataaaaaaggatttgagtgatggcagaaaacactggactctgtcctcagcctggagttggattttttaaaaaaataagccaacacattcctcgttgatttaatgggcaacacccattcctcctttaattagcacatgcctccagctccttcacaccacaatggaagttcaccaaatatatctggttgaacaagwgacttcaacagcacaaaaaaagtgttttagtctgagaaagaaccgcacagaagac

SEQ ID NO: 4723 - DNA, 598 bp, Bovine  MMBT10463
  misc_feature (1)..(50): n is a, c, g, or t
nnnnnnnnnnnnnnnnnnnnnnnnnnnnnnnnnnnnnnnnnnnnnnnnnnttgttctagatatatttatttttatgacttttaatttaattttatatgattttcatttaactacagatatatgcctttattatgtttttattataaattccatctaaaatttattttacaggataacagattgattatccaaatactatttattaaatgttttaaatatcatcaccaattttaataccttccttttaaaaataggaaaatactgccagtatgttattaaaaaatttcttctacataatcytctttgaactatatataaataatgcatttccattcaatttggggagaagtacaggatttgtattggtgggatttcatgaataatagatatcctaagtataacataatgaattagaaatgaatatctattctagattttttgtttgtattttcatttttctctcatggcactagtacatgtattttaaaattattttagtgttataaagattttcagtgtctgggaatgtaaaactctaccctctccctgtccccctaaaaaaaaaccaacctggccaatttcttattactgtgtgcca

SEQ ID NO: 4724 - DNA, 600 bp, Bovine  MMBT10470
ggggactttcctggtggtccagtggttaagactcactctcagggcagggagatgggttagatccctggtcagggaattaagatcccmtgtgccttgccatgcagtgtggcttaaaaatgaattggaatacagaaaatataggacatgattaatatacagagagaktttggaggttgaccagcattgttacaaatcttggttttgcttgatttaaaaaaatagttttttatcttttgaggtaaatacaatttatagaggtctgtaatttgttttgaaatcatctagggtggagtgggaaayaggtgtaggaaatgtatttagactccatttttttctaaaaataatctaagatgattctctgccagtaaatggttgtacaatgtttcagtaagttacattagctttatgagtctcattttcctcacctcttggataggaatagtaatacttctctcacagataaggtactggagaaatctaaaatagggacaaaattaatattattaataatgtggtatctgsaaatgtsttgtatcttagtgtctgatatgcctggctatgaactaagatgaacataaatagtctgtttcaacaagtatc

SEQ ID NO: 4725 - DNA, 598 bp, Bovine  MMBT10366
  misc_feature (1)..(171): n is a, c, g, or t
nnnnnnnnnnnnnnnnnnnnnnnnnnnnnnnnnnnnnnnnnnnnnnnnnnnnnnnnnnnnnnnnnnnnnnnnnnnnnnnnnnnnnnnnnnnnnnnnnnnnnnnnnnnnnnnnnnnnnnnnnnnnnnnnnnnnnnnnnnnnnnnnnnnnnnnnnnnnnnnnnnnnnnnnnnnaatactgtagggattaagaccgaaaccaaacagacctgggtctgaatctgactctgacatttattacatgaggggcagtatggtcattcatctgttttagatgcctgaaatctgcattgacttatattygagtaatttcctaccatatgagacaaggtgagaaaatacctctctctctctgcagctgggaagatcacagttttgtttcgtagtcccgctagggtaagggcatgtgatctctagcgccagtgttctctttgcttaagatcctagttccactcagaagatcaattcaccagttattgggttatggttttgtggttagcgagtccaagggaggcagttcgtcagagggacatgctgtacagacaaaaacagtttacttctacaacattctctttgaagcgaaacyaatagaagaatcagg

SEQ ID NO: 4726 - DNA, 600 bp, Bovine  MMBT10281
aaaatcrccccttcaacaaacccaaacaattcattgtcagatttaggggaaagcagcctggcagtagagccctgggatgaaagccaggagattgggcttggtatctctgggccaaactggctgtgtggcccacaasaagtcacttaccatctctgagactctgtgtcctcatctatgaaataagggtgtgagctggatcttatcggttctaacattctctgattctaaatgatcagactagagatggcagayaggagccaaagactgggaaaactcaggatactccagtgtccagcatayagtgggtgtttcacaagttaaaatctgtgctatgaaataaaaatgctttaaaataatttaattatttttcttgctgtaaagaaaactatacttgtagaaaatccaagcaacacagaggaagaagaaagcatacatgcatattgcctcaaacatatgtaaaataaatttccataaatcccattgtccagagaagctcgtttgttgyctgcgctttatgcttaacygtataaatgctcattcgatgctttcttttccaatcacggactgcacacgcattgtcgtcagcagtggggtctcttg

SEQ ID NO: 4727 - DNA, 600 bp, Bovine  MMBT05476
aagacttgtcccagccctgcagcggccaatgaagaattatcaatgccttattttctaggcatagattagagaatgtaaaccagacaatttgtttactgttataagaaaactaccagtttgcttacagaagattatttttgtgaacaataggtttgagttcaaaaccatttgaagaatttcagactcacactcagaaaagggaaaaggaagaagtctgcttaaaatgagtatgtaaaatttgcttatcgtacatcacatttagacacttggctgtgacctgttaccagtatcgcagagaarcccaaagcactgtttaggtacaaacattcttcatataggtaactgtaagaagctagagcctacaacttgctcctccatgccttgctgggagcctctgaaagcactggcaattttaagagtctttctcagggtaacaatgttttcttaataaaaatgttttcagctacaaattcctcccaaataaattgtcttccctttcaaaatgtaattttatgaaagaaatgtagccatttgtcattgatttaggctattttcagtattgagaaatgattttgatctctgtagagttaatgctctgtc

SEQ ID NO: 4728 - DNA, 600 bp, Bovine  MMBT11055
aaaaataaaccttkgaacttggattaytcttctccaattgcctccttagttgccagttattgactttctcttctttctacctcaagtcagaacccctcatttctttctccaccctccccttcctccatgccccaaatttcctctatattacagtgattctccacatgtgatccatagaccaatggcattaactggggcacagggtataagagcaaaacattaagccaagccctgcatcagacctagtgcatcagaatctctgggacaagagtccaacaatcagtgttttgggctgtgatratgctgctattgtgtgagagttactattttatatattgtagtaaccatgcccatgaaagtcttatgctacaggctgaggctcattttgctcaagataaatagtgtatatggcattctatctgttgcggtgctcaatgtagctattttccttatttctgaggactactctaaggatgtaacattaaattaaggctgacaaagacaaaagaaatgagatatgcccagaacaacagataggctttttgaggatggacaaactgcaaaaagtccgtgacattaaaagtatgttgtatgtaagta

SEQ ID NO: 4729 - DNA, 598 bp, Bovine  MMBT06402
  misc_feature (1)..(108): n is a, c, g, or t
nnnnnnnnnnnnnnnnnnnnnnnnnnnnnnnnnnnnnnnnnnnnnnnnnnnnnnnnnnnnnnnnnnnnnnnnnnnnnnnnnnnnnnnnnnnnnnnnnnnnnnnnnnnncaggctccagaggagaacctggggacttaatctggaaaagtatgggtttttgttttcctttttgatctcaaacaaagcaggtccagcctgtttcatttatacctacttgaaaatttaaatttcatttcaattaaacatttcaatggtaaaaataaataaataataaaactatacgttctagtgacaatgggraaaaaatgagaaagataaaaccattgattctaaagcttagaatggagccagctcaggccactgtcaaaggcctggtcactgagtgagagagggcagagaggaagctgttacagtttgggggctgtgtgcagattctcatgcattagggctgaggtccagcaggaaacctgaaattgggttcagatttggacctttctttgtggagatggcataacttaacagcaactcggttttagggaatgactgaagagaggattgagaaaggagyagagaggaatcttgtrtgcctttccttaga

SEQ ID NO: 4730 - DNA, 600 bp, Bovine  MMBT13913
atacaatagaaaagcataaaaagttttcaaattatttccagacacaaggatttggaacaccccttgctgaaacaatagcaagaagaagaaaaaaaaattataaaaaagaaaaagaaaaaaacagccaaaggtgcagtgtggggcagtaagagatctaaggtttgtgcaaatgtcaggctggggacacagcctcccacacaacagtcttctgggatctgctagtcttcagtccaattgacagggccctggccgtccaggagttcatgggctagatgtgaagacaagatttgagtgcaggamataatctgatggccattcctgagggtccctttggaaatcagcatggctcctggcccttgacagttggggaggtgttcctaaatgcaagcctcagtgactctytagtgaaggggaagtggcctattcccacatatctagccgtctggcagacttagaaacaactcccaaaggtggagccaggaagaagcagatcctttgaggtatagaagctcaaactggcaatccaggaggcagaggtactcagggacttgggtgctgggaccttcagcaaaccacctgacctcttcgtgcttcagcttc

SEQ ID NO: 4731 - DNA, 600 bp, Bovine  MMBT12960
agtgtaagatggagcaaatgacctcatttctttgaaggtcaagttataaattattcttgtgatgaagtaggatgcatatggtccttaagcgaaatctcaactgaaggcttcttgatgaaggcacacagatgctcttggttgcatcttaaaacagattttttggtgttcactggaactacagcaactacaccaggactgatttaagaattatcaattttctagagccaaagtttgcagtgaaggctttttagtggtttccaaaactcaccacagaatggtcatgcttgtcatggcgttgtstcattactaattggaggagcccaggaaggataagtgtggaggtcaaacataggtacaatccaggtaaacatgccaagcatcaccacagcaacacccacaatattaacgccaagtccagctttaaccttgaatatgaaagagcttgaatgttagtctcaaaaaaactaaaacaaaacaaaacaaattgggagaattggaatactgttgcagaaggcatatgcagatttacatgcatcttaagtgactggtatcaattatttgtttcataagacaagtccttccatttatgccaaaaaagaa

SEQ ID NO: 4732 - DNA, 600 bp, Bovine  MMBT14227
caaaatgatgacattttaagtagtaaaaccttaattagacagcagtgaggacttgtagcgtgaagaagggactgtcacggtgtcttcctgtggttaaggaaagggcttcccagctgccacagggaaggaagggggcttcagccttgactctcagagaggctggctggtgggaccctcatccttaccacgagatccttcggatccttagacagtgcaggtcacatgttcctgaccttccttgggagtgaccacccacactttatctactgtcatatctgcagrtgggaggggtgcttttaygatgactgtgacrtcttagatgtaactgtgtaacccttatagcgactgaaggggaatgtccacacccagtggaaaattccacaggaaacaaccatgtcttcattgcactcagtacctatgtatgacatacacgttaagtgaatgttttcttgggttttccaggtctacaatatttagtccatgtaaatgatagaatttgataaatatggtaaattaagttataaggtgtcatttgatttctcttttgctgtctcacgttatttaatgttcctgatgctccatacctggtttgtgcctacg

SEQ ID NO: 4733 - DNA, 600 bp, Bovine  MMBT14232
cttgggaaaactgacaaaaaaagaggtgtagattgcatttcggctgagagtggctgggcaatcagagctcggcmcctttgtgccgctgcatcggaagccactgcgccgggctcgcgcagacgacatttgaaggctcataaatgtaatgaagtccctttgacacctgctcctctcttcactttaaatgtgagccattggtccatggggaacctccgctttaaaaatagaaattatagtaattgtcttccgtgctgtcgggaggctgtaaatgcatggctctcagctctactgcctgcaatygacggctgcaagaattaccccaagttgagattttttgtccttaacaaatcacatgtatgctcgtgctgcgtgggggcaggggggctcactttgcaagttccaacttatgaactgggggtccatgggaaaggtccctctcttccttcctgggtgggaccttagatgctggacctgtgctggtttctggggacaaagcccctctctgctgctcctttctgggcatctggctttgctctgatggccatgcagtggcaggagggtggggggtggcttcctccccttcctggccacagggcacac

SEQ ID NO: 4734 - DNA, 600 bp, Bovine  MMBT14231
cctggactggacagggctcctcgtgcaggcagctgggggccttgtccctgcagagctgactttggctacagacacctcattcaggtttgagccacagggctgggagtgaggttagaggctcaccctgggttctcctggccaccccagctccacggctggagggaaaccccagaagcctgtccagcccggccagctctcccaggctgtgtgccctgggtcatcgacttccatacaccctgccctggcctgagggcctgaactaggtctctaccccatgatgggagctaaacgcctgctaaytctgatggcccttggctgacatggggccttamttacagggtagaagggctgggggctgccaasagggtcagggtccctaggggatggttgcacgtgtggccctgaaggggaagcttttctccatgggcctggtggggatagaggaagtacagctttaccaggagggctatcaaccgcctcttctgaccccactttcaggattccatgtgggaacaaggcctgtggcaaaggccgtttcagaggagggaggcccatagtacaggcacccctactagaggcctgggggctgcagggctgcgg

SEQ ID NO: 4735 - DNA, 598 bp, Bovine  MMBT14428
  misc_feature (1)..(137): n is a, c, g, or t
nnnnnnnnnnnnnnnnnnnnnnnnnnnnnnnnnnnnnnnnnnnnnnnnnnnnnnnnnnnnnnnnnnnnnnnnnnnnnnnnnnnnnnnnnnnnnnnnnnnnnnnnnnnnnnnnnnnnnnnnnnnnnnnnnnnnnnnnncagtgcaggaggtgacggcacttgctttttggtctgaaacttcagagtcatttctgtacatcttagaaacattaagacaattgtcagtccttttgagaagatgtgagggctccaggaagagcagccttgctgaaaagaattgaggtgcaatagggagagaggyggtggctyttgcagaactttgtgctgtgactcatgtacaaccttttgcaaaattgaatgtggcaaaagtactgcattattatgatgtaccatgtggtaccctgatttgtcatcttcacttgacatatcttgtatggaggggtacaaraagaaaccccacactggctgaggaaaattttcctacttacatcccacacggagatttaaaaatatattcctagaatttggcatttacaggaatatgtttcactttaatagttctggaagaggagagcttttttaccccttgagtgtaagac

SEQ ID NO: 4736 - DNA, 600 bp, Bovine  MMBT17237
gtttactgagtgatattggtctggtagtagttgaagggaagtctcgagtgaatggactccttcgtcactgtaatctcaatttcatctacaggtcagagatggagtgcaaagtatcgctacgataaggattggttgaataatgggagaatgtgtgggttatcatttttaaaagaaaattactctcacctcaatgccaaaaagatagtttccacacaccacctgcttgctgacgtctgtggtgttacagaagtcctgcacgggttacagctgaagatcggaatactcaagtaagtgaagggyggccaagggaggggttcagttaggtgtaagttttaattcaagctaagtcagttgttttttgtttctaactaatttttactggagtgtagttgctttactggccaactggaactgatcatgtccttggtagactccatgcatcctggtatcaggcactttggtgtaccttgtttatgtctgtcttcccttactaagccttgagttcctrgaaggttgggattgtgtcttactcatcattttattcctagagcttagtggagggatgagttctcagtaacaaatgaaattcgcttctgttgg

SEQ ID NO: 4737 - DNA, 600 bp, Bovine  MMBT15367
agcagatagcatgagcttcatgtttgcatctgtttctcttgtcccctaagcccacacgggcaatgtgatgacagacctagatggatgcaagatacacagtggatttgtgtcagttgtaagcttaggaacccccaatcttttgaaagaaaacaaaccaaattttgccccagaaagacattttatttactatactggtcagcacacatatctgttttctacttcagaagagtgcagtatctttatatatattccacaaactctataaaaggttaactcagaagccaatgcctccacttycaragtgtacagaaatgcaagaaactcatgaaaaactgtctcccagcacyccacagcacttagtagtctagatacactgtaggaattcaataaatgttgaatgaatctgaccagagaatcatgaagtcattgctaaaattgacatgaccacttatttatgtgtcctctgtgctgatttccctgtcacttgcgtttctgaggaagacactaagaactcaaatatttgtataaaaatgatgtttyccaatactaagggcccacgtcaatcaaagatagcgatgaatgggaacaaaggaattagtt

SEQ ID NO: 4738 - DNA, 600 bp, Bovine  MMBT18231
ggagctccccttcaaggcttcaaggggagggggtggtgcagagccccccagcagtcctcaccacagacccacttctccttgcatgcttcaccccttctcccctctccagggtgccatggccaaggctgcctcatccttctgagcagcccctccggagggtctggggtcctcagggtctttgtcacttggagccttcgggacctcagtggaagctcagaaagctctgttttcttatcctgttacattgactcataagaaagtgtcattctcaaggagaacagttttgtggttgccaaagcrgaggagggtgtggaagagatggagtgggaatttgggattagcagatgcaaacgattgtatatagaatggataaacaaggcccgactatatagcacagagaaccatagttaatatcctgtgataaatcataatagaaacgaatctgagaaagaatgtatatgaatatataactgaatcactttgttatacagcaaaaattaacacaacatggtaaatcaactatactgcaataaaatgaatcaaaaaataaaaagaaagtgtcattcggggtcctgaagtcaccggccactgttggtgact

SEQ ID NO: 4739 - DNA, 598 bp, Bovine  MMBT16575
  misc_feature (1)..(78): n is a, c, g, or t
nnnnnnnnnnnnnnnnnnnnnnnnnnnnnnnnnnnnnnnnnnnnnnnnnnnnnnnnnnnnnnnnnnnnnnnnnnnnnnacatgactgagtgaatgaactgaactgaactgaatgcagttgtcctagaaaaatgaggaatgaagtagataaagcatgcagagctttgaattcctgtggagaaaggcaataagttattctgtgcgtatttgaaaatttctcacattgggaatatcatactccgaagacttccgtaggaagattaatttgacaatagaatgcaatgtagatgagaattgggaratgccagaggcaaagttaccaaacagacattcttacaaggacaccagtttgaactatgtacaataatatgaaaagccctatgggaaagagaaagtaattagaattgaaagcctactatggaccagcactctactgggtatcccagatgattaaatacattatatcatttacatgtcattatccctctattatggtgggatttcctggtgctcagacagtaaagaatctgcctgcaatacgggagacctggttcgatccctgggtcgggaagatgccctggagaaggaaatggcaacct

SEQ ID NO: 4740 - DNA, 458 bp, Bovine  MMBT16184
aaacagttatgtgcagctattggtctgacatttattatttcagcaatacctctgtgtagaagactatataaaagatacattatttacttttattcattaagatcttcatttttttttttatttttcttggttaattataagccctgtttttgaaggcttataattaaccaccccaccccaccactctccgccaaatgtgggatgtgggatcttagttcccagaccagggactgaacccatgtctctgcattaaggctgtggagtttttaccacaggaccatcagggaagtcccagccttrtcctttaaatccatatgttttcatagtttgttagcaagaagacaatattwtgggtaatgtctgtggtgcacttatcatatgccaggcactatttgaaggactttacatgaactagcttatttaatctgcaaaacaaatcttgaaaggagatttgttat

SEQ ID NO: 4741 - DNA, 600 bp, Bovine  MMBT18395
tcgttcaccatctcccaagaggttgagcaaactcatgtccatcgagttggtgatgccatccaaccatctcgtcctctgtcatccccttctcctcctgccttcaatctttaccagcatcagggtggcagattatattttccaaagatggccacaacaacatagccccttatcccattatgctcttcccacaatgtggtcctgatgctgctccgttgagaggtgggagtctacgtgtcctccccaacctgcatgggcctctatagtggaagtgatgccgcayggattccaaggccaagtyaraaaagaccacattgcttctaccagtgctctagtggcacacaagyctttggagcccaagctgccatgtgaggagcctagctaccctgacgtgacaggctaaagagataacacacagatagagaaaaatgctgggcagtcccagctgttcccacaccaggtatgaaactcttccccacccagcaccacagagctgagtaaaagccttcagaagagtccagcctcccggctaatgtcaaatgaaacagaaataagccaccctaactgaaccctgtccagactgcagattcatgagaaaaatta

SEQ ID NO: 4742 - DNA, 600 bp, Bovine  MMBT16230
gggggggtggatgctctctgcacccttgcgattgctctgcatatgcacagctcttctgagcaaaaagcttatattcacagtaaataaagatgcagagatgcctggcaatcctaacagaagctgggcttcgctcaccacccattcgatggatttggggatttggctggaccactccagctcaagtaaaccagggtctccgagcctggggcctgaaacttggacgtccacaaggtcccgatgagtgtcccrtgcsgtttgggggtaaaaccactcwccagggtgagacaggaatcaagtcckaagggctgccgtggaggcacatggaattctaaacaartactggcatcctcgacgaacgagaaaggaccgcactgaatgcgtttcctccccggcccgccagacctctaaaggtctcattgttgcatctcctccggcagctacacccccagcccagggagtgctgtacggctgtggaaatcaggtggtgggaggggttcaaatttctgctcagtgtgaaaatgcaaagtgacctgggctagcgaggaaaagagcaggtgtcctctttcgtccagctgggggtcactgtcccctaaggggccc

SEQ ID NO: 4743 - DNA, 600 bp, Bovine  MMBT18376
catacatgaggagagaattaatgacatggaaaatagaaattaataaactccccaaaatgtactcaggaaaacaaaagggaaacatggaagaggagagataagacttgaaacacagctgagagagtctcacaaggtatcttctgyragtggagtcttggggaggaggcattattcaaagagatttggcaaagggctttctagaactgacaaaagacagttctgcttcaagatgcccagttaatcctaaactggatggattaaacatttttcttttaagtgggtgggggagatttcttacakaaaatttcagagcacccaaaaaaagtcttcaaagatgactggaaaaatacacagatcactttgtcatgccatgaccaatccaaaacagctttttaaccccrgcaatggaaaacagttgaaaaatctgcaaagttcagaggggaggaggaaaaaaagtaaactgtaaattgaatacataattgaaaatgggatgagagaaaagtattctgataaataaaaaccaagaattggctgccagtgaaatctcactataggaaagtcgaaagattttggttcaagaaaaagaacattgatcttaga

SEQ ID NO: 4744 - DNA, 601 bp, Bovine  MMBT21229
  misc_feature (1)..(1): n is a, c, g, or t
nttctttcccccattccacgtgtaggcacagaggcctttaagcagcaccacttgtacctgagaagccccaagaagctgagctggcaggagagctccaccatctggtgctaaaaaaagtcctgaggttcataaccaccatccggttcttggcctttacatagccacctctcgctgaggtcagggaccactgagcagcggctgctaccagaaaaccacagccatttctccccatggggtcattcacttgactcatgtgctaatcatctgctctgcattcaggcctgtgaccacaggctcttkmtaaggttgcccaggtgtcctagtcctgacttcacctctgatttggtgtgtgcccttccctagctgttgcctccatatgtccstgtggatgaagcgggggtgcagcgggggaggggggctgtatgatttgcgagggctstgccattctgcttctccctgtggaggtggtctgtacctaaaggatgacctccagaaaaagccctgacacaacatgtatttcccttcccttctgaaattgctgacttaagactcttcctctttggcaaaggtgccaggtagcaggctcagaggcacagattcc

SEQ ID NO: 4745 - DNA, 600 bp, Bovine  MMBT20629
actcgaatgagcaacttcactttcacttttcactttcatgcattggaaaaggaaatggcaacccactccagtgttcttgcctggagaatcccagggacgggggagcctggtaggctgctgtctatggggtcgcacagagttggacacaactgaagtgacttagcagcagcagcagctcaatcaattaatctatctacctatctacagtccatggaatcacaagagtcagacgtgacttagagactaaaccaccaccaaccrtctatctatccagctttgatatacttgttgctgaagaaytcagcaaacacaatgcaaaggattcctgaagccagccactgtgtaaggcatggagacctttctgtctctagaagtattcattctccctaggtccactgcaggctgtttttaaattaaggtggatcatacacatacaagacctacctcaaagttcattattggattaccgcccttrgcatcaagggaggaaccacactggttaaaatgatctggtttgctccacctaagaatctccggggttttatagttgacctccaggtactatctgacttatctttagaactctagtgcttccttcyc

SEQ ID NO: 4746 - DNA, 600 bp, Bovine  MMBT18759
gctgttagttatactatctatgggtcattgcaagattctccctgagtctggagcgtgtttgctggagggaacgtgccctttgaaggagagactttccagggaaacgagattcgaggtgacaacatcaataaacttctatagcttcctatctgaccatccatcactaacactttttcccacataacatcagataactcaaagtgattttccatatgagctttgtatatatttatccttgacatttccttaagttcttttaccggaatatcacagctcaatggcagcacattttatctatgyattaaaggttagttaaaagaaatgaatttgagttcaatcaccttggatgctttgcttgaccatctccagtgttctggaggcaagcaattctatcatccacacttgatacataaaaacaatgagagggacatatggggtcgaaaatgtgtaaagtgaacagtttgcgataaaatggccaatatcttcatatgtatattattttacaagtattcaaagactaaaagagtccttgtgtgtatgtagacacgtgtgtctgtgcacgtgctcagctgagtctgaccccatgtactacagcccacc

SEQ ID NO: 4747 - DNA, 598 bp, Bovine  MMBT22156
  misc_feature (1)..(47): n is a, c, g, or t
nnnnnnnnnnnnnnnnnnnnnnnnnnnnnnnnnnnnnnnnnnnnnnncaatatctgaatctataacccaggagtaatatctacatcgcagaggttaataatggtcacaaaaatagcatttgcaaagagccttccagagagccttgcctaacacacaaagctgagagttattagcttcttttaaaattttatgtacccagatcccctgacagtcactctttagcatacatgctttctacacccttttctggggacaacaaaacacagcccttaggaagagtaatatgagagcgtctacycracttcaagagcaggttctataaattcttcagtgacaaagctggcctgggctattcagtgttcagagcaaagtcatttttattgtaatgaaattttaaaaggcagttccattagttacacatatacacaactgacttaataactgttagtcatagagaacattcaagaaatacaaatgatttatccacagcacggttcacattcataagaagaaaggttaaaagagaaacgattaagtgctgaaactgtcctctgaagctcatctgggaattatcttgtttttggaggaaaatgagatt

SEQ ID NO: 4748 - DNA, 600 bp, Bovine  MMBT13396
aaagaaagtcatacctatttagacttcactgatttagaatttgtgcagttcagattagttacttgatctacctttggcaagtcagcaaatctttttaaagcctcatttttttaaaacccatgaaagaggtgaaaagtcatgtaaagtttgcctgagaatgtgctgctgaactgttacgtattggacaaatgtgagaaaagaatgtaggaaattaaatttcagaaacaataatttagacaagtatgaaaggggaaatttgccttactctttaataaaaggctgttttcagccagtctgggrccattgtttacaacctaataataaatatgctaatatagaattttcataatgaattcactaaataaggtgctctctgtggagtattttcctttaacatttagttaatcagatttcagttattgtgcctttcaaatatgcctcgtaatttttacttttcacaaagtttaaatgatggcatttagttatataaattcgtgagcctagcttatattactttcttcaccttggtcaacaagtatcagattttcgaataggaagaattataaacttccattgcyttatagacagaatgttcctctc

SEQ ID NO: 4749 - DNA, 600 bp, Bovine  MMBT19100
cacgtggccaaagtatttctaggtaggaagagatgcaaagattgagatcatgagacctgttccaccagactgcctggagcacagagtgcctcccctccaccctgaactccctcagggggtgttgaaggtcaacagccacagcagcacatggttcagtctctgcaaaggcagatggcaaatgcccttggcaaacacagatttgtagttgacacaaatttatgagcagatagttagaaatttggcttctcgagcttgtgtcctcgggctcaacgtggtagtgggtaatggtggagaaaatakgtggaaaatcaagacctattttcagatttcttttcctaagatcttttaaacagttgtaacaaacttatcaacatatcaccccttttaaaatgtaccacttttcaagattgctcaagaggacaagtcactgcttcttcctatgttttgtttagaatggaagggcccagagttttaaatatcacctcatgttctccttatgatcaccaagaaaatgtctttcatctctgtacaggtgatatcagggagctttgagcaaaacaatcagaataaaataatgcaccaaaggtctagttgccttgt

SEQ ID NO: 4750 - DNA, 600 bp, Bovine  MMBT00929
tccatcattcttgactccaacttgagaaagtgtcatcctagaatacttccagaaatggtagcaacaaagaatttctaatatcctcaaacacaaaaataatcctactctgaaacatagctgaagtcacttcttttcaaccctcaagtttatattctgaattcataaccatcaacaatgactcctttaaaggtgaccagatgaaatttatcccctgggaaatttaggggcttacagaagtttaagctgtacatggtcacgttcctaccttttcccaagttcagctcctcctgggctttcgayagtttgctagaatgatttcaggaaatctgactataattgttcagattccataataattgttcataattccaaaacaattccatagttgttcaaagactaatggtattagtttttctttaccctggatttacctagtctttgcctgaaaatgctgcccacatatgtgagaggtttttttcatcagatcataaaaagagttacatttcattgatcttcaacagcccctaacagatcattaaatggatatgacaaaattactcattttgcttcaaactggatttctagactaccaaactgata

SEQ ID NO: 4751 - DNA, 600 bp, Bovine  MMBT05031
ataaacaaggccaccctacaagcctctgtctgatttgcatagcagtgagagctgatgcaaattctcacatttggggctatttcagtttctggagatgggaagggttcctttccttaaataatcttgagcatggtatcctttctaaagcatgattactgtaaagtgaaagcatttgaggaaataaagtgttcatggtaaaagaaaaactttagatggtgtcaggtttgatttttgcagtaagaacacaccacgtcaccgagtggggagttagaatttgtagactgcaggttagctgtgtcygcatcttcactctcacctgctccttgccacacagggctccaccagtcccgttctccacatacacacgtcacttcctccctcccataaaaaactgaaggaagcccctttacagcctcttctaagtcttctttaaagcatacaaatgctatttgctatgtttccctttttcctaaagtaaattcaagagttttgtatttttagcttaatgtttgtaaagaatctagcaggttgtatgctaataaacaggtaaacagcaaaccctgatttatccccgctggtgataagactgtgaagtgagct

SEQ ID NO: 4752 - DNA, 602 bp, Bovine  MMBT04041
  misc_feature (1)..(2): n is a, c, g, or t
nngtatcatctgcatatctgaggtgcttttgcaatatctaaggaccaaacacaagtgartgctttattggatccttctactgctyggtgggtaaataaacaagtttgcatgagacaaggtctttcaaggaaatgtctatatgatacacacagagattttaatcatgtmctttcagtgagttgtgagactaccgtaatccctgcctggtaccagggaggtgtgatttaataagtgctgattttcactttgtaaatagagtcagcttctcctctactggggattctaaggtaatgtagaccccrggctgatctgcatattttaaaattatcaaacacatttcaagtagagcaatagtcaggtgtgtcccaaggaagatgctttagcctgagaaaggagggaatgaattttaaaatgtctctttccccccttttttaatgtagaaaaaatggatattcttataatcaaaagcactgttctactatttatataggttagataatggctctgatatttactgtgatcasaaaaatatccacatatatttgtaggatttccctatgctcctagtacctataatttggaagaattacaaagaagtcatg

SEQ ID NO: 4753 - DNA, 600 bp, Bovine  MMBT11263
cgcccccgcaacaacaacaaaatttcattcgtgcacacacacacgcacacacrtytgtctgttcaagaacttgtgcagtcagcagtkttctggcccctgagtggtagtgagtgccccattgtgggaggtattcaagcagggaatctgtcaaacataagaccaggctgagatcttctgtgcctggcattctgaaggttctggttttcctctcctgggaggaccagtgtgccctcactcagctctgggaggcaatgatgattcccttcctcctcttctttttcctgttcttcctgcctacarggtggaccttcagactctgtttctgttcatgctcgtggctggggtgtggagcccggacctcaccagagaggcctggcctgaagggcctgagggtccctcagctggattatgcgctggtcactctggggacccacagggtgactgggatctgggctcagctctgagaagaatcaagatttgtccgctttctcagatgtactttgtcctcatagcatttcctccaatttaacaattacagccaattgtattgtttgcctcttcactagcaagtaagccccaaggacagacgtcttgtatttc

SEQ ID NO: 4754 - DNA, 600 bp, Bovine  MMBT13505
aggtgacaagcctgcaagccttacagtcaggcctgtgaatatgcggctgttgacatatttagagcaaccctccccggcggtggtggtggtgcagagtgtcagggaggcttcttcagcgatgtcactctggactgactggcaactggccaggcaaaagcaagagaagggaaaaggtgttcccatagaggcagagaagtagaatgccatctggcaagttcaagaaccacaagctgttcaggctagagcaggagccttgggaggtggggttgagggatgacagtggagggccaggcctgggcygaggagaacaggagtccttgagagtctaaggtggtgaggggtgtggagagcatctcagggagcctgcagtggccttcattatctctctgctgactctccggtttggggaaaggcaccaagccactcaagccaaagcccaggaagaacctttctcatttctcactccataagcacatcaggtcctactgacttcaccccagttcaggtcctyctgattttcttcagcattaacaaaagggctagtaacgagactccgtaatcatctgcccggctctctggtcctcttttcatcccactcac

SEQ ID NO: 4755 - DNA, 600 bp, Bovine  MMBT13932
ctttcctctccttccacaaacccagctattatttagtctctagcaaagctgcacaaaccaactgttcctcctcagattattcctttcaaggctcaagtgatatgcctccttgggttacaccttccaggttttgtggtcagatggggctgtcagtctccagtattccaccttgcaagaaaatatttatatatgagtctcaccaggtcccatttcctctgggaatggtcctgcatgccgtgccttcatgctagtggtgacagttggatcgctggttttcatgggaccactggacagctggcrggaaaaccaggaaactgccttcccctctgtgacttcactcagcctgaaaactacaaggtgtgtgactgtgagctggaaagtttctgagmggttatatgcaacactttgagaaaacacttggaaggaaactcactgatgctgaagcaatggaaayttgtaccattcacagaatatttattttcctagatctggaaacaccagagcttgcttgtacagagtcttttcattattattttgttactggtaaatagtaattcccgttattcaccaaagggtcgtgaaactgacacttctatatgg

SEQ ID NO: 4756 - DNA, 600 bp, Bovine  MMBT12904
atcttaaaagccacgtaataaaatggaggtttccttttttattatatgtacacgttgcatgtttattgtggtcttggggataactgagggcaactccatttaccagatggcactccataccaggaattacatttcaaactagagagaaaaagtcttcacccagctgagtactgcttttgcgtgaatgtgtatgtgggcaggtgggtgggggtgctttttgcttatactatactgtacrtagctcatctggtctattgactctacttatgaattacttaaagagacatctaactaatgctrtagtagcatagtcccatataacatactaayggtaattttttttaaatgactgaatttctatctaatttagttgtaaggcaatacagtttcggttgttaaataagcttacccttaaattcctaatctatgagcctgggrcttmtttctctatatggtagggtccttggctgacttgcctctctcaagtttggcrgtattgggacccctacagactttatagagccaagggacaaccaaayccatcagaaatatcatttttcactggccacgcaatgttgaatgaatatgtggaggcaattc

SEQ ID NO: 4757 - DNA, 598 bp, Bovine  MMBT20429
  misc_feature (1)..(21): n is a, c, g, or t
nnnnnnnnnnnnnnnnnnnnnattgaatggctggcagcagatgctgccgtaaaagctcaataattaggaacccaatatggagtgatttgattgaagaaaatttcataaagtaaagacatcttaggattttcttacagttttatgtcattttactttcttcatgattatcactgtttcattattcccaaatgacttttagaaatatttttgcagyctattgatatagaattatttattaacaaatgaaatgcttgtgttagattttctttatttcacaaagagcagaagtaattatgattmaaatgtagtccaggtgccttcatctgtttttyraatttcttccttttatttttatttcattgaaaatrtattcattaccacattggagaactgatattcatatttagttttattaaacccattttgtatgtatattcttgaaatatttcaaagccattgaagatattgactgatgaaataccatgctggtgacatggcagataatgatttgtttttcaagaaacactttgggcatagtagatgatatatttattgatttatcagtatatgtggagaaagagcacagtaatataaagta

SEQ ID NO: 4758 - DNA, 600 bp, Bovine  MMBT19305
catgatgattcaatgcaagctgatcaatcgtaacaaatgtatcacgctggaaagggataccaggggtggctgtgtgtatccaggaacagctatgcaagtgtaggggcagaggggacaygggagttctgtatgatgtctcacttagtttttctgggaacctaaaactactctaagaaacaaagtctattaaaaaagtgaaaacctcaatggttaccatcacaatttcctaattaccaaactttaaaatattagtgtttacatcttatattcaaaagttatattaaaaagtagaggcattaygttaatgtgttatggtttatgaaaatcagcataacaggctatcagactatgcaaacttggcctctatctgctaagaatgtacactatgtagaagttaaggcttgaaggcctgactagagaaattctaacagaccttgtaaacttggtcgccaagtatggagaaaccccatccacctaagcacatttctaactggaaagtacaactgaactaagcttcaggcaaaggtccgtatgatgaagagcctgaattatctgcaaattccgagaatgaacaaaaccaaatcttatatacctagattc

SEQ ID NO: 4759 - DNA, 600 bp, Bovine  MMBT23333
cctttgtttcacagccatttgctatgatttggggctgatttttggcattttgtgattcaagattttcttccagaagtcayatactacgtaagccgcttgttytgttcagagtcaggaaaatataacttttttgcaaaaggagattgtgcctgatgtagaggaattgacttgggatcaagacaagcatgagtgattgaaagaaagaagtcatcactcaggattctgcaggaagctgccgtctgtaccctgtgaatgctgcagggtgtcagatgctgttcttccatgagatgcagtctctcyaagcactgcctctacratgtttcctctctttctgtattagtcataccagtggatctcaaacgaggctgggaatttattttttgaaatgataaatttctagtattcatcatagggctatacaatcagaattctaagcgctgctgtgtgagtgattctgaaacagtcagctggctgatggtttaaagctgggccttgaggactgctacattcctctcatggatcagagggtgattatgaagatcttcaaactggaattctttatatattagccctgggatgctggaaatacaccagaattcc

SEQ ID NO: 4760 - DNA, 600 bp, Bovine  MMBT23336
agcagggactgttataaaagctttagatttcaggctcacagtcgtctgagtaagaagagaaggcgtcaatggatctggctgtggtcctcgtgctctgtctctcctgtctgcttctcctctcactctggaaacagagctctgggaaagggaagctcccgccaggccccactcctctcccaattcttggaaatatctttcagttagatgttaagaatatcagcaaatctttaaccagtgtaagtagattttatgtttctccagggtcttgcaaatggtaagtaagttaagcctaattwtgaygctaatacataagtttctatgggcacactgtcaaaatatgtaaatgtgaagcaaattacttcctgtaaattttgacacttttcttgcctaaatagaggaaaaaggaatgtgtttttcgagtagagaaacacttagctctttgtatggtaaaatgaaaatatataaagtattaaaagctgggagtgttgcctccctcctttgtttcacagccatttgctatgatttggggctgatttttggcattttgtgattcaagattttcttccagaagtcayatactacgtaagccgcttgttytgt

SEQ ID NO: 4761 - DNA, 600 bp, Bovine  MMBT23334
gaygctaatacataagtttctatgggcacactgtcaaaatatgtaaatgtgaagcaaattacttcctgtaaattttgacacttttcttgcctaaatagaggaaaaaggaatgtgtttttcgagtagagaaacacttagctctttgtatggtaaaatgaaaatatataaagtattaaaagctgggagtgttgcctccctcctttgtttcacagccatttgctatgatttggggctgatttttggcattttgtgattcaagattttcttccagaagtcayatactacgtaagccgcttgttytgttcagagtcaggaaaatataacttttttgcaaaaggagattgtgcctgatgtagaggaattgacttgggatcaagacaagcatgagtgattgaaagaaagaagtcatcactcaggattctgcaggaagctgccgtctgtaccctgtgaatgctgcagggtgtcagatgctgttcttccatgagatgcagtctctcyaagcactgcctctacratgtttcctctctttctgtattagtcataccagtggatctcaaacgaggctgggaatttattttttgaaatgataaatttctagta

SEQ ID NO: 4762 - DNA, 600 bp, Bovine  MMBT22694
tctgtgtgatatatactttcttgacaatcagagtgcagccaaggtcagccttttatgaaggcagaatatggtttgaactaggaggcactgaggggtcctctcctgcctttccaataatatcaattttctcctggctgatgatggcaatgctaacagtctaacgttttaactttattttaaagctctgattcatgatcaaatgcaaataccgctgggwgaggtaaatgaaatggtaactttatcaacyactttcattttaaatgactgggtgtgagatcttccctgatctgatttcacgargatggagaaagatggtgcgtgtggaggcaggaggcaggcttctggtgcctcrttctcccgaccttcccgtcacagagatgtgactgcaagtgtttttaaaaatatgaaagaaaaagtatttcagtataattcatatgatgttaaagtgataacagttcaaagaataactacaggatgagaaatttctgggaatcaaggggcagggtatggagtgggggggacgggggaatgtcgtggaataaagacaggtaggtgaagacaggaaggtcattaaaatttaggattctgaggttcacactc

SEQ ID NO: 4763 - DNA, 600 bp, Bovine  MMBT21734
ataagataaaggaaaattctaaactcagtttcccctcccccgctttatgctcctgtgtactgtttaacttatttttattatggacattatcgtgttttttattgcatataaacattgatttgtttcactgttcccagcttcaataataacaatagcagcatttatgttacaaaacattttttcttatgtgtcaggcattatacttgtaaagacttcatgttgtttcatgacattgccacagaaaaggtaaacgttagttccattttacagattgggaagtggaagctgagggagattaakaagtatcgaaacacacgctactactcactcaagtctcaaacccaatgcctgcttaaccactgtgctytcaacactttccattccaagcagattgcaggctgaaatctcacacacacatttttataactcattaactcaaatctctagtgttttccaggttgtaytaaggaaaattgggctatcagtttaggataatttctaggaagaaagtttttattggcgcttaagtgccttagacttatttcctattttaacaccttccatctcaataatcaaaaaatggaatttgtattcatttct

SEQ ID NO: 4764 - DNA, 600 bp, Bovine  MMBT01262
ctcccagccaggaacagcatccttattctgctgtttaagaactctcttccggactgtctgggctctttggactggagtgactgctccaatttctccccatagatgtggcttgctgtyatgagctggttattcagcccttggaatactgaacaaatgttttccatcagttattgcagtgaaatcctggccattgggaaggtaataaaatctctgacccaaggaaagaatgtttcacacatacctagcaaccagagagaactcataaaaagttcattacaaagcagccctgtccattcttgygcatctccccatgaccattgctacaaaacttckctctagagcacatgtccctacagcttcatagggacaaaagttcccaaactgtgtgattaaaatacatttgggttaaagattctctcctcttttaaactatcatttgtccttccattttcctacctctcacttaaccctctattgaactttcttcctccccttttatttcctcttcattctaatcaagttgcaaagaagaaaagttaaaaagaaaccagttaggtcaagcagagcccaaagcagaaggagctgaactagccagtggac

SEQ ID NO: 4765 - DNA, 600 bp, Bovine  MMBT10615
tatatatatatttttgckcttacttttttatttaattttttctctcgggatcataaagtgaaagtatttaaattcatatttcaggagataaaagaagcctaacatctttcatccacttttatgcattcttactaattttttttttttttaaacattttgtactggcatcctgaagggtgcaatttcatgagtcaggagaataaataacagataaaaataaatgtcgttctcagcaaaggtgtgagctttccttaggggtgaaaaaaataatgaatgcatggaagaggcaacagagcctcsggacagaacctagcagcaagtggggtgaggggtgtggacagtgcgtggagtcagcacccccagggagagcctgccyagggaaccgtcccccctccccctaggacacacttccttccggaggaggcgggtggtgttgggaacaccctcacatttcacagccgagtcttgcttggcaggttcattggacaccgggagaggcagggctgcaggggatggagacgatcaagaggctgattttgctaacggagacttttcagagcttgcgatgtgcaggcagcattgcattgcaggaatgcgcca

SEQ ID NO: 4766 - DNA, 600 bp, Bovine  MMBT10159
ggctttgtcagccagggtctctgtacagagtctgccctggccgctgggaagcccagggacacggcgtggacaaaggggcgggagcgtgcgtggtcacatcatttacaagaggccccggacctagaacagccttcaagactgcaaaccaagactggagcacccacacagcaaacagactacgtctgcacagaaccctcatgggagggacgcacagccctcgcacatgctgtgacatggtcagatggggagcctcccaatcatagagaatgaggcgttggcgaccctctcagggccatgagstctttgttctttgtgttttttttagagtcaattccagtttcatttttctttcttaaattaatttttactagagtcaaaggctgtgatttctaagaacacatccacatttcacaataaggttcctgcccaccctagagatcaaagctggctgggaattctgcttttcaaatgaacagagccgctagacatcagactgcacccaaatgaagataaaaggtgtcctggacagagaccacctgaccgtgctgcccgctgagaccactaccactgccactcatgcctcagtaagaacacagctga

SEQ ID NO: 4767 - DNA, 505 bp, Bovine  MMBT11347
ggctttgtcagccagggtctctgtacagagtctgccctggccgctgggaagcccagggacacggcgtggacaaaggggcgggagcgtgcgtggtcacatcatttacaagaggccccggacctagaacagccttcaagactgcaaaccaagactggagcacccacacagcaaacagactacgtctgcacagaaccctcatgggagggacgcacagccctcgcacatgctgtgacatggtcagatggggagcctcccaatcatagagaatgaggcgttggcgaccctctcagggccatgagygtggatgattagtagttgaaacgtaacagataatctgaaaatagtagcatcytttataaaagaaggaaaaggaagaatattggaaaatgcgatttggacttctatatgtgggttaaaagtctaaatattatttatggacagctagatgcacaaggatctagtccatttctatgtactcaaaaatgcttattaatcctatcattga

SEQ ID NO: 4768 - DNA, 600 bp, Bovine  MMBT08178
gagcttgaagccaaagacacaggcttctcaggctcccgctcagcttcatggtcatggatgaactccagccagccttggagtaaacagagctggggctgcagcctggattctccggccaacaattgagcgctgcagtgagttaccagaactgctgtctcctgggtggacccttcctctgtgaaatgccatgatgatcacacctctgtcccagactgttgtgagctgacccaggaacacatcccgcatggtgagatggtagcccccttttytcagaaatgagggatccggacaagagcgtgyaggagcccctgggagggagaagcccctccaagctgarcctctgtgcacagtgggtcagagtgctgcttccaggggccaagtggccaaggcccccatcctctgtttcttggaagtgactctgacagctggcctggggatgcacagattagagacagggtaggaggtcagagcagggccagggcttggaggaccccaggctgttcaataggactcaggactgggaccacctgcaaacctggagcccgtggtggcggggaggctcccccgggttcatcacagaggacccaaggtcccctaaga

SEQ ID NO: 4769 - DNA, 600 bp, Bovine  MMBT04493
gacccaactcttaaactgtgaatagtaatttgcacttttcccaggaagaaagatgcttttttaaacttgcttctgactctcattgactgtgctagctcatgactgctagccttagcaatggatgctaaattatatagcgataaggaggaagaagagatcagaggtattttgctaaaaatgtctcattttatagaagaatctgatagaatggaaaaaaagaaggaaaaatatttgcttaatattatttcttcatatagaaagaacaatatcttcctacagaaaagctaccttgggagtcarttgaaaataaacaataatcttggggcatgaattagaagacatattcctactctagatctgctagcaatcttgaaagaatgtgataactgccttattattaaacaatgtcattccagggtgaaattactgcaataaaaaataagtttgattttagagaaacttattttattatggaataacacaaaatatgtagcacaaacttcacagatatatttatgaacctattaaaatgaaacactcatttttgccctaattatttcccatgaattctatagtcatttaggtgagtaaacacagtta

SEQ ID NO: 4770 - DNA, 600 bp, Bovine  MMBT01651; identical to SEQ ID NO: 4508

SEQ ID NO: 4771 - DNA, 600 bp, Bovine  MMBT13919
atgatttcagtgagcccagactcttgcatcttcccatgcacagaaaatcaccaaactcyttaacctgggttatctggttttctttcattaacaactgttttttgatgttagaccacctgccctttgttgcacaacttctatataacctgacttctccccttgcctccttggagcagttctgtcagttacttagatgctgcctcctaggcttgaagtcctaaaaacacccacctaatgaaacctaactctcaactttgaggttgtgaataagtccacacctccaataragccccatcaagrcccagaccccagggaggcaaatggagacctctgaccttcaggccacgctggaaggtggagatagacagcagggctaggtcttgctgctcctcagcgtagcgcaccaggtacacgtagacgagcttcttcacctggggaagagggggtttctcagcagggactggtgcccctkccctgagagatgtcctcaccccgggtggctgtgctccacagagaaagcatccagggtaccctggccccatcatgctgatccacatctggttcagggacatctgggaggtgtcttttcctggaccaggg

SEQ ID NO: 4772 - DNA, 600 bp, Bovine  MMBT19275
ttccgtgttctgagggatgtctccatttctcagattcgcattagtcctaaatgagtgggacgtgctgtctggccagtgcctctgttctttcccttttccttgttggtatccccatagctccgccctctttactcttctctcttcacttattgcattgtcttcgggcaacttttgctactcttgtgccctcaggtaccacctctcgacagcttatttccgaagctatccctataagtactcttgtgtattgaacttggatcctgtatcctttttcccactggcagaagccccatgasaacstcaaattcagcttatccaaaccataatttgtytccttctcaaaacctaattattggtgtgtataccctgtttttgtgacaggcattatcatctacctagctgcccatgctggagccctcggggttattaaggtctgtcgggttctccaggagacaggctctgagatgsagatttgcgtaaaagtggaggtttgcatacaaagtgtgttcaggacctgtytcttgccctccacccaactcgctaaaaaagtaaaagtgaaaaccgttttgttgttcactcatgttgttgtggttgtttagt

SEQ ID NO: 4773 - DNA, 598 bp, Bovine  MMBT15295
  misc_feature (1)..(120): n is a, c, g, or t
nnnnnnnnnnnnnnnnnnnnnnnnnnnnnnnnnnnnnnnnnnnnnnnnnnnnnnnnnnnnnnnnnnnnnnnnnnnnnnnnnnnnnnnnnnnnnnnnnnnnnnnnnnnnnnnnnnnnnnnnacagttctttagacataatttctttaaaaataaagtgcatataattttccacattcaagacttctctatttgtggaagattctgaaaatagaagcatctgccataatatcaggggctttggagctgaagcgtctgtccaaactcacagacrggtatttcaaaatattgaggtagtctccrgcatagccgtgatgaattttgtcaggagaagggggccattttcagtcttggacccccacctggttttgcctcactgttgactcacatacctgcctacagcaatacacactrgttttggcctgtgctaggccacgcaccatcaatggagtccattgttttccagcaaggcacctgcacaacaggctcaaacaatgaggccatacctcaagcccctcctttctcctcagggcacccaaggtgaaagaaaacttgttgaggcccggaagcccacttgcatcataattagactgcctggcca

SEQ ID NO: 4774 - DNA, 600 bp, Bovine  MMBT00155
aagcatgattttaacaaaagactggaaagaatatcaatgcctaccaataggagtttgggattggttattcaataatcccattagattggaagccttactagtggtacatgcaaattgtcttccatctgcccctccaagttcattcttcccacttctctagcctcctctgggccccagaagctggcctttggcttctgttgagtgcagccaatggggagcctagtaataggccccgagagagggaaagtagaatacaggcagtgtatttacttctctttccctccacctgtgtgtatgacyctctttgtcccaggtcagggaacccctccctcccctatccgctttcttcaggtttagggatgacagatatacaccggctgggcccaagaccttgaactactcctcctctgctccctttaccatccaatcccttggtaaacactcctggtattaaaccacttcaaattatcctaaattgattagggcatctttcctgcaggggacctcactgatacagtatgattaaagatgtgggggaatgcaaaggagagataatggtaagacacaaaaatcaggctaccaaactgtatacagacaagm

SEQ ID NO: 4775 - DNA, 598 bp, Bovine  MMBT02976
  misc_feature (1)..(100): n is a, c, g, or t
nnnnnnnnnnnnnnnnnnnnnnnnnnnnnnnnnnnnnnnnnnnnnnnnnnnnnnnnnnnnnnnnnnnnnnnnnnnnnnnnnnnnnnnnnnnnnnnnnnnntttatgaacgtttataaaattctatatgctttaccaagaactttgaagtcagggccaatgttttattctatttatttattaagtatctccaagcctagggatagtcaacaatgtatgttaaatacacaagttaatgaatgaatgatttttggtttgttgtatataaattgacatgtgttcttccaaaatgaacatattcrtgttgttttagactattatttttattgacagctatcataattatttaaaatacaataccatcaatcatcacaatattcacatcacatcataataagtattattaatctcattttacaaataagaaaattgaggcacagagattttgcataaatcatgctaattcacacagatagttatgggtaaacctgagcatccattccacattttgactccagagtgcatgttctatcttccctgtcacaaatggtgatagatttgtttgggttataaaaactcagagtaatgagtatatttatt

SEQ ID NO: 4776 - DNA, 600 bp, Bovine  MMBT02468
tccaatactttggccacctcatgcgaagagttgactcattggaaaagaccctgatgctgagagggattgggggcaggagaaggggacgacagaggatgagatggctggatggcatcaccgactcaaagcacatgagtttgggtaaactccgggagttggtgatggacagggagcctggcatgctgcgattcatggggtcgcaaagagttggacacgactgagtgactgaactgaactgaagtactttcatgtggaaatcaaaaataacagaacaagagcagactagggagaggacatttytcccagtaaaattttccaaatcaacactttcatccagtttctgacatcagttctttgagtgggcatcatctacctaatgcaaaacatggagaatgtggctttgctttgttgagttgcaaagggaaagarcttttgttcagagctgtagacaagtcagttcagtccacataatctattttctcctttaattctgaaatgcagcccatgctcatttggtagtgaggtgttgtacaagaaatgtttttcttctccttctttaaggtgacttcacatcaggtttcaagtgtgttacttcaacct

SEQ ID NO: 4777 - DNA, 600 bp, Bovine  MMBT10654
aaattactgtaagtcataattagtttgagggaaaacacagattcaaaccagtagtttttcagatagaaaccataaaagttataagcatattcaccagttcattcagtccttttgttcatcttttgaaaccatcagatttcccattagaattctttaattttttacccagctcagcattatagtttaaaaatcagaaacttgtatttatccaaaagtcctttctataaatcttaaagaggaagcatgtttacaaaagcatcataatgaaaccataactgtctataatgacaaaagatttawggcatgcttaaaatctgaaacttgggtactactgtgacaacatttgaagatagtaactagaattatgactgatagtattttaccaggacataycagaattttaggcactccatgtaatttctaggatrtctatattagtaacattyaccatactatctaggtcttcccagcggcactagtggtatagaacctgcctttcaatgcaggagacataagagatgcaggttcgatccctgtgtcagaaagatcccctggagaaggaaatggcaactcactccagtattcttgcctggagaatcc

SEQ ID NO: 4778 - DNA, 600 bp, Bovine  MMBT11336
taatcctcatatccagttacataatgttccatctcattaatggaggcatacctgtactgtgccattaagtctaaaatctaatagtcacaatacattcattttcacctttcaccatctaaatggccactgctaaatcctttcagtttcaccttctaagttgttttttttttttttttaatctattcaatcccatccatcttcagggtcttagtttagactctagttgccaccactggctcacattattgcaaaatattccaaacaagtttccctgtccttcaacccatcttctattctggmcacaatgaccttataaatactcaaacatgattgtataatttccctaacagaaaaatcttaatggctgctcattccattaggacaaaatctaaacaaggagaaacaaacaacaaagaaaaaaacatgcatcactgccagcgtctgcttacttttctaacctcatctctcaacatccctaccctccctccattcacagtaaccctaggctytagtcgtatgcaacaatgtattccaacctgcccctgttcttgaatgaccttctgcagcacaatgtagtgattaagagtttgggtttaggaa

SEQ ID NO: 4779 - DNA, 600 bp, Bovine  MMBT03020
tgcaaagacccttttgacatataaaacaacatattcgcrggttctgagtattgggatgtggacaagccaccattccgtcatttcttgaacacttgcttgctttctggtataagaagatgtcctgggttcaggcttccaggattccctgagaatyggggtagaatgctctacccyrattcctatagagaagcttctgctccctaaattctgaagccccatgccctccagccagcccctctggagtcctccaacctgaaagatacacttccccatctgcttcctgccctaccctggctcctsstttacacctcagctccttcatttgtaatatgggactgataatatctcactgggcagttgtgaaaataaaatagatgacctaggaaaaaggcctgacccagtgccaggcagaaggtaaataccagcaaagacgtcttatcagtcctctcctaactgtgccccatcccttcttcttaggtcctcagatgcatgttctctgtgttatttyaatattttattccttgcctcctcttccccatttctgtttctcttgtcatccactccccatagtcacacctgctgatatacgtaatatctgac

SEQ ID NO: 4780 - DNA, 582 bp, Bovine  MMBT09934
gatctttagttgcggcatgtaggaacttagctccccaaccagggatggaacctgggccccctgctttgggagctcagagtcttagccactggaccaccagggaagtccccacagccttggtttttaacgtttaactctggctaaggcttcttctgtaaacgtagcatctctgaaactgacctcatcatcttagcttctccgctgtgctcagtccccctgttctgaagtcaccagggttcctcatttacccatttctttccagaatgattgctaccaacctgtttgactttttagattttstgaacctcttcaataacctgctgtgcttttgtctaaatctctttcacatcaatctcactacaackgaaagaaaaactttctgaaacattattaaagtccaaatagttttgagaattgagcttgtaccccactcttcctcttggggacamgtttaaacacaatttttctgaacttcttagcccttgtgcgttatttgatgacacttattcgttccgtgtctttttaattttttcaatttttattttctttatctgcaatattgtgtttcaggtgtacagcaga

SEQ ID NO: 4781 - DNA, 600 bp, Bovine  MMBT05367
caacttagcacacacgtatgcacgtggaatactcatatatattaaaaaacaaaaaacttggtggcatttcgaagcatggactaaaaggataaatggctacaattactcaagcaagtagattttatctgtaaattaagggtgaagttcaggagggagcagttctagcagctctagaacatttgaggggaggcggaagtggggggcaccaaatgaagtgctcaaattagagatagtttagaagttaacatcgtctggcatgttgaaaaagataattagggaacagtgatatgaagcagttaygagtctgaaagaaaatttgtttatttctatcttttggttttcatgtagatatgactattaggaaaataggggagaaaagaagagttattgrtgcattctctctacaattcactgtctccaacatctttttattacattttatactttctattctcasatgactatctttccagattggcagtatcaattttcttttggaggcttttgtggggtaaagtagaatattggttccagggaaagaatatagtattttcagaacttaactaatacactttatacatgaatcataatgttatttct

SEQ ID NO: 4782 - DNA, 600 bp, Bovine  MMBT07656
gcattactaggggcagcaaccttgtgctgagtcctccataacccagcccctgggcatcgagttggtgctctcaggccactatcatgaaaagcacgcaccagcagggggcttggagccagatgatgggaggcctggcagcctcgggaaaagacaatggagctcatgaagaggatgaacagaaaccaggactttcattccagctctgccacctgctcatatgtgagcccatgtcttctgatctgtgaaatgggtatcataataccacgtggcaaagttgtgaggatgcagcaaatgacttgyttttggtaaagcataatgtgctgggcaagtctaagcaacacttgtcatcaggggaaatactactgatgctcttaacctgccaggtgagttcctgatagggtcatatcccaggcttcccttgctttcaaagctgcttgcctcactggactgctctgagtctcatagacctccacttgtctcttacattctgaacattctgctcttgacttcccagtctaacagtcatttctgcaagagaaaaaattgttttttgctggtttatttttacgtggaacattgatgacaatgttgaacttgact

SEQ ID NO: 4783 - DNA, 600 bp, Bovine  MMBT09851
tctgtgattggtgtttgaggaccctgtatgagattggttagataataaaagtgatactagtttgtgataatcgttgttgtttcactcttgcattcaggacttaaaaattagtctgggagggccttttctgaactgtggagatatagcgtttaacagttctggctgtagaaggttcccctcctaccgcgtcccgcttttggatcactgtgtatttgacacctgggtgtttagggactacttgcattcctaaattaaatatatcctttgtttctccctcctcttaatgtcttttcatttctyttggttacctgcarcttcttctcatggttaatactaaaaataaagaggaggtgaaatgagagagtttacttgattgtcagtggcttggacaaaaaacctcttccaagaaataggtcatttaaaagtattggattggcatttcacttgagttatttgtggttaacatgttattagccttttcttatttgggttgtttaaggagacattaaaagatcaggtcatttaggagttaaaggacacaaacatgtagagcgtgcagatccccagcatgtattgatgctgaacaaactccttagtcat

SEQ ID NO: 4784 - DNA, 584 bp, Bovine  MMBT09319
gctctagagctgcaactgttgagcccacgtgccacaactactgaagcctgcactcctagagccctcgctccacaacaagagaaaccgccacaataagaagcctgagcgccccaacgaacagtagcccccaattactgtaactagaggaaaaagcttgcagagcaacgaagacccagcataggcaaagataattaaataaataaaatcattaaaaaaaaaaccaaaactgtccttcaaaagacaggcccagatggacaagagctgcaggagttctgcctgcaggaaatgccccagctagtygcgcaggcgagaggaaaggaccccagagagtaacctcaggctctggaaaggaagacacacagtgctggtatcaaagtcatgatggtttgtaacagcaattttagtttcctacatgatttaagatgctaacatagtcttttaaaaagcattttttagcctaaaagctggtgttattgtaactttggtttataactccacattttgttttctatagaactaagaaactgatgtatctaccaatttctgtttatgttacggatgcgcaagtaatacaagaattttgt

SEQ ID NO: 4785 - DNA, 600 bp, Bovine  MMBT09405
agcccaggtcttgagcctgtcacaccgaggcaggggctcccgcactctggcctctagctacctcgccagctgccctcctcaaagtcagacctgaccacccgactcccacagctgctgaagacctggtaatgacctcacgttggcgttcgctccactgtccaaaaggaacttgaccatctgctggtgcccagcactggtgcagtggaagagggcagtccagccctgaatgtctttcatttccagctcagcaccttgctttaagagaacagagaatgcctgttaaggccacgtctcctccgyacagggcgggcaccctctaggccatcacactgaaagaatcgaagtgattacccaggcgcgctgcagtggttccctctctgccgagcggcctgaggccctcgcagctcacctggagaagaaaataggcgatgctctcgttgccacagctggaagccagcatcagtggagtctgcccttccggggtcggcacattcacactgacccccgcctcgagcaggaggtgcacgatggtatcgtgtccaatgtaggaggcatacatcagcggggtccagccaccaccgttcttcttattcaaatcta

SEQ ID NO: 4786 - DNA, 600 bp, Bovine  MMBT07220
tcaagtacatccatagcagtattatccagacagattttaagaagaaaagtgggcaaaggcatatcatgcaagcagagcacaaagaagtcaagaaaatcagggcaaaaaaaktattaaataggctaaagtgagccacttgttaatagtgcaagttagaatctacaattaggacatcaatcatgaacataaatatcataacatcaaaatgtgtgagacaaactatcagaatgtacaagacaaactgagaagaatggcaatctaaataagcaaaaaataataacaacaacaaaaacagaagtyctgaaaagccttaccactaaagttgattgaagactaagtcttacctcatttaaaagcaaacactacacccagtattgcaaaactttgccaaatagtaaaccccaagaaaatgtcagcaaatcccccccaaagaatactaaaattgaaaaaaacaacctaraaatcaacagcaaagtgtaaatgttgagaatattttaaacctaccacttgatacatacataattaatctttcaatcaatggggaaaccaaaataccaagtatataatgctttgaaagtaaaaataaagggaacatatatt

SEQ ID NO: 4787 - DNA, 600 bp, Bovine  MMBT08733
attgggggcaggaggagaaggggacgacagaggatgagatggctggatggcatcactgactcgatggatttgggtctcagtgaactccaggagtcggtgatggacatggaggcctggcgtgctgcgattcatggggtcgcaaagagtcggacacgactgagcgactgatctgatctgatctgatctgattgctatatatgatagtgagacagagtgtggatcttgataattctataatggatagaagcaaaagaatttctcatgctcaaattttgttgcccaagggtgttttatatcttygcccaaatataaattctcatcatgtttgtatgtagaaaaagtactctaagttttctttccaaatatccttcactcaaaatagtgacaaatatcaaatatagtagggggataagtgatatactacaattgatttttaaagttatcatgtatttgggactttcatggttcctgaaatataattctcataaaacatttaatcctcaatgcacctggagttattgttatattttgaacatttaagttgaaaaatatgggatagaaatctcagtttttacaattagggaaaatgcccgtatacaa

SEQ ID NO: 4788 - DNA, 600 bp, Bovine  MMBT09783
cagtcaacaaccaacataatcagaggtgcgacatcagccctctgagggccaagttgagtatgctctgaacagctccgttcccataaaccacagacgtctgatgagtgacctcactccagtaacttctcgggtgttatataattaggtgtttgcatatctgagtattgatgggtctaaagagatgtcacacctactttccacactgtctcccaccttcttctctaaacatacacactatgctcaccacacatgacccaaaaacaaccaccaccacaacccaagctagctatttcctatccyaccaaattacaacctgtctataattaaaggaatgtctggaaagaggctatgagatcccaatgtctgagttcccagggatgaagggtcccagttcttctgggaaaagcagttatgaattctctggaagactgaggtagggctgaccctcaaacctcaaagtggaatcgcttcaactttacatgtcagtatggtcaggacaggtagaaagccagatcttcaggggaaaaattaaacctgttaactatctgtcctaaaaggggtggacggcaggtttcctggaaatagatacaagaccaggtg

SEQ ID NO: 4789 - DNA, 600 bp, Bovine  MMBT03729
gccatttgactctggttatggtcatgtgctgattaagctgcccctcaagaatatgaaattgaaacgcaaatgacacatcagtatctcaagcaccaccacaacctatgacagtttagaaacttcagattaaccattcggcaatggaaaatgagactaggaagccttcacttctaaagctttaaaaaaaaacatttctgagaaagcgtcttgcctaggttagttttcaatcacttcaaatcgtctggtaagctactcccaaacctttgcatttacagcacaaccctttcatgagcaaagcarttcaaaaggtggggcctacaatttagtgctaaggtcaacaaagctatgcttttgaatggtatgtattatccccagatctgtaccctccatgtcaggcagcaagtctaaaaagaccaaaagtagaaatatatgccagcaaataaaataattattatcaccaagaatgaacaattctacagtaaatttattaaacttcagtgcttttctttccccctaaaaatatatggcatgtaatgaagtgctcttgtttggtaagcagccgtcttggagagcactctcatttgctagagttgtatgaaa

SEQ ID NO: 4790 - DNA, 535 bp, Bovine  MMBT08505
tggtaagtctgaggccacccagcttatgaatctaaggtgttcatccccagatttgtccctgcgcctgaggaactctctcagacgtggcggagggcagggggaggggcggccgggtgccgtatttatgcgtttcctggctggtggggttaagaagttaacaggaaaggaagaagtaagtacacgactgactgcctgggccgcccaggtctctcgattcccaggtttgcagtccgcttcctcccaatttgatgcaggttggcttgaaagatcaagggtgctcattgaggctgtcaggatgcraagtcaggagcggtccgggtctgtctcaggttacttaaataattaatgctaaatgatgattagcaagaaatgctttgatctcccaccttgcctcctggagaacaaagtccctttctggaactgattaggtgccatgaggtcatttctgatgtggcgtctttcaaatcagagatgctactgaatcacccttggtcaccgtccccccacccccactccactccatggctgttttcac

SEQ ID NO: 4791 - DNA, 600 bp, Bovine  MMBT08844
agccacaggaaagctatgcaaagtaaacatgtttattattaacaagagtagacatgcatcatctcccctgattgcaaaccttaacttagataccactgcatacagactcgtagtaactgattaatcacagaacagatgggagacaccctaccttgcgatttaactatccatctggtctttcctgaccatctattcataggaacagctctgctctgtatttctgagaaccagtttaccattcaaacataattattggtcttaagtactttgaaaaatatttcatctgtggacaaaactctrtaacaggaaaagaacagactaagagcagacacctaccatgcttaaagactccaatgagcagggacttatcagcctcactgtcccaccatgttgttggaacctccagctgatccactactgggaaccatatgtcaatctcactgaaggtataagaggcaaagtcagcacagcgatgaaggaaataaaagcaaacaatctttggaaagattattacaggtatcttcttttctctattaatttacatagtcctacatctgcctatttccttccaatggtatcaagaacagctgtcccctggta

SEQ ID NO: 4792 - DNA, 600 bp, Bovine  MMBT06874
aaatgggaagggagaaaaaaatgctttagcccctcctccataggccaacaacaaacattcagaataactttgagaccccctccagaccttccaaacaacagagagaggagagatttttttaattcatcccactctgcaattttgagcaattcacaacaygtctctgagcctyagttttttcatctctatagacccatcatatatgcatgtgtaagaattaaattgaagacattctctggcagtttcatggttaggactcygaaatttcactgccaagggtccaggttcaatccctggtcrgggaactaagaccccacaagccatgttgcatggtcaaaaaaaatgaaattgagatgagtggtgaaaagggcttcatacgatgtttgccacctgggagaagaccagtaagtgaaccaataatatgacagtttccttctgctcttttggggttaaaagaatgtggttaggttcctaactaatatccattcttcttctttaccaacagagtcctgatttcactcagggcttcaaaacacccagatttaaaaaaycaccttcccagattcctttgcaggtttaggtggccatacttcagttcta

SEQ ID NO: 4793 - DNA, 598 bp, Bovine  MMBT09062
  misc_feature (1)..(58): n is a, c, g, or t
nnnnnnnnnnnnnnnnnnnnnnnnnnnnnnnnnnnnnnnnnnnnnnnnnnnnnnnnnncctgacctttctttctctctatcatctctgttttcatgtctctctctcactctcctcttattctttcctgttcatagttcctttagctaaacaagggaagcccaacaattctaaagtgggtagtctatcccttctccagcagatctccccaacacaagtattgaaccaaccaatcctgcactgcaggcaatttctttaccaactgagctatgagggcagccccttttgctaaaaaaaagagrcaaatttcagaaagcaagaatacaatttttctctgagatgccattgtgtgcttttggaaaagctttcttctctgctattcatggagtggtttactgccctatatgccattctctgcaatttggcaaagttctccattaagagtttctaccccactactgtgaactcttaatattttgtctgaaarttctcctgacttttgttcttcttgtgtgtagcagagaaatttytcttaattaaagattctcaagtcaaggatggtagtaacatccttttctgtagcagagacaatactacgtg

SEQ ID NO: 4794 - DNA, 598 bp, Bovine  MMBT09448
  misc_feature (1)..(203): n is a, c, g, or t
nnnnnnnnnnnnnnnnnnnnnnnnnnnnnnnnnnnnnnnnnnnnnnnnnnnnnnnnnnnnnnnnnnnnnnnnnnnnnnnnnnnnnnnnnnnnnnnnnnnnnnnnnnnnnnnnnnnnnnnnnnnnnnnnnnnnnnnnnnnnnnnnnnnnnnnnnnnnnnnnnnnnnnnnnnnnnnnnnnnnnnnnnnnnnnnnnnnnnnnnnnngtgtgtgccttatgtacaatgaatactccctcccccacaggaaggcatccgggtttgtagactggctgtgttaactaatgactgcagaaagctactrtcttatgctcaggatcatacccaaaatatctgaccacctgtaggtcaggagcgctgaatgcatgctgggcagattctggagccccccttgctgtggcaggtggtractttttagttcttggattatagygggtggaggcctgggagattccgagggtgattgttgactactgtggraagatttctttatgttaataatcagtatgatcatactgctgctctgagttaaatatcggcyttgccattgtagtcatatttaaaaaattctgataagaatgaagtgagcttcctatacgctg

SEQ ID NO: 4795 - DNA, 600 bp, Bovine  MMBT09459
cccctaaaattaaaaaaaaaaaaaaaaatagaatgggcatagtcacagctgccttctagcattgagaagtggattgtataagacactgcacagagcgctgtcacataatacatattccataaaaggtgaattttattattgttgttgttatgtttttttgtggtgtgtgcttcatcagaggagcacacagaataagctccctcagcaaagagggaccaaagtaaagttttccttcccagtccctttaaattgcatgatgacttaccatggttcagaactaggctgagagtccaccaccartgcacgaaggatctgggcaagctagatcccacgaggcatatgagagtgataccttctggctcagggtcagctacacctacccggatgcattgatgacatcgtcactcctcccaaggaaccagaagtagccctcttcgtcaatagttgctctgtccccagtgttataaaagtccccacattccacttcagctgttttctctgggttattctgcaaagagaacagcactcctttgttgaaagcaatgagtttagagatgatgagcctcaacacagggttcagatactggcttcaaatcctgc

SEQ ID NO: 4796 - DNA, 598 bp, Bovine  MMBT09436
  misc_feature (1)..(1): n is a, c, g, or t
naagtcttaatgtctgttatttactgtaagaagacatgaactccttatcctaatctgaaatatgtataatccattttaaactttgtaccacattactattttattagtctcttctgttcctggcttgttttaaatataaaaattattggaagaaattgtttctctttaaaggatttgaagcttaactgtctaaaggcttaaatataatttcttcattgttcctttgcaatttctataaaaatacaaaattattttcatacaggaagctgaaaaagcgggctgttgtaaaggaagctgctrtgcagttccttcctttctaaacttcaagctgaatgcgtttcctcactccaagttcaagggcttagtttacgtgcctgaagataaactgaacagcacctgcctcttagtcacaaagggaatgtcttgaagctgygaagcaatcatgtgtactcagtttcagcttttgagattctcaaagcatgtggaaaaaaaataaattcagtaacgaatagtataggacattccagggtttcggcagctcaccttgggcttccctggtagctcagtaggtaaggaatcagcctgcaatgcaggagac

SEQ ID NO: 4797 - DNA, 600 bp, Bovine  MMBT09143
taagcacacccacaaaccttttccaagaacagttgtatttgtccccaggctggcaagaatgctttgctaatgatatcaaagccttttgatttatctacaagcaatctgacttgaacactgaggaaaaaatactcattctgttccacttcaaattaaaacaagctattttttgaatactgggctgtctttatttttctttgaacacaggggaatatgctgctctgagaccttgtactatttactctctggctgtggaacagcagcaaaacacactattaatctctgcactggaattttagraaagacaaagtataatttcatttccaaaaatgatcatccatttctacttcttaccaagcggaataaaggtataggatttactctcctgtttgaaacaaagaagaagctgggacaaaatacaatttwaaaaactggtttccaggcactggacagaaagaagctgtgagaggggaacagtcaaggtgagccccatgcctgcccactttattgtctgaagggtggggcygcagacaggatggggaaccaggcagagacttcagtctccccagggcagtgggggacagaactgagggtcctggg

SEQ ID NO: 4798 - DNA, 600 bp, Bovine  MMBT09113
tttttaattaaaaaattctaatgtaaacaaaatgagaaataaagtggtatgttgacccttttaaggtataaaaataaacacttacattttattttatgactttaattttcacagccaggtggtataaatacctttaatttatagcactttctagctattgcatttaaaactttcattttccatgtcatttttaaactgaatttttmcaataaaaaaaaattagaccctgaggaaaaaaaaaaacactgtttgaggattattagttcataacttggtagtaggaaagggtgatagaacaaragtctaaactaatgaattgggattgtgtaatatttaaatagccatttgcattaaaaaaaataggttgcccaagtgctaaatatgatacagacattaaagtaattagaaaacaggaggtggccaggggggtataaggtaccagtgaatttggggtaccagataaatgtgaaatttaaagttcacgtagacacatatgcatacttttttttttttttctttttggtagctctctccgaatcatttgtttatagtctggctggacttgcggccgcagtcctgccccttgagagatgggatctt

SEQ ID NO: 4799 - DNA, 600 bp, Bovine  MMBT01270
catcttctatatttttgtaaacaatcatagccacattcttcccaagacaatccataccacagtggaaaagctttgattatctgttaagttcatccttccctaggtgaaactggcctctgatcaaaatttcatttccaatttcaaagtgttgagttttatttagatttataaacacagggaaaaataaacagcgttttcttttttgttttcctttgagatgacatgaagcccaaaagccagttgtagaataagaggtgttaataggatttggaggagagacacagtttgatattcagagamaaagatgggcttgctgggctgtttcctctatcaaatcttcattaccctccacactgtgtcattactcacaagctttagtaccaacatgctgctctgacatccctccctggcccctctttctctccagaaataaatgctattgatcagcagtggtcatattgaaagctggcaggaatgcgtgagcttattaagtttctttattaaagttgaacataatctggaaagaagagttgattccccctggatttatggtcatttatattttttcccttgtaatcctccatttgtaacatttcatta

SEQ ID NO: 4800 - DNA, 600 bp, Bovine  MMBT14513
caaagagactacagaatgggcctggaaaattaacaaggcctggtgctctctgcctaaatcattgttacacactaattagtgctgtgctctgatttgaggctttaaatttgttcctttgaagattttcttaaaattgtattcaaaggaaaggctcctctttaataaaactgtataattcttcattcacttgggaaacatagcttcctagcataatgctgcttgaaaacctggagctgacttctaatagaggtgctaattattaacattccagtatcagccaaaggctgcattctctaagamtgaaataaaataatagtgcacaaatatttcaactccattcccaataagtacttgaaaaattcaataatgttcattaaatgcataaatgtgaatattaaaaataaagatatttcccctgtgatttatgatgtactatctgaaaagcaaagctgaagaaaggcatcattatatggcataaaaaggaattctttggctgttaattataatgtaaatttatcattacaccaggaaaaaagaacagcttgatatttaaaaaccatcaggcatggttggtcattcaaaatatagacgcattaatct

SEQ ID NO: 4801 - DNA, 600 bp, Bovine  MMBT13288
aaaaagattctaagtatatgaattatgatgaaggtattcactgtacaaatgagtcatcagtgtgaagaccaatcattaatatttcatgctccctaatattgaggaaggtgtaagttgtatgctggccttcacacaccaccttattttcattttatttatactgcatttatactgcctgattaaattattttgttatctctctaaacatggcaactttatgcaatttaattttgactaccacatccacaatgtatttccttgatgatgtggtctaagaatctgaatatattcatcgaatcytaaaatgttgaacatttamgttctccttggtatcagtagctcccaatgcaagtatctttaatttgctaaatgctttgcttgtgtttcctaacagtcccaaaccacagaaccagagcattcacccaactgtaattacaattcacaaatcatcttttgtagaacctgatcaagagacattgcaaaataattttcagaaatgcaatttttatcaccttctttactatctatcaatataattcataactgtcattttaaagctttaatttcctggtggatattgcattattgcacacccaggat

SEQ ID NO: 4802 - DNA, 598 bp, Bovine  MMBT14068
  misc_feature (1)..(152): n is a, c, g, or t
nnnnnnnnnnnnnnnnnnnnnnnnnnnnnnnnnnnnnnnnnnnnnnnnnnnnnnnnnnnnnnnnnnnnnnnnnnnnnnnnnnnnnnnnnnnnnnnnnnnnnnnnnnnnnnnnnnnnnnnnnnnnnnnnnnnnnnnnnnnnnnnnnnnnnnnnacagagacgttcttttcgccgttctcttttccttcccttttatcccagattactgaatgtcatcccctccgctacatagcaggaccttcttgttgtcctctgcaacggtctctcacacctcacgcaccacccaaaccagccctaaacrgaacccaacatcagaggcccaccagcctctcacagcctacttcacacactcacatagtaggtattcgggaaacttcaccgaatttcactaaacctgctgcaaataaaacaaagccacgtctgccctaagmcgaaaggcctgggccctcaggatgcatgttaactctttcatgctctccagaccccacacgtgtcactcgagattaatgagcaccgtgtccccaacgtccccagggtcagcctactggaatggaaacaggaatgagcaaggaacagcctcagaaggtcagaaatcccca

SEQ ID NO: 4803 - DNA, 598 bp, Bovine  MMBT17912
  misc_feature (1)..(11): n is a, c, g, or t
nnnnnnnnnnnaagatttaatgaaggaggtccttccaaaaaactcccccccattaataaagaaatatttagacttccctaatggtccattggttaagattctgagctcccactgcagggggtgtgggttcaacccctggtcaggggactaagatcccaaatgctatacagcacaacccaaaaaagaaagaaatattgactgttaccatctcacctggggaagcttgtgctgttgccatcaagtgtgcttcacctttgaggaactggccagggctcctctttattataaggtttggaaagscttggaaggataggtaggtcctgagcaggtgaggagcagagtgttcatgacctcagctttctttgcaggaaggatgttttttggaggggggggcagggttggccagaaatggttacttacagtagcctccatggccattgggatcagattccctgagagccttattagagacaagcagaaaataattgtcccacctgtttcctggtccctatgagcccaacaatgaaaacaaagtatrtgatctaacttcaggatcagaacttggagataaagcagtctgrgtggagaggagtyccag

SEQ ID NO: 4804 - DNA, 598 bp, Bovine  MMBT15906
  misc_feature (1)..(84): n is a, c, g, or t
nnnnnnnnnnnnnnnnnnnnnnnnnnnnnnnnnnnnnnnnnnnnnnnnnnnnnnnnnnnnnnnnnnnnnnnnnnnnnnnnnnnnggatgaaccttataaagtcctctggaccttcatttctttatttgtaagttggagagaaactagacagacattgagaattttgctttgggcatttgatgagctaataaatagagaaatgtgttataaactgtaaaatgagatgatatgtgaggggttgtaattcacctggccacggatgacagaaggattgatccttgtgtccccagcacccagcasaggcccagggagctggggtcactagactttgctaaatgatgactcactttggctctttttgtcccagggacctggcccagctggacgcagcctcggtctcatccatccaggtggtaggcgtggtcgaggctctgatacagaacactgacaccctctttcctggaggtaaaactcctgtctttatgaacgatccacccaacttggtgccctccagactcagtttcagtccctggtagccccgcaaactcaccaggaggcctggaggaaatggcttctccccgctagcctcagtttctca

SEQ ID NO: 4805 - DNA, 600 bp, Bovine  MMBT16373
tggaaaagagcctggaattgaaaatgagaagacattgatttaaatcctgactgtgaaatattaaatgcaattacttaaccactttagatttcagtttcctctttagtaaaacagataatracartagtgtcatatttattaagatgattaaattaggtaacatggtaaaaatgctaatgggattaacaagagaatagaaaatattaataaatagagtatgttattgataatgattttcttctatttttgagcawtagggtaaagataaaacagtattgtttccattaatttcaacttggytattctcaataccatttattatttgctatttaattaggaaaacactttatatttttaaaatattgtacttaatattggccagaaaggtacacagtatctctctgtttatccactaatgtattctcttggtgaaaattcatcatctaaaaaatcctcagataaatattccagttatcaattgtaaaacaaactaccccaaaaactcagtgagtgttttaaaacaattattcgtatttatcacagttctatatgttgactatctcaactagaaggttcccactttgaatctctcatcatgtt

SEQ ID NO: 4806 - DNA, 600 bp, Bovine  MMBT17009
tcttgtgtaaccttagtctcactgcctctattctctgatcagctgatctgaccaaccacacaatgaaactaaaggtcatccaccctgaggacactcctctcactcctgttattaatgctgttttaaaagaggcagtttctgagtatttcaagacttaacagtagatctgtgaccttgaaatttagttttggacttatctaggatgatctttattaagtcttttcggctataaattactatgccattctggggacgggggctgcagtggggcaggcaggtgggaaaatcttttcctccccrgcagggacaagtccatgtagtaatcatggtggttcttcattgtgtgctccttgaacctctgcctaaaatgtgaggcagacattttagttgccagcttctctgtccgacttgcatttatacccaatcagtgcacagaagagagtgtgtgtgtgtgtggcctgcagcataaagaggcagatggttctgaaggctggtacagagtgggagcttcctgctgaacagatctgtctctgggggtaatgccggctgcccaataaacttatgttttctggcacctatacccattgccaagggtcttcc

SEQ ID NO: 4807 - DNA, 600 bp, Bovine  MMBT16751
atatgacatccttctaaacactgttgacccatttttcagccattgactccctcaccccattccatgccacccctccccgtaaagtagcagtacatagaccacagttctgagctgactcactggattgacccatgatctccacttccacagggccacactgaataatgaccataagctgttgaatgcttagagctcgtgggccaccctcttagaatgccttcacattttgaccctcaaactgggtgatatgcttacaaattgtcaactgtgttaattcccccaggaacttatattgtgacraygatgatgatgaattttgctcatttcactgttaaattgtaaccctacttttaatacattatttctattcctctgactaaccgtccgattagcttaaatatatgaatcttgtaacttctggggaagccagatgtgacctgcggcagtagtgagctgttttagaaaacttagagaactaaggtaattaagttagacgatacatctattttttttgagattccgttaggaaaaaaactggcagaaatatgaaaaactcaacttgtcatacacaagaaaaatatagtttattgacttgtgctg

SEQ ID NO: 4808 - DNA, 600 bp, Bovine  MMBT14355
actcatttctaaactacattaagaaactgagaacaaaagagatttttttttcactaatttcaaaagttaatgaaataagtttcaagcatgattatttctatcttctgaggaaatgtttcctgtaactgcctatgcagtgacacatgataattatttgaaaaccataataatgcggtttcattattctaacyatcttctttcttaaagggccagcactggcttgacagaagtgctcctaaagcctgtggtgccctcttctgacccttcactcaatagggtgagtcaaagcttttgtttctrtaaaaaatatgtaaaaattcgtatctgacacaggttctatgaaagaaatctgactacagctccatggtgtatacttaacaaattcttccaggtttcagttttgaaatttgagaattgttccagagaaaaaataatactgaaatttgaaatgtgatagcaatttcactcaagcaacatgcctgtgtaagaaaatcttaggaaaagaagtgaaaatattatgctaaaatatctaaatgaattacaaaagataactactgaattaaaattcaaacttcatgccataactgtgcgccttaggca

SEQ ID NO: 4809 - DNA, 600 bp, Bovine  MMBT11606
agggtctgtttctggggaacccgactcaccatactactcaacttgtttcacccaggattttgttcatgccttcattcgacagtcttttactgagtttttattatgtgccaacatatcctgaaggtgagtggctaatgattggctagtttgtttcaccaagtgtaaataggcgaggcttctctcygatgcagaatctatcagatttctgggaaatgagaatgcctttagaaaactttagaaaacaatgacacacagaattagatttggcacacaggaatctccttctcaaactacatcatrtattcctcaaggcagaactatagggtgtatttctttgtaaccacattattgttcagactgcattatgccctgaagttactctggacaaagaagtagaagcactgagttctcgtttatctttgtgaagtgaggagaaataggaagagacagcctggtgattaaaatgtgatgtgggtaaacacgggagggggaggttaatgtcaactttgtagaatgaataaaattttggccaactggcaatcctggataagattttcaaaagagggctgaataataatttctcccaagaagttccaactt

SEQ ID NO: 4810 - DNA, 600 bp, Bovine  MMBT22220
tgtgcaggactgattactgaattccagaaacttaaggggtgaaggactatgatcatgagacagaggagatgctttacagatggacagtctttcctgggctcttaaacttgcttaaggaatcgcagagcattccataaccactgaccacactagcatatccaaatgctggtagcaaacctgatggctgggactttggtgaagaaatgatttatttttatttctttatttttggccacagaggatgcaggatcttagttctctgaccagggattgaacccctgttccctacagtrgaagcayatagtcttaaccactggacacagggaaggcccagtgagaaaatgatttaaatgaaactatttaattgaaagaaaaatagtcttgggaattccctggtggtccagtggttaggactccatgcttccactcccagagggcatgggttccatccctggtaggggaattaagtttctacaagtctcagggcctagccaaaaaaagaaaaatggtcttccttcaggattggatgaggcaaaagggaaagtgggatgtagacataaaggagagggtaaacaatgacagaggcatgtgggtagggag

SEQ ID NO: 4811 - DNA, 600 bp, Bovine  MMBT22175
aatagccaggacatggaagcaagctagatgtccattcacagaggaatggataaagaagattggtacatatatacagtggaatattacttagtcataaaaaggaacaaaattgggtcatttatccacagagatgtggatggatctagcctgtatamagagtaatgtcagaaaaacaaatatgtatggatggawtgtatattaacacatgtatgtggaatctagaaraatggtacagatgagcctatttgcagggcaggaatagagatgcaaacagagaatggatatgcggggaggtgggaygaactgagagagtaggattgacatatatgcactacatgtgtaaacagatagctagtgggaagctgctgtatagcacggggagctcakytcagtgctctgtgattacctagaggggtgggatggggatgggttgggaagggaggtccaagaaggaggggcatatgtatacatatggctgattcaggtggttgtacagcagaaactaacacaacattgtaaagcagctatataccccaccgacacactcacataaggcactgagtgagccatcaccagttcgtcttttggtgacttggtgtt

SEQ ID NO: 4812 - DNA, 601 bp, Bovine  MMBT21402
  misc_feature (1)..(1): n is a, c, g, or t
naatcatctgactgggaatacagtaactcgaagcttaaaggtgatgagctgagtaacttttctcttttgcatcagtcggctcatgggcacgtgcacagaggccayggttaaataaatgcgtatttgcactctctgcatatgagcgaatctctgtgtccacagtttctggtgacatacggygttggtgtgtctcatccactcagaygtatttttcagttgtttcactcatgttcagtccacttctttataggagtcartgtttccacaagtttgtggttaaaacaaacaaacaaaaattcckattcattctcaagcttcctgagtaaactgtacactcatacacttcacagatttttcagcttttctcctcttcctatctcttagtcagacctactcatggaaacattatctgcactgtggtcttgaaataaatgaatttcactaaggctgcttgggagaatgaaatctttggtatgttccttatgtaagaaacccatttgcaagaatcacagagaaaatgacagactaatggtctagaatagaatcgctgctacactttctatgatgcagtggcataaaaaacaatcaaagkaaaaccaac

SEQ ID NO: 4813 - DNA, 600 bp, Bovine  MMBT20892
gaattatgatgaaggtattcactgtacaaatgagtcatcagtgtgaagaccaatcattaatatttcatgctccctaatattgaggaaggtgtaagttgtatgctggccttcacacaccaccttattttcattttatttatactgcatttatactgcctgattaaattattttgttatctctctaaacatggcaactttatgcaatttaattttgactaccacatccacaatgtatttccttgatgatgtggtctaagaatctgaatatattcatcgaatcytaaaatgttgaacatttamgttctccttggtatcagtagctcccaatgcaagtatctttaatttgctaaatgctttgcttgtgtttcctaacagtcccaaaccacagaaccagagcattcacccaactgtaattacaattcacaaatcatcttttgtagaacctgatcaagagacattgcaaaataattttcagaaatgcaatttttatcaccttctttactatctatcaatataattcataactgtcattttaaagctttaatttcctggtggatattgcattattgcacacccaggataaaggattaggaaaagcca

SEQ ID NO: 4814 - DNA, 600 bp, Bovine  MMBT11145
caaaataaaaagaactgaagtaactgaaagaagaattaataaaactccagtcaacttaattgcttgttattcttttaaacttatttgggagaagaaaatgagtggttagactcagttttgcaaakaggtctcagttacacatatgattctttactcaatttttataagcggtcaagtttaastcatttwaaaaaaatggttggtaaggggccaaattgcaatttttattggttatatataaggaaggaaatttcaggaaaacctcctcaaaggttttagttaggactctaagctattttstaccaaagctgaacattgtgggcttaattgattttccccttcccttcttgaggaagtgatgatgtgatgtaataaaaaagaaaacaaatatttgtagtgcaaattattgataactaactccaggtatttctatggttattttgtatgttttaacagaatctaacaaattatatctagctcataaatttctaagtgagrtgagtgaaattatgactcggattgtccataattgattgtatagttcatatgaaaataagatagcrttctctagatctgataatgttagagggtatcacagac

SEQ ID NO: 4815 - DNA, 600 bp, Bovine  MMBT08626
ttgggtcttttctaaaggaaatgtctgtttctaaatggaccaggctcatgtgctatgaaaaaagggctgtgaagataggtaacaaaacctggataactaggagaattatgaatgaagtctcttctccttagtgtgagagataacagaatcctatccaactgaccactcagtcaaatcacaacatcacccagttttttgctgatgtgcacagcagggtggtctgagacgtccagcttctgtattttactgaagatctgagatctgattggctgaatgactggctgtaaagcagtgggtcayacgggcagaattyctgaagtatggttataattcagttgcaaaagcattacgcacattgccaccatttggcagagatgaatcagatgcccgctgtgtaccaggcacctgctaggatctgcaaattaaaagttaagtaaaataaaattgtgacygtcaagcaatgcaatgtttatcgaagatgaaakgcttgagtcaagtcattgttggaagggcttgagatggattttgaaaagagtayaaacaaatgaatagattggccaatcatccttacaactttactccaaactgaacaatttttat

SEQ ID NO: 4816 - DNA, 600 bp, Bovine  MMBT08429
actgcaaattcttggtcattgatttcattgctgtagtgtaaatttccttctcctctgtccttaatataaataggaaaaataaccatacttctacagttgaaatagagtacttgacataatacatgacacataggtaactgctcaaaaatatcatggttgttattatgattattactattattaaatactcaacttgacacatattaatgtagagtctgttatatacaagatactactaggtttaggacgcaaagatgaataagaaagtgttctgtgttaaggaacacagagactagtgtrgaggataaaatatgcacaaagctctaccaggcaggatgttacaagttttccataataggaatcagtgctatgcatatattatatgtttatgtttttatatattaagtccctacttaatctcttcttcaggcaatacaaaaacagaaaataaaggaatgcattttcaaacagctttttcttaaaagattagtcattctacacacttaacctttcagatataaattggatgtcacattaaccagcaactgaatagagtgaagaacaattgactttattgttactaatatattagatagaaag

SEQ ID NO: 4817 - DNA, 600 bp, Bovine  MMBT16435
accctagagtcccagagcactgcatccatggtaaccgaggaagcctccagagttgtcaagtgtctcctggtagcaaaatcactctcaggccagaatgtctgatttcaggtctgaatttgaattacagactgtcccaacttaatgatggttccacttaacgatttttgactttactatggtgcaggacagggaagcctggcaygctgcagtcaatggggtcacaaaaagtaggacacaaatgagcgactgaactgaactaatggtgcaaaagtggtattcgattcagtagaaacagaattmtgaatgttgacctttttkggggctagcaataatcttttgtgatactgggcacaggcagggggcacagctcctggtgagccacgtgatcatgagggtaagcaatcgataccattcatctgtacctatacgaccattctgtttttcatttctgatactgtatccaataaattatgtgakattcaacacaagtataaaataggctctgtgttagacggttttgcccaacagtagactaacttaagtgttctgtgcacttttatggtagactaaggagatccaaccagtccattctaaaggaga

SEQ ID NO: 4818 - DNA, 600 bp, Bovine  MMBT18194
cagagacataggggtgcacgtcagtgcccggtcacctggagaggagacagaagccgaggacggtggtgkgggatcccagcttttagcaaggctctcctccaagctgagcctcttcctccgcctgcttcctactgcccttccccctccactggccgcctcggatgatcgcaccgagcagttcaggggctgcagaccctaaactggttctatagagaagagggatctgcccgactagttcttagctgatggtagggtctccagggacggagaccccagcaggacaaagggagagaaaacaasagtgagcggcaggaagacagagcagagaggcagcagggacccggggagacagacattcattcattcgctggttcattcactgtacaagtgtgctgagcacgtccgtgttccaggcgcggaggtggtgccgggtaggggagacacacacctgcctccaaggagacaggaaatgcaaagcaggggggatgtttaacgatcaaagcaggttgttttcaagttgtgtgatgctgggtcagccaactgctctgagcctcattttccccttctataaaatgggaataataataagaacaaccctaa

SEQ ID NO: 4819 - DNA, 600 bp, Bovine  MMBT16338
tgcgtgattgctgtgtcttttttattcagtggatcccttcagtacagtattttgtgcagtcactccgcatgttccagtaattcaccaagctggcaatttgttggtgtgattagggcagtacagcaaatctcagatgcatttaataggcaatctcatgctttttatgttcacagaaaaggtggtgctcaaacctaatgatgtttcagtatttacaacgctcaccattaatggacgtctgtttgcttgcccgcgagagcaattcgattcactggtaggtgtggatggccgccttggagcagygtgtgcaatcagaaaaacttgtctggagcttaattttgcagtcacattgaactcagttgctaaaaaaattcttgaatgctacttgtctttttcttttctccggtctattaggtaagcctcaggtgttcatttgagacgctctgagctttagatttacctttgtggaaattcaccaagttgcactatgattggggcataattcagctttcagaactctttgtagtaattcacctccttgaaatgtccctgatttaaatactgatattaaaaaacatgaacacttagagaccaggatagaaa

SEQ ID NO: 4820 - DNA, 600 bp, Bovine  MMBT14675
ttattgctacataaattatctccaaacatagcatcataaaccaatcatttattttgctcatgattttgtaggttaggaattcagatagagctcagttaagagattctggcttagggtctcttttgcaattgcattcagacagtggttaaagctggaagagcagaggactagagaagtgatggatagccagatagctctccttatttatgtagcctcagaacctctgcatataggaattttacatgggcctgacaactcctgggcagttgaactccttgcatggcagctcaggacttgagyacaagtgatccagtcaacaaaacaaaaactgtctcacatttctgacatagcctcaagaagtcacacagcactacttataccagattctattaattacaaatgaatcacaaccatattgctcaaggaaagaggcacagaccccacctctcaatggaaggagtataaaagacatgttgtaagagaatagcacatgggatggaaaatattgttgataccaactataagcaatgaatttgaaagatacaatctactgtactgcatgattttttttcaaatcccttctttttaaaacatgatatc

SEQ ID NO: 4821 - DNA, 600 bp, Bovine  MMBT20156
taaaactgtgctgctcaagggcaattcagtgactgatgaggtttctgtctggcagccctatcaacttgaacaatggaagtttcttgtgtcctttattcctgggaaatagagaaattctactgactaataaaaatttttcattaaaaggtagaaagaaaattttaacagatggctaatgttttattttgtacattcaataatagaaggtctgtcagctgcaggttgaagttttataatgaacatgatttaatggaaaatcgtttcttcagaatttcaggtagaaattcacaatggaaattmctagtttgactcatagggtgagcgtgggtccatttgacatatttcagaagcttcctagcactcttgaacttaataacctttgaaaataaaatattgaaattgtttaatttcacagattcttcagcactcttgaacttaataacctttgaaaataaaatattgaaattgtttaatttyacagattcttcagtttaaaatggaaacaatggtgttgtcacaaaatgttttggtgaaatttattaataaacttaaagcctcaaattcagatactggattttattatttagttactgcacatac

SEQ ID NO: 4822 - DNA, 600 bp, Bovine  MMBT20672
ctagaaaacctgaggcaaacaattacgccatcagagagccctttaatgaattaaacactgacaagatgatctgtcctgagttttcaaaattaagcatgaatacataagtggctatcgattttttttaaagtactgcctagtacagtatttctttcacatgtcattttatactactccatcaaaacccatgggttagctattattattattctcattgtcactattactcaagcctagtctttaaaatagtaaaagctcacttgcaagacgttctcctcagcaccattaaagagaaatatsaccgcatgatgtaaggcttctgaagatgtcgacaagacacgaaggacttccagcatcactgaacagctaactgcgtcatcgctggcacctttaaatcagaaaaacagatttgcttctcagattttaaaacctttatagcacaaaccatcatggcaagaaaaggagttttcctaccaaggcagcatcagaacatctgcagtagcaccgctctggcatcatcaggtaataactgcacccgccagcagtgacctccaggaggacagggatctttggtttgctcgctgacttactctcagtaac

SEQ ID NO: 4823 - DNA, 600 bp, Bovine  MMBT01422
tagaagctgaagcataatttataatgaactgatagcaaagtttatctactatgactaataatcataaagtagtaacggtaatgtcagtcataataagaaggaactaattagagtggaaaacaatatctctccttaaggaacctcacctagctgagaaaataagacatggagctggctcatcatgtgctaattcatttagcacagggaacccaaataatagcacttgcgtggaatgattgatggacccaggaaataattcacgtggaaactaattgattgaggagaactctcataccaccyttacctgtgacatgagatactttgcagtggcactgggatgctgctgtatgaagcagcccaaagcaattatttcctaggaaatgactccttacatattcttagatgtaagtgtcagctggactgagtgtcgagtaaagaggggaggctggctacagtggtgactgcaaaaggcatgtttttgatagagaaccctgtcactggattgagactatattcctgctgattggcaacgggttgagaaatattttgaagggacttattacagtgtgctaygaggattgaaaaaatcttgcaacagtt

SEQ ID NO: 4824 - DNA, 600 bp, Bovine  MMBT08437
gtaggagcgtcaccctgagttattaagttaatggcttgggtggcacgttatgatttatcagtgaaattactcctctgagggcagagcctataaaaggatggtcagcttataagtcatgctgttgcagagcagcaataattatgggtaagaaggaccctttagaaagcaagcttgttagtaaaataacaatgctctttcctctgtacatgtcatgatgcagtctcatggacagtgccacatcaactatttaaatgcaatgtagtctttgtaaacagcaaatgtgttagtggagatcctgasagattatctgggatgttggattttgctttatggcctctyacggtccttatgctctgcctgaattattaggttggggttttagtttggggcttaaaaagatcaggtcttttctctttgcagtgacatttgattacaggctgacctctgaatgtgcctgaataaaagcaactccaaatttgggaggatgattggattatgataaagctttcaggataactccaagcacctctacagcagccaaaggattttcagagccacagggacacacagtaactggctctgattcttttctctctggct

SEQ ID NO: 4825 - DNA, 598 bp, Bovine  MMBT07159
  misc_feature (1)..(206): n is a, c, g, or t
nnnnnnnnnnnnnnnnnnnnnnnnnnnnnnnnnnnnnnnnnnnnnnnnnnnnnnnnnnnnnnnnnnnnnnnnnnnnnnnnnnnnnnnnnnnnnnnnnnnnnnnnnnnnnnnnnnnnnnnnnnnnnnnnnnnnnnnnnnnnnnnnnnnnnnnnnnnnnnnnnnnnnnnnnnnnnnnnnnnnnnnnnnnnnnnnnnnnnnnnnnnnnncccctcccaccactcctcatcccaaccctctaaaactggagattttgaatacagaactgcactctgggaattacactgtctccatcccccaagsactgcattgtttgttgagtggtgccatcatccatctgtctagtgacttttccaaactatttttgcaagtactatattcctagcttgtgctgtcactgaaatctctgttaccttatctctgtttagttgtgctgcgaaggctgctcaatctctgtaaccacttgagaatatttttcacgtggaaaagagcatgacacaggaacttaagaaagaccccctacctggaaaaagcctcagtggagaggctaaatttcttcctagatgtgaccaaagggagccacaataagagatagtaaaaa

SEQ ID NO: 4826 - DNA, 600 bp, Bovine  MMBT10467
ttttttttttccagttttcaaatgtaagacctgttgcttctctgccttttggctaagatcaagtgtagtatccaaatgtaagccttttaaaactgaggcaatgaacattccagcattctgcttttaaacttgtggaaataaatgaagaccactcaaatgagaacaaaggctgtttattcagagattgctgtagcaagggagtcagccaccatgacttctgtttggcagagattcagtgcaggcaggggtgtgggaaagctttataatggaaagaagttttaggtgtgttctgattggggsttgttggcaaagtggagctggagacaggagctaaatagacataagacatccaagattgatttgaaagcatatctggcttcctcttcttggttctgagttggaagcagaggcaaaaaaaatatagggaagctggtagtcactaagtcctgactatttggggtgataactacagagtttgtagatcagagttgtgttgccacatgtgaggagaaggaaatggcaagccactccagtattcttgcctagagaataccatggacagaggagcctggtgggctgctgtccatagggtctcacaga

SEQ ID NO: 4827 - DNA, 600 bp, Bovine  MMBT04908
gcagaacaggcaaagaacaagcccaatgagtgctacagaccaatggtctgtgtgtgaagcagcctggggacacgccattctctggtcctgcaagctccatgttttgtgcaggcttgaccagggcctgtacttttctttaaagaaggaaaagtccccagattggacagcaggcaaatatattttcaagccaacagtawgtcagctagtactccatggtttgaagccctatgactgaacaaactcttgtactcttcaaagcactttcaataaaaagagaaaatcctgctgtcccttaccccyagcggcccttcatttcagtgctatagagtgggagtactttctacccagctgcagtaatagtcacaagatacactgagactccagctgcagtaatagtcacaagatacattcagacttcactgaagcagaagcctatttgtcacagtgaagaaaagtgtgctgtattgcttggtttataaacagcaagtacccaggaaatactctttgcaaaaagcactataattcaaaatcgccaataattttaatcacattcttctcttactaagtccatatgcccagcttcttttgaagtcagtggga

SEQ ID NO: 4828 - DNA, 600 bp, Bovine  MMBT04244
cctgcatcaattatttggttaagttatttcctaatatttcactctgtaggatgttttatataggacccccatttcatactctgttttaaagagaaaactattttttaacattaaaaaaaaactatttatagaatcatttaaaatatgatgaatggaaaaagagtactcattaaaaaagaggtggggggaattaccagagaactctcatttagaaatctcttcaactaaattatagttgatgtggtaaagaacaaatttaatatgttgcttacagaatataatttgaaacattctagtttyccttatctctgttctaggaaatacgcttcttccaagagttgatttcttgccgcaatttgcatcagagctttctccattgttgtatcttcctttcgtaagcctagattaacctattaatttcaaaagccgtawctttcacaatgtgctaggaaaccaagcctgagcaacyagagccttgcacaaacaattttatcaagtgtgttctgtttatttgccctacttgctccttataattaaattcttatacctctccccagagacaacctgtgtactttgagttgtgcatagggtaactcccat

SEQ ID NO: 4829 - DNA, 600 bp, Bovine  MMBT07012
gatgttactcattcttatatttcctcccctatgctcaagaagtagatgaacatgtgacaattcagttgaattagatgaataggggttgtcttaatgacttcagatgaatttttctctgtagagcaaccaaygggggttcaagaaattctgtaaaactctttgcttggatcgcttggtttggacctcttaaaacagataaatgattcaacttaattttgttctccttacacctccccccgaaccacccccacgccacagatggtgcttgatctctacagaaagatcaatagttcactccayagtggcccctcttagaactgtcttcattcttccttccttccttctgtctctttagcttttagagtataaattagctgagtcttttcagcccttgcaactgcttcgaagacaagcaacctgctgctgagtcctttacaagagcaggtaagttcaaagacagaaaaaccaataaaaagggaggcaaagtggtatccagagaaaagcgcttttgtcaggatgtagccaatcaggattccagtcatctgataagtctgtgtagacagggcaaagggagatgctaactggggagctgggagttgg

SEQ ID NO: 4830 - DNA, 600 bp, Bovine  MMBT03875
aggctcctccatccacaggattttccagggaagaatactggagcaggttgccatttccttctccaagtgaatggtatagatgcatataaaacctagccatgtgaagcatgaagctagaagctggaggaactgaaaaagtctgagtgttaaaaacgacaaagcagaaaataaatcattaactatgtggttaatcaacccactttccgtaagtcaccagctttctcaaaagattacactgctttgattggtttgataattaatgtttcttaaatcaacacagagccaggggttaagctaccrattctgtttgttttgtgcattaattctgcctgtgactggtggctcagtatattaataaatgcttgtccataactgaccctctgttttcttgcttgagaaaccaaagtggacagtggacacacttaaattggattgaacggtgaacttgagttctttctagggacacagtgaaacaagtctattcaactgaccacacactaaacaccatttgatctgccctgaagttaaacattatcatcaaaatgttttgcggagactatgtgagtataatggctatttccataaaacttcagtttttcg

SEQ ID NO: 4831 - DNA, 600 bp, Bovine  MMBT05409
gacgacttccagcgttgatatatgctgactccaagttgccactactcaaatctgccccaattattaacacttcagcagctaagaagaaaggccaagtttctcattgaccttctattcactaaaatgatatacctaatttgcaagaatatacgttttcctcattggaggcaataaaatcattcttgtttttgaatggggaaaagaagcaagcctgtaaagtctcgttgttcctgaattggccctcgagcaacagtgatcactcaccactttgctgggatttttgcttttgccttaatgccrtckttgcagtctatatgacgttagggatgaaaaagtgttctaatattgtcctgaccttttagccctgtggtgggtccagggaatgaggtgttaaagcaatctgcattattgtgctctctgtgccggaacttctctgaatcttgggctaaacagatcccacctcaatgtccataaacactgacattttctacactctcctgcttgtaagaattctgtctgtcagacttaaggttagcaacaaataattatgctgaagtttgggttaattaatgtatgagttgagtccatttgaaatttaaa

SEQ ID NO: 4832 - DNA, 600 bp, Bovine  MMBT07891
gagatcagaaaaaacaaatgaaatgtttccatgtatcagctcctgtcctcaagatcaacgctgtaggctgaaggattcaatgctggtggtcagcaaatggacatgggtgacacgagctatgtgtaaatgcttatgcaaaaattgtatgaagaactgtgagtgcagcaaactgtcccagactaaaggactcagcagttcctgggctaaagaaaacagtgtctatggaagatgctggtccagtacttccatatctaaccatgtttcaacagaagctgaacttcccaatttttatgtaatacrtttcacttttataaacactaatttttatgcacaactcttatattaatttcctcaccatattcactgcactattgttgaatcacacactgctatggatgtgctttttcgagagttcacagtctgacccattatgtaatattagttaccaatgccatttcatttccacccatttgaaaggcaactatggtataattatccatcaactagacttgtttccaggcttacgaattaagaggtagattgaatatctgaggatgaaatgcatgtaacgcataatattcggttgacgatattgaaggc

SEQ ID NO: 4833 - DNA, 600 bp, Bovine  MMBT10530; identical to SEQ ID NO: 4505

SEQ ID NO: 4834 - DNA, 600 bp, Bovine  MMBT12993
atctttccttttagtctcacacccatattctcaattccctctgtaagcagtggatgaattttcaggaaagaytgtagcagggagcctttacatggaccactgtccccctagtttattcaagatgtttatctttaaagacactgtccagtgatcctgttttagatcttagacccaaaggtattcttatatttcccctaatgtccagcattaayagataaattaaatactcctgttctgtgaattcaacagatcacccagggggcaayagaggagagtttatcaagtattttgttaagtatyaagctcyttttaagaatctagwcaagaaatcagaaaagaagttcatgctaacattttgtaatagactggaggaatrcaatgaagataaactcttggagaatataaggaccagacacatgggcaaaactgagaatagtgtggaactctgctgcttgatgcttaagaaaggcagtgctacttaggggataagattttagggtgctgaggtggaaaccttgttctgtttactcccagtattgtcttaggggaagtgattaattttctgagcctttaattgcctgtatctcctcaggtcactgt

SEQ ID NO: 4835 - DNA, 600 bp, Bovine  MMBT12042
taatattactcaattgtgttgagcttttactatatgccaaagcatttctacacgttttatctgcattcataaattaatttaatcatcaagacttgactaggggaggacccacttccaagcttggtcataggagaattgtcaggactcatgtctttactygctgttggccagagacagctcctcactaaatgggcctctccatagcaggctcacagcatggcacctcgatcttctgagagcaatgcctgagagagacagacacagagagagatggaagttaaagaagttaaagtctttgtracatagtctcaggggtgatttcctatcacatcattatcattttttaataaacatttgtttttaatttatctagctgcaccgggtctttgttgaggtatgtgagatctagttccctgaccagggattgcgcccaggccccctgcggtgggagcagagtcttaaccactggaccaccgggcaagtcccatcattttctattcattaataatgagccattaggtccaacccacactcaatgagagagtattacacaagggtgtgaataacaggaggcggggatgacaggtcatcctagaatct

SEQ ID NO: 4836 - DNA, 600 bp, Bovine  MMBT17532
ccgaccagggattgaactggcattccctgcgttggaaggcaacgtcttaatcactggaccacctcgctttggatgtcacatagtatcgcttctgctggactctattggttggggcagtcacaaaggtccacccagtttcaagggtagggaacataaacctcatcactctgtaggaagagtgtcagtaccacactgtaagaagaccatgtgtcatggaagatactgtgatagctatctgaaaaatgcaagctgccacactcccctggactgcttatgaggataaaatgagacagtgatgtraagtacttctcccatgcctggcacatggtgaatgctcagctatagctgtttttggtttttactgatgtggccccttcactttccacctctgccaagaaccacagggatcaccacccacagaggtgctgtgcagtcgcatggccacagaagaccactgacagggatgcacagacacgtgcatgagcctgcacagctgaaacacgtattgtctctcataatcccacctccaagtgcgcactgtctgacctgagtggggcagtgaccctgtggcaggaaggacctgaggctccttaggccctt

SEQ ID NO: 4837 - DNA, 600 bp, Bovine  MMBT14431
gggcctgagattctgaatctcaaacatgttcctgaatgatggagatgacattggtgccacactttgaggagaaaaggcctaaggcaccttccaaagagtcatttctcagctcttcctctatgttcacttctggaaacaacaatgataaccaccaccactttccacttatttcctgaatccaacatgcacattcttagctcaggatgatccccatttttagacaactgctggcttcttctccatttccaagttctccgttttccctctaaatgtcattcaaatctctgtccttcaccaggrcyctttcaccactcagggtctccataatcaatgtctccattgaggtcctatacctttcctgtggttctccttagccatattttttggcaagtatatatagttattgatcttttacatctgtttgtctccttactgaattgtaagcctcttgagcacagggtgtrtgttttgtcacccttttattccccagaccttaaatagagccccgcttattaagaaattgcacagtgtagcgctattaccccagggagacaggggttcaaaccccagctctaccattcaacagctgttggagcytgg

SEQ ID NO: 4838 - DNA, 600 bp, Bovine  MMBT13583
gtttatttttcacaagtatattaggcaacatgtaaaaaaaatcgatgtactctaagctttacttacacagcattcaactactgttgaaaaccaagctcttacaaactcagctctcacaatcactttttactaaatgaaaataatatctcagcattttttcttgactgttaactatgtaagttaacgggcaaagttagcaaccttgaaagtattgttagctttgattctaagcaggctagaaactcaattaagtcaaaatgattttggacaaagtaatctccaggcctgaaaaacaaatcrcatgagctacagttttctccaattccttcacagggtagataagatttttttgaagaaagtaggtgagaagcaggaaggctgctccatccaaactgactgcagcttcagaataagtcaattaaattcaaacctacctctttggggggtgggtagattagacctcaaagggaagagaatgaatggataattacaagcttcctaaattaactgttgaaggagggtgtataggggctatctgccagaaagaaggtaaatcctcctggcaggcattgagcactccttttatggggctggaatcat

SEQ ID NO: 4839 - DNA, 600 bp, Bovine  MMBT20283
ggcactgttacacatggagtttcttattttaatttttttgagccataactgagaacttggcacagaagaaactagagagagaggtctagttcctgtccttggggcttagccctcatcacactgtttactgtgctgaagtgtagtctgggcctcttgccaggaattgtcgcctgtgctgcctaataccaggccaggtatggtgtctttcagccccaagagcagatggagctctgtctatctcgtaacctcacggcaaataacactttcctctttcttcaacttttattttctcactaacasttcattatgggagggtccatatagttaaataggtaaaggtcaggagaaaaaaaaaaatcccactgaactagaagggattagagaggcagttctgaatgataacaggcctgagatgttttctggagtaagcacaggaaaggttatttggattttggtctaagaatggcagtctgcttactcagaatgatagcaaggcttaaggtaggaaaggaccccattacagtatacaattagcttgaaatttaatttttgtctttaaatgaagaaaccctaagatttggggcaggacttgcattcatt

SEQ ID NO: 4840 - DNA, 600 bp, Bovine  MMBT22496
atcttgaagtcttttcaaaaatctaacttggaagtacgacccacaaaaggaaaagaaaatgcagccaatccccttgtatcattcattgactgagagggaaatttccagcagaagttgcaataaaaggttttgagcaagtgtagtagatctgttctgctaacactgagactccctgcaaaagtatgtccttctttcaatcaacaagactagcacgcaggtgagaattaatgagaagatccccgccttcaaggaggccatgagcaaagaactacctcccatgttgactacttttacagaaayaccactgatttgtctctaactcatacctttcattttctccatttgcyaccgggacgttacagtctcactaaacagcagtgtgctctcccccatttcccagattcccttgcagttagattgtaaccacatgactagttctgaccaatgggacatgggaggaagaatgccatttccaaactcagtgatgtaagctcccagtgtggccctccagctttctcyttccaggctgcagtggtcatacaatggcatgatacatcccccagataggaacatctgggaccctgaatcaccacccagaag

SEQ ID NO: 4841 - DNA, 600 bp, Bovine  MMBT21371
aaaaaaagacccagaattgcttcatgttgtccacctcaacaggttgaatgaaactccttgacaatcacttgcgataacaaaatggccactgacctctcacctccaaaggatgcatccccaaccccccacccccaccccaccccaagcaaaacagacaacttgtgaaacagggtgcctgcaaaagtcccaagtttcactctggctggtcacctcgggtgacaagcctctcctgaaccaatcactgtggccaagagatggaatgtactgactggtctaccttaggtcttatttccacccctygagctgccttccctgggaccacagggttccctaaagggaagtgtgaactgcagaaaagaagaaagggaggatgaactgggggggggaattttgtgttggtgattctccccattcattcctctgagagcaaaacgcttctgccccaagaagagagtcgaagtagaactaaaatttcagctgtttcgtaattcccattataaaggccattggcattcttaaagacgatgtggcatggtgggttgcagcagcagggcagaattaaatatccctgcagtaagaaaaaggagggaaagggagaat

SEQ ID NO: 4842 - DNA, 600 bp, Bovine  MMBT19165
gctaacaagtggacagggaaaaaaacaagcaaactagaatttgcacaagaagcttctactgtagatgatcctaatttggaatcaagtaatagtgtgaaataaaacagatgaaggaacagtgcccaacataatagttttgtgtcacacaggaaagataacttggaaataaaaccagattcattgcatgaggttcaagtctaatgaggtgaagctttgagatgttatggaaacattcctcaggaagtattaacatcagaatattagagtgttgtgtttttttagtgctatcttaaagcagtygctctgaacatgaatcactttaaggactttgttccatataaacaattggtcctgctactttagttcacagtgaataatataaaatgttaataaaccttttaaaacttcagaactagcagtatattcaaataatacattttatagcttatggtatttaggaggctaaatcagacattattgtttgtatttaatgctaattgatctgctacaaatgcagaagtccaaactctatttatatggatgttcagttttatatttaaataacttttaatgtttgctagttggtttttttccctgtga

SEQ ID NO: 4843 - DNA, 600 bp, Bovine  MMBT21373
atggcaggaattagatcccatcgtggggccaaggctggacagggaagacaggtgggtttagggattggagctgtccgtttaggagggctgaaaatcagagagggagtacaggtcctggggaagcttctctccacacactgggccaactttggttgaaagcggtgctcagctcacccatgccacagtacgctggtgtgtggatggatgtgttgcagacaggcaaagggtgggtgcccagagagaaggcaggatgctcagggcctctgccagccctccaggacactcattttggcctacagrccccccagcagggagcaggcaagcatgttctgttttggcattaactaggcaagctgtgggaaagtaagcagcaggcttcctaagctgaatagggtctgctccctccacaggccagtgcactgtggttatagagcggtccctccccggcaacaattctctcccctgctccctgcctaaccccccaacycccagctcagcctggagggtcttctccgtggaagaggctcccagatgggtagcatcccatgccttccaggctgggaagccccagtgtcccagaagaggaaacgaaggctgagg

SEQ ID NO: 4844 - DNA, 600 bp, Bovine  MMBT21628
cccagcttacctctcctcgccatctggcgtctgtatggtggtctcagacagatctgccactatcgtagcggacttggcgcctccaacatacccctttccctcacctgtggatcagagcaggtgctcttaagtgtaggaaaagggcccctctcccccggttccccatctcctccccatcacaggcatcaatgcctctcaagtcttccgagcttctttacttccctttttccttcaaggcagcatattccagatggctctttcctccctctgactaccccagctattgtgcatccggaagtrttgcccctgactcaccacaacgttctgggaatgacaaggagtaaataagcggttcccccaacacggtgaacagcaggcggtttccactggggctccagcagccagtctggggtcagggagcaaagggcaggaaaagggtagtctatgagaattcaggaaggacgcacaggagcaagagaagtagaggaggtggggggcaagtacagccaacctcctcccccagctcctgcaccgcacactccctcctacctggcatcgccccgagagggtaggccaccgctcgcaagtccacatctgggc

SEQ ID NO: 4845 - DNA, 600 bp, Bovine  MMBT21370
gaaatgccataatacattcctgtggccctggagaccgaactggtacaggtctcagctgcrtctcaagaaggaggttttccaggcagagtggcccctggagggagtgagctcctccatccctgtgactgtgcaaccaggtgctggctcccttccatcgaggaggccacagatgggattcttaccctgggaaggaattaataatagccaccatttatttcrcctcttccatgtttcaagctctgaactaagcatattattttcattgcttctaaccctcaccacaaaccctagcagtacatrtgacccatttcacagatttcacaatctgaggcccagaagtaaaatgacctacccaaggtcacacagttaggacaggagagcgaagcctagcccctgactacctctggctctgaagctgtgctctcccttcagcatgcctgcagctatatagtctcctggaaggaatgtgattctaagtttaagtcagagccaggactgaacgttgacctggtacagatgtaagagtgggcattgaaagacaagctattctcatattccacaggactcccaggagaaacctcaggtaaagtatgcaccagc

SEQ ID NO: 4846 - DNA, 600 bp, Bovine  MMBT22831
aacaaattattttcccttcaggaaaaaagggtggcattcctaaagaggaaaaatgaaacaagttcagctaaagtttgcctagagggacagccattaaagagaaaatgttaccgttctctacatctamaatccaccaagagattctggaacacagtgaacaagacaactgctacatcagtgattaccccaagtggggaggttgatcagctgagttttaaaggattttacagagaaagtcctcatcttcaatgtttgtgagagacagggttttcattaagattgtttataaaccatgagaakactcatttatcttgtttgtctgtaggctccttgagtgggtctattattttgggggacaaagcatccgggcagtttaaagtcatctcctggggaaagtgactatattcaaagagaattcagtgctcctccccagctggagtagcgtcacagacagggggttgaggacagagtgataccactggaaggcccttgagccagggaggggagcttctggggggtgtttgggagaaggcttacaagcagaacaagactggggccacacttgctcgtccctttctgctcatacagctcagaagatga

SEQ ID NO: 4847 - DNA, 598 bp, Bovine  MMBT18672; identical to SEQ ID NO: 4515
  misc_feature (1)..(210): n is a, c, g, or t

SEQ ID NO: 4848 - DNA, 600 bp, Bovine  MMBT08326
ccatcgctccaagcctagaaagggcacgttcatgagtttcccagtcccccttcgggggaggcagtggtgttcagactcctgtcctccagatgcctatgagaggcacacgaaacacagtggactcttaagggcatggactctaccacccacaagtgtgtgatcttggcaagtgactctgctcctctggactgcagtttcactatatgtaaatttggaatgaaagctgtacccatctcatagggtgtatgcaccacgaggattaagggagtcaaatatgtcaagtgctggagagccgtcacrcaggagacactgtagaagcggtagctgttgttactgtcagcagagggaatgggagcttggtttgtcaataaacgagagactmacttcctgatgagctgttaaggagttgagggaggcatccttatctttgggttgacmctaactcagagagaaaggtagaaaggggctttggggtcttggctacactgggaggaagagtgggccatcgcaccccatggggggacaggcagatttattagaccaggtggccccattcgcttctgtctctctattcaaggatcaccgggcttttcttgagaa

SEQ ID NO: 4849 - DNA, 600 bp, Bovine  MMBT09982
cactgcaccagtttctgtggctcttagttacaaagattatttgtggcaagtgtatatgtaacaacacgatgcaggtgtactgtgattatttgctgttgtttcatttgtttgtgggacaaaatagatatgattaaactcatgcttcaaaccaacacacattgtatccacacaatgccaatttgggggagtcactcctaggttttggtataaataaataaaaatgtaatctattttcattctatttattactcactaataggatcacaagtggaataaaatgcctccgtgtttctcacactrggatttttttttaagtccccatctactcaagggtgagattgagactcgagtgggatcactctctgatattctcttctcagaagggttttgttttccttccctcatccacggtaataacctctgattctatttcataatgagattgaaaggaagcaactatataagctgagagtgaataattgtattattctttaaatgagcccattgaaatggcaaggaagggacattataaatcttttttactgggatatatattgagcttttaaaggcctaagtctgtgaaatgctccaccttattac

SEQ ID NO: 4850 - DNA, 598 bp, Bovine  MMBT16062
  misc_feature (1)..(11): n is a, c, g, or t
nnnnnnnnnnntgcggccgcttcgtacaagtgggctgcgtgcagcttcggcgctttgttatccatccctgctcggcgacagcgcagcctcccaggctggctgtctcaggctccttcccaccgccttatctctgtcttgcaggcaaagtatgaaaatgacaatttaagataacacataatggagctaatctttcttccaaagataagattttaaaacctggagtcactgcatatttgtgggctggtgaattaaatataaaaatagccaacacaatctcagaggcagaagaaggtttctagyaactcccmtctgttgtgggcgcttttgaataatgtctgctcctcacacgcggctcatttatttctctaggacctaattgagttttgctgtttccatattgtctgttttccaggctgccttggatccgacagctgtaaacaagcgagcagaagcctcagacccagcttaatgagctccgcgctggttcccgctgctcggctccggctctccgcacgcgtcagtgaggcccatggggctgcaggctctgaaatcaggctgggctgtaaggaatggaaaattccccaagaaagcgacagag

SEQ ID NO: 4851 - DNA, 600 bp, Bovine  MMBT16154
tataatagaattcatgcttaaataataaggtaacagctttggactgtgatgttttaaatgttttattgaaatgtagactgattaacaggcaagattcttcttctaattattttaattataggctcttaatgacaagaagctgtagaaataaaaacatgttaaaatttcatttttaatgaagtggcacctggaagtcccaacttctccaaagcaagtagggataatctattgttacatagaaacaaaccacatatacagagaggttaagatgttcgttgagggaacaggattatttatgcmccaatttctctgaatgtaagtagaacgaacaagacgtatagtgggataaaaagacactggactcagtcaagggctgatttttagccatggccctggtaaactgcttgtctgtgtgactatctcacctcttttggtcccagtttttcacaagtaaaatgcagaagttgaaattaatgagcttttcaatattcatagcagcactgtttacaataggacatggaagcaacctaaatgtccatcaacagaggcatggataaaagaggatgtggtacatatatacaatggaatattgctcagcca

SEQ ID NO: 4852 - DNA, 600 bp, Bovine  MMBT02774
aatgtgatcgttactataacccatacttctgtaacagttcagattgccactggcgtttgcgctctggaaaataatctggaatgtggatttttttaaaatcctgaatacactttttcatttcttcttccacacttagcttctcacagactttctttttggaaagattggtttcccgggacttgctgatgagcgtctgaaagagttcactgtttctacgtttgtctggtgggggcatccattgcacaggtgcttttttggaaggacgatccaaagttaaagtgttaggttggtgagctgtcrcctgctgggcactgggtgggttgtcctggggagtgctcgcctctgagtggctgtcgcaactggaagtggagagctcattacaggaagtcccactctcacttcctttatccgtgactttgtcatgtttcctatcttcgtgttcttgtttaggtgacactattttctgaggtggtcctaaaaaggagaaaagaagtagaaaaactgagtaagaagtgggaaggtcaaattaaataagctttatatatattttattttcaaccacaaacatttaagaaaaatgtggtctgctaccctaattta

SEQ ID NO: 4853 - DNA, 600 bp, Bovine  MMBT01044
atctgtatgttttgcttatttttgcagaggactctttgggatactattaataagaagaaagcatcagcctcttcaagacataacaagaaggcttcaaatattcaaaatgtgaataaaacatttaatgtttcccccaaagctgacagagttaggagcccactacaagcctgtgagaatctggctacaaatggaaactgttccccaccagaaagcaatcctttaatccttgaagaaaataaactccccatatcacctatcagccccgcttcccaagagtgccacagggggacctgcttgccrcttcctgttcgtcgatctacaacctacacatccctccctgcttctgaaaatgggggactggtgaaagcagacggtgccaacactgcagaagattttcattttaatgagaaaggcataactgaaacctcctttgactccatagacaacgttaatagtcaaattgaagagaatggtaaacttactcttaccccaaattattcttcaagtttgaacatcacacaaagccaaggacattttctaagtccggattcttttgtgaataatagccatgcatctaataatgaaccagaattcgtgaag

SEQ ID NO: 4854 - DNA, 600 bp, Bovine  MMBT01338
gctcacaagtacaactaccatagaacagatggcaaaacctttacacactagactttatatctgaaaaggagacactttattttaaaattgccacttgggagcataaagtgctctcatgagaaaaacacattttgcactttaaaggcagtccataaaataaaggcagatgtttaaatgacttcttaattaacacaaagaaaacatttacctacaccgtggggatgaagcactgcaactgatgaaccctttaaaatagcctgggacatgttatatgtaaagcaataccaaacattttatctyttaggatttttcgatattttgttaaaaaaaaaaaaaaaagagtgattattatttacccataattcattaatttgaaactcttgtaaaaataatagctgttattttctagtttgattaacatgctttttgaagtaaaatgtgcttgagtctaaaacatactatagtcacaaacaaatattatcttaaattaattatatggttatgttgcccctttagcactgaacacttctattacccaaggaaacattcattaagggattagagagatggaaatagttctcaaaatatcttcacataaaa

SEQ ID NO: 4855 - DNA, 598 bp, Bovine  MMBT06242; identical to SEQ ID NO: 4504
  misc_feature (1)..(35): n is a, c, g, or t

SEQ ID NO: 4856 - DNA, 600 bp, Bovine  MMBT04032
taacttacttctgtgcccttttacatcatgtgaatgaaaccaaaatcttagtttagatataatgcctagtaattttttacatttttttccaaaagcagagaaaatatgttggtttaaattgcaagtgtatttggtcctagatgggatggtggtttagtcactcagtcgtgtctgactcttaggaacccayggactgtagaccttcaggctcttctgtccatgggatttcccaggaaggaatactggagtaggtgtcatttccttctctagggaaacttcccgatgcagggagtgtaccckgctctactgtactgcaggaggattcacaaccgactgagccaccaaggaagccctagaaggaataacaatgtgattaaatagaaaagtggatataagcatgcattttcccttcaaaaatcagaatggaacacatcataataaatatgattctaggggaagttgggatcgcattactaaaaataaaaaaattccttacaatgactaaaagaagagaaagaatttgcagacttgctaggaagggggtgataattgcttcagtgartttrataatgtaaaacccttcaaaaatactagtggttt

SEQ ID NO: 4857 - DNA, 600 bp, Bovine  MMBT03185
cagcttttttgaagcttgttgtgaggaagacttttaccaattaagtgaaaaaaagatgagagattgacagattgaaggctgttattcgaattttaaatatagttttaattcattgtgggagtacaagtacgtctcattgaaaatttagaatatagataagcaaagataaaaaattttaaatcattgtttccttaaaaactgagattatactgtacatattgttttataacctgtttcttttctactcttgctctgaacattttcccataccttattcttaaaagcatttctaaaaattgmctagtattctatttttggaatattrtagagttactcctactagtttttacttgtcattgatcatttaggatgttttccactttttcagcttatataatagcaccaaatgaaaatttgtggtcataatcattttatgtccatctgaaatccaaacttcacctcggagcctccacatccttgagctttggtggcatgatcttgaccctccccagttactgtcctccccacaacacgcattcctcagttgctgccctgagctccaccacatctgcatcaagggtgtctggcagctcagcgttg

SEQ ID NO: 4858 - DNA, 600 bp, Bovine  MMBT06239
aaggttgataggattctcagagacaataaacacacgtttatttacaaactattgtaaatttacaaactgttatctttgctaaatcctgatggtttagggcagaaaataaggaatttacataaaactaactctcattcctggaacactgtccttgggtagttccagattttggaactgttacccttaatctaaatggcatgcaatatctaatagtcaataagcccctaatatttctaagtattccgatttattgccattggcttagaattttaaatcttaattatcttgactttccatttmttctttctcgtttcccttcccaccctgcttgatgtttccaagacccctagcatgcacatcgtgttctctacttgattcagttaaacatttcaattttagagttctttgcacagctgcttctgcagtttggataattagtgttccataaaatgaaaataaacagagaaagatacctccctccctctaatgttctttaaagaaattctacataaaaactgctgtgatatatatatatatatatatatatatacacacacatacatacgtgtatcagtgaccactatctactggtttccatgc

SEQ ID NO: 4859 - DNA, 600 bp, Bovine  MMBT09142; identical to SEQ ID NO: 4511

SEQ ID NO: 4860 - DNA, 600 bp, Bovine  MMBT04130; identical to SEQ ID NO: 4514

SEQ ID NO: 4861 - DNA, 575 bp, Bovine  MMBT05944
ctctaaggcagaagcatatttcataagattcatatgatttacaaacaagaattttaagttctaattagtactttcagggtgattcatgcaaaagaaagatttctgtttgcatgtcaatggaaacctgctgccttagaaacccttgctaaactatatgattaatctttgtacatgaggaaggatttattttttcttattcccagtcctcaggaacagattcaacaactttagtgtcttagacatttaaatatccatgagtcttgcactatgttttaggtttggtatgtggtatgaggagayaaaaactcctagtaagagttccttttctttaactataatatcccaactgtttctctccttgtgtgttcctttcctactttcctctctcttgtctttacctcctgtccctttctccttcctctgcctttccttctgcagtattatatttcttttagaaatatttatggccagtacttgttgtatggtaactttgattttgttagctcttaagctagggtgacttattttcacactgtgtaattattaattaaaaagatttattttaaagttcttta

SEQ ID NO: 4862 - DNA, 600 bp, Bovine  MMBT05260
gtaatctagaattaggaagaaagaacattcagacagacacgtcaacacagaagagaagcaaggaaacattcatgatgatgaagaagggaaattccaggatgacaaagggtccccagagttgaaaaaatcagtacaaatgagagccctttgactcaaaagacaggtatgtcaagggcatgttatcatcatgatacctgctctaacagtatgtttttaatctgacagaatgactaaaagaattgcgtcttcaaaacaaaggagcatgtcattacagagggagtcatgagacataggaagtarggaacccaaataaggagaaaagcaaagggaactctaaggatgaaggacaaagggaaatcccaggatgacagttattaaacagacctagagatgtatcaaaacaaaacagaaacaaggaattggaagacagctgatgtgatttatctagtgaaaaattagttctcacagaaaggtttttgttaattgttaaacaattaacaatacatacatacaaagaaaataaatgtttatattaatgaaaaacaaaagtaccaaaaaaatcatcatagtacatcatattttcaagggcataataatact

SEQ ID NO: 4863 - DNA, 600 bp, Bovine  MMBT05478
atatagtgtgacctggtcgctgcttgccatcagtcttacaccactgtctctcactcctgtgtcattgtcaccctggtcttctgagaatatagcaagctcttttgagcctctgagctttaatgcttctggcttcatctgctctgaagtacttgctcttccttgattccacccattgctgctgctttcattatttaggtcagagcttaaaggccttcccttcatggatgccttttcttcactctacttaaagtagatggcagaatttccttctccctattttcagagaaaaattgtgctgcraaattaaacagacaaagaagacttgttcaagactattgcaataaaggagagagattgaactccattgaaacaaaaagcagggaagtgtttaagttcggaggtgagctaatggatagcttttggaggaaatttggtgagaagggttgtcaggccagctgtgttcactgggtgaagttaggctcctaccctccaacagagcctggaagatagggtatctatttttcttgatcattgcagttcaaagggatacccccggtccttgatgaagacatccttgggttgtaaagctggtcagaggct

SEQ ID NO: 4864 - DNA, 601 bp, Bovine  MMBT07760
  misc_feature (1)..(1): n is a, c, g, or t
ntacctctgtgtccctgatgcctgccatacgccagggtctccgagatgtgctaagctgactgacccagctggggtcctgtctctcacagccagctgatactagccttgtggccctctgmcctctgctatgggctgtttcttctgcaagcgccgtccttgttcatccacgttttttttgtttttttttttttcctgattattggaaatttcctcatatttgaccactttgactcctgggcccatgaagaggctagcagcattggaacggggcctggggggccacaccagatcgaggccaccrtgtcttttcatgaagttgtgtttgtgcaaactaggtgggggctgtcagagctgagagttctctacagggccccttgccctctccctgcctccagtactcctgcaaccagcagggacccgtgggggtgagaggggagccaggctacgttgattatctttgacatcagttgttaatataattttgacattaagcctcccccttaccagctccggggtagctctgtgtccaggctctggcgtggggagctgtggggagcctctcagccctggatctggcctggctgggaggcggcctgggaag

SEQ ID NO: 4865 - DNA, 600 bp, Bovine  MMBT00824
accaatgacaatattttctgagcttctttgagaataattcactttttgttattaaattattttcctcaaaatccttctcaatttgcagtattaagacaaaagaaacttttgtttctttgaaaactttggacatacattaaattttaataaaacaacaagaatgtccagaactgattctaagttaaataatacaaaaaacagtatccaaaagagttttgaagaaataataaaagcagtgtctgaagaccatttctgaccttcactagccttgtgatagtaaacaaatcatttgaaattcawacattaaataaataaatggaaacagatttaatactttgattcattggcaaatgcaatttgaagagttttaaacttctgaaaaatacagtgatttaattctaatttatatttttaaggctctaactatattaaatgataaattcccaagagattttataaaaggacttttcctgagctttgctattcaaaaaatgactaattatcaaactacattatgttagtgacacaaatagaattttgtaatatgctatacatataaaatttaatacaaaaaatgcagatggcttacagttttattct

SEQ ID NO: 4866 - DNA, 600 bp, Bovine  MMBT18186
cagcctggtatcccgggagcaggctcttcactgggtggcagaggtaaagctgaccccttcgctccacctgggtctggagacacaagagtcgggggatggggtgctgccataaggcctgactaaatcacctccaagtttcctcacacaggaagatcctcgtgtgggtgctgggaggggcttggcagcctcttcacacacctgctctgtttacagaccctgaagattgcattagctctggccagcagactgggagatcccatctacgattctaccatcactgagagtatggatgacatgctyaggtgggcccccaggagcaggaccctgagtactacagaggtggcggcaggtgtggggaaaggatcaggtgaagcagctggtggagcagtaaggcctgcagtcccaagtaaatgtcagctcaaccccagctcacagtgtgacgcaagttgcctcactgtgtgcctcagtttccccatctgtacaacaaggtggcctacttcatacagctctcaaattttcttgatcccagtgagtgaaagttgctcagtcatgtctgactctttgcaaccccatggactgtagcctgccaggctcctctat

SEQ ID NO: 4867 - DNA, 600 bp, Bovine  MMBT16506
tagaggcactgatatactgatatgtacaattttttggtctcacacaaacataattatggactgtaaggggtatgctggctttctatggttttagtttaytatgtttttgagggtacatarggcataatagaaaaaaacaaacagaaaacaaaatatcaccttcccaacccaattagcaacatctcatactatgtaaaaattaaatcatctttaagcactttaaaaacaaaaacttccactgtccttggtctgtgggcagagcctccctggagaaaacaaccttatactaggtacaatgtractatctgtgttgcaaatttatgtaaaatacagatgcagcatacagagataccataggccaggaaacaaaaatggacatatgagggtccgttgtctgaaaggaagttaagagctagggtcaatattaactccaaagattaataaatcttgatagtctctatgcaactaaaaaggatagacttacattattatctttggtttgcacagggctttaagtatttagaaggtaggttgactctaggaagcagaatatccattttttcaagcgttgcctttctaaaatgtaatgagcggcagttt

SEQ ID NO: 4868 - DNA, 600 bp, Bovine  MMBT19278
tcaaatggagcactgagaaatgaatacagactccctgctggatccaacttgttaagagtgcagtgtgggtccctcagtccatacacactctacagcctaagatgctgttcatacagcctaaaattgagccagattatcagacaactgtcaaaatgcaactgtggagcaaagagacagacatatgtgaaaagtcatacaggctggcgaaaacccctccttaccctgttccatcaatgacccaaacrsactcacttgccagatttataactctcctgaaatacagatgaaaagtagaaggtyggagggctgtcactatgattacagccttttgccataacccataaccctcattttatttctttccagttttgtttttaaattgttttctttctctgattactaaagaaatgttcaatttagaaattttaccacattcccatccagaaatatttatcaactgataagaatctaaaaactagcatttttatgcattcaaccaaagaaaataaataattatccacatatctgtttgttgctatttggtcactaagttgtgtcggactctttgccaccccatggactatagcccgccaggctcct

SEQ ID NO: 4869 - DNA, 25 bp, Artificial sequence  Extension Primer
  Primer
atggtttcatgaatattgattagct

SEQ ID NO: 4870 - DNA, 25 bp, Artificial sequence  Extension Primer
  Primer
ttcctcatcagagctagagagcaga

SEQ ID NO: 4871 - DNA, 25 bp, Artificial sequence  Extension Primer
  Primer
ttaaatattcacagttcctaagtct

SEQ ID NO: 4872 - DNA, 25 bp, Artificial sequence  Extension Primer
  Primer
caaagttgtcttagtttctcttccc

SEQ ID NO: 4873 - DNA, 25 bp, Artificial sequence  Extension Primer
  Primer
gtaatctgatctcatggtcttcttg

SEQ ID NO: 4874 - DNA, 25 bp, Artificial sequence  Extension Primer
  Primer
ctgtgaggtggtttgattcacatca

SEQ ID NO: 4875 - DNA, 25 bp, Artificial sequence  Extension Primer
  Primer
actcaggagtgtacacagatcctat

SEQ ID NO: 4876 - DNA, 25 bp, Artificial sequence  Extension Primer
  Primer
gtccatggctcttttccacaaaaac

SEQ ID NO: 4877 - DNA, 25 bp, Artificial sequence  Extension Primer
  Primer
atcctccttgcatggctgcaggggt

SEQ ID NO: 4878 - DNA, 25 bp, Artificial sequence  Extension Primer
  Primer
attttgaatattatttagacttgcc

SEQ ID NO: 4879 - DNA, 25 bp, Artificial sequence  Extension Primer
  Primer
gaacaggcctgttaggatgaccagc

SEQ ID NO: 4880 - DNA, 25 bp, Artificial sequence  Extension Primer
  Primer
tcttcctggaccaggaattgaaccc

SEQ ID NO: 4881 - DNA, 25 bp, Artificial sequence  Extension Primer
  Primer
aagcggccttggtctgtaaatgcac

SEQ ID NO: 4882 - DNA, 25 bp, Artificial sequence  Extension Primer
  Primer
agggaaacttcttttcagtattggt

SEQ ID NO: 4883 - DNA, 25 bp, Artificial sequence  Extension Primer
  Primer
acttcacaatacatttttagaatgc

SEQ ID NO: 4884 - DNA, 25 bp, Artificial sequence  Extension Primer
  Primer
tgaccttggcaagtgattcaactac

SEQ ID NO: 4885 - DNA, 25 bp, Artificial sequence  Extension Primer
  Primer
gtagtggactgtgttcctaggcaag

SEQ ID NO: 4886 - DNA, 25 bp, Artificial sequence  Extension Primer
  Primer
tgtcattgtcgttaaagagactgtt

SEQ ID NO: 4887 - DNA, 25 bp, Artificial sequence  Extension Primer
  Primer
agggatcctcaggaagtcagctgtc

SEQ ID NO: 4888 - DNA, 25 bp, Artificial sequence  Extension Primer
  Primer
atgaagcagattttcaggaaggagg

SEQ ID NO: 4889 - DNA, 25 bp, Artificial sequence  Extension Primer
  Primer
ttcggcgctgtttgaaggttttctc

SEQ ID NO: 4890 - DNA, 25 bp, Artificial sequence  Extension Primer
  Primer
tggttctccccacttccgctggtgc

SEQ ID NO: 4891 - DNA, 25 bp, Artificial sequence  Extension Primer
  Primer
accagcgggagcagcacaagcagaa

SEQ ID NO: 4892 - DNA, 25 bp, Artificial sequence  Extension Primer
  Primer
ttgctgtggttctttaaaatatact

SEQ ID NO: 4893 - DNA, 25 bp, Artificial sequence  Extension Primer
  Primer
tgataaattaaagttgcatgctgat

SEQ ID NO: 4894 - DNA, 25 bp, Artificial sequence  Extension Primer
  Primer
tgccttttaacctcttctccaagtt

SEQ ID NO: 4895 - DNA, 25 bp, Artificial sequence  Extension Primer
  Primer
aatgtagtgtttactgggttaaaag

SEQ ID NO: 4896 - DNA, 25 bp, Artificial sequence  Extension Primer
  Primer
tgagccactccgaggcattctaata

SEQ ID NO: 4897 - DNA, 25 bp, Artificial sequence  Extension Primer
  Primer
caatttaatgaaatatgtcatatct

SEQ ID NO: 4898 - DNA, 25 bp, Artificial sequence  Extension Primer
  Primer
atctacaaattttgtgttaatctcc

SEQ ID NO: 4899 - DNA, 25 bp, Artificial sequence  Extension Primer
  Primer
gatctcccatgtttcccagtctcat

SEQ ID NO: 4900 - DNA, 25 bp, Artificial sequence  Extension Primer
  Primer
gacctgactgggctaaggatacact

SEQ ID NO: 4901 - DNA, 25 bp, Artificial sequence  Extension Primer
  Primer
gattatgtaagatactcatgactga

SEQ ID NO: 4902 - DNA, 25 bp, Artificial sequence  Extension Primer
  Primer
tctaaaactttactaaagtggaaaa

SEQ ID NO: 4903 - DNA, 25 bp, Artificial sequence  Extension Primer
  Primer
tgtaaggattaattgtgatggcaca

SEQ ID NO: 4904 - DNA, 25 bp, Artificial sequence  Extension Primer
  Primer
gccacagcgccctcaaaaagagcca

SEQ ID NO: 4905 - DNA, 25 bp, Artificial sequence  Extension Primer
  Primer
gacaacccatcttccatgatgcttc

SEQ ID NO: 4906 - DNA, 25 bp, Artificial sequence  Extension Primer
  Primer
caacctccagaacccacagtcagac

SEQ ID NO: 4907 - DNA, 25 bp, Artificial sequence  Extension Primer
  Primer
ataagatgctctgggagccctaagc

SEQ ID NO: 4908 - DNA, 25 bp, Artificial sequence  Extension Primer
  Primer
tctgcctgccctctctgtggcccct

SEQ ID NO: 4909 - DNA, 25 bp, Artificial sequence  Extension Primer
  Primer
gagtcacctgtctcttcctggacct

SEQ ID NO: 4910 - DNA, 25 bp, Artificial sequence  Extension Primer
  Primer
aaccgaaatactggctacaatgcat

SEQ ID NO: 4911 - DNA, 25 bp, Artificial sequence  Extension Primer
  Primer
tctttggtttccccatttgtcatca

SEQ ID NO: 4912 - DNA, 25 bp, Artificial sequence  Extension Primer
  Primer
ataaaatatgttgtgaatgccctaa

SEQ ID NO: 4913 - DNA, 25 bp, Artificial sequence  Extension Primer
  Primer
aggggttttgttgtagcaagagtca

SEQ ID NO: 4914 - DNA, 25 bp, Artificial sequence  Extension Primer
  Primer
acacataaaaacaaaattaccaaaa

SEQ ID NO: 4915 - DNA, 25 bp, Artificial sequence  Extension Primer
  Primer
aagttcatggagttttggcagttca

SEQ ID NO: 4916 - DNA, 25 bp, Artificial sequence  Extension Primer
  Primer
gaatcaagccctataaaacttactc

SEQ ID NO: 4917 - DNA, 25 bp, Artificial sequence  Extension Primer
  Primer
ttaaacagtggaaaccgttttatct

SEQ ID NO: 4918 - DNA, 25 bp, Artificial sequence  Extension Primer
  Primer
cctctcattatgaagattaccctcc

SEQ ID NO: 4919 - DNA, 25 bp, Artificial sequence  Extension Primer
  Primer
taaaaacaatcgacaccaagacata

SEQ ID NO: 4920 - DNA, 25 bp, Artificial sequence  Extension Primer
  Primer
tatcttagctcggaagtaagtattg

SEQ ID NO: 4921 - DNA, 25 bp, Artificial sequence  Extension Primer
  Primer
aaaagtgtactgttaatcattattc

SEQ ID NO: 4922 - DNA, 25 bp, Artificial sequence  Extension Primer
  Primer
acatgtttcgttatcacatttattc

SEQ ID NO: 4923 - DNA, 25 bp, Artificial sequence  Extension Primer
  Primer
tcttgtttaaagttaggcaccgcat

SEQ ID NO: 4924 - DNA, 25 bp, Artificial sequence  Extension Primer
  Primer
tgggaggatggttagatggctgcat

SEQ ID NO: 4925 - DNA, 25 bp, Artificial sequence  Extension Primer
  Primer
tcaagaccccagttgctccagctca

SEQ ID NO: 4926 - DNA, 25 bp, Artificial sequence  Extension Primer
  Primer
tattgtgtacagggctgccgtcaga

SEQ ID NO: 4927 - DNA, 25 bp, Artificial sequence  Extension Primer
  Primer
ggtccctattaaccatccaagtaat

SEQ ID NO: 4928 - DNA, 25 bp, Artificial sequence  Extension Primer
  Primer
gctggggaaacgtgtcagaaatatg

SEQ ID NO: 4929 - DNA, 25 bp, Artificial sequence  Extension Primer
  Primer
tggtacaggtaagataaaccatttt

SEQ ID NO: 4930 - DNA, 25 bp, Artificial sequence  Extension Primer
  Primer
aggaagccaggaaggtaaggcgaga

SEQ ID NO: 4931 - DNA, 25 bp, Artificial sequence  Extension Primer
  Primer
ggctccttcagccagaatagaaacc

SEQ ID NO: 4932 - DNA, 25 bp, Artificial sequence  Extension Primer
  Primer
gagggtctcaacaggctcagagggt

SEQ ID NO: 4933 - DNA, 25 bp, Artificial sequence  Extension Primer
  Primer
ggagagctggagtgaggccggcagg

SEQ ID NO: 4934 - DNA, 25 bp, Artificial sequence  Extension Primer
  Primer
ttaactgttccctggggcagtgttc

SEQ ID NO: 4935 - DNA, 25 bp, Artificial sequence  Extension Primer
  Primer
cataagttttgtttgagccccasaa

SEQ ID NO: 4936 - DNA, 25 bp, Artificial sequence  Extension Primer
  Primer
gtgatcaaagacattctcttttaat

SEQ ID NO: 4937 - DNA, 25 bp, Artificial sequence  Extension Primer
  Primer
atttgggtaagagaggtggcaaact

SEQ ID NO: 4938 - DNA, 25 bp, Artificial sequence  Extension Primer
  Primer
ggggaggctgacacagaactggtta

SEQ ID NO: 4939 - DNA, 25 bp, Artificial sequence  Extension Primer
  Primer
tctttccttccctcttccttctttc

SEQ ID NO: 4940 - DNA, 25 bp, Artificial sequence  Extension Primer
  Primer
acaccgagagctctttgactgaact

SEQ ID NO: 4941 - DNA, 25 bp, Artificial sequence  Extension Primer
  Primer
tcacacgagtctgatgaattatgat

SEQ ID NO: 4942 - DNA, 25 bp, Artificial sequence  Extension Primer
  Primer
tggaaatgttccccagctgactttg

SEQ ID NO: 4943 - DNA, 25 bp, Artificial sequence  Extension Primer
  Primer
aatcataaaagcaacactcaagaaa

SEQ ID NO: 4944 - DNA, 25 bp, Artificial sequence  Extension Primer
  Primer
tgtatgctccttgaatttttaacag

SEQ ID NO: 4945 - DNA, 25 bp, Artificial sequence  Extension Primer
  Primer
tccttctattagggctgccatatac

SEQ ID NO: 4946 - DNA, 25 bp, Artificial sequence  Extension Primer
  Primer
cagataacttccggagacaaggcta

SEQ ID NO: 4947 - DNA, 25 bp, Artificial sequence  Extension Primer
  Primer
ccagctgttcaaagtctattttgtt

SEQ ID NO: 4948 - DNA, 25 bp, Artificial sequence  Extension Primer
  Primer
aagcagcatgcaaatttaataggag

SEQ ID NO: 4949 - DNA, 25 bp, Artificial sequence  Extension Primer
  Primer
agttcacaacaaaactgagcagaag

SEQ ID NO: 4950 - DNA, 25 bp, Artificial sequence  Extension Primer
  Primer
gaaaggagggtttcttgtaaatggg

SEQ ID NO: 4951 - DNA, 25 bp, Artificial sequence  Extension Primer
  Primer
aatgtctaccgatgccgggtgtgga

SEQ ID NO: 4952 - DNA, 25 bp, Artificial sequence  Extension Primer
  Primer
tatctacaatcagtaaaatccctgg

SEQ ID NO: 4953 - DNA, 25 bp, Artificial sequence  Extension Primer
  Primer
tcctgttaagatttaaaagccagat

SEQ ID NO: 4954 - DNA, 25 bp, Artificial sequence  Extension Primer
  Primer
cccttagtgcctagtaaagtgtctc

SEQ ID NO: 4955 - DNA, 25 bp, Artificial sequence  Extension Primer
  Primer
caacagcaacgatgacaaaaactct

SEQ ID NO: 4956 - DNA, 25 bp, Artificial sequence  Extension Primer
  Primer
cagagagaaattctactggtaaacc

SEQ ID NO: 4957 - DNA, 25 bp, Artificial sequence  Extension Primer
  Primer
attattaaggaaatacagaatatca

SEQ ID NO: 4958 - DNA, 25 bp, Artificial sequence  Extension Primer
  Primer
gtgtccactccgggaaaaagggaat

SEQ ID NO: 4959 - DNA, 22 bp, Artificial sequence  Extension Primer
  Primer
tacaacctgtatcctatcaaac

SEQ ID NO: 4960 - DNA, 25 bp, Artificial sequence  Extension Primer
  Primer
aaggaagagctttggtaataccctc

SEQ ID NO: 4961 - DNA, 25 bp, Artificial sequence  Extension Primer
  Primer
aagaagaaataaaccttgcattcgg

SEQ ID NO: 4962 - DNA, 25 bp, Artificial sequence  Extension Primer
  Primer
gtggcagtcagaagtagtagggtca

SEQ ID NO: 4963 - DNA, 22 bp, Artificial sequence  Extension Primer
  Primer
cattcttcagagatgccaaacc

SEQ ID NO: 4964 - DNA, 25 bp, Artificial sequence  Extension Primer
  Primer
gtctcatccattttaaatgatgcct

SEQ ID NO: 4965 - DNA, 25 bp, Artificial sequence  Extension Primer
  Primer
atcttttaatgtaaaatactgggaa

SEQ ID NO: 4966 - DNA, 25 bp, Artificial sequence  Extension Primer
  Primer
ccctcagagtctgtgcctgtaattc

SEQ ID NO: 4967 - DNA, 25 bp, Artificial sequence  Extension Primer
  Primer
cggcaagtctccagctcactttctc

SEQ ID NO: 4968 - DNA, 25 bp, Artificial sequence  Extension Primer
  Primer
tgaggtggaggcgccagcaccgtaa

SEQ ID NO: 4969 - DNA, 25 bp, Artificial sequence  Extension Primer
  Primer
agcgggcactgtatttctgaacata

SEQ ID NO: 4970 - DNA, 25 bp, Artificial sequence  Extension Primer
  Primer
gggtaagaagtaggctacaccatga

SEQ ID NO: 4971 - DNA, 25 bp, Artificial sequence  Extension Primer
  Primer
gaggcggcctccaaggagtctgtac

SEQ ID NO: 4972 - DNA, 25 bp, Artificial sequence  Extension Primer
  Primer
gtgcagaaacagaagaactgggtga

SEQ ID NO: 4973 - DNA, 25 bp, Artificial sequence  Extension Primer
  Primer
tttatgattccatcttcctctactt

SEQ ID NO: 4974 - DNA, 25 bp, Artificial sequence  Extension Primer
  Primer
gtcagaatggattagggtcaagggt

SEQ ID NO: 4975 - DNA, 25 bp, Artificial sequence  Extension Primer
  Primer
ttgaagtacttctgcttcaggagga

SEQ ID NO: 4976 - DNA, 25 bp, Artificial sequence  Extension Primer
  Primer
aggcacgcaagagagctggggaagc

SEQ ID NO: 4977 - DNA, 25 bp, Artificial sequence  Extension Primer
  Primer
ccagcatgcacacagccaagcagag

SEQ ID NO: 4978 - DNA, 25 bp, Artificial sequence  Extension Primer
  Primer
tcaagttttggccttgaccttggac

SEQ ID NO: 4979 - DNA, 25 bp, Artificial sequence  Extension Primer
  Primer
tttgggtgccagtggctcttccggt

SEQ ID NO: 4980 - DNA, 25 bp, Artificial sequence  Extension Primer
  Primer
tcttcatatagtcagtgtgtcaagg

SEQ ID NO: 4981 - DNA, 25 bp, Artificial sequence  Extension Primer
  Primer
tcaaaatacttagctgcttttgtta

SEQ ID NO: 4982 - DNA, 25 bp, Artificial sequence  Extension Primer
  Primer
ttctccaaaaccgcaattctattca

SEQ ID NO: 4983 - DNA, 25 bp, Artificial sequence  Extension Primer
  Primer
tcggttttgcttgtttgttctaaaa

SEQ ID NO: 4984 - DNA, 25 bp, Artificial sequence  Extension Primer
  Primer
ttgaaccaatgcatagataataaga

SEQ ID NO: 4985 - DNA, 25 bp, Artificial sequence  Extension Primer
  Primer
aattacgacatcatactccaatgta

SEQ ID NO: 4986 - DNA, 25 bp, Artificial sequence  Extension Primer
  Primer
gaataatataccaggaagaataaga

SEQ ID NO: 4987 - DNA, 25 bp, Artificial sequence  Extension Primer
  Primer
aataatgataacaaaaacaaatata

SEQ ID NO: 4988 - DNA, 25 bp, Artificial sequence  Extension Primer
  Primer
tttaactagatttgccagttttcaa

SEQ ID NO: 4989 - DNA, 25 bp, Artificial sequence  Extension Primer
  Primer
agtagaggcagttttgagaggttca

SEQ ID NO: 4990 - DNA, 25 bp, Artificial sequence  Extension Primer
  Primer
gaaaaatcacctttacctcaccaca

SEQ ID NO: 4991 - DNA, 25 bp, Artificial sequence  Extension Primer
  Primer
ttactttagcacataatgaattgta

SEQ ID NO: 4992 - DNA, 25 bp, Artificial sequence  Extension Primer
  Primer
gattcaaacctaggttagtagcctc

SEQ ID NO: 4993 - DNA, 25 bp, Artificial sequence  Extension Primer
  Primer
grtgaacagatagttctaagtgttt

SEQ ID NO: 4994 - DNA, 25 bp, Artificial sequence  Extension Primer
  Primer
cgaagaaaatcagcctttcataaaa

SEQ ID NO: 4995 - DNA, 25 bp, Artificial sequence  Extension Primer
  Primer
aatagcctgtagtaagtttatggtg

SEQ ID NO: 4996 - DNA, 25 bp, Artificial sequence  Extension Primer
  Primer
ctgcagctggtggaaggaggtagtg

SEQ ID NO: 4997 - DNA, 25 bp, Artificial sequence  Extension Primer
  Primer
attgaaagagatactgataaacttc

SEQ ID NO: 4998 - DNA, 25 bp, Artificial sequence  Extension Primer
  Primer
ttgtcttctatgaacatttttttcc

SEQ ID NO: 4999 - DNA, 25 bp, Artificial sequence  Extension Primer
  Primer
ttacccactcttctgcttccaaact

SEQ ID NO: 5000 - DNA, 25 bp, Artificial sequence  Extension Primer
  Primer
agaattgttggattatatggtaatt

SEQ ID NO: 5001 - DNA, 25 bp, Artificial sequence  Extension Primer
  Primer
tcctcaggagagcccttgtgcagtg

SEQ ID NO: 5002 - DNA, 25 bp, Artificial sequence  Extension Primer
  Primer
cccagaggtaagtatggctgtcatc

SEQ ID NO: 5003 - DNA, 25 bp, Artificial sequence  Extension Primer
  Primer
taatttagctaatggtgaacaaaat

SEQ ID NO: 5004 - DNA, 25 bp, Artificial sequence  Extension Primer
  Primer
gtgtaagtatagttatttactcata

SEQ ID NO: 5005 - DNA, 25 bp, Artificial sequence  Extension Primer
  Primer
agtgactcttccctggcagcagtgc

SEQ ID NO: 5006 - DNA, 25 bp, Artificial sequence  Extension Primer
  Primer
ttgtcctctattctaaatctaccag

SEQ ID NO: 5007 - DNA, 25 bp, Artificial sequence  Extension Primer
  Primer
ctttggaaaactctgtctgtaatag

SEQ ID NO: 5008 - DNA, 25 bp, Artificial sequence  Extension Primer
  Primer
tcttatagagggctgcataaaattc

SEQ ID NO: 5009 - DNA, 25 bp, Artificial sequence  Extension Primer
  Primer
taccatgccagttgatacatcagtc

SEQ ID NO: 5010 - DNA, 25 bp, Artificial sequence  Extension Primer
  Primer
aatttcatttgtgtttacatttatc

SEQ ID NO: 5011 - DNA, 25 bp, Artificial sequence  Extension Primer
  Primer
tgaacaattcaataggaaagagagt

SEQ ID NO: 5012 - DNA, 25 bp, Artificial sequence  Extension Primer
  Primer
ttcagcccccagaaatcattcccac

SEQ ID NO: 5013 - DNA, 25 bp, Artificial sequence  Extension Primer
  Primer
gaatcgacagcttctgttaccaaat

SEQ ID NO: 5014 - DNA, 25 bp, Artificial sequence  Extension Primer
  Primer
aaaccaatagctcttaatggaggaa

SEQ ID NO: 5015 - DNA, 25 bp, Artificial sequence  Extension Primer
  Primer
cagggcctggcatacggttgggact

SEQ ID NO: 5016 - DNA, 25 bp, Artificial sequence  Extension Primer
  Primer
gattgagattttggaggcatgggtc

SEQ ID NO: 5017 - DNA, 25 bp, Artificial sequence  Extension Primer
  Primer
cccaggaatatggctagaaaaatca

SEQ ID NO: 5018 - DNA, 25 bp, Artificial sequence  Extension Primer
  Primer
gaattgggttatggtcacggaaaat

SEQ ID NO: 5019 - DNA, 25 bp, Artificial sequence  Extension Primer
  Primer
gcatctgggagaagagcattttagg

SEQ ID NO: 5020 - DNA, 25 bp, Artificial sequence  Extension Primer
  Primer
tgatcctgtgtggtttgtttgctct

SEQ ID NO: 5021 - DNA, 25 bp, Artificial sequence  Extension Primer
  Primer
cccaggtttacgtcacctttgccgt

SEQ ID NO: 5022 - DNA, 25 bp, Artificial sequence  Extension Primer
  Primer
gttatgtagaggggagaaagatacc

SEQ ID NO: 5023 - DNA, 22 bp, Artificial sequence  Extension Primer
  Primer
gattaacataatttctcttcca

SEQ ID NO: 5024 - DNA, 25 bp, Artificial sequence  Extension Primer
  Primer
atctcatctgtaaagctctgacatg

SEQ ID NO: 5025 - DNA, 25 bp, Artificial sequence  Extension Primer
  Primer
tgagaagacacctgagaatgaagac

SEQ ID NO: 5026 - DNA, 25 bp, Artificial sequence  Extension Primer
  Primer
cttaatgaacagcacataatgaaaa

SEQ ID NO: 5027 - DNA, 25 bp, Artificial sequence  Extension Primer
  Primer
acagatcgggaacattcactctgag

SEQ ID NO: 5028 - DNA, 25 bp, Artificial sequence  Extension Primer
  Primer
ccccagtccaaggaccctgcctgtc

SEQ ID NO: 5029 - DNA, 25 bp, Artificial sequence  Extension Primer
  Primer
kcgatgccgaccaggaccaggaagy

SEQ ID NO: 5030 - DNA, 25 bp, Artificial sequence  Extension Primer
  Primer
gcccatccattccccaacatcacac

SEQ ID NO: 5031 - DNA, 25 bp, Artificial sequence  Extension Primer
  Primer
aatcggtttcctgggctactctgtc

SEQ ID NO: 5032 - DNA, 25 bp, Artificial sequence  Extension Primer
  Primer
acttactctgatatcccaatattat

SEQ ID NO: 5033 - DNA, 25 bp, Artificial sequence  Extension Primer
  Primer
atattttcaggaagctaagattttt

SEQ ID NO: 5034 - DNA, 25 bp, Artificial sequence  Extension Primer
  Primer
atgggaaaataccacataaaaattg

SEQ ID NO: 5035 - DNA, 25 bp, Artificial sequence  Extension Primer
  Primer
gaacagttcttgggaatccaagatt

SEQ ID NO: 5036 - DNA, 25 bp, Artificial sequence  Extension Primer
  Primer
cttaacaacacaggatggtttcttt

SEQ ID NO: 5037 - DNA, 25 bp, Artificial sequence  Extension Primer
  Primer
tttccactgcacctgttattctttg

SEQ ID NO: 5038 - DNA, 25 bp, Artificial sequence  Extension Primer
  Primer
aaacatccacaagtgacttaagaaa

SEQ ID NO: 5039 - DNA, 25 bp, Artificial sequence  Extension Primer
  Primer
cttcaaataatatactaaacagaca

SEQ ID NO: 5040 - DNA, 25 bp, Artificial sequence  Extension Primer
  Primer
ctcctgcctttcaacaggggccaga

SEQ ID NO: 5041 - DNA, 25 bp, Artificial sequence  Extension Primer
  Primer
aaaccatgatgtctaagaatcagtc

SEQ ID NO: 5042 - DNA, 25 bp, Artificial sequence  Extension Primer
  Primer
ctgatctccagaactctatgagaat

SEQ ID NO: 5043 - DNA, 25 bp, Artificial sequence  Extension Primer
  Primer
tcactccaacggtgggtttagacac

SEQ ID NO: 5044 - DNA, 25 bp, Artificial sequence  Extension Primer
  Primer
tacatattcatacaattaaaatttt

SEQ ID NO: 5045 - DNA, 25 bp, Artificial sequence  Extension Primer
  Primer
caggcagcctgtccaggaacctaaa

SEQ ID NO: 5046 - DNA, 25 bp, Artificial sequence  Extension Primer
  Primer
cttcctttactgtgtccaggacaaa

SEQ ID NO: 5047 - DNA, 25 bp, Artificial sequence  Extension Primer
  Primer
tctgtgggtccaaagtctatgcttt

SEQ ID NO: 5048 - DNA, 25 bp, Artificial sequence  Extension Primer
  Primer
gttagcctggatgtgtgttcgctgg

SEQ ID NO: 5049 - DNA, 25 bp, Artificial sequence  Extension Primer
  Primer
ttcattcagctgcatttaagtgagc

SEQ ID NO: 5050 - DNA, 25 bp, Artificial sequence  Extension Primer
  Primer
tccaggcagagtcagcccctttccc

SEQ ID NO: 5051 - DNA, 25 bp, Artificial sequence  Extension Primer
  Primer
aagggcagggtcaagattctggcaa

SEQ ID NO: 5052 - DNA, 25 bp, Artificial sequence  Extension Primer
  Primer
agaagcaggcggaaccccacagcac

SEQ ID NO: 5053 - DNA, 25 bp, Artificial sequence  Extension Primer
  Primer
gggcatgactccagcccctcatgac

SEQ ID NO: 5054 - DNA, 25 bp, Artificial sequence  Extension Primer
  Primer
agatatagtcaggtaaagtaatttt

SEQ ID NO: 5055 - DNA, 25 bp, Artificial sequence  Extension Primer
  Primer
aagtctaccgtctaccaatgggatc

SEQ ID NO: 5056 - DNA, 25 bp, Artificial sequence  Extension Primer
  Primer
tactagacacagactatgacatatt

SEQ ID NO: 5057 - DNA, 25 bp, Artificial sequence  Extension Primer
  Primer
gcaactgcaaacaggctatttgaga

SEQ ID NO: 5058 - DNA, 25 bp, Artificial sequence  Extension Primer
  Primer
aaggctatgaagcaggaaccaagaa

SEQ ID NO: 5059 - DNA, 25 bp, Artificial sequence  Extension Primer
  Primer
agtcagagaaaccttaactatgaac

SEQ ID NO: 5060 - DNA, 25 bp, Artificial sequence  Extension Primer
  Primer
tataaaacatttaataatttatttt

SEQ ID NO: 5061 - DNA, 25 bp, Artificial sequence  Extension Primer
  Primer
ctataattctatcttcctattaaaa

SEQ ID NO: 5062 - DNA, 25 bp, Artificial sequence  Extension Primer
  Primer
ttagtttctaggtgatagagttttt

SEQ ID NO: 5063 - DNA, 25 bp, Artificial sequence  Extension Primer
  Primer
ttgcatgcttgcagacaaaggtaac

SEQ ID NO: 5064 - DNA, 25 bp, Artificial sequence  Extension Primer
  Primer
aattccaaaaacagacttttcagta

SEQ ID NO: 5065 - DNA, 25 bp, Artificial sequence  Extension Primer
  Primer
ctggatattgggaaacaaacagtga

SEQ ID NO: 5066 - DNA, 25 bp, Artificial sequence  Extension Primer
  Primer
aaaactctatgtgtagtagaaaaag

SEQ ID NO: 5067 - DNA, 25 bp, Artificial sequence  Extension Primer
  Primer
attggacctgagttgtaagatcagt

SEQ ID NO: 5068 - DNA, 25 bp, Artificial sequence  Extension Primer
  Primer
taaaagtgcagatttttctcttatt

SEQ ID NO: 5069 - DNA, 25 bp, Artificial sequence  Extension Primer
  Primer
aagttaatagcaaacattcatacag

SEQ ID NO: 5070 - DNA, 25 bp, Artificial sequence  Extension Primer
  Primer
aaggcttaggaataaatacattttt

SEQ ID NO: 5071 - DNA, 25 bp, Artificial sequence  Extension Primer
  Primer
aagacacacgtaaaatgctttattg

SEQ ID NO: 5072 - DNA, 25 bp, Artificial sequence  Extension Primer
  Primer
aataaggatgtgaaaaacgtgcagt

SEQ ID NO: 5073 - DNA, 25 bp, Artificial sequence  Extension Primer
  Primer
atttcatatatttagctaaatcatt

SEQ ID NO: 5074 - DNA, 25 bp, Artificial sequence  Extension Primer
  Primer
catcacctgacattggaaaccagaa

SEQ ID NO: 5075 - DNA, 25 bp, Artificial sequence  Extension Primer
  Primer
accagcgggaatgaggtttgtgtgc

SEQ ID NO: 5076 - DNA, 25 bp, Artificial sequence  Extension Primer
  Primer
caactccagttcgttcatactctat

SEQ ID NO: 5077 - DNA, 25 bp, Artificial sequence  Extension Primer
  Primer
caggggaccctgccctggaccacgt

SEQ ID NO: 5078 - DNA, 25 bp, Artificial sequence  Extension Primer
  Primer
ggaagccccctagagtttcagtgtg

SEQ ID NO: 5079 - DNA, 25 bp, Artificial sequence  Extension Primer
  Primer
tgttcccagtgggcttcttatcccc

SEQ ID NO: 5080 - DNA, 25 bp, Artificial sequence  Extension Primer
  Primer
aactagcttgttaggaaaaaggctt

SEQ ID NO: 5081 - DNA, 25 bp, Artificial sequence  Extension Primer
  Primer
tgctggttttgtctaactctgactt

SEQ ID NO: 5082 - DNA, 25 bp, Artificial sequence  Extension Primer
  Primer
tcaagtaccagggatggtcattaag

SEQ ID NO: 5083 - DNA, 25 bp, Artificial sequence  Extension Primer
  Primer
tctgatggaacatgtgatgttaaaa

SEQ ID NO: 5084 - DNA, 25 bp, Artificial sequence  Extension Primer
  Primer
atatgattgcaaaaatgctgattat

SEQ ID NO: 5085 - DNA, 25 bp, Artificial sequence  Extension Primer
  Primer
tgccagactgagccatcagggatga

SEQ ID NO: 5086 - DNA, 25 bp, Artificial sequence  Extension Primer
  Primer
actccttgcacttcatacaactcaa

SEQ ID NO: 5087 - DNA, 25 bp, Artificial sequence  Extension Primer
  Primer
aacattccacagctgacttggaaag

SEQ ID NO: 5088 - DNA, 25 bp, Artificial sequence  Extension Primer
  Primer
tctccaagcagttaaataatttact

SEQ ID NO: 5089 - DNA, 25 bp, Artificial sequence  Extension Primer
  Primer
tttgtaatgcatacatttttaaaga

SEQ ID NO: 5090 - DNA, 25 bp, Artificial sequence  Extension Primer
  Primer
ttcagaagcagcttgaataggctct

SEQ ID NO: 5091 - DNA, 25 bp, Artificial sequence  Extension Primer
  Primer
gtttatagtagtaatagcaagcatt

SEQ ID NO: 5092 - DNA, 25 bp, Artificial sequence  Extension Primer
  Primer
taggatattcatccaaaccaaatct

SEQ ID NO: 5093 - DNA, 25 bp, Artificial sequence  Extension Primer
  Primer
tatatacatacctggtgtgtgccta

SEQ ID NO: 5094 - DNA, 25 bp, Artificial sequence  Extension Primer
  Primer
aaacagatatattagtgaaatgtac

SEQ ID NO: 5095 - DNA, 25 bp, Artificial sequence  Extension Primer
  Primer
ggtatacacaggaaaaaaatacatt

SEQ ID NO: 5096 - DNA, 25 bp, Artificial sequence  Extension Primer
  Primer
catctgaaatacgtatacagagtta

SEQ ID NO: 5097 - DNA, 25 bp, Artificial sequence  Extension Primer
  Primer
ttggggctgcttgggcagcagtgac

SEQ ID NO: 5098 - DNA, 25 bp, Artificial sequence  Extension Primer
  Primer
atcttcatggacataaagtgctcac

SEQ ID NO: 5099 - DNA, 25 bp, Artificial sequence  Extension Primer
  Primer
ctaccccagatctacttactcaaaa

SEQ ID NO: 5100 - DNA, 25 bp, Artificial sequence  Extension Primer
  Primer
aggtgattttcctttgaagagtgag

SEQ ID NO: 5101 - DNA, 25 bp, Artificial sequence  Extension Primer
  Primer
ccttcttgggrctgtcctcgggctg

SEQ ID NO: 5102 - DNA, 25 bp, Artificial sequence  Extension Primer
  Primer
gtggcctctctgcccacggcaggac

SEQ ID NO: 5103 - DNA, 25 bp, Artificial sequence  Extension Primer
  Primer
ccagagagcaacccccagccccacg

SEQ ID NO: 5104 - DNA, 25 bp, Artificial sequence  Extension Primer
  Primer
ctaagtacagccgctggtgtccccc

SEQ ID NO: 5105 - DNA, 25 bp, Artificial sequence  Extension Primer
  Primer
tgtccaaaagatgcactttggcccc

SEQ ID NO: 5106 - DNA, 25 bp, Artificial sequence  Extension Primer
  Primer
tctcactaaccagccacccaaaccc

SEQ ID NO: 5107 - DNA, 25 bp, Artificial sequence  Extension Primer
  Primer
ttgtcagcaaactccagattggcag

SEQ ID NO: 5108 - DNA, 25 bp, Artificial sequence  Extension Primer
  Primer
agggtcaaaagcggctggtgctttc

SEQ ID NO: 5109 - DNA, 25 bp, Artificial sequence  Extension Primer
  Primer
aaattttgtaatccagtgggtgaca

SEQ ID NO: 5110 - DNA, 25 bp, Artificial sequence  Extension Primer
  Primer
ataagcaactcaggaggtacacaaa

SEQ ID NO: 5111 - DNA, 25 bp, Artificial sequence  Extension Primer
  Primer
ggagcaaattatgcaggtgtgagta

SEQ ID NO: 5112 - DNA, 25 bp, Artificial sequence  Extension Primer
  Primer
ggggagctacagaagaattgttaga

SEQ ID NO: 5113 - DNA, 25 bp, Artificial sequence  Extension Primer
  Primer
atgattctctctggaattctccaaa

SEQ ID NO: 5114 - DNA, 25 bp, Artificial sequence  Extension Primer
  Primer
cacatggaaataacttcttggcttt

SEQ ID NO: 5115 - DNA, 25 bp, Artificial sequence  Extension Primer
  Primer
gagattactaatattttccttaaaa

SEQ ID NO: 5116 - DNA, 25 bp, Artificial sequence  Extension Primer
  Primer
gcaaatcactgtactctggctttac

SEQ ID NO: 5117 - DNA, 25 bp, Artificial sequence  Extension Primer
  Primer
tgcttgtatgtccacaaaaggttac

SEQ ID NO: 5118 - DNA, 25 bp, Artificial sequence  Extension Primer
  Primer
atagattaaaatgcttacatgttag

SEQ ID NO: 5119 - DNA, 25 bp, Artificial sequence  Extension Primer
  Primer
ccccacaattgcatgtttaagagtc

SEQ ID NO: 5120 - DNA, 25 bp, Artificial sequence  Extension Primer
  Primer
ggacaacagcattggctcaacttta

SEQ ID NO: 5121 - DNA, 25 bp, Artificial sequence  Extension Primer
  Primer
tgactgaaggaacagaagctgtgac

SEQ ID NO: 5122 - DNA, 25 bp, Artificial sequence  Extension Primer
  Primer
ctgaggcagagttatttgtatgctt

SEQ ID NO: 5123 - DNA, 25 bp, Artificial sequence  Extension Primer
  Primer
gtacgaataatgctcaaaaaaaaaa

SEQ ID NO: 5124 - DNA, 25 bp, Artificial sequence  Extension Primer
  Primer
tctctgataacagctatgtttactc

SEQ ID NO: 5125 - DNA, 25 bp, Artificial sequence  Extension Primer
  Primer
ttattccgtttgctggaattaagta

SEQ ID NO: 5126 - DNA, 25 bp, Artificial sequence  Extension Primer
  Primer
gctcaactattaatttttactcctt

SEQ ID NO: 5127 - DNA, 25 bp, Artificial sequence  Extension Primer
  Primer
ttcaggcatatgacctcacgtaatt

SEQ ID NO: 5128 - DNA, 25 bp, Artificial sequence  Extension Primer
  Primer
tccagaggaagaatgacaagttata

SEQ ID NO: 5129 - DNA, 25 bp, Artificial sequence  Extension Primer
  Primer
tttttaaaataccagaaaactgtta

SEQ ID NO: 5130 - DNA, 25 bp, Artificial sequence  Extension Primer
  Primer
agcaaacgcggggatgtattcaata

SEQ ID NO: 5131 - DNA, 25 bp, Artificial sequence  Extension Primer
  Primer
actcttttgaaggaagccctcatta

SEQ ID NO: 5132 - DNA, 25 bp, Artificial sequence  Extension Primer
  Primer
ttatgcactttcttgaaaccctctg

SEQ ID NO: 5133 - DNA, 25 bp, Artificial sequence  Extension Primer
  Primer
ctatctattgcttgattacattttt

SEQ ID NO: 5134 - DNA, 25 bp, Artificial sequence  Extension Primer
  Primer
ggtggtaaaaggacacatatgaata

SEQ ID NO: 5135 - DNA, 25 bp, Artificial sequence  Extension Primer
  Primer
ttctgttctttcaccgaagggatac

SEQ ID NO: 5136 - DNA, 25 bp, Artificial sequence  Extension Primer
  Primer
aaaataatcccgtaatagaagagag

SEQ ID NO: 5137 - DNA, 25 bp, Artificial sequence  Extension Primer
  Primer
tgtggtagcatggtgatgggagacc

SEQ ID NO: 5138 - DNA, 25 bp, Artificial sequence  Extension Primer
  Primer
agttctaattcacacaaatgccatg

SEQ ID NO: 5139 - DNA, 25 bp, Artificial sequence  Extension Primer
  Primer
gatcagattgtaatggaaatccctg

SEQ ID NO: 5140 - DNA, 25 bp, Artificial sequence  Extension Primer
  Primer
gactagggcatactttcttgctctt

SEQ ID NO: 5141 - DNA, 25 bp, Artificial sequence  Extension Primer
  Primer
tacttctgacatttcatacagaatt

SEQ ID NO: 5142 - DNA, 25 bp, Artificial sequence  Extension Primer
  Primer
atggaagaatatggtttctacccag

SEQ ID NO: 5143 - DNA, 25 bp, Artificial sequence  Extension Primer
  Primer
gattcatgtgtaaagtatttcatgc

SEQ ID NO: 5144 - DNA, 25 bp, Artificial sequence  Extension Primer
  Primer
taccatcccaggaacaagactttgc

SEQ ID NO: 5145 - DNA, 25 bp, Artificial sequence  Extension Primer
  Primer
tcaacacatgctcctcttaaaaaat

SEQ ID NO: 5146 - DNA, 25 bp, Artificial sequence  Extension Primer
  Primer
atttctcaggctttgccttggtcac

SEQ ID NO: 5147 - DNA, 25 bp, Artificial sequence  Extension Primer
  Primer
aacaacagcagtgataacgattgag

SEQ ID NO: 5148 - DNA, 25 bp, Artificial sequence  Extension Primer
  Primer
tcatraacttgtaggaagaagactt

SEQ ID NO: 5149 - DNA, 25 bp, Artificial sequence  Extension Primer
  Primer
cctttcggaagagctggcctccaga

SEQ ID NO: 5150 - DNA, 25 bp, Artificial sequence  Extension Primer
  Primer
gcagatactgtgctttttaaaaact

SEQ ID NO: 5151 - DNA, 25 bp, Artificial sequence  Extension Primer
  Primer
aaagcttttaactatctcgctaaac

SEQ ID NO: 5152 - DNA, 25 bp, Artificial sequence  Extension Primer
  Primer
tcagtgaagcctgtaagccgttgtt

SEQ ID NO: 5153 - DNA, 25 bp, Artificial sequence  Extension Primer
  Primer
tagccccccaaaacttccaattcat

SEQ ID NO: 5154 - DNA, 25 bp, Artificial sequence  Extension Primer
  Primer
ggaaaatagattaaagcagttaaat

SEQ ID NO: 5155 - DNA, 25 bp, Artificial sequence  Extension Primer
  Primer
tgattctcccactgttggacacttg

SEQ ID NO: 5156 - DNA, 25 bp, Artificial sequence  Extension Primer
  Primer
acagtaacagaaatattaacacaca

SEQ ID NO: 5157 - DNA, 25 bp, Artificial sequence  Extension Primer
  Primer
gtgaggcatgggccggctgggaagg

SEQ ID NO: 5158 - DNA, 25 bp, Artificial sequence  Extension Primer
  Primer
ccctttcttccattgtttcctctct

SEQ ID NO: 5159 - DNA, 25 bp, Artificial sequence  Extension Primer
  Primer
tcttctagcccaagggatttcgttt

SEQ ID NO: 5160 - DNA, 25 bp, Artificial sequence  Extension Primer
  Primer
gctcactacacttccaaaggaaaag

SEQ ID NO: 5161 - DNA, 25 bp, Artificial sequence  Extension Primer
  Primer
ggacttttctgtactcagtatcttc

SEQ ID NO: 5162 - DNA, 25 bp, Artificial sequence  Extension Primer
  Primer
gatggcctgtgttggctcaggattc

SEQ ID NO: 5163 - DNA, 25 bp, Artificial sequence  Extension Primer
  Primer
cttcccctttygttaggccatcagc

SEQ ID NO: 5164 - DNA, 25 bp, Artificial sequence  Extension Primer
  Primer
cccaaaccacagtctgagtcagaaa

SEQ ID NO: 5165 - DNA, 25 bp, Artificial sequence  Extension Primer
  Primer
gaagaagtgtgtgtgtgtgttgggg

SEQ ID NO: 5166 - DNA, 25 bp, Artificial sequence  Extension Primer
  Primer
ctgtgtgttttcaatttgtgtggga

SEQ ID NO: 5167 - DNA, 25 bp, Artificial sequence  Extension Primer
  Primer
ccatgtgtcacaactactgagccag

SEQ ID NO: 5168 - DNA, 25 bp, Artificial sequence  Extension Primer
  Primer
cctgtgtttctggcatccttccccc

SEQ ID NO: 5169 - DNA, 25 bp, Artificial sequence  Extension Primer
  Primer
ttaggccagcggtctgaatgggaca

SEQ ID NO: 5170 - DNA, 25 bp, Artificial sequence  Extension Primer
  Primer
ttttggatttggaggggcacaggca

SEQ ID NO: 5171 - DNA, 25 bp, Artificial sequence  Extension Primer
  Primer
aatttgagggcagaatgctgagggc

SEQ ID NO: 5172 - DNA, 25 bp, Artificial sequence  Extension Primer
  Primer
cttatatcacagacatagaaacaaa

SEQ ID NO: 5173 - DNA, 25 bp, Artificial sequence  Extension Primer
  Primer
tacaatgtttgcttatctttattat

SEQ ID NO: 5174 - DNA, 25 bp, Artificial sequence  Extension Primer
  Primer
cagactgttgctgatgttgcagtta

SEQ ID NO: 5175 - DNA, 25 bp, Artificial sequence  Extension Primer
  Primer
accacccctgccaaactctagcaaa

SEQ ID NO: 5176 - DNA, 25 bp, Artificial sequence  Extension Primer
  Primer
caagtaaataactttctggcaagag

SEQ ID NO: 5177 - DNA, 25 bp, Artificial sequence  Extension Primer
  Primer
attcatcaaatatttagggaagtag

SEQ ID NO: 5178 - DNA, 25 bp, Artificial sequence  Extension Primer
  Primer
gcttattaagccagtgttcagtcta

SEQ ID NO: 5179 - DNA, 25 bp, Artificial sequence  Extension Primer
  Primer
aaactaatggaagtacaacctcatc

SEQ ID NO: 5180 - DNA, 25 bp, Artificial sequence  Extension Primer
  Primer
atttatagtctatataaatgcacag

SEQ ID NO: 5181 - DNA, 25 bp, Artificial sequence  Extension Primer
  Primer
tagttgacaacactgcattgtataa

SEQ ID NO: 5182 - DNA, 25 bp, Artificial sequence  Extension Primer
  Primer
catccagttgaatatgggttaaaga

SEQ ID NO: 5183 - DNA, 25 bp, Artificial sequence  Extension Primer
  Primer
attgatcttttggtattacctttca

SEQ ID NO: 5184 - DNA, 25 bp, Artificial sequence  Extension Primer
  Primer
tgtggccttatctccctcctgcctt

SEQ ID NO: 5185 - DNA, 25 bp, Artificial sequence  Extension Primer
  Primer
ttctgtctccatggacttgctgact

SEQ ID NO: 5186 - DNA, 25 bp, Artificial sequence  Extension Primer
  Primer
tgctcaatactattcttatctatta

SEQ ID NO: 5187 - DNA, 25 bp, Artificial sequence  Extension Primer
  Primer
tattgcatatagcctctttggaatt

SEQ ID NO: 5188 - DNA, 25 bp, Artificial sequence  Extension Primer
  Primer
acacaggcagcagagaagattgtag

SEQ ID NO: 5189 - DNA, 25 bp, Artificial sequence  Extension Primer
  Primer
cagttctagctctcctctcctaaac

SEQ ID NO: 5190 - DNA, 25 bp, Artificial sequence  Extension Primer
  Primer
agatgaactctaaaaatttgtttct

SEQ ID NO: 5191 - DNA, 25 bp, Artificial sequence  Extension Primer
  Primer
ggttgtttatcctttggcagtatat

SEQ ID NO: 5192 - DNA, 25 bp, Artificial sequence  Extension Primer
  Primer
gttcctgacttcagaaaaaaattct

SEQ ID NO: 5193 - DNA, 25 bp, Artificial sequence  Extension Primer
  Primer
attgtattggtgatggacaggggag

SEQ ID NO: 5194 - DNA, 25 bp, Artificial sequence  Extension Primer
  Primer
agggtttggagagagagattaaata

SEQ ID NO: 5195 - DNA, 25 bp, Artificial sequence  Extension Primer
  Primer
tttgtcctctaattacaatatgtct

SEQ ID NO: 5196 - DNA, 25 bp, Artificial sequence  Extension Primer
  Primer
gagtgctataaatgagggtacgaac

SEQ ID NO: 5197 - DNA, 25 bp, Artificial sequence  Extension Primer
  Primer
gattattttgaaaactgagcagtct

SEQ ID NO: 5198 - DNA, 25 bp, Artificial sequence  Extension Primer
  Primer
acaccaagtctggcatctggccctg

SEQ ID NO: 5199 - DNA, 25 bp, Artificial sequence  Extension Primer
  Primer
tatactgaacatagattttttcccc

SEQ ID NO: 5200 - DNA, 25 bp, Artificial sequence  Extension Primer
  Primer
cctggcagttcccttctcttgggct

SEQ ID NO: 5201 - DNA, 25 bp, Artificial sequence  Extension Primer
  Primer
cacatcgcctcttcctcccactgtc

SEQ ID NO: 5202 - DNA, 25 bp, Artificial sequence  Extension Primer
  Primer
tgctgccgccattagaggcttatct

SEQ ID NO: 5203 - DNA, 25 bp, Artificial sequence  Extension Primer
  Primer
atcctttcctgcacagcctttttcc

SEQ ID NO: 5204 - DNA, 25 bp, Artificial sequence  Extension Primer
  Primer
ggtgcccgtctgcccttaacttttt

SEQ ID NO: 5205 - DNA, 25 bp, Artificial sequence  Extension Primer
  Primer
gagtgtgcctgccttgttcaggtaa

SEQ ID NO: 5206 - DNA, 25 bp, Artificial sequence  Extension Primer
  Primer
tggcagcggacagggtggggctctc

SEQ ID NO: 5207 - DNA, 25 bp, Artificial sequence  Extension Primer
  Primer
tggaaccagtgctaagccagttcta

SEQ ID NO: 5208 - DNA, 25 bp, Artificial sequence  Extension Primer
  Primer
agcccattatctgactgcttccagt

SEQ ID NO: 5209 - DNA, 25 bp, Artificial sequence  Extension Primer
  Primer
agrtcacctacgtaccctcccagaa

SEQ ID NO: 5210 - DNA, 25 bp, Artificial sequence  Extension Primer
  Primer
agcagcatgcctccagtgtagggaa

SEQ ID NO: 5211 - DNA, 25 bp, Artificial sequence  Extension Primer
  Primer
gcctctcctgcaattccagcacctc

SEQ ID NO: 5212 - DNA, 25 bp, Artificial sequence  Extension Primer
  Primer
aacctagcctcatttcatggaggac

SEQ ID NO: 5213 - DNA, 25 bp, Artificial sequence  Extension Primer
  Primer
aaaggactgatgtcagtatcaggct

SEQ ID NO: 5214 - DNA, 25 bp, Artificial sequence  Extension Primer
  Primer
aacgatgtgggacaagcagaaaggc

SEQ ID NO: 5215 - DNA, 25 bp, Artificial sequence  Extension Primer
  Primer
cattaaaatcactttattttcaaaa

SEQ ID NO: 5216 - DNA, 25 bp, Artificial sequence  Extension Primer
  Primer
ggaacacaaacccacaacaaaacat

SEQ ID NO: 5217 - DNA, 25 bp, Artificial sequence  Extension Primer
  Primer
gattcctaatctagagtactgtttc

SEQ ID NO: 5218 - DNA, 25 bp, Artificial sequence  Extension Primer
  Primer
accactctggctgctgtgtgaagaa

SEQ ID NO: 5219 - DNA, 25 bp, Artificial sequence  Extension Primer
  Primer
tgtgtcacaaaataatacaaacttg

SEQ ID NO: 5220 - DNA, 25 bp, Artificial sequence  Extension Primer
  Primer
gcttctgggctccactctttcatct

SEQ ID NO: 5221 - DNA, 25 bp, Artificial sequence  Extension Primer
  Primer
tgtgatgctatatggagaactgttt

SEQ ID NO: 5222 - DNA, 25 bp, Artificial sequence  Extension Primer
  Primer
taaagtttggggacagacttggagg

SEQ ID NO: 5223 - DNA, 25 bp, Artificial sequence  Extension Primer
  Primer
gatttggacaggaaagcactcaaca

SEQ ID NO: 5224 - DNA, 25 bp, Artificial sequence  Extension Primer
  Primer
caggtcttggacttcttgattgtct

SEQ ID NO: 5225 - DNA, 25 bp, Artificial sequence  Extension Primer
  Primer
atatagtggagatctctgatgctta

SEQ ID NO: 5226 - DNA, 25 bp, Artificial sequence  Extension Primer
  Primer
aattctttgaatatcagttttttca

SEQ ID NO: 5227 - DNA, 25 bp, Artificial sequence  Extension Primer
  Primer
gtgtaacattgttcagatgttagta

SEQ ID NO: 5228 - DNA, 25 bp, Artificial sequence  Extension Primer
  Primer
tatacactgtgcacttagatccaaa

SEQ ID NO: 5229 - DNA, 25 bp, Artificial sequence  Extension Primer
  Primer
agttgcctctatctaccatatgata

SEQ ID NO: 5230 - DNA, 25 bp, Artificial sequence  Extension Primer
  Primer
tgcaagatttaaaaagttctggaga

SEQ ID NO: 5231 - DNA, 25 bp, Artificial sequence  Extension Primer
  Primer
ctctaaagtattgtattagttacca

SEQ ID NO: 5232 - DNA, 25 bp, Artificial sequence  Extension Primer
  Primer
attatattcagttgaggaattcaca

SEQ ID NO: 5233 - DNA, 25 bp, Artificial sequence  Extension Primer
  Primer
ctttggcttcactaaccttttacaa

SEQ ID NO: 5234 - DNA, 25 bp, Artificial sequence  Extension Primer
  Primer
caattttagtggcactattataact

SEQ ID NO: 5235 - DNA, 25 bp, Artificial sequence  Extension Primer
  Primer
atttatttctcctcagtgacacttc

SEQ ID NO: 5236 - DNA, 25 bp, Artificial sequence  Extension Primer
  Primer
taactaatcaagacaagcacagttt

SEQ ID NO: 5237 - DNA, 25 bp, Artificial sequence  Extension Primer
  Primer
agggagacaggtatcccctgctttt

SEQ ID NO: 5238 - DNA, 25 bp, Artificial sequence  Extension Primer
  Primer
ttctttccttttctgaagtcaacag

SEQ ID NO: 5239 - DNA, 25 bp, Artificial sequence  Extension Primer
  Primer
taaaataatcagggtctccaacaaa

SEQ ID NO: 5240 - DNA, 25 bp, Artificial sequence  Extension Primer
  Primer
ggtatgatttttccaatttagacat

SEQ ID NO: 5241 - DNA, 25 bp, Artificial sequence  Extension Primer
  Primer
cagcttaaagcagaacaggcacaca

SEQ ID NO: 5242 - DNA, 25 bp, Artificial sequence  Extension Primer
  Primer
accagtattgaagcaatctctctct

SEQ ID NO: 5243 - DNA, 25 bp, Artificial sequence  Extension Primer
  Primer
tacgttttattgattcataaatatg

SEQ ID NO: 5244 - DNA, 25 bp, Artificial sequence  Extension Primer
  Primer
tgggaaatgaaacggttacagagtc

SEQ ID NO: 5245 - DNA, 25 bp, Artificial sequence  Extension Primer
  Primer
aaacttttactgacctctccacagg

SEQ ID NO: 5246 - DNA, 25 bp, Artificial sequence  Extension Primer
  Primer
aataaaatgaaacagtgaaagaatg

SEQ ID NO: 5247 - DNA, 25 bp, Artificial sequence  Extension Primer
  Primer
tctagcctgtgggcctggataaaat

SEQ ID NO: 5248 - DNA, 25 bp, Artificial sequence  Extension Primer
  Primer
tatatccaaagtgctctaagacaga

SEQ ID NO: 5249 - DNA, 25 bp, Artificial sequence  Extension Primer
  Primer
acacattggtctttcattgcattga

SEQ ID NO: 5250 - DNA, 25 bp, Artificial sequence  Extension Primer
  Primer
ggaagaaactttgcctttacaggta

SEQ ID NO: 5251 - DNA, 25 bp, Artificial sequence  Extension Primer
  Primer
cctcatatgaaaattaaaatatcat

SEQ ID NO: 5252 - DNA, 25 bp, Artificial sequence  Extension Primer
  Primer
acgagtcccgaattgccataaccta

SEQ ID NO: 5253 - DNA, 25 bp, Artificial sequence  Extension Primer
  Primer
cattcagaatataccaaagtgccct

SEQ ID NO: 5254 - DNA, 25 bp, Artificial sequence  Extension Primer
  Primer
ttagatccccaagcattatggaagc

SEQ ID NO: 5255 - DNA, 25 bp, Artificial sequence  Extension Primer
  Primer
tcatcagctgggtttaagaatacct

SEQ ID NO: 5256 - DNA, 25 bp, Artificial sequence  Extension Primer
  Primer
actgttgctgtaatgcactggggaa

SEQ ID NO: 5257 - DNA, 25 bp, Artificial sequence  Extension Primer
  Primer
cagaccaatttccacatcacagcca

SEQ ID NO: 5258 - DNA, 25 bp, Artificial sequence  Extension Primer
  Primer
tgccgcgaactcaacctttatggaa

SEQ ID NO: 5259 - DNA, 25 bp, Artificial sequence  Extension Primer
  Primer
ttcaaattttaccaaaagcagaaaa

SEQ ID NO: 5260 - DNA, 25 bp, Artificial sequence  Extension Primer
  Primer
aaggcttgaaaatggcaaaaatcaa

SEQ ID NO: 5261 - DNA, 25 bp, Artificial sequence  Extension Primer
  Primer
cagggartggcagaaccccgaactc

SEQ ID NO: 5262 - DNA, 25 bp, Artificial sequence  Extension Primer
  Primer
aggctacaccttctgtctccatctc

SEQ ID NO: 5263 - DNA, 25 bp, Artificial sequence  Extension Primer
  Primer
ttccttgcctcaaccccttgtctct

SEQ ID NO: 5264 - DNA, 22 bp, Artificial sequence  Extension Primer
  Primer
gcttctgccagtgtgtctgcca

SEQ ID NO: 5265 - DNA, 25 bp, Artificial sequence  Extension Primer
  Primer
agtggctaagactctgtgtttccaa

SEQ ID NO: 5266 - DNA, 25 bp, Artificial sequence  Extension Primer
  Primer
ttttaaaagatttgtctctgcttca

SEQ ID NO: 5267 - DNA, 25 bp, Artificial sequence  Extension Primer
  Primer
tcagaagttaagggacttgccagag

SEQ ID NO: 5268 - DNA, 25 bp, Artificial sequence  Extension Primer
  Primer
ccagcctgcctgtggagtttgccat

SEQ ID NO: 5269 - DNA, 25 bp, Artificial sequence  Extension Primer
  Primer
aaattgaacaagctgtggctgtggg

SEQ ID NO: 5270 - DNA, 25 bp, Artificial sequence  Extension Primer
  Primer
agggtctgtatgcacaacaagggct

SEQ ID NO: 5271 - DNA, 25 bp, Artificial sequence  Extension Primer
  Primer
tttctcatgtatgtsgggtatttaa

SEQ ID NO: 5272 - DNA, 25 bp, Artificial sequence  Extension Primer
  Primer
ttagtttcttaaatgaatttgtatc

SEQ ID NO: 5273 - DNA, 25 bp, Artificial sequence  Extension Primer
  Primer
actcttgtcttgtttgttgttgatg

SEQ ID NO: 5274 - DNA, 25 bp, Artificial sequence  Extension Primer
  Primer
caaatgtttccgtttcacagtaagg

SEQ ID NO: 5275 - DNA, 25 bp, Artificial sequence  Extension Primer
  Primer
atcgataaaaaattggtatctgagg

SEQ ID NO: 5276 - DNA, 25 bp, Artificial sequence  Extension Primer
  Primer
gtaatcaaatttaatccagtttaag

SEQ ID NO: 5277 - DNA, 25 bp, Artificial sequence  Extension Primer
  Primer
cattttttttcaataaaagtggata

SEQ ID NO: 5278 - DNA, 25 bp, Artificial sequence  Extension Primer
  Primer
ctgttctagcaatcattgttcacat

SEQ ID NO: 5279 - DNA, 25 bp, Artificial sequence  Extension Primer
  Primer
aacactactatgctataggaagtta

SEQ ID NO: 5280 - DNA, 25 bp, Artificial sequence  Extension Primer
  Primer
aaaggtagcatattttcttttgaag

SEQ ID NO: 5281 - DNA, 25 bp, Artificial sequence  Extension Primer
  Primer
aaagttattattttatgcacatcta

SEQ ID NO: 5282 - DNA, 25 bp, Artificial sequence  Extension Primer
  Primer
ctgagttataacacagtaaattcca

SEQ ID NO: 5283 - DNA, 25 bp, Artificial sequence  Extension Primer
  Primer
tatcttcatggaagttaagtgatct

SEQ ID NO: 5284 - DNA, 25 bp, Artificial sequence  Extension Primer
  Primer
ctttactgttcttcctactccactc

SEQ ID NO: 5285 - DNA, 25 bp, Artificial sequence  Extension Primer
  Primer
gttctaagatgagaaaactcacagg

SEQ ID NO: 5286 - DNA, 25 bp, Artificial sequence  Extension Primer
  Primer
acaaataaacagggtaatgacagac

SEQ ID NO: 5287 - DNA, 25 bp, Artificial sequence  Extension Primer
  Primer
ctcattacctttgtaattaagctcc

SEQ ID NO: 5288 - DNA, 25 bp, Artificial sequence  Extension Primer
  Primer
catacaaaggcttcatgtttgccac

SEQ ID NO: 5289 - DNA, 25 bp, Artificial sequence  Extension Primer
  Primer
agctatggctcttgcctctctgctt

SEQ ID NO: 5290 - DNA, 22 bp, Artificial sequence  Extension Primer
  Primer
gcgtgtaacccaggccttccca

SEQ ID NO: 5291 - DNA, 25 bp, Artificial sequence  Extension Primer
  Primer
aggaaagggaaacacgattttggaa

SEQ ID NO: 5292 - DNA, 25 bp, Artificial sequence  Extension Primer
  Primer
tccattacccttacccttaggaaaa

SEQ ID NO: 5293 - DNA, 25 bp, Artificial sequence  Extension Primer
  Primer
cctggctgccattttcaacatatcg

SEQ ID NO: 5294 - DNA, 25 bp, Artificial sequence  Extension Primer
  Primer
caagattaacctactaagccaaaag

SEQ ID NO: 5295 - DNA, 25 bp, Artificial sequence  Extension Primer
  Primer
tgkttgayttayacagtgtttgaat

SEQ ID NO: 5296 - DNA, 22 bp, Artificial sequence  Extension Primer
  Primer
gttcacaagtttattctctaca

SEQ ID NO: 5297 - DNA, 25 bp, Artificial sequence  Extension Primer
  Primer
gggagataaagctgcaaagattgat

SEQ ID NO: 5298 - DNA, 25 bp, Artificial sequence  Extension Primer
  Primer
ctctctggattgataagttaaaata

SEQ ID NO: 5299 - DNA, 25 bp, Artificial sequence  Extension Primer
  Primer
gcttcttagcccgggacccagtgcc

SEQ ID NO: 5300 - DNA, 25 bp, Artificial sequence  Extension Primer
  Primer
gatgctccagaccatgctcagyata

SEQ ID NO: 5301 - DNA, 22 bp, Artificial sequence  Extension Primer
  Primer
ttgcaagcagtaaaccatacaa

SEQ ID NO: 5302 - DNA, 25 bp, Artificial sequence  Extension Primer
  Primer
rtcatgtttatctaaataccacctg

SEQ ID NO: 5303 - DNA, 25 bp, Artificial sequence  Extension Primer
  Primer
gcaggcgtccccaggctgagtctga

SEQ ID NO: 5304 - DNA, 25 bp, Artificial sequence  Extension Primer
  Primer
ctggcatttgagaccctctccaata

SEQ ID NO: 5305 - DNA, 25 bp, Artificial sequence  Extension Primer
  Primer
actttagccagtacagtattgttgt

SEQ ID NO: 5306 - DNA, 25 bp, Artificial sequence  Extension Primer
  Primer
gggactcgctcccctctcactcagg

SEQ ID NO: 5307 - DNA, 25 bp, Artificial sequence  Extension Primer
  Primer
tctatcccatgggtctgggatcagg

SEQ ID NO: 5308 - DNA, 25 bp, Artificial sequence  Extension Primer
  Primer
tcccagggaaagcagtcctggctcc

SEQ ID NO: 5309 - DNA, 25 bp, Artificial sequence  Extension Primer
  Primer
cggatgggcacagggactcggggac

SEQ ID NO: 5310 - DNA, 25 bp, Artificial sequence  Extension Primer
  Primer
aacggctctccctctctctgcaggc

SEQ ID NO: 5311 - DNA, 25 bp, Artificial sequence  Extension Primer
  Primer
gtcctcaatagttaattatctcatt

SEQ ID NO: 5312 - DNA, 25 bp, Artificial sequence  Extension Primer
  Primer
atagagggcctgtaagaaagactgt

SEQ ID NO: 5313 - DNA, 25 bp, Artificial sequence  Extension Primer
  Primer
atgtctcacgttttctttagaaaca

SEQ ID NO: 5314 - DNA, 25 bp, Artificial sequence  Extension Primer
  Primer
cctgttaaatctgaagtcattctct

SEQ ID NO: 5315 - DNA, 25 bp, Artificial sequence  Extension Primer
  Primer
taatatttatctaactcttggtttt

SEQ ID NO: 5316 - DNA, 25 bp, Artificial sequence  Extension Primer
  Primer
agtcttaaatctatgctgcaatgag

SEQ ID NO: 5317 - DNA, 25 bp, Artificial sequence  Extension Primer
  Primer
aacagagaatgcaaatggaaaaatg

SEQ ID NO: 5318 - DNA, 25 bp, Artificial sequence  Extension Primer
  Primer
aatgagaacaaacatcagagaaatg

SEQ ID NO: 5319 - DNA, 25 bp, Artificial sequence  Extension Primer
  Primer
agctgatgatgaagattctagaaaa

SEQ ID NO: 5320 - DNA, 25 bp, Artificial sequence  Extension Primer
  Primer
aagacttaaagtacaatgctgaagg

SEQ ID NO: 5321 - DNA, 25 bp, Artificial sequence  Extension Primer
  Primer
taccattcacaacctcttgccctca

SEQ ID NO: 5322 - DNA, 25 bp, Artificial sequence  Extension Primer
  Primer
gaaagcagctctatcacttacttgg

SEQ ID NO: 5323 - DNA, 25 bp, Artificial sequence  Extension Primer
  Primer
arcctaggacctaagtttgttgttc

SEQ ID NO: 5324 - DNA, 25 bp, Artificial sequence  Extension Primer
  Primer
tcaatactaaaatcttaccaaatta

SEQ ID NO: 5325 - DNA, 25 bp, Artificial sequence  Extension Primer
  Primer
agcttaaggcttgtctcagcattag

SEQ ID NO: 5326 - DNA, 25 bp, Artificial sequence  Extension Primer
  Primer
caaacctccagatgaccccctcatg

SEQ ID NO: 5327 - DNA, 25 bp, Artificial sequence  Extension Primer
  Primer
gtgtgtgtatgtgtgtgtgtgcttc

SEQ ID NO: 5328 - DNA, 25 bp, Artificial sequence  Extension Primer
  Primer
ctgaaatactcaaaactttgatttg

SEQ ID NO: 5329 - DNA, 25 bp, Artificial sequence  Extension Primer
  Primer
ttaaatatatgtacatattttgttc

SEQ ID NO: 5330 - DNA, 25 bp, Artificial sequence  Extension Primer
  Primer
ctgagagggatttggccagtagttt

SEQ ID NO: 5331 - DNA, 25 bp, Artificial sequence  Extension Primer
  Primer
gcctttgtctatgtgcagacaaaca

SEQ ID NO: 5332 - DNA, 25 bp, Artificial sequence  Extension Primer
  Primer
cctctgcctggaatgtcctttctcc

SEQ ID NO: 5333 - DNA, 25 bp, Artificial sequence  Extension Primer
  Primer
gaaaagcttataatgattgtgtgtg

SEQ ID NO: 5334 - DNA, 25 bp, Artificial sequence  Extension Primer
  Primer
ggatgtgaaagaacacaccctataa

SEQ ID NO: 5335 - DNA, 25 bp, Artificial sequence  Extension Primer
  Primer
tcatttttgcattgagtgtccgata

SEQ ID NO: 5336 - DNA, 25 bp, Artificial sequence  Extension Primer
  Primer
tttgtattggggtatagccgattaa

SEQ ID NO: 5337 - DNA, 25 bp, Artificial sequence  Extension Primer
  Primer
aaatgttttgttgttaaactaaaaa

SEQ ID NO: 5338 - DNA, 25 bp, Artificial sequence  Extension Primer
  Primer
caacagtttggaagcttggtcagag

SEQ ID NO: 5339 - DNA, 22 bp, Artificial sequence  Extension Primer
  Primer
ggcaaatctataatggtttctt

SEQ ID NO: 5340 - DNA, 25 bp, Artificial sequence  Extension Primer
  Primer
tttgctgtatcctaggtttaatttt

SEQ ID NO: 5341 - DNA, 25 bp, Artificial sequence  Extension Primer
  Primer
actatgcccaataattgatacaaga

SEQ ID NO: 5342 - DNA, 25 bp, Artificial sequence  Extension Primer
  Primer
agtatgaacaggattgcttttttct

SEQ ID NO: 5343 - DNA, 25 bp, Artificial sequence  Extension Primer
  Primer
cacttctgcatgtcytaaagctcac

SEQ ID NO: 5344 - DNA, 25 bp, Artificial sequence  Extension Primer
  Primer
atcagtactaccagccataagttat

SEQ ID NO: 5345 - DNA, 25 bp, Artificial sequence  Extension Primer
  Primer
aaacttaacattttgcaactccaaa

SEQ ID NO: 5346 - DNA, 25 bp, Artificial sequence  Extension Primer
  Primer
gttaatgtatctcaaatgccttaaa

SEQ ID NO: 5347 - DNA, 25 bp, Artificial sequence  Extension Primer
  Primer
aataatgcggtttcattattctaac

SEQ ID NO: 5348 - DNA, 25 bp, Artificial sequence  Extension Primer
  Primer
tgcatccctaccctagactacatct

SEQ ID NO: 5349 - DNA, 25 bp, Artificial sequence  Extension Primer
  Primer
ctcatacgagccttagacacatcat

SEQ ID NO: 5350 - DNA, 25 bp, Artificial sequence  Extension Primer
  Primer
gaaaaataacactttcaatatttgc

SEQ ID NO: 5351 - DNA, 25 bp, Artificial sequence  Extension Primer
  Primer
ggttctcttacacagtatgcaggta

SEQ ID NO: 5352 - DNA, 25 bp, Artificial sequence  Extension Primer
  Primer
gactagaattgacatatatacccta

SEQ ID NO: 5353 - DNA, 25 bp, Artificial sequence  Extension Primer
  Primer
tatctctcagacccaatattgctcc

SEQ ID NO: 5354 - DNA, 25 bp, Artificial sequence  Extension Primer
  Primer
tcctggttccctttcttctgcatct

SEQ ID NO: 5355 - DNA, 25 bp, Artificial sequence  Extension Primer
  Primer
tagatgaaactgttgctcagaggtg

SEQ ID NO: 5356 - DNA, 25 bp, Artificial sequence  Extension Primer
  Primer
ctacctccttattcttctcctttgc

SEQ ID NO: 5357 - DNA, 25 bp, Artificial sequence  Extension Primer
  Primer
tacatgtgtcccctgtgtgcccaga

SEQ ID NO: 5358 - DNA, 25 bp, Artificial sequence  Extension Primer
  Primer
aataactattatgtataatgactgg

SEQ ID NO: 5359 - DNA, 25 bp, Artificial sequence  Extension Primer
  Primer
tgcttcaagtcatttcttcttccca

SEQ ID NO: 5360 - DNA, 25 bp, Artificial sequence  Extension Primer
  Primer
aaatgaggtatgaaaaccattatca

SEQ ID NO: 5361 - DNA, 25 bp, Artificial sequence  Extension Primer
  Primer
aaaacggtcattattaacataccta

SEQ ID NO: 5362 - DNA, 25 bp, Artificial sequence  Extension Primer
  Primer
tatctcatagtatgtaaaaataata

SEQ ID NO: 5363 - DNA, 25 bp, Artificial sequence  Extension Primer
  Primer
tgatgcctttctggacttgcaggaa

SEQ ID NO: 5364 - DNA, 25 bp, Artificial sequence  Extension Primer
  Primer
tcttccttggtttagcgtgacctag

SEQ ID NO: 5365 - DNA, 25 bp, Artificial sequence  Extension Primer
  Primer
cataaatataagttccattctgata

SEQ ID NO: 5366 - DNA, 25 bp, Artificial sequence  Extension Primer
  Primer
gcttagtgaagaactcctataaggc

SEQ ID NO: 5367 - DNA, 25 bp, Artificial sequence  Extension Primer
  Primer
aatcaacttgtatttgaggaaggca

SEQ ID NO: 5368 - DNA, 25 bp, Artificial sequence  Extension Primer
  Primer
ctgtcagcactgcccacctccctcc

SEQ ID NO: 5369 - DNA, 25 bp, Artificial sequence  Extension Primer
  Primer
tggactcagcctatttcctcctgtt

SEQ ID NO: 5370 - DNA, 25 bp, Artificial sequence  Extension Primer
  Primer
gcatgagcacatgtacataatgaag

SEQ ID NO: 5371 - DNA, 25 bp, Artificial sequence  Extension Primer
  Primer
atgaacagctctgattctaattata

SEQ ID NO: 5372 - DNA, 25 bp, Artificial sequence  Extension Primer
  Primer
aagtcctgtgcttatccaaaaaaat

SEQ ID NO: 5373 - DNA, 25 bp, Artificial sequence  Extension Primer
  Primer
gaacctcaggtcacacagaagtttc

SEQ ID NO: 5374 - DNA, 25 bp, Artificial sequence  Extension Primer
  Primer
tcattgggctgtatttccacctcca

SEQ ID NO: 5375 - DNA, 25 bp, Artificial sequence  Extension Primer
  Primer
cccccattcccttgggggacttaca

SEQ ID NO: 5376 - DNA, 25 bp, Artificial sequence  Extension Primer
  Primer
agtggttaagatttcgagctcccaa

SEQ ID NO: 5377 - DNA, 25 bp, Artificial sequence  Extension Primer
  Primer
atgggccttagttgtttatagatgc

SEQ ID NO: 5378 - DNA, 25 bp, Artificial sequence  Extension Primer
  Primer
cgagggatccagaggaggcacagtc

SEQ ID NO: 5379 - DNA, 22 bp, Artificial sequence  Extension Primer
  Primer
ggattctttaccactgcgccac

SEQ ID NO: 5380 - DNA, 25 bp, Artificial sequence  Extension Primer
  Primer
aagagaaggacatttggcccttgaa

SEQ ID NO: 5381 - DNA, 25 bp, Artificial sequence  Extension Primer
  Primer
cacatgataccagaagmtttccccc

SEQ ID NO: 5382 - DNA, 25 bp, Artificial sequence  Extension Primer
  Primer
tgtgcctytgtccatcttttcaggg

SEQ ID NO: 5383 - DNA, 25 bp, Artificial sequence  Extension Primer
  Primer
ttattctgcatccaaggacacgaca

SEQ ID NO: 5384 - DNA, 25 bp, Artificial sequence  Extension Primer
  Primer
tgagtcagaaacctgaagtgggggc

SEQ ID NO: 5385 - DNA, 25 bp, Artificial sequence  Extension Primer
  Primer
cttagtcgtgttacactgagacggc

SEQ ID NO: 5386 - DNA, 25 bp, Artificial sequence  Extension Primer
  Primer
tgaaacacaggaagaaaattgtcta

SEQ ID NO: 5387 - DNA, 25 bp, Artificial sequence  Extension Primer
  Primer
aaggtttctttcatttttaaagagg

SEQ ID NO: 5388 - DNA, 25 bp, Artificial sequence  Extension Primer
  Primer
gatatctctagtctttcatccctga

SEQ ID NO: 5389 - DNA, 25 bp, Artificial sequence  Extension Primer
  Primer
ttataatttgtgcttatgaagattt

SEQ ID NO: 5390 - DNA, 25 bp, Artificial sequence  Extension Primer
  Primer
aaattacgtcctttttcagcattat

SEQ ID NO: 5391 - DNA, 25 bp, Artificial sequence  Extension Primer
  Primer
ttcatgggtgacttaaaggaatttc

SEQ ID NO: 5392 - DNA, 25 bp, Artificial sequence  Extension Primer
  Primer
tttaaacagcaaaagaaatgtactg

SEQ ID NO: 5393 - DNA, 25 bp, Artificial sequence  Extension Primer
  Primer
attagatataaaggtggaagaaaat

SEQ ID NO: 5394 - DNA, 25 bp, Artificial sequence  Extension Primer
  Primer
agaaaaatctggattgcggtccaag

SEQ ID NO: 5395 - DNA, 25 bp, Artificial sequence  Extension Primer
  Primer
gaatgggtatatcaggcctccaaaa

SEQ ID NO: 5396 - DNA, 25 bp, Artificial sequence  Extension Primer
  Primer
ctcagaggggtctgggaaagacttt

SEQ ID NO: 5397 - DNA, 25 bp, Artificial sequence  Extension Primer
  Primer
acagaatactgtaaatctcctatac

SEQ ID NO: 5398 - DNA, 22 bp, Artificial sequence  Extension Primer
  Primer
aaagatgtgtttttgaaataat

SEQ ID NO: 5399 - DNA, 25 bp, Artificial sequence  Extension Primer
  Primer
aagaacattcctgattttttatttc

SEQ ID NO: 5400 - DNA, 25 bp, Artificial sequence  Extension Primer
  Primer
catcccagtttcccccttgattatt

SEQ ID NO: 5401 - DNA, 25 bp, Artificial sequence  Extension Primer
  Primer
aggaaattggtctttcccttcatct

SEQ ID NO: 5402 - DNA, 25 bp, Artificial sequence  Extension Primer
  Primer
gaggctattaagtactcaaggaaga

SEQ ID NO: 5403 - DNA, 25 bp, Artificial sequence  Extension Primer
  Primer
aagagagtagatgtatgctatttaa

SEQ ID NO: 5404 - DNA, 25 bp, Artificial sequence  Extension Primer
  Primer
taaaaattatataaacctgtactaa

SEQ ID NO: 5405 - DNA, 25 bp, Artificial sequence  Extension Primer
  Primer
actccctcattatttccattctgta

SEQ ID NO: 5406 - DNA, 25 bp, Artificial sequence  Extension Primer
  Primer
gtcataatgccacaagataaggata

SEQ ID NO: 5407 - DNA, 25 bp, Artificial sequence  Extension Primer
  Primer
tgtagctaggttattactattatta

SEQ ID NO: 5408 - DNA, 25 bp, Artificial sequence  Extension Primer
  Primer
tggagatcctctttttcccctttca

SEQ ID NO: 5409 - DNA, 25 bp, Artificial sequence  Extension Primer
  Primer
aattgagactggtggtgacagtatc

SEQ ID NO: 5410 - DNA, 25 bp, Artificial sequence  Extension Primer
  Primer
ccactttcaagtctttgaaaactga

SEQ ID NO: 5411 - DNA, 25 bp, Artificial sequence  Extension Primer
  Primer
gattttgctacgtttgctttgcctg

SEQ ID NO: 5412 - DNA, 25 bp, Artificial sequence  Extension Primer
  Primer
catgaaaagtggtaactatgtgagg

SEQ ID NO: 5413 - DNA, 25 bp, Artificial sequence  Extension Primer
  Primer
aatgtccttcatgtaaattactcta

SEQ ID NO: 5414 - DNA, 25 bp, Artificial sequence  Extension Primer
  Primer
gtcatggccaaagatgaaaatgtca

SEQ ID NO: 5415 - DNA, 25 bp, Artificial sequence  Extension Primer
  Primer
gcacaggaaaaacaccactacattc

SEQ ID NO: 5416 - DNA, 25 bp, Artificial sequence  Extension Primer
  Primer
ctggtgaaccccaattggacacaga

SEQ ID NO: 5417 - DNA, 25 bp, Artificial sequence  Extension Primer
  Primer
cttttctgagtagattaaggcactc

SEQ ID NO: 5418 - DNA, 25 bp, Artificial sequence  Extension Primer
  Primer
agtgattgtttagaaatatctaagg

SEQ ID NO: 5419 - DNA, 25 bp, Artificial sequence  Extension Primer
  Primer
tattttcagtaatgatgttttctag

SEQ ID NO: 5420 - DNA, 25 bp, Artificial sequence  Extension Primer
  Primer
cagaattttccaggtatctaacagg

SEQ ID NO: 5421 - DNA, 25 bp, Artificial sequence  Extension Primer
  Primer
tgtgtttgcatcatctgttcctgga

SEQ ID NO: 5422 - DNA, 25 bp, Artificial sequence  Extension Primer
  Primer
ggctttcacatgcctctggcagcag

SEQ ID NO: 5423 - DNA, 25 bp, Artificial sequence  Extension Primer
  Primer
ctagactacatcccaaatattagga

SEQ ID NO: 5424 - DNA, 25 bp, Artificial sequence  Extension Primer
  Primer
tggaaggagcaggctagtataggca

SEQ ID NO: 5425 - DNA, 25 bp, Artificial sequence  Extension Primer
  Primer
ccaggctcctgcatgttacaggaac

SEQ ID NO: 5426 - DNA, 25 bp, Artificial sequence  Extension Primer
  Primer
atctgctaatccatgataaaagggc

SEQ ID NO: 5427 - DNA, 25 bp, Artificial sequence  Extension Primer
  Primer
cagctgttatttctctggtctaaca

SEQ ID NO: 5428 - DNA, 25 bp, Artificial sequence  Extension Primer
  Primer
gttatacatactttggtttctgcag

SEQ ID NO: 5429 - DNA, 25 bp, Artificial sequence  Extension Primer
  Primer
ggaccagggaacagctctccctgaa

SEQ ID NO: 5430 - DNA, 25 bp, Artificial sequence  Extension Primer
  Primer
tgccctaggggcgggttgtggacat

SEQ ID NO: 5431 - DNA, 25 bp, Artificial sequence  Extension Primer
  Primer
aaaggaggtataggaattgattgaa

SEQ ID NO: 5432 - DNA, 25 bp, Artificial sequence  Extension Primer
  Primer
ggcctggcgagtctctgctttgaat

SEQ ID NO: 5433 - DNA, 25 bp, Artificial sequence  Extension Primer
  Primer
taattgtgtgtgcctggtgcttctc

SEQ ID NO: 5434 - DNA, 25 bp, Artificial sequence  Extension Primer
  Primer
atgtcgagtttatgccgaggtaaag

SEQ ID NO: 5435 - DNA, 25 bp, Artificial sequence  Extension Primer
  Primer
aggagaaacagggtgtcctgggagg

SEQ ID NO: 5436 - DNA, 25 bp, Artificial sequence  Extension Primer
  Primer
gcttcttttctcaccactctcctta

SEQ ID NO: 5437 - DNA, 25 bp, Artificial sequence  Extension Primer
  Primer
tacgtggctgaatatgggagatgag

SEQ ID NO: 5438 - DNA, 25 bp, Artificial sequence  Extension Primer
  Primer
aatttgggcagggggtagccttggt

SEQ ID NO: 5439 - DNA, 25 bp, Artificial sequence  Extension Primer
  Primer
gaggcctctgggattttatttcatc

SEQ ID NO: 5440 - DNA, 25 bp, Artificial sequence  Extension Primer
  Primer
tgaccttgccccacgagtaataacc

SEQ ID NO: 5441 - DNA, 25 bp, Artificial sequence  Extension Primer
  Primer
gacagagacagaccacgtcacccaa

SEQ ID NO: 5442 - DNA, 25 bp, Artificial sequence  Extension Primer
  Primer
gacttaactgaggtcccacggctcc

SEQ ID NO: 5443 - DNA, 25 bp, Artificial sequence  Extension Primer
  Primer
aatgcagggagcaggggtttgatcc

SEQ ID NO: 5444 - DNA, 25 bp, Artificial sequence  Extension Primer
  Primer
aaccagcgcgtgcgagggtggtgga

SEQ ID NO: 5445 - DNA, 25 bp, Artificial sequence  Extension Primer
  Primer
aaatccagtcaagggcgaacaagga

SEQ ID NO: 5446 - DNA, 25 bp, Artificial sequence  Extension Primer
  Primer
acctaaccagcaccaccacrygcat

SEQ ID NO: 5447 - DNA, 25 bp, Artificial sequence  Extension Primer
  Primer
ggggtgaatccaccgcgtttctggg

SEQ ID NO: 5448 - DNA, 25 bp, Artificial sequence  Extension Primer
  Primer
gtgtgctccttgtcatttaggggct

SEQ ID NO: 5449 - DNA, 25 bp, Artificial sequence  Extension Primer
  Primer
accttgcaagcagcagtttgtgccc

SEQ ID NO: 5450 - DNA, 25 bp, Artificial sequence  Extension Primer
  Primer
ggggtgtaataaacactgaagacag

SEQ ID NO: 5451 - DNA, 25 bp, Artificial sequence  Extension Primer
  Primer
tctcttyaaagaaaatgtaygttta

SEQ ID NO: 5452 - DNA, 25 bp, Artificial sequence  Extension Primer
  Primer
tcatgaagtgttctatgtaataaga

SEQ ID NO: 5453 - DNA, 25 bp, Artificial sequence  Extension Primer
  Primer
ggcagaactgcagaaaaatcctata

SEQ ID NO: 5454 - DNA, 25 bp, Artificial sequence  Extension Primer
  Primer
aaatatttattktgcttttgaaatg

SEQ ID NO: 5455 - DNA, 25 bp, Artificial sequence  Extension Primer
  Primer
agatttccagctacaggaaagctag

SEQ ID NO: 5456 - DNA, 25 bp, Artificial sequence  Extension Primer
  Primer
tattaaggagcttaaaaaataaaca

SEQ ID NO: 5457 - DNA, 25 bp, Artificial sequence  Extension Primer
  Primer
ccttgcccacttctgttcttctctc

SEQ ID NO: 5458 - DNA, 25 bp, Artificial sequence  Extension Primer
  Primer
taaaaactgtcatgatagattagtg

SEQ ID NO: 5459 - DNA, 25 bp, Artificial sequence  Extension Primer
  Primer
gtaaatatataactaaaaggagaag

SEQ ID NO: 5460 - DNA, 25 bp, Artificial sequence  Extension Primer
  Primer
tctttagttttcttaacttctcaca

SEQ ID NO: 5461 - DNA, 25 bp, Artificial sequence  Extension Primer
  Primer
atgttttacatgattacattttagc

SEQ ID NO: 5462 - DNA, 25 bp, Artificial sequence  Extension Primer
  Primer
taaaagtgtgctctgagaacagtag

SEQ ID NO: 5463 - DNA, 25 bp, Artificial sequence  Extension Primer
  Primer
aaattttgatcatgtgcaaaagtaa

SEQ ID NO: 5464 - DNA, 25 bp, Artificial sequence  Extension Primer
  Primer
tggttggtacttggatgggagaaaa

SEQ ID NO: 5465 - DNA, 25 bp, Artificial sequence  Extension Primer
  Primer
atgtcatcccactttctcttatttc

SEQ ID NO: 5466 - DNA, 25 bp, Artificial sequence  Extension Primer
  Primer
gagtcacatgaattttttggtttcc

SEQ ID NO: 5467 - DNA, 25 bp, Artificial sequence  Extension Primer
  Primer
catgggggcacataacagtcgcttc

SEQ ID NO: 5468 - DNA, 25 bp, Artificial sequence  Extension Primer
  Primer
gctctttgttttcttttaaataatt

SEQ ID NO: 5469 - DNA, 25 bp, Artificial sequence  Extension Primer
  Primer
aaaggcccgctcaatgcattttctt

SEQ ID NO: 5470 - DNA, 25 bp, Artificial sequence  Extension Primer
  Primer
attcagtcattccaatctactacta

SEQ ID NO: 5471 - DNA, 25 bp, Artificial sequence  Extension Primer
  Primer
tctccagaacaagatatagcagtaa

SEQ ID NO: 5472 - DNA, 25 bp, Artificial sequence  Extension Primer
  Primer
ccaagcacatgtaatgtgtataaaa

SEQ ID NO: 5473 - DNA, 25 bp, Artificial sequence  Extension Primer
  Primer
acacttagtaatgctctggcacttg

SEQ ID NO: 5474 - DNA, 25 bp, Artificial sequence  Extension Primer
  Primer
aagagaatgcactggctgcccaaag

SEQ ID NO: 5475 - DNA, 25 bp, Artificial sequence  Extension Primer
  Primer
ctaatacctataagtctttctagta

SEQ ID NO: 5476 - DNA, 25 bp, Artificial sequence  Extension Primer
  Primer
ctaaaacgtggtggaattccctctc

SEQ ID NO: 5477 - DNA, 25 bp, Artificial sequence  Extension Primer
  Primer
atggttgactaagtaaatctacttt

SEQ ID NO: 5478 - DNA, 25 bp, Artificial sequence  Extension Primer
  Primer
cctaacttttctctcttctaacaaa

SEQ ID NO: 5479 - DNA, 25 bp, Artificial sequence  Extension Primer
  Primer
aaaggactttccttggttacttctc

SEQ ID NO: 5480 - DNA, 25 bp, Artificial sequence  Extension Primer
  Primer
tttattaagtgcttactatatattc

SEQ ID NO: 5481 - DNA, 22 bp, Artificial sequence  Extension Primer
  Primer
aggacactgtcaatgtattttt

SEQ ID NO: 5482 - DNA, 25 bp, Artificial sequence  Extension Primer
  Primer
acagatggaagcttcgttgcttaaa

SEQ ID NO: 5483 - DNA, 25 bp, Artificial sequence  Extension Primer
  Primer
ttatactctttaaatagcatgagat

SEQ ID NO: 5484 - DNA, 25 bp, Artificial sequence  Extension Primer
  Primer
tctagrtaagtctatgtagyaaaat

SEQ ID NO: 5485 - DNA, 25 bp, Artificial sequence  Extension Primer
  Primer
gttctgtgagtatatatccacagtt

SEQ ID NO: 5486 - DNA, 25 bp, Artificial sequence  Extension Primer
  Primer
tccacaacttaccagttgataaata

SEQ ID NO: 5487 - DNA, 25 bp, Artificial sequence  Extension Primer
  Primer
tttgattatcaggtactatcatgga

SEQ ID NO: 5488 - DNA, 25 bp, Artificial sequence  Extension Primer
  Primer
gtgttttattacagtaagttcccta

SEQ ID NO: 5489 - DNA, 25 bp, Artificial sequence  Extension Primer
  Primer
atgccacagcagctaaggcacatag

SEQ ID NO: 5490 - DNA, 25 bp, Artificial sequence  Extension Primer
  Primer
tggttacaggtagccgggagcagag

SEQ ID NO: 5491 - DNA, 25 bp, Artificial sequence  Extension Primer
  Primer
ctatttctttcgaaatcaagaggct

SEQ ID NO: 5492 - DNA, 25 bp, Artificial sequence  Extension Primer
  Primer
atgagccataccccacagtttggaa

SEQ ID NO: 5493 - DNA, 25 bp, Artificial sequence  Extension Primer
  Primer
aaaagctggtctggtgattgatcgg

SEQ ID NO: 5494 - DNA, 25 bp, Artificial sequence  Extension Primer
  Primer
cgtgcccaaactccccgtggcagac

SEQ ID NO: 5495 - DNA, 25 bp, Artificial sequence  Extension Primer
  Primer
caaattcctaaatagctcattactg

SEQ ID NO: 5496 - DNA, 25 bp, Artificial sequence  Extension Primer
  Primer
ataaaacctatgaagtctttctctc

SEQ ID NO: 5497 - DNA, 25 bp, Artificial sequence  Extension Primer
  Primer
ggctttctttggcattgtaatgaac

SEQ ID NO: 5498 - DNA, 25 bp, Artificial sequence  Extension Primer
  Primer
gcaaaactcctaattagggagatga

SEQ ID NO: 5499 - DNA, 25 bp, Artificial sequence  Extension Primer
  Primer
gcttatacaaatagagttacagatg

SEQ ID NO: 5500 - DNA, 25 bp, Artificial sequence  Extension Primer
  Primer
catggggtcgcaaacatgactgagc

SEQ ID NO: 5501 - DNA, 25 bp, Artificial sequence  Extension Primer
  Primer
gggccttttagcctaacgacatatg

SEQ ID NO: 5502 - DNA, 25 bp, Artificial sequence  Extension Primer
  Primer
ctccatccatgggccgatcgcaagt

SEQ ID NO: 5503 - DNA, 25 bp, Artificial sequence  Extension Primer
  Primer
gatggcaggaagagtgcccccacac

SEQ ID NO: 5504 - DNA, 25 bp, Artificial sequence  Extension Primer
  Primer
gcctctcagcatcttagaggtttca

SEQ ID NO: 5505 - DNA, 25 bp, Artificial sequence  Extension Primer
  Primer
gcctcgttagccggccgggagttgt

SEQ ID NO: 5506 - DNA, 25 bp, Artificial sequence  Extension Primer
  Primer
ccctcccacaacatctccagtgaat

SEQ ID NO: 5507 - DNA, 25 bp, Artificial sequence  Extension Primer
  Primer
ttttcttagaagggaggccctcatc

SEQ ID NO: 5508 - DNA, 25 bp, Artificial sequence  Extension Primer
  Primer
tcaaccacaccttccaagggctcac

SEQ ID NO: 5509 - DNA, 25 bp, Artificial sequence  Extension Primer
  Primer
gagcctggtactgtgacaagagtgg

SEQ ID NO: 5510 - DNA, 25 bp, Artificial sequence  Extension Primer
  Primer
gacttctggggagggagcgtgggaa

SEQ ID NO: 5511 - DNA, 25 bp, Artificial sequence  Extension Primer
  Primer
ggagagtaacccaggcagtgggaac

SEQ ID NO: 5512 - DNA, 25 bp, Artificial sequence  Extension Primer
  Primer
agaaaagatttcacatagaagtaga

SEQ ID NO: 5513 - DNA, 25 bp, Artificial sequence  Extension Primer
  Primer
ttaatagtttccagccataacctca

SEQ ID NO: 5514 - DNA, 25 bp, Artificial sequence  Extension Primer
  Primer
ggttttcattagttatctattttac

SEQ ID NO: 5515 - DNA, 25 bp, Artificial sequence  Extension Primer
  Primer
atcatgctagatgggcaaaattgtc

SEQ ID NO: 5516 - DNA, 25 bp, Artificial sequence  Extension Primer
  Primer
aacatttgctttatttcctcctcta

SEQ ID NO: 5517 - DNA, 25 bp, Artificial sequence  Extension Primer
  Primer
tcattgaaataacaaagggaactgt

SEQ ID NO: 5518 - DNA, 25 bp, Artificial sequence  Extension Primer
  Primer
aattttaaaactcccaacaaacaaa

SEQ ID NO: 5519 - DNA, 25 bp, Artificial sequence  Extension Primer
  Primer
tataaaaatgaaattttacaactca

SEQ ID NO: 5520 - DNA, 25 bp, Artificial sequence  Extension Primer
  Primer
ggagataagccacaaagtaggtgac

SEQ ID NO: 5521 - DNA, 25 bp, Artificial sequence  Extension Primer
  Primer
caagcatatttttgtcatcgcctcc

SEQ ID NO: 5522 - DNA, 25 bp, Artificial sequence  Extension Primer
  Primer
aatcacatagaaaagttacaactgc

SEQ ID NO: 5523 - DNA, 25 bp, Artificial sequence  Extension Primer
  Primer
agaacagtgtaaacaggtcacataa

SEQ ID NO: 5524 - DNA, 25 bp, Artificial sequence  Extension Primer
  Primer
atacatgattcaatttacagactga

SEQ ID NO: 5525 - DNA, 25 bp, Artificial sequence  Extension Primer
  Primer
gaggtgaccttagattataatgttc

SEQ ID NO: 5526 - DNA, 25 bp, Artificial sequence  Extension Primer
  Primer
gaaatacaagattaagttcctgtga

SEQ ID NO: 5527 - DNA, 25 bp, Artificial sequence  Extension Primer
  Primer
acttctgtgagccctttatttttca

SEQ ID NO: 5528 - DNA, 25 bp, Artificial sequence  Extension Primer
  Primer
tatagttacatatctcttgtaatag

SEQ ID NO: 5529 - DNA, 25 bp, Artificial sequence  Extension Primer
  Primer
atttgctagcattttgtgtttgtgc

SEQ ID NO: 5530 - DNA, 25 bp, Artificial sequence  Extension Primer
  Primer
atgaatgtgaactaagyagagaatg

SEQ ID NO: 5531 - DNA, 22 bp, Artificial sequence  Extension Primer
  Primer
aagaaatcactgaaagggaagc

SEQ ID NO: 5532 - DNA, 25 bp, Artificial sequence  Extension Primer
  Primer
tccagttttcctcatatataaaatc

SEQ ID NO: 5533 - DNA, 25 bp, Artificial sequence  Extension Primer
  Primer
aatatcagagcagacaatctaaagc

SEQ ID NO: 5534 - DNA, 25 bp, Artificial sequence  Extension Primer
  Primer
gaaaaaatgggctgctgctaatggg

SEQ ID NO: 5535 - DNA, 25 bp, Artificial sequence  Extension Primer
  Primer
tacatcatcttcaacaaatatgacc

SEQ ID NO: 5536 - DNA, 25 bp, Artificial sequence  Extension Primer
  Primer
agtagtgttgagattgagaaaaacc

SEQ ID NO: 5537 - DNA, 25 bp, Artificial sequence  Extension Primer
  Primer
tgtccccagaggctattactcaaaa

SEQ ID NO: 5538 - DNA, 25 bp, Artificial sequence  Extension Primer
  Primer
acaaaaggcatgagggctgtgtgat

SEQ ID NO: 5539 - DNA, 25 bp, Artificial sequence  Extension Primer
  Primer
actctaccccttcattttaaaatcc

SEQ ID NO: 5540 - DNA, 25 bp, Artificial sequence  Extension Primer
  Primer
atggatcattgtaaggattaagggc

SEQ ID NO: 5541 - DNA, 25 bp, Artificial sequence  Extension Primer
  Primer
taggcagtctttccaaacaatctgc

SEQ ID NO: 5542 - DNA, 25 bp, Artificial sequence  Extension Primer
  Primer
ccatatctcattgcagtggagagct

SEQ ID NO: 5543 - DNA, 25 bp, Artificial sequence  Extension Primer
  Primer
tggaaacactgttctcaggggtccc

SEQ ID NO: 5544 - DNA, 25 bp, Artificial sequence  Extension Primer
  Primer
acagccagggaaccttcccagccca

SEQ ID NO: 5545 - DNA, 25 bp, Artificial sequence  Extension Primer
  Primer
gttcctcccagccttaatttagacc

SEQ ID NO: 5546 - DNA, 25 bp, Artificial sequence  Extension Primer
  Primer
gtggggatattgttttctgagccgg

SEQ ID NO: 5547 - DNA, 25 bp, Artificial sequence  Extension Primer
  Primer
gctgggtcttgaagtatcagattcc

SEQ ID NO: 5548 - DNA, 25 bp, Artificial sequence  Extension Primer
  Primer
tgaggccagcagaagagcatctgac

SEQ ID NO: 5549 - DNA, 25 bp, Artificial sequence  Extension Primer
  Primer
ccctcagctgagagcagagacacac

SEQ ID NO: 5550 - DNA, 25 bp, Artificial sequence  Extension Primer
  Primer
gcggaatcagaaatgtgtggaagtc

SEQ ID NO: 5551 - DNA, 25 bp, Artificial sequence  Extension Primer
  Primer
gaggtgtcccttctttgcttcttca

SEQ ID NO: 5552 - DNA, 25 bp, Artificial sequence  Extension Primer
  Primer
tagcaagactcacagccttctccac

SEQ ID NO: 5553 - DNA, 25 bp, Artificial sequence  Extension Primer
  Primer
cctcctgtttattacttttcttctc

SEQ ID NO: 5554 - DNA, 25 bp, Artificial sequence  Extension Primer
  Primer
ctgcttccagttctagcatggagtc

SEQ ID NO: 5555 - DNA, 25 bp, Artificial sequence  Extension Primer
  Primer
ctctgggaggtagtggaggacagac

SEQ ID NO: 5556 - DNA, 25 bp, Artificial sequence  Extension Primer
  Primer
ttggctcacacaaccgggcaattcc

SEQ ID NO: 5557 - DNA, 25 bp, Artificial sequence  Extension Primer
  Primer
tggaggtgaactcagctaccggggt

SEQ ID NO: 5558 - DNA, 25 bp, Artificial sequence  Extension Primer
  Primer
gacaccgcagtcagagccctaggac

SEQ ID NO: 5559 - DNA, 25 bp, Artificial sequence  Extension Primer
  Primer
tgagagctccttgccaccttcaggg

SEQ ID NO: 5560 - DNA, 25 bp, Artificial sequence  Extension Primer
  Primer
gtttgtgaagaactgcacaagttcc

SEQ ID NO: 5561 - DNA, 25 bp, Artificial sequence  Extension Primer
  Primer
aatacttgaagcagtagtttaccaa

SEQ ID NO: 5562 - DNA, 25 bp, Artificial sequence  Extension Primer
  Primer
atttattgaaatgtcagatggattc

SEQ ID NO: 5563 - DNA, 25 bp, Artificial sequence  Extension Primer
  Primer
cataggttccaaagtagaccttagc

SEQ ID NO: 5564 - DNA, 25 bp, Artificial sequence  Extension Primer
  Primer
caaggtactttcttgacttcaattc

SEQ ID NO: 5565 - DNA, 25 bp, Artificial sequence  Extension Primer
  Primer
caaaagacataaacctacacattca

SEQ ID NO: 5566 - DNA, 25 bp, Artificial sequence  Extension Primer
  Primer
aataggatttgatgttagaggcttc

SEQ ID NO: 5567 - DNA, 25 bp, Artificial sequence  Extension Primer
  Primer
tcaacactagtaaaacagaacaaca

SEQ ID NO: 5568 - DNA, 25 bp, Artificial sequence  Extension Primer
  Primer
gttgctacatttaattcagaagttc

SEQ ID NO: 5569 - DNA, 25 bp, Artificial sequence  Extension Primer
  Primer
gcctactcagtgccgtttgttttct

SEQ ID NO: 5570 - DNA, 25 bp, Artificial sequence  Extension Primer
  Primer
gttagatacactatagaaatgatct

SEQ ID NO: 5571 - DNA, 25 bp, Artificial sequence  Extension Primer
  Primer
tgagataggattagctatgggacta

SEQ ID NO: 5572 - DNA, 25 bp, Artificial sequence  Extension Primer
  Primer
gttacttatgtcttagaggtaaata

SEQ ID NO: 5573 - DNA, 25 bp, Artificial sequence  Extension Primer
  Primer
gtgatgctcgttaaacatgattttc

SEQ ID NO: 5574 - DNA, 25 bp, Artificial sequence  Extension Primer
  Primer
atcctgtttcagggccaaccaatta

SEQ ID NO: 5575 - DNA, 25 bp, Artificial sequence  Extension Primer
  Primer
gataactctgataagatgtttgatc

SEQ ID NO: 5576 - DNA, 25 bp, Artificial sequence  Extension Primer
  Primer
agagaaagcttgattattctgaatg

SEQ ID NO: 5577 - DNA, 25 bp, Artificial sequence  Extension Primer
  Primer
gaagcagatgctgtcacgtggtcct

SEQ ID NO: 5578 - DNA, 25 bp, Artificial sequence  Extension Primer
  Primer
ttgtaagaatcagcaatgccctgac

SEQ ID NO: 5579 - DNA, 25 bp, Artificial sequence  Extension Primer
  Primer
ttgcacatcccaaccttgaagacat

SEQ ID NO: 5580 - DNA, 25 bp, Artificial sequence  Extension Primer
  Primer
gggatcttgtttcttaaactttatt

SEQ ID NO: 5581 - DNA, 25 bp, Artificial sequence  Extension Primer
  Primer
ataacaacagccactgtggttgtac

SEQ ID NO: 5582 - DNA, 25 bp, Artificial sequence  Extension Primer
  Primer
agttaattgactgcttggtagatga

SEQ ID NO: 5583 - DNA, 25 bp, Artificial sequence  Extension Primer
  Primer
gtattaagttccagatcctgttcta

SEQ ID NO: 5584 - DNA, 25 bp, Artificial sequence  Extension Primer
  Primer
cacctgccttctatctttcttctgg

SEQ ID NO: 5585 - DNA, 25 bp, Artificial sequence  Extension Primer
  Primer
cattttgaactttatccctttgaaa

SEQ ID NO: 5586 - DNA, 25 bp, Artificial sequence  Extension Primer
  Primer
ggagggaaagaaggagaaaatttgc

SEQ ID NO: 5587 - DNA, 25 bp, Artificial sequence  Extension Primer
  Primer
agaaatagtggaaaataatagaatg

SEQ ID NO: 5588 - DNA, 25 bp, Artificial sequence  Extension Primer
  Primer
cgttcatggttatataaagggctca

SEQ ID NO: 5589 - DNA, 25 bp, Artificial sequence  Extension Primer
  Primer
attcgttttcattcaccccattcta

SEQ ID NO: 5590 - DNA, 25 bp, Artificial sequence  Extension Primer
  Primer
agactgacaacaaaagaagcaggtg

SEQ ID NO: 5591 - DNA, 25 bp, Artificial sequence  Extension Primer
  Primer
ggacttccttygtggtccaatgggt

SEQ ID NO: 5592 - DNA, 25 bp, Artificial sequence  Extension Primer
  Primer
agaaaatactatttttcaatttgct

SEQ ID NO: 5593 - DNA, 25 bp, Artificial sequence  Extension Primer
  Primer
aatacacagaatatatgaacacagt

SEQ ID NO: 5594 - DNA, 25 bp, Artificial sequence  Extension Primer
  Primer
attcaagagacagaggcacagatgc

SEQ ID NO: 5595 - DNA, 25 bp, Artificial sequence  Extension Primer
  Primer
gacgtaagagcagaggttaccaagc

SEQ ID NO: 5596 - DNA, 25 bp, Artificial sequence  Extension Primer
  Primer
gctgttaaccaacttacatgccctc

SEQ ID NO: 5597 - DNA, 25 bp, Artificial sequence  Extension Primer
  Primer
ctgctgctctacctaacaaccccca

SEQ ID NO: 5598 - DNA, 25 bp, Artificial sequence  Extension Primer
  Primer
catatgcatacgtaaaatcaagagc

SEQ ID NO: 5599 - DNA, 25 bp, Artificial sequence  Extension Primer
  Primer
acggttgcagaattttaggtggacc

SEQ ID NO: 5600 - DNA, 25 bp, Artificial sequence  Extension Primer
  Primer
tttcgttacagtgttggaagaggct

SEQ ID NO: 5601 - DNA, 25 bp, Artificial sequence  Extension Primer
  Primer
aatcttgggagaaattcttctggct

SEQ ID NO: 5602 - DNA, 25 bp, Artificial sequence  Extension Primer
  Primer
cttgctttgattttctcaggggacc

SEQ ID NO: 5603 - DNA, 25 bp, Artificial sequence  Extension Primer
  Primer
gagacccggaccaccgtcatcaggc

SEQ ID NO: 5604 - DNA, 25 bp, Artificial sequence  Extension Primer
  Primer
aaatacattctatgccaggcttaag

SEQ ID NO: 5605 - DNA, 25 bp, Artificial sequence  Extension Primer
  Primer
taagattagcaatgttttggctaat

SEQ ID NO: 5606 - DNA, 25 bp, Artificial sequence  Extension Primer
  Primer
gcagaaggtgatactattgtcctta

SEQ ID NO: 5607 - DNA, 25 bp, Artificial sequence  Extension Primer
  Primer
cactcactaggactcagcctcatct

SEQ ID NO: 5608 - DNA, 25 bp, Artificial sequence  Extension Primer
  Primer
gacactagaacccttctgctttctc

SEQ ID NO: 5609 - DNA, 25 bp, Artificial sequence  Extension Primer
  Primer
gcccaggtgccttaccttacacaaa

SEQ ID NO: 5610 - DNA, 25 bp, Artificial sequence  Extension Primer
  Primer
gcagtgcatggacttctcattgggt

SEQ ID NO: 5611 - DNA, 25 bp, Artificial sequence  Extension Primer
  Primer
attctgtgatcagttctgctcccac

SEQ ID NO: 5612 - DNA, 25 bp, Artificial sequence  Extension Primer
  Primer
cttctcgtcagaaagggagggtctc

SEQ ID NO: 5613 - DNA, 25 bp, Artificial sequence  Extension Primer
  Primer
tggaaacttgccagcggtggggtgc

SEQ ID NO: 5614 - DNA, 25 bp, Artificial sequence  Extension Primer
  Primer
tctcctctgcaggttctccatcccc

SEQ ID NO: 5615 - DNA, 22 bp, Artificial sequence  Extension Primer
  Primer
gaatgatctacattcttaccca

SEQ ID NO: 5616 - DNA, 25 bp, Artificial sequence  Extension Primer
  Primer
caggccagccgcctgtctctgcctc

SEQ ID NO: 5617 - DNA, 25 bp, Artificial sequence  Extension Primer
  Primer
gggctgaggtgagagtgtggaggcc

SEQ ID NO: 5618 - DNA, 25 bp, Artificial sequence  Extension Primer
  Primer
cagagccttaactatgtgaccttac

SEQ ID NO: 5619 - DNA, 25 bp, Artificial sequence  Extension Primer
  Primer
ggattaagatttttttttttttatt

SEQ ID NO: 5620 - DNA, 25 bp, Artificial sequence  Extension Primer
  Primer
gaaaatggcaacagcaaggtttatc

SEQ ID NO: 5621 - DNA, 25 bp, Artificial sequence  Extension Primer
  Primer
gactgaagttcatgaaatgtggtta

SEQ ID NO: 5622 - DNA, 25 bp, Artificial sequence  Extension Primer
  Primer
ggatgccttgctggcttcaaaacag

SEQ ID NO: 5623 - DNA, 25 bp, Artificial sequence  Extension Primer
  Primer
ttaggctcatataaaaatgtagtaa

SEQ ID NO: 5624 - DNA, 25 bp, Artificial sequence  Extension Primer
  Primer
ttttagaattactacatgctagatg

SEQ ID NO: 5625 - DNA, 25 bp, Artificial sequence  Extension Primer
  Primer
taagcataattctctaaattcaaat

SEQ ID NO: 5626 - DNA, 25 bp, Artificial sequence  Extension Primer
  Primer
tggctttggggacaaatagtgattt

SEQ ID NO: 5627 - DNA, 25 bp, Artificial sequence  Extension Primer
  Primer
aaatagattagagaatggtgcaaaa

SEQ ID NO: 5628 - DNA, 25 bp, Artificial sequence  Extension Primer
  Primer
aaggaagcaaaataacttgcaacat

SEQ ID NO: 5629 - DNA, 25 bp, Artificial sequence  Extension Primer
  Primer
aaatcaaagtcccttctctccaaga

SEQ ID NO: 5630 - DNA, 25 bp, Artificial sequence  Extension Primer
  Primer
attggaatgatcttgcttgcaactc

SEQ ID NO: 5631 - DNA, 25 bp, Artificial sequence  Extension Primer
  Primer
caaattacaagacaaaagcatacac

SEQ ID NO: 5632 - DNA, 25 bp, Artificial sequence  Extension Primer
  Primer
attgatttgcagccagggagtacac

SEQ ID NO: 5633 - DNA, 25 bp, Artificial sequence  Extension Primer
  Primer
gacytcaatcaaaaatataatagag

SEQ ID NO: 5634 - DNA, 25 bp, Artificial sequence  Extension Primer
  Primer
ctactaagggtttttaaattctact

SEQ ID NO: 5635 - DNA, 25 bp, Artificial sequence  Extension Primer
  Primer
gatgccatccccagatttttttact

SEQ ID NO: 5636 - DNA, 25 bp, Artificial sequence  Extension Primer
  Primer
ttgatagatgatgagagatattcat

SEQ ID NO: 5637 - DNA, 25 bp, Artificial sequence  Extension Primer
  Primer
ataatttctccatcatctgtacaac

SEQ ID NO: 5638 - DNA, 25 bp, Artificial sequence  Extension Primer
  Primer
tctgtctactactcaaataactcca

SEQ ID NO: 5639 - DNA, 25 bp, Artificial sequence  Extension Primer
  Primer
gggaagagctcaaagaacatgtaag

SEQ ID NO: 5640 - DNA, 25 bp, Artificial sequence  Extension Primer
  Primer
gcaaaatgtgtaacttgcaaaatgt

SEQ ID NO: 5641 - DNA, 25 bp, Artificial sequence  Extension Primer
  Primer
gaagacaatgtgtactttacctgag

SEQ ID NO: 5642 - DNA, 25 bp, Artificial sequence  Extension Primer
  Primer
tcaaacttttctaaggccagagaac

SEQ ID NO: 5643 - DNA, 25 bp, Artificial sequence  Extension Primer
  Primer
gcccagagggaaagtgaatttctca

SEQ ID NO: 5644 - DNA, 25 bp, Artificial sequence  Extension Primer
  Primer
tattattttcaactacatacagaac

SEQ ID NO: 5645 - DNA, 25 bp, Artificial sequence  Extension Primer
  Primer
tcgaaaaagctaatgatgccaagga

SEQ ID NO: 5646 - DNA, 25 bp, Artificial sequence  Extension Primer
  Primer
ggaggcttaactgattctcattctt

SEQ ID NO: 5647 - DNA, 25 bp, Artificial sequence  Extension Primer
  Primer
ttatacagggtaaaagtggatgggg

SEQ ID NO: 5648 - DNA, 25 bp, Artificial sequence  Extension Primer
  Primer
gacaaagtatgaattttaaaaatct

SEQ ID NO: 5649 - DNA, 25 bp, Artificial sequence  Extension Primer
  Primer
attcatcatgttattctcgctaagc

SEQ ID NO: 5650 - DNA, 25 bp, Artificial sequence  Extension Primer
  Primer
tagacaaagtatttgctcatcctac

SEQ ID NO: 5651 - DNA, 25 bp, Artificial sequence  Extension Primer
  Primer
gatcactgaatcaaagtcagaatct

SEQ ID NO: 5652 - DNA, 25 bp, Artificial sequence  Extension Primer
  Primer
acctatatgccaatagtgtatacct

SEQ ID NO: 5653 - DNA, 25 bp, Artificial sequence  Extension Primer
  Primer
tcaagtcaagcagcattgaggacct

SEQ ID NO: 5654 - DNA, 25 bp, Artificial sequence  Extension Primer
  Primer
ctccgcatccctgagaaccaagcac

SEQ ID NO: 5655 - DNA, 25 bp, Artificial sequence  Extension Primer
  Primer
cacatgaaatcccacatccatcact

SEQ ID NO: 5656 - DNA, 25 bp, Artificial sequence  Extension Primer
  Primer
gattatttgggtcacatagcacgga

SEQ ID NO: 5657 - DNA, 25 bp, Artificial sequence  Extension Primer
  Primer
cagataattgaagctggctgttatc

SEQ ID NO: 5658 - DNA, 25 bp, Artificial sequence  Extension Primer
  Primer
aggcaatgtaggatttcattttgca

SEQ ID NO: 5659 - DNA, 25 bp, Artificial sequence  Extension Primer
  Primer
gtcttgaggaagaatcacttttctt

SEQ ID NO: 5660 - DNA, 25 bp, Artificial sequence  Extension Primer
  Primer
cagctccccaggaggtggggcrccc

SEQ ID NO: 5661 - DNA, 25 bp, Artificial sequence  Extension Primer
  Primer
caacacttcttgtcaaggggctact

SEQ ID NO: 5662 - DNA, 25 bp, Artificial sequence  Extension Primer
  Primer
gtggggcctgagactctgcgtttct

SEQ ID NO: 5663 - DNA, 25 bp, Artificial sequence  Extension Primer
  Primer
gcctccttcacgccagacttcctcc

SEQ ID NO: 5664 - DNA, 25 bp, Artificial sequence  Extension Primer
  Primer
catttgcccgaggccatgtgccttc

SEQ ID NO: 5665 - DNA, 25 bp, Artificial sequence  Extension Primer
  Primer
caaacaccgcagttttatttaacca

SEQ ID NO: 5666 - DNA, 25 bp, Artificial sequence  Extension Primer
  Primer
tggcagggaagacaggtcgggctct

SEQ ID NO: 5667 - DNA, 25 bp, Artificial sequence  Extension Primer
  Primer
catcattcctcataatgagagcccc

SEQ ID NO: 5668 - DNA, 25 bp, Artificial sequence  Extension Primer
  Primer
tgtaacttgagagttggacgagccg

SEQ ID NO: 5669 - DNA, 25 bp, Artificial sequence  Extension Primer
  Primer
gctgtgatcccttaagaattgcatc

SEQ ID NO: 5670 - DNA, 25 bp, Artificial sequence  Extension Primer
  Primer
caacatcaccgtatgtacttggcct

SEQ ID NO: 5671 - DNA, 25 bp, Artificial sequence  Extension Primer
  Primer
gctggcatgggtagatatgggggcc

SEQ ID NO: 5672 - DNA, 25 bp, Artificial sequence  Extension Primer
  Primer
aaaagaaggaccttttctgrctttc

SEQ ID NO: 5673 - DNA, 25 bp, Artificial sequence  Extension Primer
  Primer
ccagagagtctttattagaatttgt

SEQ ID NO: 5674 - DNA, 25 bp, Artificial sequence  Extension Primer
  Primer
cttaaaagtgacttttaaaagtgac

SEQ ID NO: 5675 - DNA, 25 bp, Artificial sequence  Extension Primer
  Primer
tcacctacttggtaagaagagcaac

SEQ ID NO: 5676 - DNA, 25 bp, Artificial sequence  Extension Primer
  Primer
tgggaaatctctggacatttaaagt

SEQ ID NO: 5677 - DNA, 25 bp, Artificial sequence  Extension Primer
  Primer
aactatgattattgagaacacataa

SEQ ID NO: 5678 - DNA, 25 bp, Artificial sequence  Extension Primer
  Primer
ctgcttccaactcgaagcgacartg

SEQ ID NO: 5679 - DNA, 25 bp, Artificial sequence  Extension Primer
  Primer
tagtccttaactgcaaagcactatc

SEQ ID NO: 5680 - DNA, 25 bp, Artificial sequence  Extension Primer
  Primer
agtagctctataggaaggccaataa

SEQ ID NO: 5681 - DNA, 25 bp, Artificial sequence  Extension Primer
  Primer
tgatttttccagctgatgacacaac

SEQ ID NO: 5682 - DNA, 25 bp, Artificial sequence  Extension Primer
  Primer
cytaagatatcttttagttcaacac

SEQ ID NO: 5683 - DNA, 25 bp, Artificial sequence  Extension Primer
  Primer
ccaaacactgatacatacttgagaa

SEQ ID NO: 5684 - DNA, 25 bp, Artificial sequence  Extension Primer
  Primer
agccccccagatacatagtctttaa

SEQ ID NO: 5685 - DNA, 25 bp, Artificial sequence  Extension Primer
  Primer
ttagtctaaaggagtgtgaaggctt

SEQ ID NO: 5686 - DNA, 25 bp, Artificial sequence  Extension Primer
  Primer
ttacacatctgtctcttgtgaactc

SEQ ID NO: 5687 - DNA, 25 bp, Artificial sequence  Extension Primer
  Primer
gtattgtgcaaagaaaacagttcaa

SEQ ID NO: 5688 - DNA, 25 bp, Artificial sequence  Extension Primer
  Primer
tgacctcatttatactgtgtgggtg

SEQ ID NO: 5689 - DNA, 25 bp, Artificial sequence  Extension Primer
  Primer
caaacacttgttgagtgacaaacac

SEQ ID NO: 5690 - DNA, 25 bp, Artificial sequence  Extension Primer
  Primer
ataagtaaataaacaaatggctaat

SEQ ID NO: 5691 - DNA, 25 bp, Artificial sequence  Extension Primer
  Primer
agaaagaaacaactacaggatcaaa

SEQ ID NO: 5692 - DNA, 22 bp, Artificial sequence  Extension Primer
  Primer
agtatgtgtgtttgatgtttcc

SEQ ID NO: 5693 - DNA, 25 bp, Artificial sequence  Extension Primer
  Primer
ggacgcacactctaaggcttttcat

SEQ ID NO: 5694 - DNA, 25 bp, Artificial sequence  Extension Primer
  Primer
atacattcaatatttcttacccttc

SEQ ID NO: 5695 - DNA, 25 bp, Artificial sequence  Extension Primer
  Primer
gaaaccaaggctccagaaaagaatg

SEQ ID NO: 5696 - DNA, 25 bp, Artificial sequence  Extension Primer
  Primer
aaaatgttaaataatcagagaccat

SEQ ID NO: 5697 - DNA, 25 bp, Artificial sequence  Extension Primer
  Primer
atggaatactaccctttgtccatcc

SEQ ID NO: 5698 - DNA, 25 bp, Artificial sequence  Extension Primer
  Primer
aggataagattaactgaggacagac

SEQ ID NO: 5699 - DNA, 25 bp, Artificial sequence  Extension Primer
  Primer
tctacaatatgttttattctggtgg

SEQ ID NO: 5700 - DNA, 25 bp, Artificial sequence  Extension Primer
  Primer
ctggctgattttatttacagctctc

SEQ ID NO: 5701 - DNA, 25 bp, Artificial sequence  Extension Primer
  Primer
tttagtgagcatctttacgatcatt

SEQ ID NO: 5702 - DNA, 25 bp, Artificial sequence  Extension Primer
  Primer
atagggaattaacatgtgtaataaa

SEQ ID NO: 5703 - DNA, 25 bp, Artificial sequence  Extension Primer
  Primer
aaatattgctctaagtaactgccat

SEQ ID NO: 5704 - DNA, 22 bp, Artificial sequence  Extension Primer
  Primer
agttcctacttccctgggctgt

SEQ ID NO: 5705 - DNA, 25 bp, Artificial sequence  Extension Primer
  Primer
accaagctgcgtgtgatatagcact

SEQ ID NO: 5706 - DNA, 25 bp, Artificial sequence  Extension Primer
  Primer
ctcattaaaatgaagaatattcccc

SEQ ID NO: 5707 - DNA, 25 bp, Artificial sequence  Extension Primer
  Primer
aagaaaatatcaatgtcctatggtc

SEQ ID NO: 5708 - DNA, 22 bp, Artificial sequence  Extension Primer
  Primer
tcatccagcctttagtcaacct

SEQ ID NO: 5709 - DNA, 25 bp, Artificial sequence  Extension Primer
  Primer
aatttatattgtttccgaaagccct

SEQ ID NO: 5710 - DNA, 25 bp, Artificial sequence  Extension Primer
  Primer
ctcttgtctggctttttaatacctc

SEQ ID NO: 5711 - DNA, 25 bp, Artificial sequence  Extension Primer
  Primer
ggtaatgaaatgaaaaatttcccca

SEQ ID NO: 5712 - DNA, 25 bp, Artificial sequence  Extension Primer
  Primer
tgccacccatgctgataaaatggaa

SEQ ID NO: 5713 - DNA, 25 bp, Artificial sequence  Extension Primer
  Primer
tgtccccactgctcaaggcaaacgc

SEQ ID NO: 5714 - DNA, 25 bp, Artificial sequence  Extension Primer
  Primer
ccgggagggctccccggaggcggtg

SEQ ID NO: 5715 - DNA, 25 bp, Artificial sequence  Extension Primer
  Primer
aagggctccgaatgtggggacacgc

SEQ ID NO: 5716 - DNA, 25 bp, Artificial sequence  Extension Primer
  Primer
agcagatgggtgcgttccagcattt

SEQ ID NO: 5717 - DNA, 25 bp, Artificial sequence  Extension Primer
  Primer
ttcttgccatttaaaggtacactga

SEQ ID NO: 5718 - DNA, 25 bp, Artificial sequence  Extension Primer
  Primer
ggtctgattcacttttttatttttc

SEQ ID NO: 5719 - DNA, 25 bp, Artificial sequence  Extension Primer
  Primer
aacacactgggacatgctcgcattc

SEQ ID NO: 5720 - DNA, 25 bp, Artificial sequence  Extension Primer
  Primer
gttttygttactagaggatctccag

SEQ ID NO: 5721 - DNA, 25 bp, Artificial sequence  Extension Primer
  Primer
actaatcctaaattttcattgaaac

SEQ ID NO: 5722 - DNA, 25 bp, Artificial sequence  Extension Primer
  Primer
cattccagtcttgttcaaaatcttc

SEQ ID NO: 5723 - DNA, 25 bp, Artificial sequence  Extension Primer
  Primer
tgcaaartccattttgccatttatg

SEQ ID NO: 5724 - DNA, 25 bp, Artificial sequence  Extension Primer
  Primer
cactctacatgttctaagcattctt

SEQ ID NO: 5725 - DNA, 25 bp, Artificial sequence  Extension Primer
  Primer
gtttgtcctgaagcctgccctgagc

SEQ ID NO: 5726 - DNA, 25 bp, Artificial sequence  Extension Primer
  Primer
aactagagaggagcccccgctctcc

SEQ ID NO: 5727 - DNA, 22 bp, Artificial sequence  Extension Primer
  Primer
tgtgatgtcacttatatgtagg

SEQ ID NO: 5728 - DNA, 25 bp, Artificial sequence  Extension Primer
  Primer
gagtttcagattttctttcttcttc

SEQ ID NO: 5729 - DNA, 25 bp, Artificial sequence  Extension Primer
  Primer
aataattcaattcagatttctttca

SEQ ID NO: 5730 - DNA, 25 bp, Artificial sequence  Extension Primer
  Primer
taaattcctggtaagaaagagaaaa

SEQ ID NO: 5731 - DNA, 25 bp, Artificial sequence  Extension Primer
  Primer
atatagattagaaaggcaaagtaag

SEQ ID NO: 5732 - DNA, 25 bp, Artificial sequence  Extension Primer
  Primer
gtgggcatcaggaacctgccctttt

SEQ ID NO: 5733 - DNA, 25 bp, Artificial sequence  Extension Primer
  Primer
agactctgagatttcacttcagggg

SEQ ID NO: 5734 - DNA, 25 bp, Artificial sequence  Extension Primer
  Primer
tttttttccttaggaatacatggat

SEQ ID NO: 5735 - DNA, 25 bp, Artificial sequence  Extension Primer
  Primer
tatacatttttgaatcagttcgtca

SEQ ID NO: 5736 - DNA, 25 bp, Artificial sequence  Extension Primer
  Primer
gggggctgccccaatggagggtggc

SEQ ID NO: 5737 - DNA, 25 bp, Artificial sequence  Extension Primer
  Primer
attatcattgcttcatatcatcaac

SEQ ID NO: 5738 - DNA, 25 bp, Artificial sequence  Extension Primer
  Primer
aaggagttgcctcaggagaatagac

SEQ ID NO: 5739 - DNA, 25 bp, Artificial sequence  Extension Primer
  Primer
agactcttttccaaaaaccttgatt

SEQ ID NO: 5740 - DNA, 25 bp, Artificial sequence  Extension Primer
  Primer
caattttccaaatgatgctccttta

SEQ ID NO: 5741 - DNA, 25 bp, Artificial sequence  Extension Primer
  Primer
gggctcctcaccatcacaataaaga

SEQ ID NO: 5742 - DNA, 25 bp, Artificial sequence  Extension Primer
  Primer
ccattcacaacttacaaccattcta

SEQ ID NO: 5743 - DNA, 25 bp, Artificial sequence  Extension Primer
  Primer
aattccccaacaaatccayggctgt

SEQ ID NO: 5744 - DNA, 22 bp, Artificial sequence  Extension Primer
  Primer
acgtttgggtgtttaaagttac

SEQ ID NO: 5745 - DNA, 25 bp, Artificial sequence  Extension Primer
  Primer
catttttatcaggaatcctaggtct

SEQ ID NO: 5746 - DNA, 25 bp, Artificial sequence  Extension Primer
  Primer
gatttgattgtagcctgagtatcat

SEQ ID NO: 5747 - DNA, 25 bp, Artificial sequence  Extension Primer
  Primer
gagacttttcataaaatcacatttt

SEQ ID NO: 5748 - DNA, 25 bp, Artificial sequence  Extension Primer
  Primer
ttgactttttcttactgtttcatct

SEQ ID NO: 5749 - DNA, 25 bp, Artificial sequence  Extension Primer
  Primer
ctgcctagaatatccttccacctcc

SEQ ID NO: 5750 - DNA, 25 bp, Artificial sequence  Extension Primer
  Primer
tcgcctggggacgcattttgtgtct

SEQ ID NO: 5751 - DNA, 25 bp, Artificial sequence  Extension Primer
  Primer
gaagggagaggatgtgatcctcaga

SEQ ID NO: 5752 - DNA, 25 bp, Artificial sequence  Extension Primer
  Primer
acaattcaaagctgacaaccttggg

SEQ ID NO: 5753 - DNA, 25 bp, Artificial sequence  Extension Primer
  Primer
agccaaaccagttcggaagggacca

SEQ ID NO: 5754 - DNA, 25 bp, Artificial sequence  Extension Primer
  Primer
gtcagggaggcccttgataccgtgt

SEQ ID NO: 5755 - DNA, 22 bp, Artificial sequence  Extension Primer
  Primer
cagagcccagtttttggggaag

SEQ ID NO: 5756 - DNA, 25 bp, Artificial sequence  Extension Primer
  Primer
agaaccttgtgggaagtttgccgtc

SEQ ID NO: 5757 - DNA, 25 bp, Artificial sequence  Extension Primer
  Primer
atccataccctcttctattgtgtct

SEQ ID NO: 5758 - DNA, 25 bp, Artificial sequence  Extension Primer
  Primer
ttgcagatgtagctagacactataa

SEQ ID NO: 5759 - DNA, 25 bp, Artificial sequence  Extension Primer
  Primer
tttgcaatatcctgcaattgctatt

SEQ ID NO: 5760 - DNA, 25 bp, Artificial sequence  Extension Primer
  Primer
cattgggcacaattaccagaagagg

SEQ ID NO: 5761 - DNA, 25 bp, Artificial sequence  Extension Primer
  Primer
aagaagtaacatgtgataacgtatg

SEQ ID NO: 5762 - DNA, 25 bp, Artificial sequence  Extension Primer
  Primer
aatggattccacttaggattttgta

SEQ ID NO: 5763 - DNA, 25 bp, Artificial sequence  Extension Primer
  Primer
catttagtatttgaacaacagaaaa

SEQ ID NO: 5764 - DNA, 25 bp, Artificial sequence  Extension Primer
  Primer
aatamcaataataataataataaac

SEQ ID NO: 5765 - DNA, 25 bp, Artificial sequence  Extension Primer
  Primer
gtctgcagagactatggcttacaca

SEQ ID NO: 5766 - DNA, 25 bp, Artificial sequence  Extension Primer
  Primer
ttggggactttaaaaatcaggatta

SEQ ID NO: 5767 - DNA, 25 bp, Artificial sequence  Extension Primer
  Primer
gatacaaaagggggaaaaaaactaa

SEQ ID NO: 5768 - DNA, 25 bp, Artificial sequence  Extension Primer
  Primer
tatgtggataattaaaaaataagac

SEQ ID NO: 5769 - DNA, 25 bp, Artificial sequence  Extension Primer
  Primer
aaattcttgggagtttggcaagact

SEQ ID NO: 5770 - DNA, 25 bp, Artificial sequence  Extension Primer
  Primer
ggatgacccccaaattttatttcag

SEQ ID NO: 5771 - DNA, 25 bp, Artificial sequence  Extension Primer
  Primer
actatcttctactatacacaaaaat

SEQ ID NO: 5772 - DNA, 25 bp, Artificial sequence  Extension Primer
  Primer
atcatatcatgaaatcctatactcc

SEQ ID NO: 5773 - DNA, 25 bp, Artificial sequence  Extension Primer
  Primer
ctgaaaaatcaccttctaaaataga

SEQ ID NO: 5774 - DNA, 25 bp, Artificial sequence  Extension Primer
  Primer
aatatacacttattagtatagtatg

SEQ ID NO: 5775 - DNA, 25 bp, Artificial sequence  Extension Primer
  Primer
aaccaaggattccttcagctccaga

SEQ ID NO: 5776 - DNA, 25 bp, Artificial sequence  Extension Primer
  Primer
tttgtgatagggctctgttagagac

SEQ ID NO: 5777 - DNA, 25 bp, Artificial sequence  Extension Primer
  Primer
tattgtatctgtcagactgcattga

SEQ ID NO: 5778 - DNA, 25 bp, Artificial sequence  Extension Primer
  Primer
tgctagttattagcgtttcctccct

SEQ ID NO: 5779 - DNA, 25 bp, Artificial sequence  Extension Primer
  Primer
tatatacttttaatatttcccgcta

SEQ ID NO: 5780 - DNA, 25 bp, Artificial sequence  Extension Primer
  Primer
tgcaggaacagtctgggaattcagg

SEQ ID NO: 5781 - DNA, 25 bp, Artificial sequence  Extension Primer
  Primer
tttatctaataatggcctactggaa

SEQ ID NO: 5782 - DNA, 25 bp, Artificial sequence  Extension Primer
  Primer
cttgaattgactgatgagcccacct

SEQ ID NO: 5783 - DNA, 25 bp, Artificial sequence  Extension Primer
  Primer
cagctactgctgtttctcctggatg

SEQ ID NO: 5784 - DNA, 25 bp, Artificial sequence  Extension Primer
  Primer
acttcagtaaaaacagctcactttt

SEQ ID NO: 5785 - DNA, 25 bp, Artificial sequence  Extension Primer
  Primer
taattggttttaaatgagagaaaca

SEQ ID NO: 5786 - DNA, 25 bp, Artificial sequence  Extension Primer
  Primer
tggaggaaatatagcattgacacag

SEQ ID NO: 5787 - DNA, 25 bp, Artificial sequence  Extension Primer
  Primer
ataacatgctataaacaatgtgatt

SEQ ID NO: 5788 - DNA, 25 bp, Artificial sequence  Extension Primer
  Primer
gggacttctccctttatattcagtc

SEQ ID NO: 5789 - DNA, 25 bp, Artificial sequence  Extension Primer
  Primer
tttgttttctgttttctatgggagc

SEQ ID NO: 5790 - DNA, 25 bp, Artificial sequence  Extension Primer
  Primer
aagtgtttgggcttttcaattaaaa

SEQ ID NO: 5791 - DNA, 25 bp, Artificial sequence  Extension Primer
  Primer
gaatctattttctttattatcatta

SEQ ID NO: 5792 - DNA, 25 bp, Artificial sequence  Extension Primer
  Primer
ttttacctaagtcagtcccttcccc

SEQ ID NO: 5793 - DNA, 25 bp, Artificial sequence  Extension Primer
  Primer
attatcagattgggtctctacctag

SEQ ID NO: 5794 - DNA, 25 bp, Artificial sequence  Extension Primer
  Primer
aggaaaatgggcctaacacaaattt

SEQ ID NO: 5795 - DNA, 25 bp, Artificial sequence  Extension Primer
  Primer
cctggttccctttcttctgcatcty

SEQ ID NO: 5796 - DNA, 25 bp, Artificial sequence  Extension Primer
  Primer
gggattcctcatgctgagtaacaag

SEQ ID NO: 5797 - DNA, 25 bp, Artificial sequence  Extension Primer
  Primer
cacagagtctgctgctgctgcctaa

SEQ ID NO: 5798 - DNA, 25 bp, Artificial sequence  Extension Primer
  Primer
tgcagcccctcatctttaaacagaa

SEQ ID NO: 5799 - DNA, 25 bp, Artificial sequence  Extension Primer
  Primer
cgaatcaaggtaagcagtttgactt

SEQ ID NO: 5800 - DNA, 25 bp, Artificial sequence  Extension Primer
  Primer
tctacagtacccaggacagcttccg

SEQ ID NO: 5801 - DNA, 25 bp, Artificial sequence  Extension Primer
  Primer
tgactggcagagatcttgggagccc

SEQ ID NO: 5802 - DNA, 25 bp, Artificial sequence  Extension Primer
  Primer
atgtttatgtaagtaggtgctttac

SEQ ID NO: 5803 - DNA, 25 bp, Artificial sequence  Extension Primer
  Primer
cacttctgcctatgtattctcgttg

SEQ ID NO: 5804 - DNA, 25 bp, Artificial sequence  Extension Primer
  Primer
tttagagaatttaaataattgtctt

SEQ ID NO: 5805 - DNA, 25 bp, Artificial sequence  Extension Primer
  Primer
cataagtgaaaaaaataagttacag

SEQ ID NO: 5806 - DNA, 25 bp, Artificial sequence  Extension Primer
  Primer
aagtactgaagtagactctatgaac

SEQ ID NO: 5807 - DNA, 25 bp, Artificial sequence  Extension Primer
  Primer
tatgtttcccagttcctgacaagtt

SEQ ID NO: 5808 - DNA, 25 bp, Artificial sequence  Extension Primer
  Primer
gccatggtttttcctttaagacttt

SEQ ID NO: 5809 - DNA, 25 bp, Artificial sequence  Extension Primer
  Primer
agcattattatattcatggctattc

SEQ ID NO: 5810 - DNA, 25 bp, Artificial sequence  Extension Primer
  Primer
ttatgattagaacacattaaaaaac

SEQ ID NO: 5811 - DNA, 25 bp, Artificial sequence  Extension Primer
  Primer
tactgagatctaatctatataattt

SEQ ID NO: 5812 - DNA, 25 bp, Artificial sequence  Extension Primer
  Primer
ttctggtaccgactttcaaggatgc

SEQ ID NO: 5813 - DNA, 25 bp, Artificial sequence  Extension Primer
  Primer
ggtttgttttctgcatcaacacagc

SEQ ID NO: 5814 - DNA, 25 bp, Artificial sequence  Extension Primer
  Primer
gctggctatctggctgggaaaggaa

SEQ ID NO: 5815 - DNA, 25 bp, Artificial sequence  Extension Primer
  Primer
cacacttgctcctacctgccgaccc

SEQ ID NO: 5816 - DNA, 25 bp, Artificial sequence  Extension Primer
  Primer
tcgtgttgccgatcttgttacaggt

SEQ ID NO: 5817 - DNA, 25 bp, Artificial sequence  Extension Primer
  Primer
tacttaatctataccaagagacact

SEQ ID NO: 5818 - DNA, 25 bp, Artificial sequence  Extension Primer
  Primer
caacacctggatctgtccccgggtc

SEQ ID NO: 5819 - DNA, 25 bp, Artificial sequence  Extension Primer
  Primer
ctgtcaaagtaccaaattgagcatc

SEQ ID NO: 5820 - DNA, 25 bp, Artificial sequence  Extension Primer
  Primer
caactctagctgtaaagaaattgga

SEQ ID NO: 5821 - DNA, 25 bp, Artificial sequence  Extension Primer
  Primer
tcttatctataaggtggacaagaac

SEQ ID NO: 5822 - DNA, 25 bp, Artificial sequence  Extension Primer
  Primer
aagcaaccaccccagctgtgacttg

SEQ ID NO: 5823 - DNA, 25 bp, Artificial sequence  Extension Primer
  Primer
atagggcaggacagagccctttctg

SEQ ID NO: 5824 - DNA, 25 bp, Artificial sequence  Extension Primer
  Primer
ggatgcagtgactgatcaactgtcc

SEQ ID NO: 5825 - DNA, 25 bp, Artificial sequence  Extension Primer
  Primer
ctactggtggcaaaggctggaacaa

SEQ ID NO: 5826 - DNA, 25 bp, Artificial sequence  Extension Primer
  Primer
cacagccccctacaatccaaactac

SEQ ID NO: 5827 - DNA, 25 bp, Artificial sequence  Extension Primer
  Primer
ggggcttcctggcaccagccacatg

SEQ ID NO: 5828 - DNA, 25 bp, Artificial sequence  Extension Primer
  Primer
gattgtcggtgttgccagctctgtg

SEQ ID NO: 5829 - DNA, 25 bp, Artificial sequence  Extension Primer
  Primer
gtccattcttttcccttaggaccac

SEQ ID NO: 5830 - DNA, 25 bp, Artificial sequence  Extension Primer
  Primer
gtgggacaggccasgggagcagagc

SEQ ID NO: 5831 - DNA, 25 bp, Artificial sequence  Extension Primer
  Primer
tggccactgtgaaaggccggcccac

SEQ ID NO: 5832 - DNA, 25 bp, Artificial sequence  Extension Primer
  Primer
atggaatagggtagaagtaagggat

SEQ ID NO: 5833 - DNA, 25 bp, Artificial sequence  Extension Primer
  Primer
ataaagaggttggggtgcatcaggg

SEQ ID NO: 5834 - DNA, 25 bp, Artificial sequence  Extension Primer
  Primer
acgattccccctccatttggtcctg

SEQ ID NO: 5835 - DNA, 25 bp, Artificial sequence  Extension Primer
  Primer
gcagactttaaatataaaatatgag

SEQ ID NO: 5836 - DNA, 25 bp, Artificial sequence  Extension Primer
  Primer
atgaaggccaaaaagatgaaataat

SEQ ID NO: 5837 - DNA, 25 bp, Artificial sequence  Extension Primer
  Primer
aagctttgatatcaaaaattaagat

SEQ ID NO: 5838 - DNA, 25 bp, Artificial sequence  Extension Primer
  Primer
cccatactttcacagttgtaaagat

SEQ ID NO: 5839 - DNA, 25 bp, Artificial sequence  Extension Primer
  Primer
aatgaactacttcagtgttacttaa

SEQ ID NO: 5840 - DNA, 25 bp, Artificial sequence  Extension Primer
  Primer
ggaattctgaaaaatacagttgata

SEQ ID NO: 5841 - DNA, 25 bp, Artificial sequence  Extension Primer
  Primer
ttgaaaacataacttctaggtttga

SEQ ID NO: 5842 - DNA, 25 bp, Artificial sequence  Extension Primer
  Primer
aaaattctaacaattctatgttcac

SEQ ID NO: 5843 - DNA, 25 bp, Artificial sequence  Extension Primer
  Primer
tggataaccagactgaaaaaataaa

SEQ ID NO: 5844 - DNA, 25 bp, Artificial sequence  Extension Primer
  Primer
aaaaggattctgtgaaggtaaaaat

SEQ ID NO: 5845 - DNA, 25 bp, Artificial sequence  Extension Primer
  Primer
gcgaagccaagcgctccatcctttg

SEQ ID NO: 5846 - DNA, 25 bp, Artificial sequence  Extension Primer
  Primer
gcaagctgacctagggaatgygtca

SEQ ID NO: 5847 - DNA, 25 bp, Artificial sequence  Extension Primer
  Primer
tgggcacacacggatggaggctttt

SEQ ID NO: 5848 - DNA, 25 bp, Artificial sequence  Extension Primer
  Primer
agtgaattctcatcccyagtaccac

SEQ ID NO: 5849 - DNA, 25 bp, Artificial sequence  Extension Primer
  Primer
aatgttgaaggtacagatacagaca

SEQ ID NO: 5850 - DNA, 25 bp, Artificial sequence  Extension Primer
  Primer
acatcgatggcaagcgaggacatgc

SEQ ID NO: 5851 - DNA, 25 bp, Artificial sequence  Extension Primer
  Primer
gttgcaccattcacatgcttcccaa

SEQ ID NO: 5852 - DNA, 22 bp, Artificial sequence  Extension Primer
  Primer
cagagagggattggatgatggg

SEQ ID NO: 5853 - DNA, 25 bp, Artificial sequence  Extension Primer
  Primer
ggtccaatgattaaggctctgcatt

SEQ ID NO: 5854 - DNA, 25 bp, Artificial sequence  Extension Primer
  Primer
gcccctttgatagaaggagaggact

SEQ ID NO: 5855 - DNA, 25 bp, Artificial sequence  Extension Primer
  Primer
tgaccttgtaaatttctgtggccct

SEQ ID NO: 5856 - DNA, 25 bp, Artificial sequence  Extension Primer
  Primer
taaggccattcatcatcaaggccct

SEQ ID NO: 5857 - DNA, 25 bp, Artificial sequence  Extension Primer
  Primer
tgcccccccagttggagcccagcat

SEQ ID NO: 5858 - DNA, 25 bp, Artificial sequence  Extension Primer
  Primer
ttcgaagactgtagatgagagggtt

SEQ ID NO: 5859 - DNA, 25 bp, Artificial sequence  Extension Primer
  Primer
gaggtgaaccagaaagccatatttt

SEQ ID NO: 5860 - DNA, 25 bp, Artificial sequence  Extension Primer
  Primer
tactgttgtgagtgagatggtgaaa

SEQ ID NO: 5861 - DNA, 25 bp, Artificial sequence  Extension Primer
  Primer
ggatatcttgcatatttccaacatt

SEQ ID NO: 5862 - DNA, 25 bp, Artificial sequence  Extension Primer
  Primer
tttcattctcactcaaatcctctac

SEQ ID NO: 5863 - DNA, 25 bp, Artificial sequence  Extension Primer
  Primer
aagcacaccgaatgtgttagcatga

SEQ ID NO: 5864 - DNA, 25 bp, Artificial sequence  Extension Primer
  Primer
aagggtgacaagctggatggaaaaa

SEQ ID NO: 5865 - DNA, 25 bp, Artificial sequence  Extension Primer
  Primer
cacatctgtagtttttccacttaat

SEQ ID NO: 5866 - DNA, 25 bp, Artificial sequence  Extension Primer
  Primer
cacttatagtaggtggcagtttcct

SEQ ID NO: 5867 - DNA, 25 bp, Artificial sequence  Extension Primer
  Primer
ttttctcctttctgtttcttcatac

SEQ ID NO: 5868 - DNA, 25 bp, Artificial sequence  Extension Primer
  Primer
gtctgatagttgttaaccaagaata

SEQ ID NO: 5869 - DNA, 25 bp, Artificial sequence  Extension Primer
  Primer
gtgttacatttctcttcaagtggca

SEQ ID NO: 5870 - DNA, 25 bp, Artificial sequence  Extension Primer
  Primer
tagtggagaagaatgtatgcttcaa

SEQ ID NO: 5871 - DNA, 25 bp, Artificial sequence  Extension Primer
  Primer
ctgttttctccatggacctccattc

SEQ ID NO: 5872 - DNA, 25 bp, Artificial sequence  Extension Primer
  Primer
attgctcagtacccctggggagatg

SEQ ID NO: 5873 - DNA, 25 bp, Artificial sequence  Extension Primer
  Primer
gctcagagaggcctagtgaccttcc

SEQ ID NO: 5874 - DNA, 25 bp, Artificial sequence  Extension Primer
  Primer
gacaaaaggcagagtgtctcctcta

SEQ ID NO: 5875 - DNA, 25 bp, Artificial sequence  Extension Primer
  Primer
accacagtactgcgggtcttctttg

SEQ ID NO: 5876 - DNA, 25 bp, Artificial sequence  Extension Primer
  Primer
caccatcagcatcatctctatcagt

SEQ ID NO: 5877 - DNA, 25 bp, Artificial sequence  Extension Primer
  Primer
tcctgacatcatcactgcgctaaga

SEQ ID NO: 5878 - DNA, 25 bp, Artificial sequence  Extension Primer
  Primer
atcttattcatggtcaaatacctca

SEQ ID NO: 5879 - DNA, 25 bp, Artificial sequence  Extension Primer
  Primer
cataatataaacaccatcctggtac

SEQ ID NO: 5880 - DNA, 25 bp, Artificial sequence  Extension Primer
  Primer
gggtgacggtgcccacgtatctgtg

SEQ ID NO: 5881 - DNA, 25 bp, Artificial sequence  Extension Primer
  Primer
cacctggacacaggaaaaccaacac

SEQ ID NO: 5882 - DNA, 25 bp, Artificial sequence  Extension Primer
  Primer
gtactgcaaccagagtctccttcag

SEQ ID NO: 5883 - DNA, 25 bp, Artificial sequence  Extension Primer
  Primer
aaatagttgttttcactttcttcct

SEQ ID NO: 5884 - DNA, 25 bp, Artificial sequence  Extension Primer
  Primer
acaccccacaatcctcagggtcatc

SEQ ID NO: 5885 - DNA, 25 bp, Artificial sequence  Extension Primer
  Primer
gaaactattcacccaagcacagttg

SEQ ID NO: 5886 - DNA, 25 bp, Artificial sequence  Extension Primer
  Primer
acgcggggatgtattcaatamattc

SEQ ID NO: 5887 - DNA, 25 bp, Artificial sequence  Extension Primer
  Primer
gagttctttctatcctcttactgtg

SEQ ID NO: 5888 - DNA, 25 bp, Artificial sequence  Extension Primer
  Primer
aaggcagcctgccaggactctttgt

SEQ ID NO: 5889 - DNA, 25 bp, Artificial sequence  Extension Primer
  Primer
gacagcacttctgatggccgcagtg

SEQ ID NO: 5890 - DNA, 25 bp, Artificial sequence  Extension Primer
  Primer
tgattcattcccagtgagccctgtc

SEQ ID NO: 5891 - DNA, 25 bp, Artificial sequence  Extension Primer
  Primer
agctctacaaacactcttaaaggga

SEQ ID NO: 5892 - DNA, 25 bp, Artificial sequence  Extension Primer
  Primer
cctttaaaacactgttcatatcata

SEQ ID NO: 5893 - DNA, 25 bp, Artificial sequence  Extension Primer
  Primer
tcagacaggagactccagacaaata

SEQ ID NO: 5894 - DNA, 25 bp, Artificial sequence  Extension Primer
  Primer
tacaggctaaacatcatcagtgtgg

SEQ ID NO: 5895 - DNA, 25 bp, Artificial sequence  Extension Primer
  Primer
ttatttaaagttttcattcctgtgg

SEQ ID NO: 5896 - DNA, 25 bp, Artificial sequence  Extension Primer
  Primer
tcggggcttaaaagcatgatacagc

SEQ ID NO: 5897 - DNA, 25 bp, Artificial sequence  Extension Primer
  Primer
tgcaaataccagccagggcagactc

SEQ ID NO: 5898 - DNA, 25 bp, Artificial sequence  Extension Primer
  Primer
ttcaccactccattttctttaccca

SEQ ID NO: 5899 - DNA, 25 bp, Artificial sequence  Extension Primer
  Primer
aacacaagagatgtagcaggaacct

SEQ ID NO: 5900 - DNA, 25 bp, Artificial sequence  Extension Primer
  Primer
ctggacactcccctctgctggggtc

SEQ ID NO: 5901 - DNA, 25 bp, Artificial sequence  Extension Primer
  Primer
gcagatggactcatcactgaggaaa

SEQ ID NO: 5902 - DNA, 25 bp, Artificial sequence  Extension Primer
  Primer
acggctctcccagacgtgtgggtca

SEQ ID NO: 5903 - DNA, 25 bp, Artificial sequence  Extension Primer
  Primer
ctatgtaatgccacctccccacacc

SEQ ID NO: 5904 - DNA, 25 bp, Artificial sequence  Extension Primer
  Primer
ggtggggagaaaactgggagatggc

SEQ ID NO: 5905 - DNA, 25 bp, Artificial sequence  Extension Primer
  Primer
tacaccaggctcccctgtccccgac

SEQ ID NO: 5906 - DNA, 25 bp, Artificial sequence  Extension Primer
  Primer
ggggctcttctctgacgtgggggac

SEQ ID NO: 5907 - DNA, 25 bp, Artificial sequence  Extension Primer
  Primer
cagtctccttctgcttcctctgatg

SEQ ID NO: 5908 - DNA, 25 bp, Artificial sequence  Extension Primer
  Primer
gccattctatgacaaccagagtttt

SEQ ID NO: 5909 - DNA, 25 bp, Artificial sequence  Extension Primer
  Primer
ctcctcaggagttctcttaaggttt

SEQ ID NO: 5910 - DNA, 25 bp, Artificial sequence  Extension Primer
  Primer
gctcttacatgtataaaaataacta

SEQ ID NO: 5911 - DNA, 25 bp, Artificial sequence  Extension Primer
  Primer
ttatatgtaaaacagaatcattatc

SEQ ID NO: 5912 - DNA, 25 bp, Artificial sequence  Extension Primer
  Primer
acaccctgtactgagagtcaataaa

SEQ ID NO: 5913 - DNA, 25 bp, Artificial sequence  Extension Primer
  Primer
tatcatttggttgcagcaacaataa

SEQ ID NO: 5914 - DNA, 25 bp, Artificial sequence  Extension Primer
  Primer
actaccacatgtttctgaactatat

SEQ ID NO: 5915 - DNA, 25 bp, Artificial sequence  Extension Primer
  Primer
ataaaatacagcatgtagtccctat

SEQ ID NO: 5916 - DNA, 22 bp, Artificial sequence  Extension Primer
  Primer
agaaatcgaggtcacactcttt

SEQ ID NO: 5917 - DNA, 25 bp, Artificial sequence  Extension Primer
  Primer
actgtctttcttttagagatgaaga

SEQ ID NO: 5918 - DNA, 25 bp, Artificial sequence  Extension Primer
  Primer
ttttctaggtctaatcaataccaat

SEQ ID NO: 5919 - DNA, 25 bp, Artificial sequence  Extension Primer
  Primer
agaatgrgagaagaattgaagacaa

SEQ ID NO: 5920 - DNA, 25 bp, Artificial sequence  Extension Primer
  Primer
ctctgaagtggcccttttaaaaatg

SEQ ID NO: 5921 - DNA, 25 bp, Artificial sequence  Extension Primer
  Primer
catttgagggcaaaatattctggta

SEQ ID NO: 5922 - DNA, 25 bp, Artificial sequence  Extension Primer
  Primer
gggattcaattatttctttccctgc

SEQ ID NO: 5923 - DNA, 25 bp, Artificial sequence  Extension Primer
  Primer
atgctacacagaagcaatacaacac

SEQ ID NO: 5924 - DNA, 25 bp, Artificial sequence  Extension Primer
  Primer
ttcagtcagtaaataaatattcatt

SEQ ID NO: 5925 - DNA, 25 bp, Artificial sequence  Extension Primer
  Primer
aggkgattttaacagatggcatttt

SEQ ID NO: 5926 - DNA, 25 bp, Artificial sequence  Extension Primer
  Primer
ggagggtcaaatatcacagtgaata

SEQ ID NO: 5927 - DNA, 25 bp, Artificial sequence  Extension Primer
  Primer
agtggcactattataactyttctta

SEQ ID NO: 5928 - DNA, 25 bp, Artificial sequence  Extension Primer
  Primer
agggctgactgtacaaattcagtga

SEQ ID NO: 5929 - DNA, 25 bp, Artificial sequence  Extension Primer
  Primer
gtaggaagacaccttgtacctcaca

SEQ ID NO: 5930 - DNA, 25 bp, Artificial sequence  Extension Primer
  Primer
aagtattacagagcacttttacttc

SEQ ID NO: 5931 - DNA, 25 bp, Artificial sequence  Extension Primer
  Primer
tgacagaatcatagaaaagcataaa

SEQ ID NO: 5932 - DNA, 25 bp, Artificial sequence  Extension Primer
  Primer
aatgaatttagaaaaagatagaaaa

SEQ ID NO: 5933 - DNA, 25 bp, Artificial sequence  Extension Primer
  Primer
cagtaaggatttgggactttcrcac

SEQ ID NO: 5934 - DNA, 25 bp, Artificial sequence  Extension Primer
  Primer
ttcaccactccacttcatggtactt

SEQ ID NO: 5935 - DNA, 25 bp, Artificial sequence  Extension Primer
  Primer
gttccccagctgactttgrtaaaga

SEQ ID NO: 5936 - DNA, 25 bp, Artificial sequence  Extension Primer
  Primer
agtttccttggccttctagtgataa

SEQ ID NO: 5937 - DNA, 25 bp, Artificial sequence  Extension Primer
  Primer
attatttacaatggtgtaagatttt

SEQ ID NO: 5938 - DNA, 25 bp, Artificial sequence  Extension Primer
  Primer
ggttcaaagcagaacaggactgtgt

SEQ ID NO: 5939 - DNA, 25 bp, Artificial sequence  Extension Primer
  Primer
tccaagaacttaattacagtagtta

SEQ ID NO: 5940 - DNA, 25 bp, Artificial sequence  Extension Primer
  Primer
cacctaatacttttattaaattatc

SEQ ID NO: 5941 - DNA, 25 bp, Artificial sequence  Extension Primer
  Primer
acactagaatagttgccaatattat

SEQ ID NO: 5942 - DNA, 25 bp, Artificial sequence  Extension Primer
  Primer
gcaaataaataattatcttgttgtt

SEQ ID NO: 5943 - DNA, 25 bp, Artificial sequence  Extension Primer
  Primer
tttctgaaagggatgaaaataaatg

SEQ ID NO: 5944 - DNA, 25 bp, Artificial sequence  Extension Primer
  Primer
attccttggccaaatctgatttcca

SEQ ID NO: 5945 - DNA, 25 bp, Artificial sequence  Extension Primer
  Primer
ytctctctgactctgttactattta

SEQ ID NO: 5946 - DNA, 25 bp, Artificial sequence  Extension Primer
  Primer
actctayaagcacaacagtaagtta

SEQ ID NO: 5947 - DNA, 25 bp, Artificial sequence  Extension Primer
  Primer
aatatgagttgttctctacaagata

SEQ ID NO: 5948 - DNA, 25 bp, Artificial sequence  Extension Primer
  Primer
tggtcaagaaacacttgagtgtcta

SEQ ID NO: 5949 - DNA, 25 bp, Artificial sequence  Extension Primer
  Primer
tttgaattgtgtggattttgaacta

SEQ ID NO: 5950 - DNA, 25 bp, Artificial sequence  Extension Primer
  Primer
aagccagcattaacaaaattacata

SEQ ID NO: 5951 - DNA, 25 bp, Artificial sequence  Extension Primer
  Primer
rcaggtggtatttagataaacatga

SEQ ID NO: 5952 - DNA, 25 bp, Artificial sequence  Extension Primer
  Primer
ttattttgggaggatcatcataatt

SEQ ID NO: 5953 - DNA, 25 bp, Artificial sequence  Extension Primer
  Primer
gcccaaagcaatcccatgaatggtt

SEQ ID NO: 5954 - DNA, 25 bp, Artificial sequence  Extension Primer
  Primer
gtcctgaagataaaggactattcaa

SEQ ID NO: 5955 - DNA, 25 bp, Artificial sequence  Extension Primer
  Primer
cttttcttgtctttttctcattaga

SEQ ID NO: 5956 - DNA, 25 bp, Artificial sequence  Extension Primer
  Primer
agaaagtccagctttcaaacaagaa

SEQ ID NO: 5957 - DNA, 25 bp, Artificial sequence  Extension Primer
  Primer
aaatattctcttttgtaatacaatg

SEQ ID NO: 5958 - DNA, 25 bp, Artificial sequence  Extension Primer
  Primer
tattacttttcacttaatttcctcc

SEQ ID NO: 5959 - DNA, 25 bp, Artificial sequence  Extension Primer
  Primer
gttctatttaccataccctctgtta

SEQ ID NO: 5960 - DNA, 25 bp, Artificial sequence  Extension Primer
  Primer
acagaaaacaaatctcttttggaga

SEQ ID NO: 5961 - DNA, 25 bp, Artificial sequence  Extension Primer
  Primer
ttagtggtctcagcgacacacaact

SEQ ID NO: 5962 - DNA, 25 bp, Artificial sequence  Extension Primer
  Primer
acctcagaaactctcgattcacaga

SEQ ID NO: 5963 - DNA, 25 bp, Artificial sequence  Extension Primer
  Primer
attacctgcaataactctaagtctc

SEQ ID NO: 5964 - DNA, 22 bp, Artificial sequence  Extension Primer
  Primer
agcatcataataaaataaaacc

SEQ ID NO: 5965 - DNA, 25 bp, Artificial sequence  Extension Primer
  Primer
agtggatgaaggggatcaaaaggtt

SEQ ID NO: 5966 - DNA, 25 bp, Artificial sequence  Extension Primer
  Primer
cttaaatcactaatccttccattga

SEQ ID NO: 5967 - DNA, 25 bp, Artificial sequence  Extension Primer
  Primer
tatgtacaatctagagactttggat

SEQ ID NO: 5968 - DNA, 25 bp, Artificial sequence  Extension Primer
  Primer
tgtctgaaagtcttcatcagtagga

SEQ ID NO: 5969 - DNA, 25 bp, Artificial sequence  Extension Primer
  Primer
cttcttcgaggcaggtggaaattct

SEQ ID NO: 5970 - DNA, 25 bp, Artificial sequence  Extension Primer
  Primer
atgctaacatattcaagttgaacca

SEQ ID NO: 5971 - DNA, 25 bp, Artificial sequence  Extension Primer
  Primer
taatagttcctacaaagttgagaca

SEQ ID NO: 5972 - DNA, 25 bp, Artificial sequence  Extension Primer
  Primer
cttccctcaaagagaaaaattatgc

SEQ ID NO: 5973 - DNA, 25 bp, Artificial sequence  Extension Primer
  Primer
taagagttgatgataatacaaatac

SEQ ID NO: 5974 - DNA, 25 bp, Artificial sequence  Extension Primer
  Primer
ttgaatggaggactctccaggcata

SEQ ID NO: 5975 - DNA, 25 bp, Artificial sequence  Extension Primer
  Primer
tggggtcgcaaagagtcaaacacga

SEQ ID NO: 5976 - DNA, 25 bp, Artificial sequence  Extension Primer
  Primer
ttagtaaacacatctgtttcacctt

SEQ ID NO: 5977 - DNA, 25 bp, Artificial sequence  Extension Primer
  Primer
tgacttgaaacgaatgtcttcaaaa

SEQ ID NO: 5978 - DNA, 22 bp, Artificial sequence  Extension Primer
  Primer
gatctaatttaaagactatcaa

SEQ ID NO: 5979 - DNA, 25 bp, Artificial sequence  Extension Primer
  Primer
gtcaacgaatcccttttgagatcac

SEQ ID NO: 5980 - DNA, 25 bp, Artificial sequence  Extension Primer
  Primer
tacaatcccaagatgaacactggat

SEQ ID NO: 5981 - DNA, 25 bp, Artificial sequence  Extension Primer
  Primer
gcaggacttaaaatccccaaccrtg

SEQ ID NO: 5982 - DNA, 25 bp, Artificial sequence  Extension Primer
  Primer
tatagcaggagcttaataggaggag

SEQ ID NO: 5983 - DNA, 25 bp, Artificial sequence  Extension Primer
  Primer
ctgagctgctagtcaggaactgagc

SEQ ID NO: 5984 - DNA, 25 bp, Artificial sequence  Extension Primer
  Primer
cgttatgggtagagcatcccttggc

SEQ ID NO: 5985 - DNA, 25 bp, Artificial sequence  Extension Primer
  Primer
tcgcagtcctgatggttctgaatcc

SEQ ID NO: 5986 - DNA, 25 bp, Artificial sequence  Extension Primer
  Primer
tgcagcctgtactttccttagcaag

SEQ ID NO: 5987 - DNA, 25 bp, Artificial sequence  Extension Primer
  Primer
aaactatcaaacctgatggactaag

SEQ ID NO: 5988 - DNA, 25 bp, Artificial sequence  Extension Primer
  Primer
waaaaacagagtcattgctattcag

SEQ ID NO: 5989 - DNA, 25 bp, Artificial sequence  Extension Primer
  Primer
ttgagtcttaaaaaagcatgtctgt

SEQ ID NO: 5990 - DNA, 25 bp, Artificial sequence  Extension Primer
  Primer
acctgtgaatagttaattatcctcc

SEQ ID NO: 5991 - DNA, 25 bp, Artificial sequence  Extension Primer
  Primer
agctgatagccagctgggattgaga

SEQ ID NO: 5992 - DNA, 22 bp, Artificial sequence  Extension Primer
  Primer
aataatttcctcctgcataacc

SEQ ID NO: 5993 - DNA, 25 bp, Artificial sequence  Extension Primer
  Primer
tataactatcctaaactttcccagg

SEQ ID NO: 5994 - DNA, 22 bp, Artificial sequence  Extension Primer
  Primer
accccctggtcagcagcctgaa

SEQ ID NO: 5995 - DNA, 25 bp, Artificial sequence  Extension Primer
  Primer
aagagctggaggggatggggagtcc

SEQ ID NO: 5996 - DNA, 25 bp, Artificial sequence  Extension Primer
  Primer
cagttcctggsgctgatggcctaac

SEQ ID NO: 5997 - DNA, 25 bp, Artificial sequence  Extension Primer
  Primer
acatctcgcctgagacatgcaatac

SEQ ID NO: 5998 - DNA, 25 bp, Artificial sequence  Extension Primer
  Primer
tactgaatcacattagaaaatgtaa

SEQ ID NO: 5999 - DNA, 25 bp, Artificial sequence  Extension Primer
  Primer
cctgcaaagctccttctaatgattt

SEQ ID NO: 6000 - DNA, 25 bp, Artificial sequence  Extension Primer
  Primer
cttctgggccaacatcagtgactac

SEQ ID NO: 6001 - DNA, 25 bp, Artificial sequence  Extension Primer
  Primer
ggtctgattttgctttatcaatgag

SEQ ID NO: 6002 - DNA, 25 bp, Artificial sequence  Extension Primer
  Primer
taagcaggtttgcaggggctagrgc

SEQ ID NO: 6003 - DNA, 25 bp, Artificial sequence  Extension Primer
  Primer
ggctgtggtcggcatgctgactcag

SEQ ID NO: 6004 - DNA, 25 bp, Artificial sequence  Extension Primer
  Primer
ccagtgtgatcagcagccctgaaac

SEQ ID NO: 6005 - DNA, 25 bp, Artificial sequence  Extension Primer
  Primer
actcttgcctccatcagagcttagc

SEQ ID NO: 6006 - DNA, 25 bp, Artificial sequence  Extension Primer
  Primer
twcattttctagagtgacatcttgg

SEQ ID NO: 6007 - DNA, 25 bp, Artificial sequence  Extension Primer
  Primer
gctggccgggaagaccaatgcacac

SEQ ID NO: 6008 - DNA, 25 bp, Artificial sequence  Extension Primer
  Primer
aaggtgaggctagaattccagatag

SEQ ID NO: 6009 - DNA, 25 bp, Artificial sequence  Extension Primer
  Primer
tgaggaaaaccacttcatagcacac

SEQ ID NO: 6010 - DNA, 25 bp, Artificial sequence  Extension Primer
  Primer
catggtctgcagggaagaaagggtg

SEQ ID NO: 6011 - DNA, 25 bp, Artificial sequence  Extension Primer
  Primer
ggagctagaaggtgtctgtctgtga

SEQ ID NO: 6012 - DNA, 25 bp, Artificial sequence  Extension Primer
  Primer
tgctggactgtgtgatctcaggcta

SEQ ID NO: 6013 - DNA, 25 bp, Artificial sequence  Extension Primer
  Primer
ctggctgcagccggggcgtcttctc

SEQ ID NO: 6014 - DNA, 25 bp, Artificial sequence  Extension Primer
  Primer
tgctgctcactaataacctttcctc

SEQ ID NO: 6015 - DNA, 25 bp, Artificial sequence  Extension Primer
  Primer
aaggagaagtcttaaccactggatc

SEQ ID NO: 6016 - DNA, 25 bp, Artificial sequence  Extension Primer
  Primer
ggaagtccctaaggagctgcatttt

SEQ ID NO: 6017 - DNA, 25 bp, Artificial sequence  Extension Primer
  Primer
gtaggggtcccggtcccctggagtc

SEQ ID NO: 6018 - DNA, 25 bp, Artificial sequence  Extension Primer
  Primer
attcaggcttgagggaggcacagac

SEQ ID NO: 6019 - DNA, 25 bp, Artificial sequence  Extension Primer
  Primer
ggtgctgggtgcgcctagcacagag

SEQ ID NO: 6020 - DNA, 25 bp, Artificial sequence  Extension Primer
  Primer
atacaggtcagagggtcagctacag

SEQ ID NO: 6021 - DNA, 25 bp, Artificial sequence  Extension Primer
  Primer
gaccattctcttacccaccacccac

SEQ ID NO: 6022 - DNA, 25 bp, Artificial sequence  Extension Primer
  Primer
ctgtgtgttcagaacttgccaggtg

SEQ ID NO: 6023 - DNA, 25 bp, Artificial sequence  Extension Primer
  Primer
gcccttcagtgccctccactctatg

SEQ ID NO: 6024 - DNA, 25 bp, Artificial sequence  Extension Primer
  Primer
tygaatggcagcgatgctcagctca

SEQ ID NO: 6025 - DNA, 25 bp, Artificial sequence  Extension Primer
  Primer
tccagttggtaatcccttgcagacc

SEQ ID NO: 6026 - DNA, 25 bp, Artificial sequence  Extension Primer
  Primer
gctgaagaggtcaaactttgccaga

SEQ ID NO: 6027 - DNA, 25 bp, Artificial sequence  Extension Primer
  Primer
cttctgattgttttctakttccatt

SEQ ID NO: 6028 - DNA, 25 bp, Artificial sequence  Extension Primer
  Primer
ctggccaggaaactgacgctggaaa

SEQ ID NO: 6029 - DNA, 25 bp, Artificial sequence  Extension Primer
  Primer
cagcaggtcccagctgagaccygcc

SEQ ID NO: 6030 - DNA, 25 bp, Artificial sequence  Extension Primer
  Primer
gtcgacaccaygctgtgcagggcaa

SEQ ID NO: 6031 - DNA, 25 bp, Artificial sequence  Extension Primer
  Primer
ctcactaaccagccacccaaacccm

SEQ ID NO: 6032 - DNA, 25 bp, Artificial sequence  Extension Primer
  Primer
tataggtacacatagtgtgtttgcc

SEQ ID NO: 6033 - DNA, 25 bp, Artificial sequence  Extension Primer
  Primer
taacatggctcccctggagaaggaa

SEQ ID NO: 6034 - DNA, 25 bp, Artificial sequence  Extension Primer
  Primer
tcctgtcctcagagaggccttcccc

SEQ ID NO: 6035 - DNA, 25 bp, Artificial sequence  Extension Primer
  Primer
aaggagaatcagaaatattccaggg

SEQ ID NO: 6036 - DNA, 25 bp, Artificial sequence  Extension Primer
  Primer
gccctcttttctggtaccctgccct

SEQ ID NO: 6037 - DNA, 25 bp, Artificial sequence  Extension Primer
  Primer
agagggttgtaacttgatcctcttc

SEQ ID NO: 6038 - DNA, 25 bp, Artificial sequence  Extension Primer
  Primer
ctcctgggaggagggtgtgcttgcc

SEQ ID NO: 6039 - DNA, 25 bp, Artificial sequence  Extension Primer
  Primer
acctcyagcagcagatccgaggaca

SEQ ID NO: 6040 - DNA, 25 bp, Artificial sequence  Extension Primer
  Primer
tgggtgtgttgagacagatgtggaa

SEQ ID NO: 6041 - DNA, 25 bp, Artificial sequence  Extension Primer
  Primer
acctygtatgtttctcagagaggca

SEQ ID NO: 6042 - DNA, 25 bp, Artificial sequence  Extension Primer
  Primer
gtgtttaaaatccatactggtcgca

SEQ ID NO: 6043 - DNA, 25 bp, Artificial sequence  Extension Primer
  Primer
ccttcccaagccgtggccsaggcgc

SEQ ID NO: 6044 - DNA, 25 bp, Artificial sequence  Extension Primer
  Primer
tgtagataattcatttaatatttgt

SEQ ID NO: 6045 - DNA, 25 bp, Artificial sequence  Extension Primer
  Primer
tctctttttgtctttaactttcatc

SEQ ID NO: 6046 - DNA, 25 bp, Artificial sequence  Extension Primer
  Primer
ctcttaaaaatttaaaaattaccaa

SEQ ID NO: 6047 - DNA, 25 bp, Artificial sequence  Extension Primer
  Primer
ctagctcactgcctggcatgttaca

SEQ ID NO: 6048 - DNA, 25 bp, Artificial sequence  Extension Primer
  Primer
gagagcggattcatccttggagaag

SEQ ID NO: 6049 - DNA, 22 bp, Artificial sequence  Extension Primer
  Primer
gaaagtgattcctaagatgctt

SEQ ID NO: 6050 - DNA, 25 bp, Artificial sequence  Extension Primer
  Primer
acatataactatagtaccatttcaa

SEQ ID NO: 6051 - DNA, 25 bp, Artificial sequence  Extension Primer
  Primer
agaaaaaaagactccataaaactta

SEQ ID NO: 6052 - DNA, 25 bp, Artificial sequence  Extension Primer
  Primer
agtgcaggctatttctccttttgtg

SEQ ID NO: 6053 - DNA, 25 bp, Artificial sequence  Extension Primer
  Primer
catttctcaaaataatgctgcaaaa

SEQ ID NO: 6054 - DNA, 25 bp, Artificial sequence  Extension Primer
  Primer
tacacaaamaaagcatggtcactgc

SEQ ID NO: 6055 - DNA, 25 bp, Artificial sequence  Extension Primer
  Primer
gacagtatacggatagcattgtttt

SEQ ID NO: 6056 - DNA, 25 bp, Artificial sequence  Extension Primer
  Primer
ggaaatggaaaagaactgrtttttk

SEQ ID NO: 6057 - DNA, 25 bp, Artificial sequence  Extension Primer
  Primer
tttcttgagggttkgggagggtttt

SEQ ID NO: 6058 - DNA, 25 bp, Artificial sequence  Extension Primer
  Primer
ccaagcacattcctgcctctggatt

SEQ ID NO: 6059 - DNA, 25 bp, Artificial sequence  Extension Primer
  Primer
tctgtctccatggacttgctgacts

SEQ ID NO: 6060 - DNA, 25 bp, Artificial sequence  Extension Primer
  Primer
taacctaagtggtataattctgact

SEQ ID NO: 6061 - DNA, 25 bp, Artificial sequence  Extension Primer
  Primer
ctcctgctcccagctccaagccatc

SEQ ID NO: 6062 - DNA, 25 bp, Artificial sequence  Extension Primer
  Primer
agtttgatccctggtcaggaactag

SEQ ID NO: 6063 - DNA, 25 bp, Artificial sequence  Extension Primer
  Primer
tttcctggggatcacccagccgtcc

SEQ ID NO: 6064 - DNA, 25 bp, Artificial sequence  Extension Primer
  Primer
ctcctaattggcttagaactaaaca

SEQ ID NO: 6065 - DNA, 25 bp, Artificial sequence  Extension Primer
  Primer
agaacgctttttgttctaatgtttg

SEQ ID NO: 6066 - DNA, 25 bp, Artificial sequence  Extension Primer
  Primer
aagtgtttagtatagacttcagttt

SEQ ID NO: 6067 - DNA, 25 bp, Artificial sequence  Extension Primer
  Primer
gactgaaagaatacttccataattt

SEQ ID NO: 6068 - DNA, 25 bp, Artificial sequence  Extension Primer
  Primer
atgtaatctgtatccgtggaactgt

SEQ ID NO: 6069 - DNA, 25 bp, Artificial sequence  Extension Primer
  Primer
tggaaatacacttctcctttgrtgg

SEQ ID NO: 6070 - DNA, 25 bp, Artificial sequence  Extension Primer
  Primer
aggtgaacagctgccctatccaatg

SEQ ID NO: 6071 - DNA, 25 bp, Artificial sequence  Extension Primer
  Primer
atcattcacaacacacaacagagag

SEQ ID NO: 6072 - DNA, 25 bp, Artificial sequence  Extension Primer
  Primer
ttgcagtatatgggcttctcattgc

SEQ ID NO: 6073 - DNA, 25 bp, Artificial sequence  Extension Primer
  Primer
aaaacttcctgacaaagtcaatata

SEQ ID NO: 6074 - DNA, 25 bp, Artificial sequence  Extension Primer
  Primer
tgaaaacaaaatccaatagatactt

SEQ ID NO: 6075 - DNA, 25 bp, Artificial sequence  Extension Primer
  Primer
atattagccactggtcaaatgtttc

SEQ ID NO: 6076 - DNA, 25 bp, Artificial sequence  Extension Primer
  Primer
ctggcccttcacttgcattatctaa

SEQ ID NO: 6077 - DNA, 25 bp, Artificial sequence  Extension Primer
  Primer
ggaggaagttttatgtaaactttag

SEQ ID NO: 6078 - DNA, 25 bp, Artificial sequence  Extension Primer
  Primer
tgacagtcttccattaaggcaagtg

SEQ ID NO: 6079 - DNA, 25 bp, Artificial sequence  Extension Primer
  Primer
ttaagaatcttgagatgaattcaga

SEQ ID NO: 6080 - DNA, 25 bp, Artificial sequence  Extension Primer
  Primer
actcttttttcttgttacttacatg

SEQ ID NO: 6081 - DNA, 25 bp, Artificial sequence  Extension Primer
  Primer
actgaaatgtattctctagcttkgt

SEQ ID NO: 6082 - DNA, 25 bp, Artificial sequence  Extension Primer
  Primer
aatctaagctaaaggcacataaatc

SEQ ID NO: 6083 - DNA, 25 bp, Artificial sequence  Extension Primer
  Primer
tgaatgcaagaaaaatgtaacccac

SEQ ID NO: 6084 - DNA, 25 bp, Artificial sequence  Extension Primer
  Primer
agcaytgtgaagaagaaaaggtctt

SEQ ID NO: 6085 - DNA, 25 bp, Artificial sequence  Extension Primer
  Primer
aaaatacgtttaaaatgttgcatct

SEQ ID NO: 6086 - DNA, 25 bp, Artificial sequence  Extension Primer
  Primer
cccactgaatggcttgcgggatctt

SEQ ID NO: 6087 - DNA, 25 bp, Artificial sequence  Extension Primer
  Primer
cctagaatgcacatgcctctctctc

SEQ ID NO: 6088 - DNA, 25 bp, Artificial sequence  Extension Primer
  Primer
actgcatcactctctcaaggtccta

SEQ ID NO: 6089 - DNA, 25 bp, Artificial sequence  Extension Primer
  Primer
tctttttgaagttggaaaatcccga

SEQ ID NO: 6090 - DNA, 25 bp, Artificial sequence  Extension Primer
  Primer
tagaacatgagggccagtagagacg

SEQ ID NO: 6091 - DNA, 25 bp, Artificial sequence  Extension Primer
  Primer
acagtttccacaacatctccggggc

SEQ ID NO: 6092 - DNA, 25 bp, Artificial sequence  Extension Primer
  Primer
ctcygggccatttcaacaataaata

SEQ ID NO: 6093 - DNA, 25 bp, Artificial sequence  Extension Primer
  Primer
aaaattttcattcaccagactcttt

SEQ ID NO: 6094 - DNA, 25 bp, Artificial sequence  Extension Primer
  Primer
gaaaaaaaattggccaaattttcct

SEQ ID NO: 6095 - DNA, 25 bp, Artificial sequence  Extension Primer
  Primer
aaaatgattttggtatacataactg

SEQ ID NO: 6096 - DNA, 25 bp, Artificial sequence  Extension Primer
  Primer
taactggaaattgagcattcccaaa

SEQ ID NO: 6097 - DNA, 25 bp, Artificial sequence  Extension Primer
  Primer
gaagaaaagaaactaaacacataac

SEQ ID NO: 6098 - DNA, 25 bp, Artificial sequence  Extension Primer
  Primer
gaaatgaaagtgttgcacaccttaa

SEQ ID NO: 6099 - DNA, 25 bp, Artificial sequence  Extension Primer
  Primer
ggtagtctgggctggctcagaatgg

SEQ ID NO: 6100 - DNA, 25 bp, Artificial sequence  Extension Primer
  Primer
tctaggcctgacatgagaagccttc

SEQ ID NO: 6101 - DNA, 25 bp, Artificial sequence  Extension Primer
  Primer
agaaatgttgtaacactgaggcttc

SEQ ID NO: 6102 - DNA, 25 bp, Artificial sequence  Extension Primer
  Primer
gtcaccaaggatacttaaaataata

SEQ ID NO: 6103 - DNA, 25 bp, Artificial sequence  Extension Primer
  Primer
aatgggagatgctgttaccattggg

SEQ ID NO: 6104 - DNA, 25 bp, Artificial sequence  Extension Primer
  Primer
ttccggccacattctcactaacccc

SEQ ID NO: 6105 - DNA, 25 bp, Artificial sequence  Extension Primer
  Primer
gacatcaagtacatcgttgttcatg

SEQ ID NO: 6106 - DNA, 25 bp, Artificial sequence  Extension Primer
  Primer
gattgttacggggatatgaacacta

SEQ ID NO: 6107 - DNA, 25 bp, Artificial sequence  Extension Primer
  Primer
ttaccctgacagatgcctggtactt

SEQ ID NO: 6108 - DNA, 25 bp, Artificial sequence  Extension Primer
  Primer
gcttggttttcattcctcaagtctg

SEQ ID NO: 6109 - DNA, 25 bp, Artificial sequence  Extension Primer
  Primer
ttcctcttaagtattattggtgagt

SEQ ID NO: 6110 - DNA, 25 bp, Artificial sequence  Extension Primer
  Primer
tggaggttaaggcctttagggatta

SEQ ID NO: 6111 - DNA, 25 bp, Artificial sequence  Extension Primer
  Primer
aaaacgaagggaacaaaataagtcc

SEQ ID NO: 6112 - DNA, 25 bp, Artificial sequence  Extension Primer
  Primer
agcaaaaatacatcagcaaggatta

SEQ ID NO: 6113 - DNA, 25 bp, Artificial sequence  Extension Primer
  Primer
acatttyccccccgtaactgtcaag

SEQ ID NO: 6114 - DNA, 25 bp, Artificial sequence  Extension Primer
  Primer
taaggagcttaaaaaataaacayac

SEQ ID NO: 6115 - DNA, 25 bp, Artificial sequence  Extension Primer
  Primer
tcacagaagtttgaaattgtttcca

SEQ ID NO: 6116 - DNA, 25 bp, Artificial sequence  Extension Primer
  Primer
tacactatttctattgtaccatctc

SEQ ID NO: 6117 - DNA, 25 bp, Artificial sequence  Extension Primer
  Primer
gactctgcagataggaccaagttaa

SEQ ID NO: 6118 - DNA, 22 bp, Artificial sequence  Extension Primer
  Primer
aatgatttatagtttctttttc

SEQ ID NO: 6119 - DNA, 25 bp, Artificial sequence  Extension Primer
  Primer
gccctcagaagtctggaaacagtcc

SEQ ID NO: 6120 - DNA, 25 bp, Artificial sequence  Extension Primer
  Primer
aaaataatacarcattgkaaagcaa

SEQ ID NO: 6121 - DNA, 25 bp, Artificial sequence  Extension Primer
  Primer
tacacttacaacctaacttcaagga

SEQ ID NO: 6122 - DNA, 25 bp, Artificial sequence  Extension Primer
  Primer
tttcaggaggaagagggtattggag

SEQ ID NO: 6123 - DNA, 25 bp, Artificial sequence  Extension Primer
  Primer
aacacctcctatctgacccttccct

SEQ ID NO: 6124 - DNA, 25 bp, Artificial sequence  Extension Primer
  Primer
agaccagttccaagagggcattaac

SEQ ID NO: 6125 - DNA, 25 bp, Artificial sequence  Extension Primer
  Primer
cgggagtgagtactgttggtggtgt

SEQ ID NO: 6126 - DNA, 25 bp, Artificial sequence  Extension Primer
  Primer
tctgcctttctttggcttgtgcttc

SEQ ID NO: 6127 - DNA, 25 bp, Artificial sequence  Extension Primer
  Primer
acttgaagctattctaggcttctga

SEQ ID NO: 6128 - DNA, 22 bp, Artificial sequence  Extension Primer
  Primer
tgcaagtctgttgttactattt

SEQ ID NO: 6129 - DNA, 25 bp, Artificial sequence  Extension Primer
  Primer
tctttgtgacagttgcatggggttt

SEQ ID NO: 6130 - DNA, 25 bp, Artificial sequence  Extension Primer
  Primer
ctgtgattactttgtgcaaagatgt

SEQ ID NO: 6131 - DNA, 25 bp, Artificial sequence  Extension Primer
  Primer
tgcagaattttaggtggaccrtaaa

SEQ ID NO: 6132 - DNA, 25 bp, Artificial sequence  Extension Primer
  Primer
gggcagtcaagctctacatcctgtc

SEQ ID NO: 6133 - DNA, 25 bp, Artificial sequence  Extension Primer
  Primer
ccttttcaagagaatagcagataaa

SEQ ID NO: 6134 - DNA, 25 bp, Artificial sequence  Extension Primer
  Primer
gaagccacgatgtaatccgccaagg

SEQ ID NO: 6135 - DNA, 25 bp, Artificial sequence  Extension Primer
  Primer
ccacagtagatcccagatttgtcta

SEQ ID NO: 6136 - DNA, 25 bp, Artificial sequence  Extension Primer
  Primer
aagygaacactgggaggagggatga

SEQ ID NO: 6137 - DNA, 25 bp, Artificial sequence  Extension Primer
  Primer
agggtggggtggaaactaagagtct

SEQ ID NO: 6138 - DNA, 25 bp, Artificial sequence  Extension Primer
  Primer
gctgatccctagggattgtattatc

SEQ ID NO: 6139 - DNA, 25 bp, Artificial sequence  Extension Primer
  Primer
tgtttaacacaggcctgtggtttcc

SEQ ID NO: 6140 - DNA, 25 bp, Artificial sequence  Extension Primer
  Primer
acccatcttccatgatgcttcrgca

SEQ ID NO: 6141 - DNA, 25 bp, Artificial sequence  Extension Primer
  Primer
gtaaagtgagagtaccttcccaaaa

SEQ ID NO: 6142 - DNA, 25 bp, Artificial sequence  Extension Primer
  Primer
agaaaacataggctctgctgcctcc

SEQ ID NO: 6143 - DNA, 25 bp, Artificial sequence  Extension Primer
  Primer
cctttcttggcctttagcgtcaaca

SEQ ID NO: 6144 - DNA, 25 bp, Artificial sequence  Extension Primer
  Primer
ggaaatcttggcactaatactaatc

SEQ ID NO: 6145 - DNA, 25 bp, Artificial sequence  Extension Primer
  Primer
tcatcaggttgaaggagaggaaaac

SEQ ID NO: 6146 - DNA, 25 bp, Artificial sequence  Extension Primer
  Primer
taacttcagaccaaccagaggtcac

SEQ ID NO: 6147 - DNA, 25 bp, Artificial sequence  Extension Primer
  Primer
agctgggcttgagcatcagtccctt

SEQ ID NO: 6148 - DNA, 25 bp, Artificial sequence  Extension Primer
  Primer
cacccaccagcagagggaaagagga

SEQ ID NO: 6149 - DNA, 25 bp, Artificial sequence  Extension Primer
  Primer
tgacctccacctcttgctgcaggga

SEQ ID NO: 6150 - DNA, 25 bp, Artificial sequence  Extension Primer
  Primer
cgggctagagactttctgttgccaa

SEQ ID NO: 6151 - DNA, 25 bp, Artificial sequence  Extension Primer
  Primer
gtggaactcatgagtcagtgaggaa

SEQ ID NO: 6152 - DNA, 25 bp, Artificial sequence  Extension Primer
  Primer
cacctgccaatgcaggagacatggg

SEQ ID NO: 6153 - DNA, 22 bp, Artificial sequence  Extension Primer
  Primer
tgtctcacctcatcaagctggg

SEQ ID NO: 6154 - DNA, 22 bp, Artificial sequence  Extension Primer
  Primer
aggctctgggcacaaggaaggc

SEQ ID NO: 6155 - DNA, 25 bp, Artificial sequence  Extension Primer
  Primer
tggggtacacagcactctccaaggc

SEQ ID NO: 6156 - DNA, 25 bp, Artificial sequence  Extension Primer
  Primer
ccggacattgatggagagcagggca

SEQ ID NO: 6157 - DNA, 22 bp, Artificial sequence  Extension Primer
  Primer
gttcggggcggctggtgaacac

SEQ ID NO: 6158 - DNA, 25 bp, Artificial sequence  Extension Primer
  Primer
atgtctgtcccactgttttcatgca

SEQ ID NO: 6159 - DNA, 25 bp, Artificial sequence  Extension Primer
  Primer
cagagaagaatttcttaaatagata

SEQ ID NO: 6160 - DNA, 25 bp, Artificial sequence  Extension Primer
  Primer
gtatcagaaactaagctaaataaat

SEQ ID NO: 6161 - DNA, 25 bp, Artificial sequence  Extension Primer
  Primer
acagaaagaagtgctacacatagat

SEQ ID NO: 6162 - DNA, 25 bp, Artificial sequence  Extension Primer
  Primer
gagataacagttccgtacattatag

SEQ ID NO: 6163 - DNA, 25 bp, Artificial sequence  Extension Primer
  Primer
gagattatgcttcaatatggaatac

SEQ ID NO: 6164 - DNA, 25 bp, Artificial sequence  Extension Primer
  Primer
agactcactatgtaatgagacataa

SEQ ID NO: 6165 - DNA, 25 bp, Artificial sequence  Extension Primer
  Primer
ttgctacctggaacttatttcagtg

SEQ ID NO: 6166 - DNA, 25 bp, Artificial sequence  Extension Primer
  Primer
ctaacacaatactgtaaataaacta

SEQ ID NO: 6167 - DNA, 25 bp, Artificial sequence  Extension Primer
  Primer
ttcatgatttaaaggaccttaacaa

SEQ ID NO: 6168 - DNA, 25 bp, Artificial sequence  Extension Primer
  Primer
aaaaagatagtcctaaactgcaatc

SEQ ID NO: 6169 - DNA, 25 bp, Artificial sequence  Extension Primer
  Primer
ctcattatatatcacaatgcgataa

SEQ ID NO: 6170 - DNA, 25 bp, Artificial sequence  Extension Primer
  Primer
ggtttctaatttcattagattctga

SEQ ID NO: 6171 - DNA, 25 bp, Artificial sequence  Extension Primer
  Primer
tgtataatttttcgtcccactggta

SEQ ID NO: 6172 - DNA, 25 bp, Artificial sequence  Extension Primer
  Primer
aacacttgcttcaagtactctttaa

SEQ ID NO: 6173 - DNA, 25 bp, Artificial sequence  Extension Primer
  Primer
ctgttcccttctctaagtgtaaagt

SEQ ID NO: 6174 - DNA, 22 bp, Artificial sequence  Extension Primer
  Primer
caggtaacggggtagtttgttg

SEQ ID NO: 6175 - DNA, 25 bp, Artificial sequence  Extension Primer
  Primer
ggagatttagagagcaaacacaaca

SEQ ID NO: 6176 - DNA, 25 bp, Artificial sequence  Extension Primer
  Primer
cttaattctacaaaactttgcttag

SEQ ID NO: 6177 - DNA, 25 bp, Artificial sequence  Extension Primer
  Primer
gctaagaaaaattctctaaggaata

SEQ ID NO: 6178 - DNA, 25 bp, Artificial sequence  Extension Primer
  Primer
gcagccagtctcttctgctcattta

SEQ ID NO: 6179 - DNA, 25 bp, Artificial sequence  Extension Primer
  Primer
gatgcttctttgagaagatgtagac

SEQ ID NO: 6180 - DNA, 25 bp, Artificial sequence  Extension Primer
  Primer
aatcattgcatttccatttgatcct

SEQ ID NO: 6181 - DNA, 25 bp, Artificial sequence  Extension Primer
  Primer
cctgggacaaatacataaatgacca

SEQ ID NO: 6182 - DNA, 25 bp, Artificial sequence  Extension Primer
  Primer
tatattccagttcgaagtgaaaatg

SEQ ID NO: 6183 - DNA, 25 bp, Artificial sequence  Extension Primer
  Primer
gtacaatttgatgaattttgacaaa

SEQ ID NO: 6184 - DNA, 25 bp, Artificial sequence  Extension Primer
  Primer
ctaaactgatgaagagaaaagcagc

SEQ ID NO: 6185 - DNA, 25 bp, Artificial sequence  Extension Primer
  Primer
aaaaaaaaaactaygtaggagggaa

SEQ ID NO: 6186 - DNA, 25 bp, Artificial sequence  Extension Primer
  Primer
tcaccccaggtggagaatgagtgag

SEQ ID NO: 6187 - DNA, 25 bp, Artificial sequence  Extension Primer
  Primer
gcataaaattcttttcctcttccca

SEQ ID NO: 6188 - DNA, 25 bp, Artificial sequence  Extension Primer
  Primer
cctcctacgtgactgagatacctac

SEQ ID NO: 6189 - DNA, 25 bp, Artificial sequence  Extension Primer
  Primer
ttcttattgctgctgaaacaaatac

SEQ ID NO: 6190 - DNA, 25 bp, Artificial sequence  Extension Primer
  Primer
tccactttaaaattgtgttgagcac

SEQ ID NO: 6191 - DNA, 25 bp, Artificial sequence  Extension Primer
  Primer
caaaaaaaaaccatccccaagaggc

SEQ ID NO: 6192 - DNA, 25 bp, Artificial sequence  Extension Primer
  Primer
ttttctrcatataagaccaagctta

SEQ ID NO: 6193 - DNA, 25 bp, Artificial sequence  Extension Primer
  Primer
agcgcctgagaggctgggcgggaga

SEQ ID NO: 6194 - DNA, 25 bp, Artificial sequence  Extension Primer
  Primer
tggggggcccgtcgggtcccatctg

SEQ ID NO: 6195 - DNA, 25 bp, Artificial sequence  Extension Primer
  Primer
gacaggaagaaggtgaggccgagtc

SEQ ID NO: 6196 - DNA, 22 bp, Artificial sequence  Extension Primer
  Primer
tctggctgccatttggtaactg

SEQ ID NO: 6197 - DNA, 25 bp, Artificial sequence  Extension Primer
  Primer
ttagtgactaaaagatgctccttgt

SEQ ID NO: 6198 - DNA, 25 bp, Artificial sequence  Extension Primer
  Primer
tctcatccctcagaactcttgatgt

SEQ ID NO: 6199 - DNA, 25 bp, Artificial sequence  Extension Primer
  Primer
ccatccataacttcatggcgacrcc

SEQ ID NO: 6200 - DNA, 25 bp, Artificial sequence  Extension Primer
  Primer
gctagctctgggaagaaaaggttta

SEQ ID NO: 6201 - DNA, 25 bp, Artificial sequence  Extension Primer
  Primer
gaacctggacttgagtttctgtgtt

SEQ ID NO: 6202 - DNA, 25 bp, Artificial sequence  Extension Primer
  Primer
aaaacgccagctgatgcacttggag

SEQ ID NO: 6203 - DNA, 25 bp, Artificial sequence  Extension Primer
  Primer
ttacagaccgagagatcctgagcca

SEQ ID NO: 6204 - DNA, 25 bp, Artificial sequence  Extension Primer
  Primer
ccttctatcacttccctgccctgcg

SEQ ID NO: 6205 - DNA, 25 bp, Artificial sequence  Extension Primer
  Primer
ctgtccttttcatcctaacactatt

SEQ ID NO: 6206 - DNA, 25 bp, Artificial sequence  Extension Primer
  Primer
acacagtgtctacatcaaatgacat

SEQ ID NO: 6207 - DNA, 25 bp, Artificial sequence  Extension Primer
  Primer
ttttttccaattaatttctctttta

SEQ ID NO: 6208 - DNA, 25 bp, Artificial sequence  Extension Primer
  Primer
tgtttatgagaggtcagattttctt

SEQ ID NO: 6209 - DNA, 25 bp, Artificial sequence  Extension Primer
  Primer
tcaatcccatacttggaaaccacat

SEQ ID NO: 6210 - DNA, 25 bp, Artificial sequence  Extension Primer
  Primer
ggcttagtggtaaagaatctgctta

SEQ ID NO: 6211 - DNA, 25 bp, Artificial sequence  Extension Primer
  Primer
gaagatatgttagttttcatttttg

SEQ ID NO: 6212 - DNA, 25 bp, Artificial sequence  Extension Primer
  Primer
cagcaaagctgtcgaaacaaagtga

SEQ ID NO: 6213 - DNA, 25 bp, Artificial sequence  Extension Primer
  Primer
gcagtaayagttgattgtaccttga

SEQ ID NO: 6214 - DNA, 25 bp, Artificial sequence  Extension Primer
  Primer
cgttgcttaaayaagcatctatact

SEQ ID NO: 6215 - DNA, 25 bp, Artificial sequence  Extension Primer
  Primer
taaaatttcaatcttatatttgatc

SEQ ID NO: 6216 - DNA, 25 bp, Artificial sequence  Extension Primer
  Primer
tttgacaccaatgcagaataagtca

SEQ ID NO: 6217 - DNA, 25 bp, Artificial sequence  Extension Primer
  Primer
ccatgtgatttgaataaactgtctg

SEQ ID NO: 6218 - DNA, 25 bp, Artificial sequence  Extension Primer
  Primer
gtatctttactatgatgtctatgta

SEQ ID NO: 6219 - DNA, 25 bp, Artificial sequence  Extension Primer
  Primer
tccaatttgtcacaaatacaagtgc

SEQ ID NO: 6220 - DNA, 25 bp, Artificial sequence  Extension Primer
  Primer
aaaggtagtggtcttctgtagcagt

SEQ ID NO: 6221 - DNA, 25 bp, Artificial sequence  Extension Primer
  Primer
gttgtgggtcttatttttattagcc

SEQ ID NO: 6222 - DNA, 25 bp, Artificial sequence  Extension Primer
  Primer
tcgaagaactgaatttagataccca

SEQ ID NO: 6223 - DNA, 25 bp, Artificial sequence  Extension Primer
  Primer
gcttttcctgcacctcctgtctctc

SEQ ID NO: 6224 - DNA, 22 bp, Artificial sequence  Extension Primer
  Primer
acagaatcaggatgctgtgttt

SEQ ID NO: 6225 - DNA, 25 bp, Artificial sequence  Extension Primer
  Primer
ccccaaccaagggacacaggaaaga

SEQ ID NO: 6226 - DNA, 25 bp, Artificial sequence  Extension Primer
  Primer
tcccaggtggcccctcccctcygac

SEQ ID NO: 6227 - DNA, 25 bp, Artificial sequence  Extension Primer
  Primer
gacagggagtggaacagctggaaac

SEQ ID NO: 6228 - DNA, 25 bp, Artificial sequence  Extension Primer
  Primer
accacagctcggtccctggtgaatg

SEQ ID NO: 6229 - DNA, 25 bp, Artificial sequence  Extension Primer
  Primer
tctaactgggcatcctgtaatttta

SEQ ID NO: 6230 - DNA, 25 bp, Artificial sequence  Extension Primer
  Primer
ttccctcctgtcagcccctcctctc

SEQ ID NO: 6231 - DNA, 25 bp, Artificial sequence  Extension Primer
  Primer
gattaagcagtatctcgtctccact

SEQ ID NO: 6232 - DNA, 25 bp, Artificial sequence  Extension Primer
  Primer
ggggccccgacacagggcctttgta

SEQ ID NO: 6233 - DNA, 25 bp, Artificial sequence  Extension Primer
  Primer
cacgtggcctccatacagtgactcc

SEQ ID NO: 6234 - DNA, 25 bp, Artificial sequence  Extension Primer
  Primer
taaacagctgtggtcgcccaccatc

SEQ ID NO: 6235 - DNA, 25 bp, Artificial sequence  Extension Primer
  Primer
taatttgctatctgagaactcttct

SEQ ID NO: 6236 - DNA, 25 bp, Artificial sequence  Extension Primer
  Primer
ggcaaatccatattatcccctaatc

SEQ ID NO: 6237 - DNA, 25 bp, Artificial sequence  Extension Primer
  Primer
aataacactttaaatattatggttc

SEQ ID NO: 6238 - DNA, 25 bp, Artificial sequence  Extension Primer
  Primer
ccatagccagtaaagtaaaatcaag

SEQ ID NO: 6239 - DNA, 25 bp, Artificial sequence  Extension Primer
  Primer
acattttctactgctttctttctaa

SEQ ID NO: 6240 - DNA, 25 bp, Artificial sequence  Extension Primer
  Primer
tattggagtataggacagatgagcc

SEQ ID NO: 6241 - DNA, 25 bp, Artificial sequence  Extension Primer
  Primer
tacgctataggaggatgaaatgtgg

SEQ ID NO: 6242 - DNA, 25 bp, Artificial sequence  Extension Primer
  Primer
ggcaaggggaccttgtccaagaatc

SEQ ID NO: 6243 - DNA, 25 bp, Artificial sequence  Extension Primer
  Primer
cgggaaactgcgctgcacgtggcac

SEQ ID NO: 6244 - DNA, 25 bp, Artificial sequence  Extension Primer
  Primer
gggctggagggaggacatggtgggc

SEQ ID NO: 6245 - DNA, 25 bp, Artificial sequence  Extension Primer
  Primer
tgtgtttcagccttgccatgcacct

SEQ ID NO: 6246 - DNA, 25 bp, Artificial sequence  Extension Primer
  Primer
ggtgcagaccggggtgccatgcgga

SEQ ID NO: 6247 - DNA, 25 bp, Artificial sequence  Extension Primer
  Primer
cacctcaagacagagcccaacaggc

SEQ ID NO: 6248 - DNA, 25 bp, Artificial sequence  Extension Primer
  Primer
catacacattgaatgtatatttata

SEQ ID NO: 6249 - DNA, 25 bp, Artificial sequence  Extension Primer
  Primer
ccacaagagactaattgcaactcct

SEQ ID NO: 6250 - DNA, 25 bp, Artificial sequence  Extension Primer
  Primer
tttttaattggaagaaattgcttta

SEQ ID NO: 6251 - DNA, 25 bp, Artificial sequence  Extension Primer
  Primer
ctgagagcgcgccttggtgacaggg

SEQ ID NO: 6252 - DNA, 25 bp, Artificial sequence  Extension Primer
  Primer
ggagtggaggggggatgtggccaag

SEQ ID NO: 6253 - DNA, 25 bp, Artificial sequence  Extension Primer
  Primer
ccacatccaggggcacagagagccc

SEQ ID NO: 6254 - DNA, 25 bp, Artificial sequence  Extension Primer
  Primer
gtgtcaagtgcccctcatgggaaga

SEQ ID NO: 6255 - DNA, 25 bp, Artificial sequence  Extension Primer
  Primer
gtgggacctttaggagatcataaga

SEQ ID NO: 6256 - DNA, 25 bp, Artificial sequence  Extension Primer
  Primer
tgcagcctgtgcacttagagcccac

SEQ ID NO: 6257 - DNA, 25 bp, Artificial sequence  Extension Primer
  Primer
gcactgaatctatagattgctttgg

SEQ ID NO: 6258 - DNA, 25 bp, Artificial sequence  Extension Primer
  Primer
tccacaratctctacctaattaaca

SEQ ID NO: 6259 - DNA, 25 bp, Artificial sequence  Extension Primer
  Primer
atcaatgattacatttgatttttca

SEQ ID NO: 6260 - DNA, 25 bp, Artificial sequence  Extension Primer
  Primer
ccatatttaaataataataaggtcc

SEQ ID NO: 6261 - DNA, 25 bp, Artificial sequence  Extension Primer
  Primer
gcaaaatctagcatacttacagcac

SEQ ID NO: 6262 - DNA, 25 bp, Artificial sequence  Extension Primer
  Primer
cattttattaaaacttcttcaaccc

SEQ ID NO: 6263 - DNA, 25 bp, Artificial sequence  Extension Primer
  Primer
cccctaacgtgcctggtcactggcc

SEQ ID NO: 6264 - DNA, 25 bp, Artificial sequence  Extension Primer
  Primer
ctttatattttgaacgtagcatttg

SEQ ID NO: 6265 - DNA, 25 bp, Artificial sequence  Extension Primer
  Primer
tacgttagttcacctaaagacaatc

SEQ ID NO: 6266 - DNA, 25 bp, Artificial sequence  Extension Primer
  Primer
cccccatggggccagcccacctgag

SEQ ID NO: 6267 - DNA, 25 bp, Artificial sequence  Extension Primer
  Primer
gggatggtcccacattgcccactat

SEQ ID NO: 6268 - DNA, 25 bp, Artificial sequence  Extension Primer
  Primer
atgtcctggggagcagctggagaac

SEQ ID NO: 6269 - DNA, 25 bp, Artificial sequence  Extension Primer
  Primer
ccccaccacccctctgccatgtaat

SEQ ID NO: 6270 - DNA, 25 bp, Artificial sequence  Extension Primer
  Primer
gctgggtccagtccgcagtcagtaa

SEQ ID NO: 6271 - DNA, 25 bp, Artificial sequence  Extension Primer
  Primer
cagtgatgaggtcttstgcctgctt

SEQ ID NO: 6272 - DNA, 25 bp, Artificial sequence  Extension Primer
  Primer
gatgacattgttttcccaccaactc

SEQ ID NO: 6273 - DNA, 25 bp, Artificial sequence  Extension Primer
  Primer
gttcctctcctttcctttcctttca

SEQ ID NO: 6274 - DNA, 25 bp, Artificial sequence  Extension Primer
  Primer
gagaatgccgtttctttggctgtcc

SEQ ID NO: 6275 - DNA, 25 bp, Artificial sequence  Extension Primer
  Primer
agacatcttggtgagtcgctcctcc

SEQ ID NO: 6276 - DNA, 25 bp, Artificial sequence  Extension Primer
  Primer
agcttcccttggcttcacagaccac

SEQ ID NO: 6277 - DNA, 25 bp, Artificial sequence  Extension Primer
  Primer
tagtttcctacatgcttgtggcctc

SEQ ID NO: 6278 - DNA, 25 bp, Artificial sequence  Extension Primer
  Primer
gagtgtgaaggctagggcccrmcac

SEQ ID NO: 6279 - DNA, 25 bp, Artificial sequence  Extension Primer
  Primer
agagactgagggtggggagaaaagc

SEQ ID NO: 6280 - DNA, 25 bp, Artificial sequence  Extension Primer
  Primer
ttaaaaattgacagaattgaccaga

SEQ ID NO: 6281 - DNA, 25 bp, Artificial sequence  Extension Primer
  Primer
aatagtaaggaatgtctgaaatgtc

SEQ ID NO: 6282 - DNA, 25 bp, Artificial sequence  Extension Primer
  Primer
agaaattggttctcagacttcactg

SEQ ID NO: 6283 - DNA, 25 bp, Artificial sequence  Extension Primer
  Primer
tgcagctgaacaagtcaagttctaa

SEQ ID NO: 6284 - DNA, 25 bp, Artificial sequence  Extension Primer
  Primer
ggtccacactgacagacggacactc

SEQ ID NO: 6285 - DNA, 25 bp, Artificial sequence  Extension Primer
  Primer
cgatgtagaattaaacatgtgcaga

SEQ ID NO: 6286 - DNA, 25 bp, Artificial sequence  Extension Primer
  Primer
caaaggtccacctgttgactaagcc

SEQ ID NO: 6287 - DNA, 25 bp, Artificial sequence  Extension Primer
  Primer
ctaggtaccactcatggggagcatc

SEQ ID NO: 6288 - DNA, 25 bp, Artificial sequence  Extension Primer
  Primer
tgacctgtgaactttaattgggaag

SEQ ID NO: 6289 - DNA, 25 bp, Artificial sequence  Extension Primer
  Primer
tctcctccaggcggatggtcatggc

SEQ ID NO: 6290 - DNA, 25 bp, Artificial sequence  Extension Primer
  Primer
gaggygtgtcgatgaagtcaaaccc

SEQ ID NO: 6291 - DNA, 25 bp, Artificial sequence  Extension Primer
  Primer
tggtgtatggggatggttttcagga

SEQ ID NO: 6292 - DNA, 25 bp, Artificial sequence  Extension Primer
  Primer
cagcataaaggaagagtctggtggc

SEQ ID NO: 6293 - DNA, 22 bp, Artificial sequence  Extension Primer
  Primer
ccgggatgcrgggagctgagcc

SEQ ID NO: 6294 - DNA, 25 bp, Artificial sequence  Extension Primer
  Primer
gaggatgggctatgggtgtctttgg

SEQ ID NO: 6295 - DNA, 25 bp, Artificial sequence  Extension Primer
  Primer
gcattgtattttaactaagtattcc

SEQ ID NO: 6296 - DNA, 25 bp, Artificial sequence  Extension Primer
  Primer
atatgtcatttctttcattgtgaac

SEQ ID NO: 6297 - DNA, 25 bp, Artificial sequence  Extension Primer
  Primer
atgcaagtaaggatgactattccac

SEQ ID NO: 6298 - DNA, 25 bp, Artificial sequence  Extension Primer
  Primer
aagactgtcataattgtttgctgtg

SEQ ID NO: 6299 - DNA, 25 bp, Artificial sequence  Extension Primer
  Primer
ggtagctgcaaccatgcttgctcct

SEQ ID NO: 6300 - DNA, 25 bp, Artificial sequence  Extension Primer
  Primer
ctgcacatttcctgtgatttagtac

SEQ ID NO: 6301 - DNA, 25 bp, Artificial sequence  Extension Primer
  Primer
actctatttggaagcatgctcctct

SEQ ID NO: 6302 - DNA, 25 bp, Artificial sequence  Extension Primer
  Primer
ctcgcaaataaaaatgtggtctttg

SEQ ID NO: 6303 - DNA, 25 bp, Artificial sequence  Extension Primer
  Primer
rgttgagtcaattaacataatttga

SEQ ID NO: 6304 - DNA, 25 bp, Artificial sequence  Extension Primer
  Primer
cacagctgccagcaatccagttagg

SEQ ID NO: 6305 - DNA, 25 bp, Artificial sequence  Extension Primer
  Primer
gaatgcaatcaaatagccaaatgta

SEQ ID NO: 6306 - DNA, 25 bp, Artificial sequence  Extension Primer
  Primer
ctcccctaacctatcactagaagac

SEQ ID NO: 6307 - DNA, 25 bp, Artificial sequence  Extension Primer
  Primer
caggaacacggttacttatccaagt

SEQ ID NO: 6308 - DNA, 25 bp, Artificial sequence  Extension Primer
  Primer
atgagaactagtggatggtgctgtt

SEQ ID NO: 6309 - DNA, 25 bp, Artificial sequence  Extension Primer
  Primer
tgttctccctttactgtatttattc

SEQ ID NO: 6310 - DNA, 25 bp, Artificial sequence  Extension Primer
  Primer
tctttttctttgtcctttgtgtttt

SEQ ID NO: 6311 - DNA, 25 bp, Artificial sequence  Extension Primer
  Primer
gggttgagcactttcagatttaaca

SEQ ID NO: 6312 - DNA, 25 bp, Artificial sequence  Extension Primer
  Primer
crctcctctttgatttatttacaac

SEQ ID NO: 6313 - DNA, 25 bp, Artificial sequence  Extension Primer
  Primer
tttcaggtatacattaytggtttct

SEQ ID NO: 6314 - DNA, 25 bp, Artificial sequence  Extension Primer
  Primer
caccttggcctctctgtgagtctga

SEQ ID NO: 6315 - DNA, 25 bp, Artificial sequence  Extension Primer
  Primer
attcaagtgaatagtgatgatggtt

SEQ ID NO: 6316 - DNA, 25 bp, Artificial sequence  Extension Primer
  Primer
ctagaattgcaaagtttatttaagg

SEQ ID NO: 6317 - DNA, 25 bp, Artificial sequence  Extension Primer
  Primer
gcattatacaaaataggcagracat

SEQ ID NO: 6318 - DNA, 25 bp, Artificial sequence  Extension Primer
  Primer
gaatattaccactgtgtagaatacc

SEQ ID NO: 6319 - DNA, 25 bp, Artificial sequence  Extension Primer
  Primer
ggagaatggcattgaaacatgtata

SEQ ID NO: 6320 - DNA, 25 bp, Artificial sequence  Extension Primer
  Primer
acaatatgcattaggattagctgct

SEQ ID NO: 6321 - DNA, 25 bp, Artificial sequence  Extension Primer
  Primer
aagaaaacattaagctcagggrgac

SEQ ID NO: 6322 - DNA, 25 bp, Artificial sequence  Extension Primer
  Primer
aatagaaatcacaaagtcacattac

SEQ ID NO: 6323 - DNA, 25 bp, Artificial sequence  Extension Primer
  Primer
atgtgagatgaatcagcgtagtgta

SEQ ID NO: 6324 - DNA, 25 bp, Artificial sequence  Extension Primer
  Primer
aacactttctgaaagactgtctact

SEQ ID NO: 6325 - DNA, 25 bp, Artificial sequence  Extension Primer
  Primer
tatctcagatgttaaaggtacaaag

SEQ ID NO: 6326 - DNA, 25 bp, Artificial sequence  Extension Primer
  Primer
tacaggattgaaagttgaaaactag

SEQ ID NO: 6327 - DNA, 25 bp, Artificial sequence  Extension Primer
  Primer
attatgatctcttcaggctactttc

SEQ ID NO: 6328 - DNA, 25 bp, Artificial sequence  Extension Primer
  Primer
ctattaaggcaaagatgttcagtga

SEQ ID NO: 6329 - DNA, 25 bp, Artificial sequence  Extension Primer
  Primer
gacaagagcaaggatgtgaagacca

SEQ ID NO: 6330 - DNA, 25 bp, Artificial sequence  Extension Primer
  Primer
gagtaaatgctttctatcttgtgct

SEQ ID NO: 6331 - DNA, 25 bp, Artificial sequence  Extension Primer
  Primer
actgtctcctgtaaaatggttgggg

SEQ ID NO: 6332 - DNA, 25 bp, Artificial sequence  Extension Primer
  Primer
tttatgttattttttgagtaattca

SEQ ID NO: 6333 - DNA, 25 bp, Artificial sequence  Extension Primer
  Primer
cccccacaagctatctattaagaat

SEQ ID NO: 6334 - DNA, 25 bp, Artificial sequence  Extension Primer
  Primer
gagaagaaacataaacccaagccaa

SEQ ID NO: 6335 - DNA, 25 bp, Artificial sequence  Extension Primer
  Primer
ggaaacaccactagccctgccagtc

SEQ ID NO: 6336 - DNA, 25 bp, Artificial sequence  Extension Primer
  Primer
gaagtgagttctgtaacattggggg

SEQ ID NO: 6337 - DNA, 25 bp, Artificial sequence  Extension Primer
  Primer
ggtgatggacaggggagsctgatgc

SEQ ID NO: 6338 - DNA, 25 bp, Artificial sequence  Extension Primer
  Primer
attatttatacaaaattctgactca

SEQ ID NO: 6339 - DNA, 25 bp, Artificial sequence  Extension Primer
  Primer
tgacagtggtgagtgcttggggctg

SEQ ID NO: 6340 - DNA, 25 bp, Artificial sequence  Extension Primer
  Primer
atctatgctgtaccattttaaggga

SEQ ID NO: 6341 - DNA, 25 bp, Artificial sequence  Extension Primer
  Primer
taacatcattgcataatggcatagt

SEQ ID NO: 6342 - DNA, 25 bp, Artificial sequence  Extension Primer
  Primer
aacaacttcagaagataatgtcaca

SEQ ID NO: 6343 - DNA, 25 bp, Artificial sequence  Extension Primer
  Primer
grgatgctggaagtggatttagagc

SEQ ID NO: 6344 - DNA, 25 bp, Artificial sequence  Extension Primer
  Primer
aatagcatttataggatataaccat

SEQ ID NO: 6345 - DNA, 25 bp, Artificial sequence  Extension Primer
  Primer
aaggtggtcctaagaagataaaggt

SEQ ID NO: 6346 - DNA, 25 bp, Artificial sequence  Extension Primer
  Primer
cgtggaactggagattccttcatag

SEQ ID NO: 6347 - DNA, 25 bp, Artificial sequence  Extension Primer
  Primer
gagcaatcactcttgtaaagccctc

SEQ ID NO: 6348 - DNA, 25 bp, Artificial sequence  Extension Primer
  Primer
aaaaaaaagtgacagaaaaagagat

SEQ ID NO: 6349 - DNA, 25 bp, Artificial sequence  Extension Primer
  Primer
ttcgttttcattcaccccattctar

SEQ ID NO: 6350 - DNA, 25 bp, Artificial sequence  Extension Primer
  Primer
tggatgtgtaggactagaggaggaa

SEQ ID NO: 6351 - DNA, 25 bp, Artificial sequence  Extension Primer
  Primer
taggagataaccttcagaatatagg

SEQ ID NO: 6352 - DNA, 25 bp, Artificial sequence  Extension Primer
  Primer
gttccttgtaggctgtgccaacaga

SEQ ID NO: 6353 - DNA, 25 bp, Artificial sequence  Extension Primer
  Primer
atattagatgtatatttttaatccc

SEQ ID NO: 6354 - DNA, 25 bp, Artificial sequence  Extension Primer
  Primer
taaatgaaaataagcaaaccatcac

SEQ ID NO: 6355 - DNA, 25 bp, Artificial sequence  Extension Primer
  Primer
aagtttgtcaacagtaagccttatt

SEQ ID NO: 6356 - DNA, 25 bp, Artificial sequence  Extension Primer
  Primer
cattgcttcatccttctgtcatggc

SEQ ID NO: 6357 - DNA, 25 bp, Artificial sequence  Extension Primer
  Primer
ttgtttttttaatcctgattctgca

SEQ ID NO: 6358 - DNA, 25 bp, Artificial sequence  Extension Primer
  Primer
aaaccatcttggtaagttgatgaac

SEQ ID NO: 6359 - DNA, 25 bp, Artificial sequence  Extension Primer
  Primer
ggacgtggatgaacctcgaccgtat

SEQ ID NO: 6360 - DNA, 25 bp, Artificial sequence  Extension Primer
  Primer
caccagagccgctggccctcctcac

SEQ ID NO: 6361 - DNA, 25 bp, Artificial sequence  Extension Primer
  Primer
accgtcttatgggagggcctgtagg

SEQ ID NO: 6362 - DNA, 25 bp, Artificial sequence  Extension Primer
  Primer
gcaaactccagcaaaccacctcctc

SEQ ID NO: 6363 - DNA, 25 bp, Artificial sequence  Extension Primer
  Primer
tttttagactgtgacggaatcaaac

SEQ ID NO: 6364 - DNA, 25 bp, Artificial sequence  Extension Primer
  Primer
acatgggagacagacaggcagaagg

SEQ ID NO: 6365 - DNA, 25 bp, Artificial sequence  Extension Primer
  Primer
ctaaaatattatttgccccacgaaa

SEQ ID NO: 6366 - DNA, 25 bp, Artificial sequence  Extension Primer
  Primer
ggtcatgcagacagcaagggttggg

SEQ ID NO: 6367 - DNA, 25 bp, Artificial sequence  Extension Primer
  Primer
agggaggtcagatggatggtaaata

SEQ ID NO: 6368 - DNA, 25 bp, Artificial sequence  Extension Primer
  Primer
gtgacattcacatagaaagtcccat

SEQ ID NO: 6369 - DNA, 25 bp, Artificial sequence  Extension Primer
  Primer
gcctggccagctggttcctgttccc

SEQ ID NO: 6370 - DNA, 25 bp, Artificial sequence  Extension Primer
  Primer
ggaggggttaggtatcattaacagc

SEQ ID NO: 6371 - DNA, 25 bp, Artificial sequence  Extension Primer
  Primer
aaattaatgcttctgattgtagaac

SEQ ID NO: 6372 - DNA, 25 bp, Artificial sequence  Extension Primer
  Primer
aagatcagataagaaattcacctgc

SEQ ID NO: 6373 - DNA, 25 bp, Artificial sequence  Extension Primer
  Primer
aatatttctcacatatcttcattat

SEQ ID NO: 6374 - DNA, 25 bp, Artificial sequence  Extension Primer
  Primer
aatcctcaccatcacagccacaaat

SEQ ID NO: 6375 - DNA, 25 bp, Artificial sequence  Extension Primer
  Primer
tttcttttgaccacaagcagcaaca

SEQ ID NO: 6376 - DNA, 25 bp, Artificial sequence  Extension Primer
  Primer
gaaccagctaaaagataatatagtc

SEQ ID NO: 6377 - DNA, 25 bp, Artificial sequence  Extension Primer
  Primer
tggaaaagatttttgatctgtgttc

SEQ ID NO: 6378 - DNA, 25 bp, Artificial sequence  Extension Primer
  Primer
atgagttagcatttctatgactaaa

SEQ ID NO: 6379 - DNA, 25 bp, Artificial sequence  Extension Primer
  Primer
cagtcttacttaacagacattatac

SEQ ID NO: 6380 - DNA, 25 bp, Artificial sequence  Extension Primer
  Primer
tgattgttgaaaccaatatttgaac

SEQ ID NO: 6381 - DNA, 25 bp, Artificial sequence  Extension Primer
  Primer
aagggtatatcattgcagcctttgt

SEQ ID NO: 6382 - DNA, 25 bp, Artificial sequence  Extension Primer
  Primer
ttttgccttcttaattgttatttct

SEQ ID NO: 6383 - DNA, 25 bp, Artificial sequence  Extension Primer
  Primer
agggatgggtcattctagaaacaac

SEQ ID NO: 6384 - DNA, 25 bp, Artificial sequence  Extension Primer
  Primer
gaatgatctaagaattttgttgtct

SEQ ID NO: 6385 - DNA, 25 bp, Artificial sequence  Extension Primer
  Primer
tatttccaccaccttttactcttcc

SEQ ID NO: 6386 - DNA, 25 bp, Artificial sequence  Extension Primer
  Primer
tcagagctttattttttcattatac

SEQ ID NO: 6387 - DNA, 25 bp, Artificial sequence  Extension Primer
  Primer
tttgcatatgggcatgtrattttac

SEQ ID NO: 6388 - DNA, 25 bp, Artificial sequence  Extension Primer
  Primer
attttttctattccttcccatattt

SEQ ID NO: 6389 - DNA, 25 bp, Artificial sequence  Extension Primer
  Primer
aaaaaagaaacatctacaaaacaac

SEQ ID NO: 6390 - DNA, 25 bp, Artificial sequence  Extension Primer
  Primer
tagtgtgtattagactaagaccaaa

SEQ ID NO: 6391 - DNA, 25 bp, Artificial sequence  Extension Primer
  Primer
ttgtaatatgaattgttaaagtttg

SEQ ID NO: 6392 - DNA, 25 bp, Artificial sequence  Extension Primer
  Primer
taaaaatgtatggaatgtcccaatt

SEQ ID NO: 6393 - DNA, 25 bp, Artificial sequence  Extension Primer
  Primer
tatatcctgagattgttgagaaaac

SEQ ID NO: 6394 - DNA, 25 bp, Artificial sequence  Extension Primer
  Primer
tcaaagacgtcttaagtcttaaaga

SEQ ID NO: 6395 - DNA, 25 bp, Artificial sequence  Extension Primer
  Primer
cattgatataccttaaaaacataca

SEQ ID NO: 6396 - DNA, 25 bp, Artificial sequence  Extension Primer
  Primer
tatcagcgtagatcttcaacaatac

SEQ ID NO: 6397 - DNA, 25 bp, Artificial sequence  Extension Primer
  Primer
gggcagaagtctgcaaactttttct

SEQ ID NO: 6398 - DNA, 25 bp, Artificial sequence  Extension Primer
  Primer
gcttttccatgtaaaagggattcat

SEQ ID NO: 6399 - DNA, 25 bp, Artificial sequence  Extension Primer
  Primer
gttactacatactgaagaagatgac

SEQ ID NO: 6400 - DNA, 25 bp, Artificial sequence  Extension Primer
  Primer
cagcacccagcaagttaaaattcac

SEQ ID NO: 6401 - DNA, 25 bp, Artificial sequence  Extension Primer
  Primer
aggccacttcaagttacattttaac

SEQ ID NO: 6402 - DNA, 25 bp, Artificial sequence  Extension Primer
  Primer
atcatcttcaacaaatatgaccrac

SEQ ID NO: 6403 - DNA, 25 bp, Artificial sequence  Extension Primer
  Primer
tttttagaacctcaaattaattatg

SEQ ID NO: 6404 - DNA, 25 bp, Artificial sequence  Extension Primer
  Primer
ggaagaaaattgtctayaaaggata

SEQ ID NO: 6405 - DNA, 25 bp, Artificial sequence  Extension Primer
  Primer
aagttaaaagcccaatctcctaacc

SEQ ID NO: 6406 - DNA, 25 bp, Artificial sequence  Extension Primer
  Primer
gacagttgaattgcatgtccaccat

SEQ ID NO: 6407 - DNA, 25 bp, Artificial sequence  Extension Primer
  Primer
atctcttaacggagattgagagagc

SEQ ID NO: 6408 - DNA, 25 bp, Artificial sequence  Extension Primer
  Primer
aacaatgacttgtttatagggttga

SEQ ID NO: 6409 - DNA, 25 bp, Artificial sequence  Extension Primer
  Primer
ttttcacagcatgtgcactgatcca

SEQ ID NO: 6410 - DNA, 25 bp, Artificial sequence  Extension Primer
  Primer
atttgttttgacttgtatagaaatc

SEQ ID NO: 6411 - DNA, 25 bp, Artificial sequence  Extension Primer
  Primer
taatgaacatggtaggggagcgaac

SEQ ID NO: 6412 - DNA, 25 bp, Artificial sequence  Extension Primer
  Primer
tgatagcatcacaaaatctaaacca

SEQ ID NO: 6413 - DNA, 25 bp, Artificial sequence  Extension Primer
  Primer
agaacaaatgtaaataaacaagagc

SEQ ID NO: 6414 - DNA, 25 bp, Artificial sequence  Extension Primer
  Primer
ctggcagatataggctccaaggaca

SEQ ID NO: 6415 - DNA, 25 bp, Artificial sequence  Extension Primer
  Primer
gaaggcatggcagaagtagagggaa

SEQ ID NO: 6416 - DNA, 25 bp, Artificial sequence  Extension Primer
  Primer
caatgaaaaatctatacacagcgat

SEQ ID NO: 6417 - DNA, 25 bp, Artificial sequence  Extension Primer
  Primer
tcttgtgcacattatratttaggaa

SEQ ID NO: 6418 - DNA, 25 bp, Artificial sequence  Extension Primer
  Primer
agcatacttcttttctgtcctgcct

SEQ ID NO: 6419 - DNA, 25 bp, Artificial sequence  Extension Primer
  Primer
aatgtatgttttccctttacagcat

SEQ ID NO: 6420 - DNA, 25 bp, Artificial sequence  Extension Primer
  Primer
ttgaaatagaaatctggccttggaa

SEQ ID NO: 6421 - DNA, 25 bp, Artificial sequence  Extension Primer
  Primer
catcccacacctgtccttccragta

SEQ ID NO: 6422 - DNA, 25 bp, Artificial sequence  Extension Primer
  Primer
aaactcatatcccttcttcccaatc

SEQ ID NO: 6423 - DNA, 25 bp, Artificial sequence  Extension Primer
  Primer
aacaagygctttcccaagagttcag

SEQ ID NO: 6424 - DNA, 25 bp, Artificial sequence  Extension Primer
  Primer
acatatcacctagacttgtaatctt

SEQ ID NO: 6425 - DNA, 25 bp, Artificial sequence  Extension Primer
  Primer
tcttggctcctccctctcagccaac

SEQ ID NO: 6426 - DNA, 25 bp, Artificial sequence  Extension Primer
  Primer
gtctctggtttcctgtagtcttctc

SEQ ID NO: 6427 - DNA, 25 bp, Artificial sequence  Extension Primer
  Primer
atgagtggacaaacaaattgaacag

SEQ ID NO: 6428 - DNA, 25 bp, Artificial sequence  Extension Primer
  Primer
atttgcrtgttggcattcagctttt

SEQ ID NO: 6429 - DNA, 25 bp, Artificial sequence  Extension Primer
  Primer
aatggcttgcagaaggcatgcaaac

SEQ ID NO: 6430 - DNA, 25 bp, Artificial sequence  Extension Primer
  Primer
gccagcctcaggggtaacagactat

SEQ ID NO: 6431 - DNA, 25 bp, Artificial sequence  Extension Primer
  Primer
atggtcgctgcagggaaaccaaggt

SEQ ID NO: 6432 - DNA, 25 bp, Artificial sequence  Extension Primer
  Primer
cagttgtacgggcatctggtatagg

SEQ ID NO: 6433 - DNA, 25 bp, Artificial sequence  Extension Primer
  Primer
cagccctcctggtcagccctctatg

SEQ ID NO: 6434 - DNA, 25 bp, Artificial sequence  Extension Primer
  Primer
cgcttctaatggaaatcactcagtc

SEQ ID NO: 6435 - DNA, 25 bp, Artificial sequence  Extension Primer
  Primer
gctcttcacagctagagaaaagccc

SEQ ID NO: 6436 - DNA, 25 bp, Artificial sequence  Extension Primer
  Primer
ctgagccaccagggaagccyctgta

SEQ ID NO: 6437 - DNA, 25 bp, Artificial sequence  Extension Primer
  Primer
aaatgccttacaaatactccttttk

SEQ ID NO: 6438 - DNA, 25 bp, Artificial sequence  Extension Primer
  Primer
agttttttcctaattaatctcctta

SEQ ID NO: 6439 - DNA, 25 bp, Artificial sequence  Extension Primer
  Primer
ttaaaatgatgacgaataacgataa

SEQ ID NO: 6440 - DNA, 25 bp, Artificial sequence  Extension Primer
  Primer
tttacctttatacagaatgatgtat

SEQ ID NO: 6441 - DNA, 25 bp, Artificial sequence  Extension Primer
  Primer
aggaaaagttacatggaggagacag

SEQ ID NO: 6442 - DNA, 25 bp, Artificial sequence  Extension Primer
  Primer
aattagattttgccaagtcaaagta

SEQ ID NO: 6443 - DNA, 25 bp, Artificial sequence  Extension Primer
  Primer
tcagtataagaactgcctttccaca

SEQ ID NO: 6444 - DNA, 25 bp, Artificial sequence  Extension Primer
  Primer
ttctaactatagaagtttgtcaaag

SEQ ID NO: 6445 - DNA, 25 bp, Artificial sequence  Extension Primer
  Primer
gaactatctctccacagacaagaag

SEQ ID NO: 6446 - DNA, 25 bp, Artificial sequence  Extension Primer
  Primer
tgctctcataaacaaatgtcctctt

SEQ ID NO: 6447 - DNA, 25 bp, Artificial sequence  Extension Primer
  Primer
cagggtaccaatatgagcatctctc

SEQ ID NO: 6448 - DNA, 25 bp, Artificial sequence  Extension Primer
  Primer
aattaaattcaaactcacactggtt

SEQ ID NO: 6449 - DNA, 25 bp, Artificial sequence  Extension Primer
  Primer
acataaaccaatcccctgcaacatc

SEQ ID NO: 6450 - DNA, 25 bp, Artificial sequence  Extension Primer
  Primer
tgagccctggtagagtgccttttcc

SEQ ID NO: 6451 - DNA, 25 bp, Artificial sequence  Extension Primer
  Primer
caccatttaccaccagccaaagaca

SEQ ID NO: 6452 - DNA, 25 bp, Artificial sequence  Extension Primer
  Primer
gagtggtattcaataaccaagttct

SEQ ID NO: 6453 - DNA, 22 bp, Artificial sequence  Extension Primer
  Primer
tggtactagaaggagcagaaaa

SEQ ID NO: 6454 - DNA, 22 bp, Artificial sequence  Extension Primer
  Primer
gcaaataccctcagctgaacta

SEQ ID NO: 6455 - DNA, 25 bp, Artificial sequence  Extension Primer
  Primer
gcccagttctcaggaaggggaaaca

SEQ ID NO: 6456 - DNA, 25 bp, Artificial sequence  Extension Primer
  Primer
ttactggatttctstttcctcattc

SEQ ID NO: 6457 - DNA, 25 bp, Artificial sequence  Extension Primer
  Primer
ctcagccctagccctaaaggctcag

SEQ ID NO: 6458 - DNA, 25 bp, Artificial sequence  Extension Primer
  Primer
aatatatagccaatgaaaggaagag

SEQ ID NO: 6459 - DNA, 25 bp, Artificial sequence  Extension Primer
  Primer
tctaggttctagtagagcaagggta

SEQ ID NO: 6460 - DNA, 25 bp, Artificial sequence  Extension Primer
  Primer
ctccccctcacccagtgcaatgtca

SEQ ID NO: 6461 - DNA, 25 bp, Artificial sequence  Extension Primer
  Primer
atggattcttcaccatatgagccac

SEQ ID NO: 6462 - DNA, 25 bp, Artificial sequence  Extension Primer
  Primer
cagaaaccctgtctcccacacccag

SEQ ID NO: 6463 - DNA, 25 bp, Artificial sequence  Extension Primer
  Primer
gcaggcagtggaggtggggcggggg

SEQ ID NO: 6464 - DNA, 22 bp, Artificial sequence  Extension Primer
  Primer
tcctagttatctgggtgtgggg

SEQ ID NO: 6465 - DNA, 25 bp, Artificial sequence  Extension Primer
  Primer
aagactcccacgatgaaattcactc

SEQ ID NO: 6466 - DNA, 25 bp, Artificial sequence  Extension Primer
  Primer
acgctgggctagcttcccacagcag

SEQ ID NO: 6467 - DNA, 22 bp, Artificial sequence  Extension Primer
  Primer
ctccgtcactccagtctctgcc

SEQ ID NO: 6468 - DNA, 25 bp, Artificial sequence  Extension Primer
  Primer
ggggagcgtgtcatcttctggcatt

SEQ ID NO: 6469 - DNA, 25 bp, Artificial sequence  Extension Primer
  Primer
agatasataaaccccatgargccca

SEQ ID NO: 6470 - DNA, 25 bp, Artificial sequence  Extension Primer
  Primer
tggcagcrattctgttcttgccatt

SEQ ID NO: 6471 - DNA, 25 bp, Artificial sequence  Extension Primer
  Primer
attagctgaagcagggatgatcccc

SEQ ID NO: 6472 - DNA, 25 bp, Artificial sequence  Extension Primer
  Primer
atttcattcaacatcttagtgtata

SEQ ID NO: 6473 - DNA, 25 bp, Artificial sequence  Extension Primer
  Primer
aaacaacaacaaatatggctaaaaa

SEQ ID NO: 6474 - DNA, 25 bp, Artificial sequence  Extension Primer
  Primer
acaggaygcctacatgtagcttgac

SEQ ID NO: 6475 - DNA, 25 bp, Artificial sequence  Extension Primer
  Primer
taacctgcatcctctctttcttttc

SEQ ID NO: 6476 - DNA, 25 bp, Artificial sequence  Extension Primer
  Primer
ttaaggtttcaaaagatatgcttat

SEQ ID NO: 6477 - DNA, 25 bp, Artificial sequence  Extension Primer
  Primer
aattcatgtatctaaaaactaaagt

SEQ ID NO: 6478 - DNA, 25 bp, Artificial sequence  Extension Primer
  Primer
atgtaagtcacttctttagaactca

SEQ ID NO: 6479 - DNA, 25 bp, Artificial sequence  Extension Primer
  Primer
aatacgcagtgaaattcacatttta

SEQ ID NO: 6480 - DNA, 25 bp, Artificial sequence  Extension Primer
  Primer
tagtgtcctgtgcctattatcatta

SEQ ID NO: 6481 - DNA, 25 bp, Artificial sequence  Extension Primer
  Primer
tggacttatttagcatsttggcctc

SEQ ID NO: 6482 - DNA, 25 bp, Artificial sequence  Extension Primer
  Primer
ttccagaaatttttttcccccttcc

SEQ ID NO: 6483 - DNA, 25 bp, Artificial sequence  Extension Primer
  Primer
aatgacatgtttaagtacaataaaa

SEQ ID NO: 6484 - DNA, 25 bp, Artificial sequence  Extension Primer
  Primer
aatgatgagtacagagaaaacaaag

SEQ ID NO: 6485 - DNA, 25 bp, Artificial sequence  Extension Primer
  Primer
accattattatttgtgaattgattg

SEQ ID NO: 6486 - DNA, 25 bp, Artificial sequence  Extension Primer
  Primer
aaatagttaacaagggtcatctttt

SEQ ID NO: 6487 - DNA, 25 bp, Artificial sequence  Extension Primer
  Primer
tagctctataggaaggccaataarg

SEQ ID NO: 6488 - DNA, 25 bp, Artificial sequence  Extension Primer
  Primer
tgaagacattcaagaaaatttaagg

SEQ ID NO: 6489 - DNA, 22 bp, Artificial sequence  Extension Primer
  Primer
agcattcagtatctatttyaca

SEQ ID NO: 6490 - DNA, 25 bp, Artificial sequence  Extension Primer
  Primer
tacacataaatcaacgctgtaaaca

SEQ ID NO: 6491 - DNA, 25 bp, Artificial sequence  Extension Primer
  Primer
tgaatcactatattgtatacctgta

SEQ ID NO: 6492 - DNA, 25 bp, Artificial sequence  Extension Primer
  Primer
tcagggaataataatgaaattcaca

SEQ ID NO: 6493 - DNA, 25 bp, Artificial sequence  Extension Primer
  Primer
ttaaaaaattcaatttaatggataa

SEQ ID NO: 6494 - DNA, 25 bp, Artificial sequence  Extension Primer
  Primer
gcaactgaaggacaatagcaacaca

SEQ ID NO: 6495 - DNA, 25 bp, Artificial sequence  Extension Primer
  Primer
aaaaccctcaaaatatcaatcactc

SEQ ID NO: 6496 - DNA, 25 bp, Artificial sequence  Extension Primer
  Primer
cctcccgtgtgtcaggctacccatg

SEQ ID NO: 6497 - DNA, 25 bp, Artificial sequence  Extension Primer
  Primer
tcaatgagtggatttccttcacaga

SEQ ID NO: 6498 - DNA, 25 bp, Artificial sequence  Extension Primer
  Primer
ccaaggcacagactgactgacagag

SEQ ID NO: 6499 - DNA, 25 bp, Artificial sequence  Extension Primer
  Primer
gggaaaawatatatagacataaagc

SEQ ID NO: 6500 - DNA, 25 bp, Artificial sequence  Extension Primer
  Primer
gtcatgctatgaaacactaaacatt

SEQ ID NO: 6501 - DNA, 25 bp, Artificial sequence  Extension Primer
  Primer
caaaggaatacagtcagaactctaa

SEQ ID NO: 6502 - DNA, 25 bp, Artificial sequence  Extension Primer
  Primer
gtcacttctattctatccaggtatg

SEQ ID NO: 6503 - DNA, 25 bp, Artificial sequence  Extension Primer
  Primer
gtgtaactactattttctttcccag

SEQ ID NO: 6504 - DNA, 25 bp, Artificial sequence  Extension Primer
  Primer
taaaataatcaacawaaagtgattt

SEQ ID NO: 6505 - DNA, 25 bp, Artificial sequence  Extension Primer
  Primer
gtcggctgtgagtcggatcatagac

SEQ ID NO: 6506 - DNA, 25 bp, Artificial sequence  Extension Primer
  Primer
ggattagaactacattggatgtgag

SEQ ID NO: 6507 - DNA, 25 bp, Artificial sequence  Extension Primer
  Primer
cagcctgggtagtgccagctgtgtg

SEQ ID NO: 6508 - DNA, 25 bp, Artificial sequence  Extension Primer
  Primer
cacgataattaagcatctcgctagt

SEQ ID NO: 6509 - DNA, 25 bp, Artificial sequence  Extension Primer
  Primer
gcacagtaagcactcctttaactta

SEQ ID NO: 6510 - DNA, 25 bp, Artificial sequence  Extension Primer
  Primer
actcaggcaagaatattcaggatta

SEQ ID NO: 6511 - DNA, 25 bp, Artificial sequence  Extension Primer
  Primer
gctgtcctaagagccctgggagtaa

SEQ ID NO: 6512 - DNA, 25 bp, Artificial sequence  Extension Primer
  Primer
taggcagctccctcgcttgccctct

SEQ ID NO: 6513 - DNA, 25 bp, Artificial sequence  Extension Primer
  Primer
atttccaacatgcctgatgcaccaa

SEQ ID NO: 6514 - DNA, 25 bp, Artificial sequence  Extension Primer
  Primer
gactaattktaagtcccgtttgtgt

SEQ ID NO: 6515 - DNA, 25 bp, Artificial sequence  Extension Primer
  Primer
tcttgtgttaggtttttgttctagg

SEQ ID NO: 6516 - DNA, 25 bp, Artificial sequence  Extension Primer
  Primer
ccatgtatggrgywctggagctttt

SEQ ID NO: 6517 - DNA, 25 bp, Artificial sequence  Extension Primer
  Primer
cacccagactgcaaggtaatcccaa

SEQ ID NO: 6518 - DNA, 25 bp, Artificial sequence  Extension Primer
  Primer
ttttactgagtggaatttgcaagag

SEQ ID NO: 6519 - DNA, 25 bp, Artificial sequence  Extension Primer
  Primer
attacaagaagtttttacccactca

SEQ ID NO: 6520 - DNA, 25 bp, Artificial sequence  Extension Primer
  Primer
tacaaaggaagtcctgtctctcata

SEQ ID NO: 6521 - DNA, 25 bp, Artificial sequence  Extension Primer
  Primer
aagaaagcacaaggaaagaaatggg

SEQ ID NO: 6522 - DNA, 25 bp, Artificial sequence  Extension Primer
  Primer
aaccgaaaccagaaagtgaaaggag

SEQ ID NO: 6523 - DNA, 25 bp, Artificial sequence  Extension Primer
  Primer
tgaggtgtttgtaaacctcatgtct

SEQ ID NO: 6524 - DNA, 25 bp, Artificial sequence  Extension Primer
  Primer
tcttcctcccctgargctgcaagag

SEQ ID NO: 6525 - DNA, 25 bp, Artificial sequence  Extension Primer
  Primer
ccaaatcttcaaccacacctgccct

SEQ ID NO: 6526 - DNA, 25 bp, Artificial sequence  Extension Primer
  Primer
gtctgtcacagacttctatcactta

SEQ ID NO: 6527 - DNA, 25 bp, Artificial sequence  Extension Primer
  Primer
gctatctcaatattgcagaaagttt

SEQ ID NO: 6528 - DNA, 25 bp, Artificial sequence  Extension Primer
  Primer
caactgtatacaccctaactaccaa

SEQ ID NO: 6529 - DNA, 25 bp, Artificial sequence  Extension Primer
  Primer
ggacatagctcagagaagccgagaa

SEQ ID NO: 6530 - DNA, 22 bp, Artificial sequence  Extension Primer
  Primer
acttgtgtctgttttacttact

SEQ ID NO: 6531 - DNA, 25 bp, Artificial sequence  Extension Primer
  Primer
acactcagggttttctgtttattaa

SEQ ID NO: 6532 - DNA, 25 bp, Artificial sequence  Extension Primer
  Primer
acttttactgccttcacattactgc

SEQ ID NO: 6533 - DNA, 25 bp, Artificial sequence  Extension Primer
  Primer
cgtggatttcccctgaaataataaa

SEQ ID NO: 6534 - DNA, 25 bp, Artificial sequence  Extension Primer
  Primer
aaattctccttgattcttttacttc

SEQ ID NO: 6535 - DNA, 25 bp, Artificial sequence  Extension Primer
  Primer
tggcttccaggttcttctattgtgt

SEQ ID NO: 6536 - DNA, 25 bp, Artificial sequence  Extension Primer
  Primer
ggaatacgttaggcatattggtaag

SEQ ID NO: 6537 - DNA, 25 bp, Artificial sequence  Extension Primer
  Primer
tcctctttgtaggttatcatcagta

SEQ ID NO: 6538 - DNA, 25 bp, Artificial sequence  Extension Primer
  Primer
ttatgcccttgctttcagcccacaa

SEQ ID NO: 6539 - DNA, 25 bp, Artificial sequence  Extension Primer
  Primer
gattagagagtcctagacatgattt

SEQ ID NO: 6540 - DNA, 25 bp, Artificial sequence  Extension Primer
  Primer
acaatcagcaaggaaatggactcaa

SEQ ID NO: 6541 - DNA, 25 bp, Artificial sequence  Extension Primer
  Primer
ttctctgcatttcttaatgaagtts

SEQ ID NO: 6542 - DNA, 25 bp, Artificial sequence  Extension Primer
  Primer
tagaaaattttactcgcacaggata

SEQ ID NO: 6543 - DNA, 25 bp, Artificial sequence  Extension Primer
  Primer
cactgaggacaatagaagaaataac

SEQ ID NO: 6544 - DNA, 25 bp, Artificial sequence  Extension Primer
  Primer
agggaagtggaggttgaataaaaga

SEQ ID NO: 6545 - DNA, 25 bp, Artificial sequence  Extension Primer
  Primer
atagaygaaatacggaggaagaggg

SEQ ID NO: 6546 - DNA, 25 bp, Artificial sequence  Extension Primer
  Primer
ttctttggcaattggtagttatggg

SEQ ID NO: 6547 - DNA, 25 bp, Artificial sequence  Extension Primer
  Primer
tcaaggattgaaggggaaggaaaag

SEQ ID NO: 6548 - DNA, 25 bp, Artificial sequence  Extension Primer
  Primer
atcacagaaaatttcccagggaaca

SEQ ID NO: 6549 - DNA, 25 bp, Artificial sequence  Extension Primer
  Primer
acagcttatctttttatgtagtccc

SEQ ID NO: 6550 - DNA, 25 bp, Artificial sequence  Extension Primer
  Primer
ggctgaagcttaaatcagaaaaccc

SEQ ID NO: 6551 - DNA, 25 bp, Artificial sequence  Extension Primer
  Primer
gcatgtaactcagaagaagatggaa

SEQ ID NO: 6552 - DNA, 25 bp, Artificial sequence  Extension Primer
  Primer
ttttaccaaaattatactcatatcg

SEQ ID NO: 6553 - DNA, 25 bp, Artificial sequence  Extension Primer
  Primer
aaattcccttctttttgacctttat

SEQ ID NO: 6554 - DNA, 25 bp, Artificial sequence  Extension Primer
  Primer
ccttctgccagcgcgagcacctcct

SEQ ID NO: 6555 - DNA, 25 bp, Artificial sequence  Extension Primer
  Primer
ggcgtgggggcgctggggcacggtc

SEQ ID NO: 6556 - DNA, 25 bp, Artificial sequence  Extension Primer
  Primer
caggtatacagagaaacagagggcg

SEQ ID NO: 6557 - DNA, 25 bp, Artificial sequence  Extension Primer
  Primer
cgaagcgcacrcagagggggccctg

SEQ ID NO: 6558 - DNA, 25 bp, Artificial sequence  Extension Primer
  Primer
agaagctctgggacttggagtgaag

SEQ ID NO: 6559 - DNA, 25 bp, Artificial sequence  Extension Primer
  Primer
tgcagagctggagacaagggcctca

SEQ ID NO: 6560 - DNA, 25 bp, Artificial sequence  Extension Primer
  Primer
ggttgtgagaattaaaagagctata

SEQ ID NO: 6561 - DNA, 25 bp, Artificial sequence  Extension Primer
  Primer
aagctggggccagagaaattacatt

SEQ ID NO: 6562 - DNA, 25 bp, Artificial sequence  Extension Primer
  Primer
ctttcctgaccatttccttgagcaa

SEQ ID NO: 6563 - DNA, 25 bp, Artificial sequence  Extension Primer
  Primer
gaaggataaggggtgcctcccgctg

SEQ ID NO: 6564 - DNA, 25 bp, Artificial sequence  Extension Primer
  Primer
tgctcttgatctcccttaccttgtg

SEQ ID NO: 6565 - DNA, 22 bp, Artificial sequence  Extension Primer
  Primer
agaagacaagtaaataggcttt

SEQ ID NO: 6566 - DNA, 25 bp, Artificial sequence  Extension Primer
  Primer
atcacaatgaaagaactctaactca

SEQ ID NO: 6567 - DNA, 25 bp, Artificial sequence  Extension Primer
  Primer
accagaatgtagaggaagaggagga

SEQ ID NO: 6568 - DNA, 25 bp, Artificial sequence  Extension Primer
  Primer
acaaccttagaggccttgaggaagc

SEQ ID NO: 6569 - DNA, 25 bp, Artificial sequence  Extension Primer
  Primer
ggcaatccatagtatacaaaccaga

SEQ ID NO: 6570 - DNA, 25 bp, Artificial sequence  Extension Primer
  Primer
gagaagaaaccragctatatcacct

SEQ ID NO: 6571 - DNA, 25 bp, Artificial sequence  Extension Primer
  Primer
aatctgagtaaggctgaaagagctg

SEQ ID NO: 6572 - DNA, 25 bp, Artificial sequence  Extension Primer
  Primer
aaactttgtgcttatcttcttcctt

SEQ ID NO: 6573 - DNA, 25 bp, Artificial sequence  Extension Primer
  Primer
aataacaaacagtagtaataagtct

SEQ ID NO: 6574 - DNA, 25 bp, Artificial sequence  Extension Primer
  Primer
gttagtgagagataatgggataaga

SEQ ID NO: 6575 - DNA, 25 bp, Artificial sequence  Extension Primer
  Primer
tcctcagctataaaattcctctcta

SEQ ID NO: 6576 - DNA, 25 bp, Artificial sequence  Extension Primer
  Primer
tggacaggctattcctgacttcttc

SEQ ID NO: 6577 - DNA, 25 bp, Artificial sequence  Extension Primer
  Primer
gaagaagccccagccaagggtatta

SEQ ID NO: 6578 - DNA, 25 bp, Artificial sequence  Extension Primer
  Primer
tggggaaaataattttgyttaacta

SEQ ID NO: 6579 - DNA, 25 bp, Artificial sequence  Extension Primer
  Primer
agtacctgcaagatgttcttaggga

SEQ ID NO: 6580 - DNA, 25 bp, Artificial sequence  Extension Primer
  Primer
gagggggtgcagtattgaacagata

SEQ ID NO: 6581 - DNA, 25 bp, Artificial sequence  Extension Primer
  Primer
gaatgatgatctctagrtccatcca

SEQ ID NO: 6582 - DNA, 25 bp, Artificial sequence  Extension Primer
  Primer
cgatcaaaaataagggacaaggaaa

SEQ ID NO: 6583 - DNA, 25 bp, Artificial sequence  Extension Primer
  Primer
tgtagtgactactgaaccagttggc

SEQ ID NO: 6584 - DNA, 25 bp, Artificial sequence  Extension Primer
  Primer
gctggaactaagtgtttgcatgccg

SEQ ID NO: 6585 - DNA, 25 bp, Artificial sequence  Extension Primer
  Primer
tcccagacctgggagaacttgatca

SEQ ID NO: 6586 - DNA, 25 bp, Artificial sequence  Extension Primer
  Primer
cgttggccttctgggcagcctccac

SEQ ID NO: 6587 - DNA, 25 bp, Artificial sequence  Extension Primer
  Primer
ccaccaagtaggctccctgggtgtt

SEQ ID NO: 6588 - DNA, 25 bp, Artificial sequence  Extension Primer
  Primer
ttctcagtctccaccctggaccttc

SEQ ID NO: 6589 - DNA, 22 bp, Artificial sequence  Extension Primer
  Primer
wgagtatctaactattgagagg

SEQ ID NO: 6590 - DNA, 25 bp, Artificial sequence  Extension Primer
  Primer
ttctctaaygctgccggtgccaaag

SEQ ID NO: 6591 - DNA, 25 bp, Artificial sequence  Extension Primer
  Primer
ctgtgttcccatggtgcccacctga

SEQ ID NO: 6592 - DNA, 25 bp, Artificial sequence  Extension Primer
  Primer
aggagctttccccagggatcccaaa

SEQ ID NO: 6593 - DNA, 25 bp, Artificial sequence  Extension Primer
  Primer
agatgagaggtaaccagtagctgac

SEQ ID NO: 6594 - DNA, 25 bp, Artificial sequence  Extension Primer
  Primer
ccactctaatccattcctccctctt

SEQ ID NO: 6595 - DNA, 25 bp, Artificial sequence  Extension Primer
  Primer
cccccttcacctgtttctctactgc

SEQ ID NO: 6596 - DNA, 25 bp, Artificial sequence  Extension Primer
  Primer
tataggaaacccacttatggagata

SEQ ID NO: 6597 - DNA, 25 bp, Artificial sequence  Extension Primer
  Primer
gcatcccgctaacatgctcccctga

SEQ ID NO: 6598 - DNA, 25 bp, Artificial sequence  Extension Primer
  Primer
caatggctttttgtattcagaaaac

SEQ ID NO: 6599 - DNA, 25 bp, Artificial sequence  Extension Primer
  Primer
caaatcagctggactccacctttcc

SEQ ID NO: 6600 - DNA, 25 bp, Artificial sequence  Extension Primer
  Primer
acctaagacctgtttcttccacttc

SEQ ID NO: 6601 - DNA, 25 bp, Artificial sequence  Extension Primer
  Primer
ttgctttctgtgttatattttgttt

SEQ ID NO: 6602 - DNA, 25 bp, Artificial sequence  Extension Primer
  Primer
gagactccactgagagggtagggmc

SEQ ID NO: 6603 - DNA, 25 bp, Artificial sequence  Extension Primer
  Primer
gagcacagagagcctggcaaatctg

SEQ ID NO: 6604 - DNA, 25 bp, Artificial sequence  Extension Primer
  Primer
gatggaccacatgactgttcacarc

SEQ ID NO: 6605 - DNA, 25 bp, Artificial sequence  Extension Primer
  Primer
ccctccttacctagtcaaaagatgg

SEQ ID NO: 6606 - DNA, 25 bp, Artificial sequence  Extension Primer
  Primer
ttggttcctagcacacagtctcagt

SEQ ID NO: 6607 - DNA, 25 bp, Artificial sequence  Extension Primer
  Primer
aacaatccaataaagtaacactgtc

SEQ ID NO: 6608 - DNA, 25 bp, Artificial sequence  Extension Primer
  Primer
ggaggtataaggtctcacaatcaga

SEQ ID NO: 6609 - DNA, 25 bp, Artificial sequence  Extension Primer
  Primer
ggttctggcaagaacaccaaatgga

SEQ ID NO: 6610 - DNA, 25 bp, Artificial sequence  Extension Primer
  Primer
tggcctcagagtcatgccctatcct

SEQ ID NO: 6611 - DNA, 25 bp, Artificial sequence  Extension Primer
  Primer
cttccttcctctccttcccccaacc

SEQ ID NO: 6612 - DNA, 25 bp, Artificial sequence  Extension Primer
  Primer
aaaagagtaagacatgacttagcaa

SEQ ID NO: 6613 - DNA, 25 bp, Artificial sequence  Extension Primer
  Primer
ggtaattggctgtggctgagggagc

SEQ ID NO: 6614 - DNA, 25 bp, Artificial sequence  Extension Primer
  Primer
ttgtttgttccsacgggagttagga

SEQ ID NO: 6615 - DNA, 25 bp, Artificial sequence  Extension Primer
  Primer
aaatgagagtggtgagcagacctaa

SEQ ID NO: 6616 - DNA, 25 bp, Artificial sequence  Extension Primer
  Primer
ggaaactaagagtctytaaatccct

SEQ ID NO: 6617 - DNA, 25 bp, Artificial sequence  Extension Primer
  Primer
ctctcctggccccactggtggccct

SEQ ID NO: 6618 - DNA, 25 bp, Artificial sequence  Extension Primer
  Primer
accttcygaatcaaaactgggagca

SEQ ID NO: 6619 - DNA, 25 bp, Artificial sequence  Extension Primer
  Primer
ttttatggatgagaaaattcagcct

SEQ ID NO: 6620 - DNA, 25 bp, Artificial sequence  Extension Primer
  Primer
tgggattcccacaccccagccccga

SEQ ID NO: 6621 - DNA, 25 bp, Artificial sequence  Extension Primer
  Primer
cctggaacttcttcccaccgcagcc

SEQ ID NO: 6622 - DNA, 22 bp, Artificial sequence  Extension Primer
  Primer
ccaagacatgtgcttgacggca

SEQ ID NO: 6623 - DNA, 25 bp, Artificial sequence  Extension Primer
  Primer
ttcgtgtatgagcttatctgtcacc

SEQ ID NO: 6624 - DNA, 25 bp, Artificial sequence  Extension Primer
  Primer
tactggacatgctgcttttacttaa

SEQ ID NO: 6625 - DNA, 25 bp, Artificial sequence  Extension Primer
  Primer
aaaagatgctcatatgctcactttg

SEQ ID NO: 6626 - DNA, 25 bp, Artificial sequence  Extension Primer
  Primer
catagtccatgtcctgaacctctgc

SEQ ID NO: 6627 - DNA, 25 bp, Artificial sequence  Extension Primer
  Primer
agtaaattgatgaacttagaaattc

SEQ ID NO: 6628 - DNA, 25 bp, Artificial sequence  Extension Primer
  Primer
cttgtgtttttccctctctaataaa

SEQ ID NO: 6629 - DNA, 25 bp, Artificial sequence  Extension Primer
  Primer
ttagttgttggaawgtattctttta

SEQ ID NO: 6630 - DNA, 25 bp, Artificial sequence  Extension Primer
  Primer
gccrcctcattaacaacaaaagaca

SEQ ID NO: 6631 - DNA, 25 bp, Artificial sequence  Extension Primer
  Primer
aaaattgaaaatcctttccrtgttt

SEQ ID NO: 6632 - DNA, 25 bp, Artificial sequence  Extension Primer
  Primer
taggtgcctgagacatgaaaatgaa

SEQ ID NO: 6633 - DNA, 25 bp, Artificial sequence  Extension Primer
  Primer
agtagcatttggtcttatactamga

SEQ ID NO: 6634 - DNA, 25 bp, Artificial sequence  Extension Primer
  Primer
aaagctcttacattttagacagtaa

SEQ ID NO: 6635 - DNA, 25 bp, Artificial sequence  Extension Primer
  Primer
aattgaagcatcagcgcaccactgt

SEQ ID NO: 6636 - DNA, 25 bp, Artificial sequence  Extension Primer
  Primer
tcagaaggaggaatagctagtctgt

SEQ ID NO: 6637 - DNA, 25 bp, Artificial sequence  Extension Primer
  Primer
gagttaataaataacctggagcttt

SEQ ID NO: 6638 - DNA, 25 bp, Artificial sequence  Extension Primer
  Primer
gaactgtttgtgtaaatacttacta

SEQ ID NO: 6639 - DNA, 25 bp, Artificial sequence  Extension Primer
  Primer
gtatttagataaacatgaygaatat

SEQ ID NO: 6640 - DNA, 25 bp, Artificial sequence  Extension Primer
  Primer
tttcaaccaccattgyccctaytct

SEQ ID NO: 6641 - DNA, 25 bp, Artificial sequence  Extension Primer
  Primer
tcacttctattctatccaggtatgm

SEQ ID NO: 6642 - DNA, 25 bp, Artificial sequence  Extension Primer
  Primer
tggcagacacagtactttcttttat

SEQ ID NO: 6643 - DNA, 25 bp, Artificial sequence  Extension Primer
  Primer
cttccgctcactccctactcctctc

SEQ ID NO: 6644 - DNA, 25 bp, Artificial sequence  Extension Primer
  Primer
gcttagtttacatgttttcatacaa

SEQ ID NO: 6645 - DNA, 25 bp, Artificial sequence  Extension Primer
  Primer
acagacactctggacatttttaata

SEQ ID NO: 6646 - DNA, 25 bp, Artificial sequence  Extension Primer
  Primer
gtattatggtgcccataatgattaa

SEQ ID NO: 6647 - DNA, 25 bp, Artificial sequence  Extension Primer
  Primer
gctttaacacttgaaattctcttct

SEQ ID NO: 6648 - DNA, 25 bp, Artificial sequence  Extension Primer
  Primer
gaacacagaaatgcaaaaaactagc

SEQ ID NO: 6649 - DNA, 25 bp, Artificial sequence  Extension Primer
  Primer
gaaaaaaattaaagcattttaactg

SEQ ID NO: 6650 - DNA, 25 bp, Artificial sequence  Extension Primer
  Primer
tttgctcctttattgcttgtccaag

SEQ ID NO: 6651 - DNA, 25 bp, Artificial sequence  Extension Primer
  Primer
taatggatgaaattctacaacaaaa

SEQ ID NO: 6652 - DNA, 25 bp, Artificial sequence  Extension Primer
  Primer
gtatttttttctctcttctactttg

SEQ ID NO: 6653 - DNA, 25 bp, Artificial sequence  Extension Primer
  Primer
ggagctaagaaatgggactcttatt

SEQ ID NO: 6654 - DNA, 25 bp, Artificial sequence  Extension Primer
  Primer
atttgtctatcacaaatggcaaaaa

SEQ ID NO: 6655 - DNA, 25 bp, Artificial sequence  Extension Primer
  Primer
atgaaaaatgtaccagaactcagtg

SEQ ID NO: 6656 - DNA, 25 bp, Artificial sequence  Extension Primer
  Primer
cataacaatgcaaatatacttaaca

SEQ ID NO: 6657 - DNA, 25 bp, Artificial sequence  Extension Primer
  Primer
ccaggtttgagacttaaacttgact

SEQ ID NO: 6658 - DNA, 25 bp, Artificial sequence  Extension Primer
  Primer
taaaaaatctcaagcacagatcctt

SEQ ID NO: 6659 - DNA, 25 bp, Artificial sequence  Extension Primer
  Primer
gatttgtaattcttttagtaaatac

SEQ ID NO: 6660 - DNA, 25 bp, Artificial sequence  Extension Primer
  Primer
atagaaagrcacatagacccttacg

SEQ ID NO: 6661 - DNA, 25 bp, Artificial sequence  Extension Primer
  Primer
ggcctgatgttcctggtactatctt

SEQ ID NO: 6662 - DNA, 25 bp, Artificial sequence  Extension Primer
  Primer
ttctggtggcagaatcaggctcata

SEQ ID NO: 6663 - DNA, 25 bp, Artificial sequence  Extension Primer
  Primer
gaagcaaagacaaaaagtcagatgc

SEQ ID NO: 6664 - DNA, 25 bp, Artificial sequence  Extension Primer
  Primer
ttgtgaaagtagcaaccatcaataa

SEQ ID NO: 6665 - DNA, 25 bp, Artificial sequence  Extension Primer
  Primer
ggtagatatggaaaggaaaaggaag

SEQ ID NO: 6666 - DNA, 25 bp, Artificial sequence  Extension Primer
  Primer
agttgctacctaccacacagaccta

SEQ ID NO: 6667 - DNA, 25 bp, Artificial sequence  Extension Primer
  Primer
attggtatgaggagtgaaaaggtca

SEQ ID NO: 6668 - DNA, 25 bp, Artificial sequence  Extension Primer
  Primer
gttacatattcctacggtcaaacct

SEQ ID NO: 6669 - DNA, 25 bp, Artificial sequence  Extension Primer
  Primer
attcttygtaagttgaatatagggc

SEQ ID NO: 6670 - DNA, 25 bp, Artificial sequence  Extension Primer
  Primer
gagttatcacctkcgatcctgtctt

SEQ ID NO: 6671 - DNA, 22 bp, Artificial sequence  Extension Primer
  Primer
cagtctgtyagtgagctgtgat

SEQ ID NO: 6672 - DNA, 25 bp, Artificial sequence  Extension Primer
  Primer
cttccactcccactgtctctcgtta

SEQ ID NO: 6673 - DNA, 25 bp, Artificial sequence  Extension Primer
  Primer
agtagagcaagggtamtccctcttc

SEQ ID NO: 6674 - DNA, 25 bp, Artificial sequence  Extension Primer
  Primer
ggggcggctggtgaacacygtctgc

SEQ ID NO: 6675 - DNA, 25 bp, Artificial sequence  Extension Primer
  Primer
ggtattttgctctgggccatctcta

SEQ ID NO: 6676 - DNA, 25 bp, Artificial sequence  Extension Primer
  Primer
ctgccccagaacgcttcccytactc

SEQ ID NO: 6677 - DNA, 25 bp, Artificial sequence  Extension Primer
  Primer
tctctcacgatgaaaatagaacckg

SEQ ID NO: 6678 - DNA, 25 bp, Artificial sequence  Extension Primer
  Primer
cttggtttggttgctggtcaaactg

SEQ ID NO: 6679 - DNA, 25 bp, Artificial sequence  Extension Primer
  Primer
ctctgaaggaaggaattctgtcttg

SEQ ID NO: 6680 - DNA, 25 bp, Artificial sequence  Extension Primer
  Primer
agcatcctccttttctctgctcctc

SEQ ID NO: 6681 - DNA, 25 bp, Artificial sequence  Extension Primer
  Primer
aacagtcaagtctcatctgagtcca

SEQ ID NO: 6682 - DNA, 25 bp, Artificial sequence  Extension Primer
  Primer
aaccctggctagcacatctttagaa

SEQ ID NO: 6683 - DNA, 25 bp, Artificial sequence  Extension Primer
  Primer
ctgcttgagagaggctgaagagayg

SEQ ID NO: 6684 - DNA, 25 bp, Artificial sequence  Extension Primer
  Primer
atgcaggaratgttaaaggtggagg

SEQ ID NO: 6685 - DNA, 25 bp, Artificial sequence  Extension Primer
  Primer
tgaggtatttccttatgtaagactt

SEQ ID NO: 6686 - DNA, 25 bp, Artificial sequence  Extension Primer
  Primer
ctttccagtagtatccccttctttt

SEQ ID NO: 6687 - DNA, 25 bp, Artificial sequence  Extension Primer
  Primer
gctgttcataggccagcacctgttc

SEQ ID NO: 6688 - DNA, 25 bp, Artificial sequence  Extension Primer
  Primer
gaggcgccagcaccgtaaytgttct

SEQ ID NO: 6689 - DNA, 25 bp, Artificial sequence  Extension Primer
  Primer
tctggggccgagttgtagcaatgat

SEQ ID NO: 6690 - DNA, 25 bp, Artificial sequence  Extension Primer
  Primer
ggccaagtgtgatgcccttgttaca

SEQ ID NO: 6691 - DNA, 25 bp, Artificial sequence  Extension Primer
  Primer
atctcagcatgtcacactccctgtt

SEQ ID NO: 6692 - DNA, 25 bp, Artificial sequence  Extension Primer
  Primer
gacactgagccagcagatgccacaa

SEQ ID NO: 6693 - DNA, 25 bp, Artificial sequence  Extension Primer
  Primer
gatccctgtctcttttttgctaaca

SEQ ID NO: 6694 - DNA, 25 bp, Artificial sequence  Extension Primer
  Primer
acaaacattatttgagaccacaagc

SEQ ID NO: 6695 - DNA, 25 bp, Artificial sequence  Extension Primer
  Primer
acccaagtgttcaaagactcacagc

SEQ ID NO: 6696 - DNA, 25 bp, Artificial sequence  Extension Primer
  Primer
attttagytccccagagactgaacg

SEQ ID NO: 6697 - DNA, 25 bp, Artificial sequence  Extension Primer
  Primer
ttttttctgctcacgtccttccctc

SEQ ID NO: 6698 - DNA, 25 bp, Artificial sequence  Extension Primer
  Primer
gaacctgtgccctgcagtggaagca

SEQ ID NO: 6699 - DNA, 25 bp, Artificial sequence  Extension Primer
  Primer
ggatggcgcgagtygcccttcactg

SEQ ID NO: 6700 - DNA, 25 bp, Artificial sequence  Extension Primer
  Primer
tccagtggccatgaattcccatcct

SEQ ID NO: 6701 - DNA, 25 bp, Artificial sequence  Extension Primer
  Primer
ttyacaggttcaacaacagagatca

SEQ ID NO: 6702 - DNA, 25 bp, Artificial sequence  Extension Primer
  Primer
gggctccaaggtgaagcacaagatc

SEQ ID NO: 6703 - DNA, 25 bp, Artificial sequence  Extension Primer
  Primer
cctttttctgagccctgaatggtgg

SEQ ID NO: 6704 - DNA, 25 bp, Artificial sequence  Extension Primer
  Primer
ttgcacttggagcagaggagtcagc

SEQ ID NO: 6705 - DNA, 25 bp, Artificial sequence  Extension Primer
  Primer
tgcgatgccaactgcctgtcagaaa

SEQ ID NO: 6706 - DNA, 25 bp, Artificial sequence  Extension Primer
  Primer
ggttgtgggctacatggagttcata

SEQ ID NO: 6707 - DNA, 25 bp, Artificial sequence  Extension Primer
  Primer
taatcccagactggaccacccactc

SEQ ID NO: 6708 - DNA, 25 bp, Artificial sequence  Extension Primer
  Primer
csaagcacagtgccaccacattctt

SEQ ID NO: 6709 - DNA, 25 bp, Artificial sequence  Extension Primer
  Primer
tccacagatgcggctgcagcagtcc

SEQ ID NO: 6710 - DNA, 25 bp, Artificial sequence  Extension Primer
  Primer
ctctctgcaaatggcaggcaggggt

SEQ ID NO: 6711 - DNA, 25 bp, Artificial sequence  Extension Primer
  Primer
cccgtctgcccttaactttttyccc

SEQ ID NO: 6712 - DNA, 25 bp, Artificial sequence  Extension Primer
  Primer
gcgatattcatctgtaaataggaaa

SEQ ID NO: 6713 - DNA, 25 bp, Artificial sequence  Extension Primer
  Primer
aaggtccacaggcargcgcctcgtg

SEQ ID NO: 6714 - DNA, 25 bp, Artificial sequence  Extension Primer
  Primer
tggtcagccttggctagcaggcatg

SEQ ID NO: 6715 - DNA, 25 bp, Artificial sequence  Extension Primer
  Primer
gttcaccttgaggctttcatgccag

SEQ ID NO: 6716 - DNA, 25 bp, Artificial sequence  Extension Primer
  Primer
ggcaaggagtcgaggatcaaaggac

SEQ ID NO: 6717 - DNA, 25 bp, Artificial sequence  Extension Primer
  Primer
ccgtggggtttcaaagagttggaca

SEQ ID NO: 6718 - DNA, 25 bp, Artificial sequence  Extension Primer
  Primer
ctaaaggtgatgaaaatgaagtccc

SEQ ID NO: 6719 - DNA, 25 bp, Artificial sequence  Extension Primer
  Primer
ggctctctggcatggagttaccaag

SEQ ID NO: 6720 - DNA, 25 bp, Artificial sequence  Extension Primer
  Primer
agctcctttgaaagccacttgctgg

SEQ ID NO: 6721 - DNA, 25 bp, Artificial sequence  Extension Primer
  Primer
ttatgtggagaaactcagctcagcc

SEQ ID NO: 6722 - DNA, 25 bp, Artificial sequence  Extension Primer
  Primer
agtacaggctgcagatcagcatcac

SEQ ID NO: 6723 - DNA, 25 bp, Artificial sequence  Extension Primer
  Primer
tggaattttctatttgtgacaatgg

SEQ ID NO: 6724 - DNA, 25 bp, Artificial sequence  Extension Primer
  Primer
tttcagtaaatttggcttaagtaca

SEQ ID NO: 6725 - DNA, 25 bp, Artificial sequence  Extension Primer
  Primer
ttactttatttttaattgaaggata

SEQ ID NO: 6726 - DNA, 25 bp, Artificial sequence  Extension Primer
  Primer
tgaccttctacagagaagtgcttta

SEQ ID NO: 6727 - DNA, 25 bp, Artificial sequence  Extension Primer
  Primer
ttaatttttcctatttcaaataaca

SEQ ID NO: 6728 - DNA, 25 bp, Artificial sequence  Extension Primer
  Primer
tagtattcatcataaacaaagacag

SEQ ID NO: 6729 - DNA, 25 bp, Artificial sequence  Extension Primer
  Primer
tccaacagctaaagtctttttttcc

SEQ ID NO: 6730 - DNA, 25 bp, Artificial sequence  Extension Primer
  Primer
gaaactctcgattcacagaytacag

SEQ ID NO: 6731 - DNA, 25 bp, Artificial sequence  Extension Primer
  Primer
attcattgtgttccaagggtttttt

SEQ ID NO: 6732 - DNA, 25 bp, Artificial sequence  Extension Primer
  Primer
tagaaagggaggactcaattctcaa

SEQ ID NO: 6733 - DNA, 25 bp, Artificial sequence  Extension Primer
  Primer
agaggtccagatgttagctcgtgac

SEQ ID NO: 6734 - DNA, 25 bp, Artificial sequence  Extension Primer
  Primer
taaacatcagacagtcagtacaatt

SEQ ID NO: 6735 - DNA, 25 bp, Artificial sequence  Extension Primer
  Primer
ctcttatragtagtaggttacttta

SEQ ID NO: 6736 - DNA, 25 bp, Artificial sequence  Extension Primer
  Primer
cttctaatgtattttctgttctttt

SEQ ID NO: 6737 - DNA, 25 bp, Artificial sequence  Extension Primer
  Primer
gcaaaaagtcagatttgcaggactg

SEQ ID NO: 6738 - DNA, 25 bp, Artificial sequence  Extension Primer
  Primer
gacaaataggaaaattcagtaaatt

SEQ ID NO: 6739 - DNA, 25 bp, Artificial sequence  Extension Primer
  Primer
tttgctctgccccgttttccataat

SEQ ID NO: 6740 - DNA, 25 bp, Artificial sequence  Extension Primer
  Primer
tacattcacattgttttgtaactat

SEQ ID NO: 6741 - DNA, 25 bp, Artificial sequence  Extension Primer
  Primer
agggatggaatgtttcccaggaata

SEQ ID NO: 6742 - DNA, 25 bp, Artificial sequence  Extension Primer
  Primer
aagatgaaatgaactaaagrtatgt

SEQ ID NO: 6743 - DNA, 25 bp, Artificial sequence  Extension Primer
  Primer
taacaaaatgcrtattacagagtca

SEQ ID NO: 6744 - DNA, 25 bp, Artificial sequence  Extension Primer
  Primer
tgctgtacagcagaaaccaacayag

SEQ ID NO: 6745 - DNA, 25 bp, Artificial sequence  Extension Primer
  Primer
tcatgctgaatcagtggcaattacc

SEQ ID NO: 6746 - DNA, 25 bp, Artificial sequence  Extension Primer
  Primer
catagatgtatgtatgtatgtattt

SEQ ID NO: 6747 - DNA, 25 bp, Artificial sequence  Extension Primer
  Primer
catgatagggatccttacagcctca

SEQ ID NO: 6748 - DNA, 25 bp, Artificial sequence  Extension Primer
  Primer
ttagcccacagaaaggaaggctgaa

SEQ ID NO: 6749 - DNA, 25 bp, Artificial sequence  Extension Primer
  Primer
taagtaagacagtaaaggaatgaaa

SEQ ID NO: 6750 - DNA, 25 bp, Artificial sequence  Extension Primer
  Primer
acgccaatttccaagaacttctaca

SEQ ID NO: 6751 - DNA, 25 bp, Artificial sequence  Extension Primer
  Primer
tcagtatgtagtattacttaggctt

SEQ ID NO: 6752 - DNA, 25 bp, Artificial sequence  Extension Primer
  Primer
ctactctctcagcaaatttatatta

SEQ ID NO: 6753 - DNA, 25 bp, Artificial sequence  Extension Primer
  Primer
cattgtgttcaatactttacttaca

SEQ ID NO: 6754 - DNA, 25 bp, Artificial sequence  Extension Primer
  Primer
gggagccagggcacagttcgtaaaa

SEQ ID NO: 6755 - DNA, 25 bp, Artificial sequence  Extension Primer
  Primer
atcagaaagaaacgattcccatgaa

SEQ ID NO: 6756 - DNA, 25 bp, Artificial sequence  Extension Primer
  Primer
ctagaaattatagcaacagaattga

SEQ ID NO: 6757 - DNA, 25 bp, Artificial sequence  Extension Primer
  Primer
gttccctgagcacagtgagctctct

SEQ ID NO: 6758 - DNA, 25 bp, Artificial sequence  Extension Primer
  Primer
ttaggttagtgagcgtatttcttaa

SEQ ID NO: 6759 - DNA, 25 bp, Artificial sequence  Extension Primer
  Primer
cttagagggaagatcattatcatca

SEQ ID NO: 6760 - DNA, 25 bp, Artificial sequence  Extension Primer
  Primer
aaatgtatgcaaaactctttgaaaa

SEQ ID NO: 6761 - DNA, 25 bp, Artificial sequence  Extension Primer
  Primer
aatacaaatccaactgctcttcttt

SEQ ID NO: 6762 - DNA, 25 bp, Artificial sequence  Extension Primer
  Primer
tccattctgcagaactggaaaaact

SEQ ID NO: 6763 - DNA, 25 bp, Artificial sequence  Extension Primer
  Primer
gcaagagaatgatgaacaaaccaga

SEQ ID NO: 6764 - DNA, 25 bp, Artificial sequence  Extension Primer
  Primer
tccttttctttagtctctctactct

SEQ ID NO: 6765 - DNA, 25 bp, Artificial sequence  Extension Primer
  Primer
tayagtacagctaacgtgatcatgc

SEQ ID NO: 6766 - DNA, 25 bp, Artificial sequence  Extension Primer
  Primer
ctaaaggcacataaatcwagttacg

SEQ ID NO: 6767 - DNA, 25 bp, Artificial sequence  Extension Primer
  Primer
catctgtacaatgttataattctag

SEQ ID NO: 6768 - DNA, 25 bp, Artificial sequence  Extension Primer
  Primer
tatcttcttttttaaaagtaatacc

SEQ ID NO: 6769 - DNA, 25 bp, Artificial sequence  Extension Primer
  Primer
ctaaagctcttgcacgctyaataga

SEQ ID NO: 6770 - DNA, 25 bp, Artificial sequence  Extension Primer
  Primer
agttacygaaagaacatcattggtc

SEQ ID NO: 6771 - DNA, 25 bp, Artificial sequence  Extension Primer
  Primer
ggaaggaaaagaatatgtatggaaa

SEQ ID NO: 6772 - DNA, 25 bp, Artificial sequence  Extension Primer
  Primer
cattttaccaattttaattgtagcc

SEQ ID NO: 6773 - DNA, 25 bp, Artificial sequence  Extension Primer
  Primer
ttgctgggcacatttagaaaaaaat

SEQ ID NO: 6774 - DNA, 25 bp, Artificial sequence  Extension Primer
  Primer
agagctcttagtaaatctgtaatca

SEQ ID NO: 6775 - DNA, 25 bp, Artificial sequence  Extension Primer
  Primer
cttcaagctaaagagggataagaat

SEQ ID NO: 6776 - DNA, 25 bp, Artificial sequence  Extension Primer
  Primer
ctgctgagccaacgagccaccaatt

SEQ ID NO: 6777 - DNA, 25 bp, Artificial sequence  Extension Primer
  Primer
tcctctatgaaacctgaagccataa

SEQ ID NO: 6778 - DNA, 25 bp, Artificial sequence  Extension Primer
  Primer
agttctgtgtcatggaacaatgtat

SEQ ID NO: 6779 - DNA, 25 bp, Artificial sequence  Extension Primer
  Primer
ctagctcataccagtatggcatgac

SEQ ID NO: 6780 - DNA, 25 bp, Artificial sequence  Extension Primer
  Primer
cagagagccagggtacgggttagac

SEQ ID NO: 6781 - DNA, 25 bp, Artificial sequence  Extension Primer
  Primer
ctgccccagggcctttgcacagact

SEQ ID NO: 6782 - DNA, 25 bp, Artificial sequence  Extension Primer
  Primer
gaccagcaagtggaattgaggtgac

SEQ ID NO: 6783 - DNA, 25 bp, Artificial sequence  Extension Primer
  Primer
gcagccttcagcaaaagagattaaa

SEQ ID NO: 6784 - DNA, 25 bp, Artificial sequence  Extension Primer
  Primer
accggcatagaggaaacttcatcta

SEQ ID NO: 6785 - DNA, 25 bp, Artificial sequence  Extension Primer
  Primer
atatcacccttgttgggattctaac

SEQ ID NO: 6786 - DNA, 25 bp, Artificial sequence  Extension Primer
  Primer
gaaartcagtgtcacaccaaataaa

SEQ ID NO: 6787 - DNA, 25 bp, Artificial sequence  Extension Primer
  Primer
actgtcaactagatctggggagtcc

SEQ ID NO: 6788 - DNA, 25 bp, Artificial sequence  Extension Primer
  Primer
tggatgccatagcagcagagtaagg

SEQ ID NO: 6789 - DNA, 25 bp, Artificial sequence  Extension Primer
  Primer
tccttccctcgtggcagctgttgtc

SEQ ID NO: 6790 - DNA, 25 bp, Artificial sequence  Extension Primer
  Primer
gcatcccagtctccaggtccttcac

SEQ ID NO: 6791 - DNA, 25 bp, Artificial sequence  Extension Primer
  Primer
ggatttcatggtgatttcctgatgg

SEQ ID NO: 6792 - DNA, 25 bp, Artificial sequence  Extension Primer
  Primer
atcagagttctgacaaaggagatac

SEQ ID NO: 6793 - DNA, 25 bp, Artificial sequence  Extension Primer
  Primer
atgctgctgctgctgctgctaagtc

SEQ ID NO: 6794 - DNA, 25 bp, Artificial sequence  Extension Primer
  Primer
agtggcgttggggtaaactgcttga

SEQ ID NO: 6795 - DNA, 25 bp, Artificial sequence  Extension Primer
  Primer
caggatggtcacagtggtgcggttt

SEQ ID NO: 6796 - DNA, 25 bp, Artificial sequence  Extension Primer
  Primer
cttttgaagctggctcttaaaaatt

SEQ ID NO: 6797 - DNA, 25 bp, Artificial sequence  Extension Primer
  Primer
gtgagtcttcagaccctgactgaca

SEQ ID NO: 6798 - DNA, 25 bp, Artificial sequence  Extension Primer
  Primer
gagaggcagagacacacacacccag

SEQ ID NO: 6799 - DNA, 25 bp, Artificial sequence  Extension Primer
  Primer
tcttaaccttgtcctgtcccttgct

SEQ ID NO: 6800 - DNA, 22 bp, Artificial sequence  Extension Primer
  Primer
aagatcatcacactgaggtcag

SEQ ID NO: 6801 - DNA, 25 bp, Artificial sequence  Extension Primer
  Primer
aatttgggractcattttgagacca

SEQ ID NO: 6802 - DNA, 25 bp, Artificial sequence  Extension Primer
  Primer
atgctgtggagaccacacagcagac

SEQ ID NO: 6803 - DNA, 25 bp, Artificial sequence  Extension Primer
  Primer
gagacagggaaatcagggaaccaga

SEQ ID NO: 6804 - DNA, 25 bp, Artificial sequence  Extension Primer
  Primer
cattcctgacctcactgtttgactc

SEQ ID NO: 6805 - DNA, 25 bp, Artificial sequence  Extension Primer
  Primer
tttggattgattgatcacaagtgga

SEQ ID NO: 6806 - DNA, 25 bp, Artificial sequence  Extension Primer
  Primer
actagatgtccttgggtgagcgggg

SEQ ID NO: 6807 - DNA, 25 bp, Artificial sequence  Extension Primer
  Primer
gaagaggcacagagaggcagaagga

SEQ ID NO: 6808 - DNA, 25 bp, Artificial sequence  Extension Primer
  Primer
actggaggcttaaatgggacattgc

SEQ ID NO: 6809 - DNA, 25 bp, Artificial sequence  Extension Primer
  Primer
actgtagcagttcaggagagggaca

SEQ ID NO: 6810 - DNA, 25 bp, Artificial sequence  Extension Primer
  Primer
tgtccccatcactcttcatacctac

SEQ ID NO: 6811 - DNA, 25 bp, Artificial sequence  Extension Primer
  Primer
atagcaagcctgcgaggaagggact

SEQ ID NO: 6812 - DNA, 25 bp, Artificial sequence  Extension Primer
  Primer
ggacaaaatgaagaggcaggcaggg

SEQ ID NO: 6813 - DNA, 25 bp, Artificial sequence  Extension Primer
  Primer
tacactctgggacccagcacaggac

SEQ ID NO: 6814 - DNA, 25 bp, Artificial sequence  Extension Primer
  Primer
cccagggagaagggggcggagccag

SEQ ID NO: 6815 - DNA, 25 bp, Artificial sequence  Extension Primer
  Primer
gctatccccactctatgaacgcaca

SEQ ID NO: 6816 - DNA, 25 bp, Artificial sequence  Extension Primer
  Primer
tggagccagcccacatttggacctc

SEQ ID NO: 6817 - DNA, 25 bp, Artificial sequence  Extension Primer
  Primer
agagaccacaccaagagaagccacc

SEQ ID NO: 6818 - DNA, 25 bp, Artificial sequence  Extension Primer
  Primer
attarcttgtgaacaggctcccacc

SEQ ID NO: 6819 - DNA, 25 bp, Artificial sequence  Extension Primer
  Primer
cccctagaggaggaaatggcaaccc

SEQ ID NO: 6820 - DNA, 25 bp, Artificial sequence  Extension Primer
  Primer
gcttgccaggagcagaagaatcact

SEQ ID NO: 6821 - DNA, 25 bp, Artificial sequence  Extension Primer
  Primer
ttaactaataactgacatcacaccc

SEQ ID NO: 6822 - DNA, 25 bp, Artificial sequence  Extension Primer
  Primer
ttatgtgctcattgcacaagttgta

SEQ ID NO: 6823 - DNA, 25 bp, Artificial sequence  Extension Primer
  Primer
ctcaagaataattaattaatgktgt

SEQ ID NO: 6824 - DNA, 25 bp, Artificial sequence  Extension Primer
  Primer
gagttttaaaaccatgagttatgag

SEQ ID NO: 6825 - DNA, 25 bp, Artificial sequence  Extension Primer
  Primer
ttttggaatgaattgggtttgtagg

SEQ ID NO: 6826 - DNA, 25 bp, Artificial sequence  Extension Primer
  Primer
ggtggaataatttcaatttggaagt

SEQ ID NO: 6827 - DNA, 25 bp, Artificial sequence  Extension Primer
  Primer
tgtacacgctgatggatgattatgt

SEQ ID NO: 6828 - DNA, 25 bp, Artificial sequence  Extension Primer
  Primer
cagttcaaacaagaaatagtttagt

SEQ ID NO: 6829 - DNA, 25 bp, Artificial sequence  Extension Primer
  Primer
agttgcaagcttgtctgaaaaattg

SEQ ID NO: 6830 - DNA, 25 bp, Artificial sequence  Extension Primer
  Primer
ctaaaatcgcaatggyagcaaaaat

SEQ ID NO: 6831 - DNA, 25 bp, Artificial sequence  Extension Primer
  Primer
cagcctctcattttctcctcacaac

SEQ ID NO: 6832 - DNA, 25 bp, Artificial sequence  Extension Primer
  Primer
ttgatatgaaatagtagcttacaaa

SEQ ID NO: 6833 - DNA, 25 bp, Artificial sequence  Extension Primer
  Primer
crgatattaagcagaagatgctgat

SEQ ID NO: 6834 - DNA, 25 bp, Artificial sequence  Extension Primer
  Primer
aagaaagctctctatagcrtgacta

SEQ ID NO: 6835 - DNA, 25 bp, Artificial sequence  Extension Primer
  Primer
tgctttgcagtgaggtgttcttggt

SEQ ID NO: 6836 - DNA, 25 bp, Artificial sequence  Extension Primer
  Primer
agatattcaaataggcataatttag

SEQ ID NO: 6837 - DNA, 25 bp, Artificial sequence  Extension Primer
  Primer
cattgtaactagacttatggttggt

SEQ ID NO: 6838 - DNA, 25 bp, Artificial sequence  Extension Primer
  Primer
tgtaaatcttctccagcaccgttga

SEQ ID NO: 6839 - DNA, 25 bp, Artificial sequence  Extension Primer
  Primer
caattctatatgaactcttgatttt

SEQ ID NO: 6840 - DNA, 25 bp, Artificial sequence  Extension Primer
  Primer
gaggattatcatgcagtgaayattt

SEQ ID NO: 6841 - DNA, 25 bp, Artificial sequence  Extension Primer
  Primer
atgttgggcaggtggataacatcay

SEQ ID NO: 6842 - DNA, 25 bp, Artificial sequence  Extension Primer
  Primer
ataggaaatgagtagtatgctttaa

SEQ ID NO: 6843 - DNA, 25 bp, Artificial sequence  Extension Primer
  Primer
tgctggctcttttgctaatggrgga

SEQ ID NO: 6844 - DNA, 25 bp, Artificial sequence  Extension Primer
  Primer
aacatgttgtgaaaacagcatgagg

SEQ ID NO: 6845 - DNA, 25 bp, Artificial sequence  Extension Primer
  Primer
acagtatcaaaaacatgcaaataca

SEQ ID NO: 6846 - DNA, 25 bp, Artificial sequence  Extension Primer
  Primer
ggaataaagatgaaatgaactaaag

SEQ ID NO: 6847 - DNA, 25 bp, Artificial sequence  Extension Primer
  Primer
atttttttcaggcaactttgggttt

SEQ ID NO: 6848 - DNA, 25 bp, Artificial sequence  Extension Primer
  Primer
cttatactaaagcatgaaaagccta

SEQ ID NO: 6849 - DNA, 25 bp, Artificial sequence  Extension Primer
  Primer
cctttataacccaatgtcgaccact

SEQ ID NO: 6850 - DNA, 25 bp, Artificial sequence  Extension Primer
  Primer
ggacctgagtggacttcttgggtga

SEQ ID NO: 6851 - DNA, 25 bp, Artificial sequence  Extension Primer
  Primer
agaggatccagaagtcataccaagc

SEQ ID NO: 6852 - DNA, 25 bp, Artificial sequence  Extension Primer
  Primer
cataattttctataggggaaacagt

SEQ ID NO: 6853 - DNA, 25 bp, Artificial sequence  Extension Primer
  Primer
ttttctcatttatcagaargctctg

SEQ ID NO: 6854 - DNA, 25 bp, Artificial sequence  Extension Primer
  Primer
caacctggcaggaaacctttaagca

SEQ ID NO: 6855 - DNA, 25 bp, Artificial sequence  Extension Primer
  Primer
tctccttgctgtgggctttatgctc

SEQ ID NO: 6856 - DNA, 25 bp, Artificial sequence  Extension Primer
  Primer
aacaatgggcttaggttccaagcaa

SEQ ID NO: 6857 - DNA, 25 bp, Artificial sequence  Extension Primer
  Primer
aagcaaagacaaaaagtcagatgcy

SEQ ID NO: 6858 - DNA, 25 bp, Artificial sequence  Extension Primer
  Primer
agaggggaaatgaggtcaactctgc

SEQ ID NO: 6859 - DNA, 25 bp, Artificial sequence  Extension Primer
  Primer
agcctgtgacacattatctttgcca

SEQ ID NO: 6860 - DNA, 25 bp, Artificial sequence  Extension Primer
  Primer
tttcctmctctacttttattacccc

SEQ ID NO: 6861 - DNA, 25 bp, Artificial sequence  Extension Primer
  Primer
gaaaaatgggcatatgatagtacct

SEQ ID NO: 6862 - DNA, 25 bp, Artificial sequence  Extension Primer
  Primer
agtccagaagtaggctttaaggcaa

SEQ ID NO: 6863 - DNA, 25 bp, Artificial sequence  Extension Primer
  Primer
ctacagaatcaaattggttgaggga

SEQ ID NO: 6864 - DNA, 25 bp, Artificial sequence  Extension Primer
  Primer
aattcagtgtttatgtactttggtc

SEQ ID NO: 6865 - DNA, 25 bp, Artificial sequence  Extension Primer
  Primer
caggttcaggaaccgtcttggggaa

SEQ ID NO: 6866 - DNA, 25 bp, Artificial sequence  Extension Primer
  Primer
gtgatgtgtcagatttccagccgac

SEQ ID NO: 6867 - DNA, 25 bp, Artificial sequence  Extension Primer
  Primer
tgccagtgttctccagttgaaatca

SEQ ID NO: 6868 - DNA, 25 bp, Artificial sequence  Extension Primer
  Primer
agcagtctctttaataagtggtgcc

SEQ ID NO: 6869 - DNA, 25 bp, Artificial sequence  Extension Primer
  Primer
ttccatttctctctgatacaatcat

SEQ ID NO: 6870 - DNA, 25 bp, Artificial sequence  Extension Primer
  Primer
gcaaataaaagtatgatgatcagca

SEQ ID NO: 6871 - DNA, 25 bp, Artificial sequence  Extension Primer
  Primer
aatatcattgatggtgtttctacgg

SEQ ID NO: 6872 - DNA, 25 bp, Artificial sequence  Extension Primer
  Primer
gaactacctttattgttatttcatt

SEQ ID NO: 6873 - DNA, 25 bp, Artificial sequence  Extension Primer
  Primer
gtccctgcattgggtgagtgattcc

SEQ ID NO: 6874 - DNA, 25 bp, Artificial sequence  Extension Primer
  Primer
gggtcctcccttggggagtgggtac

SEQ ID NO: 6875 - DNA, 25 bp, Artificial sequence  Extension Primer
  Primer
cagtgcgcggccacaggccacgagc

SEQ ID NO: 6876 - DNA, 25 bp, Artificial sequence  Extension Primer
  Primer
agcctggcaaatctgytcatttctc

SEQ ID NO: 6877 - DNA, 25 bp, Artificial sequence  Extension Primer
  Primer
acagcttcatcacacaagctstgac

SEQ ID NO: 6878 - DNA, 25 bp, Artificial sequence  Extension Primer
  Primer
gatgaaatgggcttaatgcaagaca

SEQ ID NO: 6879 - DNA, 25 bp, Artificial sequence  Extension Primer
  Primer
tctggctcagacacatgcccctcac

SEQ ID NO: 6880 - DNA, 25 bp, Artificial sequence  Extension Primer
  Primer
ttttgtctgtcctgtctggagcctg

SEQ ID NO: 6881 - DNA, 25 bp, Artificial sequence  Extension Primer
  Primer
agctgtaagtgccagcatcttctga

SEQ ID NO: 6882 - DNA, 25 bp, Artificial sequence  Extension Primer
  Primer
gtccttgtytctctggggaactagc

SEQ ID NO: 6883 - DNA, 25 bp, Artificial sequence  Extension Primer
  Primer
atagagttcyctgaccagagattga

SEQ ID NO: 6884 - DNA, 25 bp, Artificial sequence  Extension Primer
  Primer
cacccagagggtaagtcattccttt

SEQ ID NO: 6885 - DNA, 25 bp, Artificial sequence  Extension Primer
  Primer
gcagacacctaaccagcaccaccac

SEQ ID NO: 6886 - DNA, 25 bp, Artificial sequence  Extension Primer
  Primer
attacgagacttggaggtcctttcc

SEQ ID NO: 6887 - DNA, 25 bp, Artificial sequence  Extension Primer
  Primer
aagcctctcattggacatgatgttc

SEQ ID NO: 6888 - DNA, 25 bp, Artificial sequence  Extension Primer
  Primer
taccctttccatgggctcttccygt

SEQ ID NO: 6889 - DNA, 25 bp, Artificial sequence  Extension Primer
  Primer
ctcagtcccagtgaaggtctacata

SEQ ID NO: 6890 - DNA, 25 bp, Artificial sequence  Extension Primer
  Primer
atcagagtccatggaaacggagtca

SEQ ID NO: 6891 - DNA, 25 bp, Artificial sequence  Extension Primer
  Primer
taggcaccacttkgcttttttctgc

SEQ ID NO: 6892 - DNA, 22 bp, Artificial sequence  Extension Primer
  Primer
ctctaacaacaagtatcaacat

SEQ ID NO: 6893 - DNA, 25 bp, Artificial sequence  Extension Primer
  Primer
atcccaagtrtagcccagggctgtc

SEQ ID NO: 6894 - DNA, 25 bp, Artificial sequence  Extension Primer
  Primer
tttaatagygccccgtagcccggag

SEQ ID NO: 6895 - DNA, 25 bp, Artificial sequence  Extension Primer
  Primer
accgcacgtggccgacagagggagc

SEQ ID NO: 6896 - DNA, 25 bp, Artificial sequence  Extension Primer
  Primer
agtattattaacaagtccactgaga

SEQ ID NO: 6897 - DNA, 25 bp, Artificial sequence  Extension Primer
  Primer
agcctttcccccacctccttccatc

SEQ ID NO: 6898 - DNA, 25 bp, Artificial sequence  Extension Primer
  Primer
tggtcacaaaaagagtcctcaaaat

SEQ ID NO: 6899 - DNA, 25 bp, Artificial sequence  Extension Primer
  Primer
cgagacctgcctcctcctgaggtgc

SEQ ID NO: 6900 - DNA, 22 bp, Artificial sequence  Extension Primer
  Primer
agcggtagaagatatagctccc

SEQ ID NO: 6901 - DNA, 25 bp, Artificial sequence  Extension Primer
  Primer
aagatcttgggatgaaagtggcagc

SEQ ID NO: 6902 - DNA, 25 bp, Artificial sequence  Extension Primer
  Primer
gcacaaggaaagaaatgggscgtca

SEQ ID NO: 6903 - DNA, 25 bp, Artificial sequence  Extension Primer
  Primer
tgacattgccaagggaaccacccga

SEQ ID NO: 6904 - DNA, 25 bp, Artificial sequence  Extension Primer
  Primer
gcttgcatctggcccctcgttcccc

SEQ ID NO: 6905 - DNA, 25 bp, Artificial sequence  Extension Primer
  Primer
gggggctgctcggcttccatacacc

SEQ ID NO: 6906 - DNA, 25 bp, Artificial sequence  Extension Primer
  Primer
ttgggacagtcgggcttattaggca

SEQ ID NO: 6907 - DNA, 25 bp, Artificial sequence  Extension Primer
  Primer
aacaagaaatgaacaaacaaaaccc

SEQ ID NO: 6908 - DNA, 25 bp, Artificial sequence  Extension Primer
  Primer
tccaccaccatcaggagtgaaggca

SEQ ID NO: 6909 - DNA, 25 bp, Artificial sequence  Extension Primer
  Primer
ttctccagaaggacttatggggtcc

SEQ ID NO: 6910 - DNA, 22 bp, Artificial sequence  Extension Primer
  Primer
tgccttctcccaaaactgatac

SEQ ID NO: 6911 - DNA, 25 bp, Artificial sequence  Extension Primer
  Primer
atgtatagaaaggctscagtmatta

SEQ ID NO: 6912 - DNA, 25 bp, Artificial sequence  Extension Primer
  Primer
tttgcatatatggaactgattattt

SEQ ID NO: 6913 - DNA, 25 bp, Artificial sequence  Extension Primer
  Primer
cctatactgtgttattctgcttcct

SEQ ID NO: 6914 - DNA, 25 bp, Artificial sequence  Extension Primer
  Primer
aattaggaaaaagatttttaagtcc

SEQ ID NO: 6915 - DNA, 25 bp, Artificial sequence  Extension Primer
  Primer
ttgctatcctaattgcagaggctac

SEQ ID NO: 6916 - DNA, 25 bp, Artificial sequence  Extension Primer
  Primer
gtttgcctctaggccatcttaattc

SEQ ID NO: 6917 - DNA, 25 bp, Artificial sequence  Extension Primer
  Primer
cctagcagacaggccatgawaaaac

SEQ ID NO: 6918 - DNA, 25 bp, Artificial sequence  Extension Primer
  Primer
ttrttttgaactctttatagagtaa

SEQ ID NO: 6919 - DNA, 25 bp, Artificial sequence  Extension Primer
  Primer
ccagctttcaaacaagaaytgttgt

SEQ ID NO: 6920 - DNA, 25 bp, Artificial sequence  Extension Primer
  Primer
taatattaatttagttacttactgc

SEQ ID NO: 6921 - DNA, 25 bp, Artificial sequence  Extension Primer
  Primer
attttacagacaagataactgaagg

SEQ ID NO: 6922 - DNA, 25 bp, Artificial sequence  Extension Primer
  Primer
acccaagactgacatagcatccttt

SEQ ID NO: 6923 - DNA, 25 bp, Artificial sequence  Extension Primer
  Primer
tatgtctgattcaagtccatccttc

SEQ ID NO: 6924 - DNA, 25 bp, Artificial sequence  Extension Primer
  Primer
caagccaagtcaatacttcataaga

SEQ ID NO: 6925 - DNA, 25 bp, Artificial sequence  Extension Primer
  Primer
agttctgacatgcccaagggaataa

SEQ ID NO: 6926 - DNA, 25 bp, Artificial sequence  Extension Primer
  Primer
tttggcaaaattgaaaatcctttcc

SEQ ID NO: 6927 - DNA, 25 bp, Artificial sequence  Extension Primer
  Primer
actgggcaaatttacaaagcttgtr

SEQ ID NO: 6928 - DNA, 25 bp, Artificial sequence  Extension Primer
  Primer
tttgcctaacaagtctttggatggt

SEQ ID NO: 6929 - DNA, 25 bp, Artificial sequence  Extension Primer
  Primer
tactgggcaaatttacaaagcttgt

SEQ ID NO: 6930 - DNA, 25 bp, Artificial sequence  Extension Primer
  Primer
actgtgattattagggagtggagta

SEQ ID NO: 6931 - DNA, 25 bp, Artificial sequence  Extension Primer
  Primer
gcaaaatcctgatcagttctgaata

SEQ ID NO: 6932 - DNA, 25 bp, Artificial sequence  Extension Primer
  Primer
acagtaaggargacataatttagaa

SEQ ID NO: 6933 - DNA, 25 bp, Artificial sequence  Extension Primer
  Primer
catcatagcttaatgataaaataat

SEQ ID NO: 6934 - DNA, 25 bp, Artificial sequence  Extension Primer
  Primer
tttaatggcttaggaaaagacaaca

SEQ ID NO: 6935 - DNA, 25 bp, Artificial sequence  Extension Primer
  Primer
tacattatgatcttctgaagctact

SEQ ID NO: 6936 - DNA, 25 bp, Artificial sequence  Extension Primer
  Primer
cctacacctcccaaactttatcatc

SEQ ID NO: 6937 - DNA, 25 bp, Artificial sequence  Extension Primer
  Primer
tttccttatcgtttttcatgtctca

SEQ ID NO: 6938 - DNA, 22 bp, Artificial sequence  Extension Primer
  Primer
gagattcctgggcctatatcca

SEQ ID NO: 6939 - DNA, 25 bp, Artificial sequence  Extension Primer
  Primer
gaagattggaagcaaaaccttgggt

SEQ ID NO: 6940 - DNA, 25 bp, Artificial sequence  Extension Primer
  Primer
aaaytaggtttgcagcagatttgac

SEQ ID NO: 6941 - DNA, 25 bp, Artificial sequence  Extension Primer
  Primer
aaaatctttgtgtttttattaaatc

SEQ ID NO: 6942 - DNA, 25 bp, Artificial sequence  Extension Primer
  Primer
agttcattattggattaccgccctt

SEQ ID NO: 6943 - DNA, 25 bp, Artificial sequence  Extension Primer
  Primer
cttggccatacatatacattatcca

SEQ ID NO: 6944 - DNA, 25 bp, Artificial sequence  Extension Primer
  Primer
tatagaggtacatctcctcacagaa

SEQ ID NO: 6945 - DNA, 25 bp, Artificial sequence  Extension Primer
  Primer
tggcagccaatgccagaagccagtc

SEQ ID NO: 6946 - DNA, 25 bp, Artificial sequence  Extension Primer
  Primer
tagcaacaagctataaaacaaagga

SEQ ID NO: 6947 - DNA, 25 bp, Artificial sequence  Extension Primer
  Primer
aacatcgtgcttatagctttgctcc

SEQ ID NO: 6948 - DNA, 25 bp, Artificial sequence  Extension Primer
  Primer
gtgcatcttgtctgaaaatgactcc

SEQ ID NO: 6949 - DNA, 25 bp, Artificial sequence  Extension Primer
  Primer
tgaagggcagaaatcaatacttgct

SEQ ID NO: 6950 - DNA, 25 bp, Artificial sequence  Extension Primer
  Primer
tagcatgattaaaaataattcccac

SEQ ID NO: 6951 - DNA, 25 bp, Artificial sequence  Extension Primer
  Primer
aaagcctctccacttagaaggctct

SEQ ID NO: 6952 - DNA, 25 bp, Artificial sequence  Extension Primer
  Primer
tccttcaactcacttcacacagagt

SEQ ID NO: 6953 - DNA, 25 bp, Artificial sequence  Extension Primer
  Primer
catcaaaatggaactatgaggtatg

SEQ ID NO: 6954 - DNA, 25 bp, Artificial sequence  Extension Primer
  Primer
atatttatgaagaagatttgcaggt

SEQ ID NO: 6955 - DNA, 25 bp, Artificial sequence  Extension Primer
  Primer
actgtgctacagagtgaagtcagtt

SEQ ID NO: 6956 - DNA, 25 bp, Artificial sequence  Extension Primer
  Primer
agaaagttagcaaaggaaaccagca

SEQ ID NO: 6957 - DNA, 25 bp, Artificial sequence  Extension Primer
  Primer
tctggtttagaaatacagggacctt

SEQ ID NO: 6958 - DNA, 25 bp, Artificial sequence  Extension Primer
  Primer
tgaaagtggctttaggtaggctgga

SEQ ID NO: 6959 - DNA, 25 bp, Artificial sequence  Extension Primer
  Primer
gaatctttaagtgtctccaaaagcc

SEQ ID NO: 6960 - DNA, 25 bp, Artificial sequence  Extension Primer
  Primer
cttgagtagtcattttgttggagga

SEQ ID NO: 6961 - DNA, 25 bp, Artificial sequence  Extension Primer
  Primer
cactcttttgaacatcatgggcact

SEQ ID NO: 6962 - DNA, 25 bp, Artificial sequence  Extension Primer
  Primer
tctgattcaagtccatccttcrgcc

SEQ ID NO: 6963 - DNA, 25 bp, Artificial sequence  Extension Primer
  Primer
ttaactgaggacagataacagggtc

SEQ ID NO: 6964 - DNA, 25 bp, Artificial sequence  Extension Primer
  Primer
acagactagacttaggtgggacaca

SEQ ID NO: 6965 - DNA, 25 bp, Artificial sequence  Extension Primer
  Primer
atccttggagatcaaagtgagtgcc

SEQ ID NO: 6966 - DNA, 25 bp, Artificial sequence  Extension Primer
  Primer
gagtcccaggagaactcttcaggca

SEQ ID NO: 6967 - DNA, 25 bp, Artificial sequence  Extension Primer
  Primer
aagcaatgaccrttaaacaaggcag

SEQ ID NO: 6968 - DNA, 25 bp, Artificial sequence  Extension Primer
  Primer
ccatcctgagctgtaaacagaccac

SEQ ID NO: 6969 - DNA, 25 bp, Artificial sequence  Extension Primer
  Primer
accagggccccgcggtgtggggcra

SEQ ID NO: 6970 - DNA, 25 bp, Artificial sequence  Extension Primer
  Primer
ggtggcggagggygaatgggaaggc

SEQ ID NO: 6971 - DNA, 25 bp, Artificial sequence  Extension Primer
  Primer
cctgtggctattcagcacttgaaat

SEQ ID NO: 6972 - DNA, 25 bp, Artificial sequence  Extension Primer
  Primer
gggtctaggggatgccatggtaccc

SEQ ID NO: 6973 - DNA, 25 bp, Artificial sequence  Extension Primer
  Primer
ctgtggtatacagtaggaccttgtt

SEQ ID NO: 6974 - DNA, 25 bp, Artificial sequence  Extension Primer
  Primer
attgcaatggctttctaactttcct

SEQ ID NO: 6975 - DNA, 25 bp, Artificial sequence  Extension Primer
  Primer
gcttcacagacacggcaaagcttaa

SEQ ID NO: 6976 - DNA, 25 bp, Artificial sequence  Extension Primer
  Primer
gaggatgacatttcaaacagaatgc

SEQ ID NO: 6977 - DNA, 25 bp, Artificial sequence  Extension Primer
  Primer
ttgctcttcgagcctcagtttcctc

SEQ ID NO: 6978 - DNA, 25 bp, Artificial sequence  Extension Primer
  Primer
ggaagaggagggtgcatggattttc

SEQ ID NO: 6979 - DNA, 25 bp, Artificial sequence  Extension Primer
  Primer
atggactctgatttatttccccact

SEQ ID NO: 6980 - DNA, 25 bp, Artificial sequence  Extension Primer
  Primer
atggccagacaaggggcacagatgc

SEQ ID NO: 6981 - DNA, 25 bp, Artificial sequence  Extension Primer
  Primer
actcattaagacacaggaattagcc

SEQ ID NO: 6982 - DNA, 25 bp, Artificial sequence  Extension Primer
  Primer
tttctctgctccaaactcggatgtt

SEQ ID NO: 6983 - DNA, 25 bp, Artificial sequence  Extension Primer
  Primer
tagttgcagcatatgaactcttgtt

SEQ ID NO: 6984 - DNA, 25 bp, Artificial sequence  Extension Primer
  Primer
gtgactggtgtgtggagtggtactt

SEQ ID NO: 6985 - DNA, 25 bp, Artificial sequence  Extension Primer
  Primer
agatgtccttgggtgagcggggrtt

SEQ ID NO: 6986 - DNA, 25 bp, Artificial sequence  Extension Primer
  Primer
ccaggggtgctcggcatgggcctag

SEQ ID NO: 6987 - DNA, 25 bp, Artificial sequence  Extension Primer
  Primer
ggagrggccaygttttgatagaaat

SEQ ID NO: 6988 - DNA, 25 bp, Artificial sequence  Extension Primer
  Primer
atctttcaagcagtaggcaccactt

SEQ ID NO: 6989 - DNA, 25 bp, Artificial sequence  Extension Primer
  Primer
ccagctctttcctatttattctctc

SEQ ID NO: 6990 - DNA, 25 bp, Artificial sequence  Extension Primer
  Primer
cctttgatagaaggagaggactsgg

SEQ ID NO: 6991 - DNA, 25 bp, Artificial sequence  Extension Primer
  Primer
ctgaggaggaagaaaaawaagacaa

SEQ ID NO: 6992 - DNA, 25 bp, Artificial sequence  Extension Primer
  Primer
cctcacgctgccttgggcatgaaac

SEQ ID NO: 6993 - DNA, 25 bp, Artificial sequence  Extension Primer
  Primer
acaatggatggctctgcagctggga

SEQ ID NO: 6994 - DNA, 25 bp, Artificial sequence  Extension Primer
  Primer
gatacagggtctgggaaaacacagg

SEQ ID NO: 6995 - DNA, 25 bp, Artificial sequence  Extension Primer
  Primer
gcattccggttggtagataagactc

SEQ ID NO: 6996 - DNA, 25 bp, Artificial sequence  Extension Primer
  Primer
ccaaggggctctgatgggtgttgct

SEQ ID NO: 6997 - DNA, 25 bp, Artificial sequence  Extension Primer
  Primer
ccagctctcatccagggctgacctt

SEQ ID NO: 6998 - DNA, 25 bp, Artificial sequence  Extension Primer
  Primer
ggccatggagaagtaatttttaccc

SEQ ID NO: 6999 - DNA, 25 bp, Artificial sequence  Extension Primer
  Primer
cccctttactctggtttgtctcccc

SEQ ID NO: 7000 - DNA, 25 bp, Artificial sequence  Extension Primer
  Primer
gtggtaccagtgatctgtatttgcc

SEQ ID NO: 7001 - DNA, 25 bp, Artificial sequence  Extension Primer
  Primer
agagcacgcgggctggcagaaggca

SEQ ID NO: 7002 - DNA, 25 bp, Artificial sequence  Extension Primer
  Primer
atcttkcctgaagtttctaagaggc

SEQ ID NO: 7003 - DNA, 25 bp, Artificial sequence  Extension Primer
  Primer
tatgatttgctgctttctcataaaa

SEQ ID NO: 7004 - DNA, 25 bp, Artificial sequence  Extension Primer
  Primer
ataggatttccacagacctagatta

SEQ ID NO: 7005 - DNA, 25 bp, Artificial sequence  Extension Primer
  Primer
cactgtgagtgacacgctgccagta

SEQ ID NO: 7006 - DNA, 22 bp, Artificial sequence  Extension Primer
  Primer
aaagaaagttctaaggaatttc

SEQ ID NO: 7007 - DNA, 25 bp, Artificial sequence  Extension Primer
  Primer
tagctaaamgtagctaattttagaa

SEQ ID NO: 7008 - DNA, 25 bp, Artificial sequence  Extension Primer
  Primer
caagaggaattcagaaaagagaaaa

SEQ ID NO: 7009 - DNA, 25 bp, Artificial sequence  Extension Primer
  Primer
crgcacaaaggatggagtgggagaa

SEQ ID NO: 7010 - DNA, 25 bp, Artificial sequence  Extension Primer
  Primer
aactccaatattaggaatgtgttat

SEQ ID NO: 7011 - DNA, 25 bp, Artificial sequence  Extension Primer
  Primer
gctactttcrgacatttgattttcc

SEQ ID NO: 7012 - DNA, 25 bp, Artificial sequence  Extension Primer
  Primer
gagaggtcagattttcttyagatat

SEQ ID NO: 7013 - DNA, 25 bp, Artificial sequence  Extension Primer
  Primer
taagttagagtcttcagaccacttt

SEQ ID NO: 7014 - DNA, 25 bp, Artificial sequence  Extension Primer
  Primer
atatttgagctgccatcttagccta

SEQ ID NO: 7015 - DNA, 25 bp, Artificial sequence  Extension Primer
  Primer
tgaagtgccttgaatctttctgact

SEQ ID NO: 7016 - DNA, 25 bp, Artificial sequence  Extension Primer
  Primer
tgaagaggaactacatactagaagg

SEQ ID NO: 7017 - DNA, 22 bp, Artificial sequence  Extension Primer
  Primer
gcacctcaggggctccaggctt

SEQ ID NO: 7018 - DNA, 25 bp, Artificial sequence  Extension Primer
  Primer
ctaaggaaggcataaaggtgtgttt

SEQ ID NO: 7019 - DNA, 25 bp, Artificial sequence  Extension Primer
  Primer
tacttctatatgatggaatcagact

SEQ ID NO: 7020 - DNA, 25 bp, Artificial sequence  Extension Primer
  Primer
ccagctcatttatttccttttattt

SEQ ID NO: 7021 - DNA, 25 bp, Artificial sequence  Extension Primer
  Primer
tgattgttggaactttgttctagga

SEQ ID NO: 7022 - DNA, 25 bp, Artificial sequence  Extension Primer
  Primer
accttttcttaaacctcggcatagc

SEQ ID NO: 7023 - DNA, 25 bp, Artificial sequence  Extension Primer
  Primer
tcagatatcatctctatgaagaaag

SEQ ID NO: 7024 - DNA, 25 bp, Artificial sequence  Extension Primer
  Primer
ttactgaactcacttgcatatcata

SEQ ID NO: 7025 - DNA, 25 bp, Artificial sequence  Extension Primer
  Primer
aaaagggttctatggccaagtaaat

SEQ ID NO: 7026 - DNA, 25 bp, Artificial sequence  Extension Primer
  Primer
tcttgggggcatatttcaaaagagt

SEQ ID NO: 7027 - DNA, 25 bp, Artificial sequence  Extension Primer
  Primer
agggattccattaaatcaggggcca

SEQ ID NO: 7028 - DNA, 25 bp, Artificial sequence  Extension Primer
  Primer
cctgtaggccaaaaaacagttaaac

SEQ ID NO: 7029 - DNA, 25 bp, Artificial sequence  Extension Primer
  Primer
actgttttatttaagagtctattcc

SEQ ID NO: 7030 - DNA, 25 bp, Artificial sequence  Extension Primer
  Primer
agcaaacagtggagatggactccga

SEQ ID NO: 7031 - DNA, 25 bp, Artificial sequence  Extension Primer
  Primer
ggaagtagttayagcttttgaagaa

SEQ ID NO: 7032 - DNA, 25 bp, Artificial sequence  Extension Primer
  Primer
atcactcatcaactttatcatactg

SEQ ID NO: 7033 - DNA, 25 bp, Artificial sequence  Extension Primer
  Primer
caatcaccctttaggaaaagatgac

SEQ ID NO: 7034 - DNA, 25 bp, Artificial sequence  Extension Primer
  Primer
gtagtcrtatcatacatccacactc

SEQ ID NO: 7035 - DNA, 25 bp, Artificial sequence  Extension Primer
  Primer
tatcacttgcttctagcaacacaga

SEQ ID NO: 7036 - DNA, 25 bp, Artificial sequence  Extension Primer
  Primer
ctatgggaatttcaagctcagaaaa

SEQ ID NO: 7037 - DNA, 25 bp, Artificial sequence  Extension Primer
  Primer
ctcctcacactggttgtagataagc

SEQ ID NO: 7038 - DNA, 25 bp, Artificial sequence  Extension Primer
  Primer
aggacatactaggcactgtgaatac

SEQ ID NO: 7039 - DNA, 25 bp, Artificial sequence  Extension Primer
  Primer
ctatgaattaaggtgtgtgtatgta

SEQ ID NO: 7040 - DNA, 25 bp, Artificial sequence  Extension Primer
  Primer
ctcagagtccactttctttttgaaa

SEQ ID NO: 7041 - DNA, 25 bp, Artificial sequence  Extension Primer
  Primer
cttcttcctagaaaataaggccaat

SEQ ID NO: 7042 - DNA, 25 bp, Artificial sequence  Extension Primer
  Primer
aattttacagagggtttagatttga

SEQ ID NO: 7043 - DNA, 25 bp, Artificial sequence  Extension Primer
  Primer
acccccaaaataaaaaataaataaa

SEQ ID NO: 7044 - DNA, 25 bp, Artificial sequence  Extension Primer
  Primer
aaggatacagaaggcagcaaagtca

SEQ ID NO: 7045 - DNA, 25 bp, Artificial sequence  Extension Primer
  Primer
cttcaggcagctcgatcgcctggtg

SEQ ID NO: 7046 - DNA, 25 bp, Artificial sequence  Extension Primer
  Primer
gaggctctgggttttcctggctcac

SEQ ID NO: 7047 - DNA, 25 bp, Artificial sequence  Extension Primer
  Primer
ctacttttctacattcttataaagc

SEQ ID NO: 7048 - DNA, 25 bp, Artificial sequence  Extension Primer
  Primer
agaggyaccactctggctggagacc

SEQ ID NO: 7049 - DNA, 25 bp, Artificial sequence  Extension Primer
  Primer
ccctttctcttgctctgagtcttat

SEQ ID NO: 7050 - DNA, 25 bp, Artificial sequence  Extension Primer
  Primer
cattgcttacaagtgaattgtttct

SEQ ID NO: 7051 - DNA, 25 bp, Artificial sequence  Extension Primer
  Primer
ttgaatgccttctctaaacattcta

SEQ ID NO: 7052 - DNA, 25 bp, Artificial sequence  Extension Primer
  Primer
ctgacagtatcagacaaataataat

SEQ ID NO: 7053 - DNA, 25 bp, Artificial sequence  Extension Primer
  Primer
tagttgtatccaaaatgtcacaaaa

SEQ ID NO: 7054 - DNA, 25 bp, Artificial sequence  Extension Primer
  Primer
acgactggacgtgtgtggttctgtg

SEQ ID NO: 7055 - DNA, 25 bp, Artificial sequence  Extension Primer
  Primer
agcagtaacatgaaggtattcactt

SEQ ID NO: 7056 - DNA, 25 bp, Artificial sequence  Extension Primer
  Primer
atgccatttaagagggtcaaaaaac

SEQ ID NO: 7057 - DNA, 25 bp, Artificial sequence  Extension Primer
  Primer
gctggggatggggtagggtggactc

SEQ ID NO: 7058 - DNA, 25 bp, Artificial sequence  Extension Primer
  Primer
tttacatctgtagtcttaggcaaaa

SEQ ID NO: 7059 - DNA, 25 bp, Artificial sequence  Extension Primer
  Primer
gagttgaattctagctttctttcct

SEQ ID NO: 7060 - DNA, 25 bp, Artificial sequence  Extension Primer
  Primer
ttgtgatgacagataaccctgtgat

SEQ ID NO: 7061 - DNA, 25 bp, Artificial sequence  Extension Primer
  Primer
atcacaaaaaaactttgaggtgggc

SEQ ID NO: 7062 - DNA, 25 bp, Artificial sequence  Extension Primer
  Primer
ctaatctttactgggaatttactac

SEQ ID NO: 7063 - DNA, 25 bp, Artificial sequence  Extension Primer
  Primer
ttccaacctctttccattttgacaa

SEQ ID NO: 7064 - DNA, 25 bp, Artificial sequence  Extension Primer
  Primer
aattctgatataaggacagcaaaat

SEQ ID NO: 7065 - DNA, 25 bp, Artificial sequence  Extension Primer
  Primer
ggcttttgacaaatcagaggatctt

SEQ ID NO: 7066 - DNA, 25 bp, Artificial sequence  Extension Primer
  Primer
attatttctcccaacaggcctgtcc

SEQ ID NO: 7067 - DNA, 25 bp, Artificial sequence  Extension Primer
  Primer
ggcggtgtactcagaggattggaga

SEQ ID NO: 7068 - DNA, 25 bp, Artificial sequence  Extension Primer
  Primer
acattcacatttcaggtatacatta

SEQ ID NO: 7069 - DNA, 25 bp, Artificial sequence  Extension Primer
  Primer
cttctgacctactagttgagttaca

SEQ ID NO: 7070 - DNA, 25 bp, Artificial sequence  Extension Primer
  Primer
taggaatcctttactgagcccttgg

SEQ ID NO: 7071 - DNA, 25 bp, Artificial sequence  Extension Primer
  Primer
aaaggggcatccttaccccaacctc

SEQ ID NO: 7072 - DNA, 25 bp, Artificial sequence  Extension Primer
  Primer
cacagcctgtaatgtttaaatttca

SEQ ID NO: 7073 - DNA, 25 bp, Artificial sequence  Extension Primer
  Primer
agatgaagaaccttcaagctctttc

SEQ ID NO: 7074 - DNA, 25 bp, Artificial sequence  Extension Primer
  Primer
gaaaattttatgttaaggaaactgg

SEQ ID NO: 7075 - DNA, 25 bp, Artificial sequence  Extension Primer
  Primer
aaaacttaccttaattctttcattt

SEQ ID NO: 7076 - DNA, 25 bp, Artificial sequence  Extension Primer
  Primer
ctttcccaaaacagtataaatacat

SEQ ID NO: 7077 - DNA, 25 bp, Artificial sequence  Extension Primer
  Primer
catccattgtggatttcaaaacatg

SEQ ID NO: 7078 - DNA, 25 bp, Artificial sequence  Extension Primer
  Primer
tacagttatcacgaagctaacagac

SEQ ID NO: 7079 - DNA, 25 bp, Artificial sequence  Extension Primer
  Primer
tggatgttgttctaatacatttggt

SEQ ID NO: 7080 - DNA, 25 bp, Artificial sequence  Extension Primer
  Primer
ataccctcagccaaaaagactcata

SEQ ID NO: 7081 - DNA, 25 bp, Artificial sequence  Extension Primer
  Primer
ttagagagctctgaagtagtaattt

SEQ ID NO: 7082 - DNA, 25 bp, Artificial sequence  Extension Primer
  Primer
ttctaagaagttgaaaagaatggtg

SEQ ID NO: 7083 - DNA, 25 bp, Artificial sequence  Extension Primer
  Primer
agtatttctcagttctgttcctctt

SEQ ID NO: 7084 - DNA, 25 bp, Artificial sequence  Extension Primer
  Primer
cttttccaacattcctagtactgat

SEQ ID NO: 7085 - DNA, 25 bp, Artificial sequence  Extension Primer
  Primer
ggagctgggatgttttagagcgtga

SEQ ID NO: 7086 - DNA, 25 bp, Artificial sequence  Extension Primer
  Primer
cagaaaagaattcactgaaaatacc

SEQ ID NO: 7087 - DNA, 25 bp, Artificial sequence  Extension Primer
  Primer
ctttggtacacctaatgatttttat

SEQ ID NO: 7088 - DNA, 25 bp, Artificial sequence  Extension Primer
  Primer
aggtggaagccagatcactgagtgc

SEQ ID NO: 7089 - DNA, 25 bp, Artificial sequence  Extension Primer
  Primer
aacagaggctcttctcaatgacaca

SEQ ID NO: 7090 - DNA, 25 bp, Artificial sequence  Extension Primer
  Primer
atgttgttggtaattcctttggaac

SEQ ID NO: 7091 - DNA, 25 bp, Artificial sequence  Extension Primer
  Primer
gtctccaggagaaatttagagcacc

SEQ ID NO: 7092 - DNA, 25 bp, Artificial sequence  Extension Primer
  Primer
atctatcccttgtttcattttgatt

SEQ ID NO: 7093 - DNA, 25 bp, Artificial sequence  Extension Primer
  Primer
gggaatatatcttggagcatgaatg

SEQ ID NO: 7094 - DNA, 25 bp, Artificial sequence  Extension Primer
  Primer
catatcttaattttaatactagaca

SEQ ID NO: 7095 - DNA, 25 bp, Artificial sequence  Extension Primer
  Primer
atgaggaaactgaggcccagacaga

SEQ ID NO: 7096 - DNA, 25 bp, Artificial sequence  Extension Primer
  Primer
agtgtacctgaagagttatcatcta

SEQ ID NO: 7097 - DNA, 25 bp, Artificial sequence  Extension Primer
  Primer
ggctcagggactcttcagagggaca

SEQ ID NO: 7098 - DNA, 25 bp, Artificial sequence  Extension Primer
  Primer
aggcctaaatataactacagttgtg

SEQ ID NO: 7099 - DNA, 25 bp, Artificial sequence  Extension Primer
  Primer
ttgaaaatccagagttctggttctc

SEQ ID NO: 7100 - DNA, 25 bp, Artificial sequence  Extension Primer
  Primer
attaatttgaattcaatttattctt

SEQ ID NO: 7101 - DNA, 25 bp, Artificial sequence  Extension Primer
  Primer
gctatttcctgatgaaytaatgaca

SEQ ID NO: 7102 - DNA, 25 bp, Artificial sequence  Extension Primer
  Primer
ctggttctttttggaattttatctc

SEQ ID NO: 7103 - DNA, 25 bp, Artificial sequence  Extension Primer
  Primer
ggcctgtgctcactacaaaagctgg

SEQ ID NO: 7104 - DNA, 25 bp, Artificial sequence  Extension Primer
  Primer
gtgactgctcccagatcccaggcac

SEQ ID NO: 7105 - DNA, 25 bp, Artificial sequence  Extension Primer
  Primer
agtgtctcttccacagtatgtcttg

SEQ ID NO: 7106 - DNA, 25 bp, Artificial sequence  Extension Primer
  Primer
acagacattttctcatttatcagaa

SEQ ID NO: 7107 - DNA, 25 bp, Artificial sequence  Extension Primer
  Primer
ttagcatcttatttaatcaagctac

SEQ ID NO: 7108 - DNA, 25 bp, Artificial sequence  Extension Primer
  Primer
attttctatttctactgtacctctc

SEQ ID NO: 7109 - DNA, 25 bp, Artificial sequence  Extension Primer
  Primer
ccccaagccagttgtttctgggacc

SEQ ID NO: 7110 - DNA, 25 bp, Artificial sequence  Extension Primer
  Primer
ctgcttattgtgtctctycaatayt

SEQ ID NO: 7111 - DNA, 25 bp, Artificial sequence  Extension Primer
  Primer
tcctctttccaatgaaggggatgcg

SEQ ID NO: 7112 - DNA, 25 bp, Artificial sequence  Extension Primer
  Primer
caggatcatccttcttttctggctc

SEQ ID NO: 7113 - DNA, 25 bp, Artificial sequence  Extension Primer
  Primer
tatactgtacaagtttgtctgcaaa

SEQ ID NO: 7114 - DNA, 25 bp, Artificial sequence  Extension Primer
  Primer
agtcatgaaacagaattcttctatt

SEQ ID NO: 7115 - DNA, 25 bp, Artificial sequence  Extension Primer
  Primer
gatttagataagggaggaatgtttt

SEQ ID NO: 7116 - DNA, 25 bp, Artificial sequence  Extension Primer
  Primer
catttcataggcagctttgtcacca

SEQ ID NO: 7117 - DNA, 25 bp, Artificial sequence  Extension Primer
  Primer
ttttaagacttctggagttaacatt

SEQ ID NO: 7118 - DNA, 25 bp, Artificial sequence  Extension Primer
  Primer
agcctcctactttctggtgtttatt

SEQ ID NO: 7119 - DNA, 25 bp, Artificial sequence  Extension Primer
  Primer
tgtactcgtttaatgctctgctgtc

SEQ ID NO: 7120 - DNA, 25 bp, Artificial sequence  Extension Primer
  Primer
gcacaaggaagcagattgcaagaaa

SEQ ID NO: 7121 - DNA, 25 bp, Artificial sequence  Extension Primer
  Primer
aaagatcctactgcatagcacaggg

SEQ ID NO: 7122 - DNA, 25 bp, Artificial sequence  Extension Primer
  Primer
gtgtgttgttgaatttctaagttat

SEQ ID NO: 7123 - DNA, 25 bp, Artificial sequence  Extension Primer
  Primer
aaggttgtcatttaatgagggctta

SEQ ID NO: 7124 - DNA, 25 bp, Artificial sequence  Extension Primer
  Primer
gtaggttcatccgttgtaacaaatg

SEQ ID NO: 7125 - DNA, 25 bp, Artificial sequence  Extension Primer
  Primer
catctcttatttcagttgtcttgtc

SEQ ID NO: 7126 - DNA, 25 bp, Artificial sequence  Extension Primer
  Primer
gtggctttgagaactgaaaaagcaa

SEQ ID NO: 7127 - DNA, 25 bp, Artificial sequence  Extension Primer
  Primer
aaattggagactggattctattttc

SEQ ID NO: 7128 - DNA, 25 bp, Artificial sequence  Extension Primer
  Primer
cttgattaaaaaacaatttccgttt

SEQ ID NO: 7129 - DNA, 22 bp, Artificial sequence  Extension Primer
  Primer
aactcttacttttttttcttat

SEQ ID NO: 7130 - DNA, 25 bp, Artificial sequence  Extension Primer
  Primer
cttggcctttctcagtccactcagg

SEQ ID NO: 7131 - DNA, 25 bp, Artificial sequence  Extension Primer
  Primer
cagcttagtgccctcctttttcttc

SEQ ID NO: 7132 - DNA, 25 bp, Artificial sequence  Extension Primer
  Primer
aaagttgctgatttctcctcactct

SEQ ID NO: 7133 - DNA, 25 bp, Artificial sequence  Extension Primer
  Primer
ctagaaagtgaaatgttacagtgtg

SEQ ID NO: 7134 - DNA, 25 bp, Artificial sequence  Extension Primer
  Primer
gctttccgcttctgagggtgacttc

SEQ ID NO: 7135 - DNA, 25 bp, Artificial sequence  Extension Primer
  Primer
gtccgggaagcaactagagatcttg

SEQ ID NO: 7136 - DNA, 25 bp, Artificial sequence  Extension Primer
  Primer
aatttcaatctcatagaatctagtt

SEQ ID NO: 7137 - DNA, 25 bp, Artificial sequence  Extension Primer
  Primer
gttttaaaaagctaatttaatagac

SEQ ID NO: 7138 - DNA, 25 bp, Artificial sequence  Extension Primer
  Primer
ttcggattaagttggtgagcatttt

SEQ ID NO: 7139 - DNA, 25 bp, Artificial sequence  Extension Primer
  Primer
catatgctttaaatacttaagtaag

SEQ ID NO: 7140 - DNA, 25 bp, Artificial sequence  Extension Primer
  Primer
atatgacatagccttgtagcagaat

SEQ ID NO: 7141 - DNA, 25 bp, Artificial sequence  Extension Primer
  Primer
gtcatttatagtcaaggtcacacca

SEQ ID NO: 7142 - DNA, 25 bp, Artificial sequence  Extension Primer
  Primer
ttgattctgactcaagacggagggc

SEQ ID NO: 7143 - DNA, 25 bp, Artificial sequence  Extension Primer
  Primer
aagagagttaagggctatagaagat

SEQ ID NO: 7144 - DNA, 25 bp, Artificial sequence  Extension Primer
  Primer
gcgtggtgttcctgcctgcctgcag

SEQ ID NO: 7145 - DNA, 25 bp, Artificial sequence  Extension Primer
  Primer
gggagctcagagtcttagccactgg

SEQ ID NO: 7146 - DNA, 22 bp, Artificial sequence  Extension Primer
  Primer
ttcgattatttaagcgaaagac

SEQ ID NO: 7147 - DNA, 25 bp, Artificial sequence  Extension Primer
  Primer
aaattctgcaawgccygcctttttt

SEQ ID NO: 7148 - DNA, 25 bp, Artificial sequence  Extension Primer
  Primer
ccacttccacctccacaaaggacac

SEQ ID NO: 7149 - DNA, 25 bp, Artificial sequence  Extension Primer
  Primer
taattgcgtctcttcgattctcacg

SEQ ID NO: 7150 - DNA, 25 bp, Artificial sequence  Extension Primer
  Primer
ccctgcacgcctgcatgatgagcca

SEQ ID NO: 7151 - DNA, 25 bp, Artificial sequence  Extension Primer
  Primer
caaaatttctgcatgtattccagcc

SEQ ID NO: 7152 - DNA, 25 bp, Artificial sequence  Extension Primer
  Primer
agcctttgtttgtaatgtgacaagt

SEQ ID NO: 7153 - DNA, 25 bp, Artificial sequence  Extension Primer
  Primer
aactcaataatgctgtagaggtgaa

SEQ ID NO: 7154 - DNA, 25 bp, Artificial sequence  Extension Primer
  Primer
aggatagtgagctgctcacagatac

SEQ ID NO: 7155 - DNA, 25 bp, Artificial sequence  Extension Primer
  Primer
tctgcaaggtaacaaagatagagaa

SEQ ID NO: 7156 - DNA, 25 bp, Artificial sequence  Extension Primer
  Primer
taataaacaataaccataagtgaaa

SEQ ID NO: 7157 - DNA, 25 bp, Artificial sequence  Extension Primer
  Primer
taagttatggaggaagggcttctgt

SEQ ID NO: 7158 - DNA, 25 bp, Artificial sequence  Extension Primer
  Primer
catatgtgtacacatttctatggga

SEQ ID NO: 7159 - DNA, 25 bp, Artificial sequence  Extension Primer
  Primer
gagaggagagagtcgaggatgaagt

SEQ ID NO: 7160 - DNA, 25 bp, Artificial sequence  Extension Primer
  Primer
aaagcaaatatggtggatacaaata

SEQ ID NO: 7161 - DNA, 25 bp, Artificial sequence  Extension Primer
  Primer
aataaactgtattctacctaccact

SEQ ID NO: 7162 - DNA, 25 bp, Artificial sequence  Extension Primer
  Primer
tgctcctggaggcaagctgatgata

SEQ ID NO: 7163 - DNA, 25 bp, Artificial sequence  Extension Primer
  Primer
ttatctgtgctctcatattttgtcc

SEQ ID NO: 7164 - DNA, 25 bp, Artificial sequence  Extension Primer
  Primer
tttgtatattgtctgtgactgtttt

SEQ ID NO: 7165 - DNA, 25 bp, Artificial sequence  Extension Primer
  Primer
cctaactgactctgcctgtttttca

SEQ ID NO: 7166 - DNA, 25 bp, Artificial sequence  Extension Primer
  Primer
tcacaccacacagcactatgttcta

SEQ ID NO: 7167 - DNA, 25 bp, Artificial sequence  Extension Primer
  Primer
cctggctttcgtctctgccctacag

SEQ ID NO: 7168 - DNA, 25 bp, Artificial sequence  Extension Primer
  Primer
acaatctgcctgcaacacagaagaa

SEQ ID NO: 7169 - DNA, 22 bp, Artificial sequence  Extension Primer
  Primer
atcctacattccttgtgtctaa

SEQ ID NO: 7170 - DNA, 25 bp, Artificial sequence  Extension Primer
  Primer
attttcagatatgaaaccataacaa

SEQ ID NO: 7171 - DNA, 25 bp, Artificial sequence  Extension Primer
  Primer
ctggcctgttggagggcctgggact

SEQ ID NO: 7172 - DNA, 25 bp, Artificial sequence  Extension Primer
  Primer
attttaatcctgcagcataactaac

SEQ ID NO: 7173 - DNA, 25 bp, Artificial sequence  Extension Primer
  Primer
ctcctyytcgtggaagaggtaatct

SEQ ID NO: 7174 - DNA, 25 bp, Artificial sequence  Extension Primer
  Primer
cttcaattggaagttcccttagaga

SEQ ID NO: 7175 - DNA, 25 bp, Artificial sequence  Extension Primer
  Primer
gctttatttggtcacaggatccatg

SEQ ID NO: 7176 - DNA, 25 bp, Artificial sequence  Extension Primer
  Primer
tgctacacttctgagtttatatcca

SEQ ID NO: 7177 - DNA, 25 bp, Artificial sequence  Extension Primer
  Primer
aaaagcagttaatcaactggcaagc

SEQ ID NO: 7178 - DNA, 22 bp, Artificial sequence  Extension Primer
  Primer
aattcaaattccctgcagcatt

SEQ ID NO: 7179 - DNA, 25 bp, Artificial sequence  Extension Primer
  Primer
aagtcctgtttaaattcccctagcg

SEQ ID NO: 7180 - DNA, 25 bp, Artificial sequence  Extension Primer
  Primer
aagatcttttggaaaataactgaat

SEQ ID NO: 7181 - DNA, 25 bp, Artificial sequence  Extension Primer
  Primer
cagtaaagtcacttcatagtgttga

SEQ ID NO: 7182 - DNA, 25 bp, Artificial sequence  Extension Primer
  Primer
tagttgtcactctaagtgagtgttt

SEQ ID NO: 7183 - DNA, 25 bp, Artificial sequence  Extension Primer
  Primer
tgagcaatagtttcttggagatcta

SEQ ID NO: 7184 - DNA, 25 bp, Artificial sequence  Extension Primer
  Primer
ccagtatatgtccctaagaaactta

SEQ ID NO: 7185 - DNA, 25 bp, Artificial sequence  Extension Primer
  Primer
atgctcctatctttggacacctgct

SEQ ID NO: 7186 - DNA, 25 bp, Artificial sequence  Extension Primer
  Primer
gatggtggttgaccctaggagagac

SEQ ID NO: 7187 - DNA, 25 bp, Artificial sequence  Extension Primer
  Primer
gtccaactctgtgcgaccccataga

SEQ ID NO: 7188 - DNA, 25 bp, Artificial sequence  Extension Primer
  Primer
tcccggcagaaaggaggggaaaggc

SEQ ID NO: 7189 - DNA, 25 bp, Artificial sequence  Extension Primer
  Primer
aatgaggttcacagtagctcgctta

SEQ ID NO: 7190 - DNA, 25 bp, Artificial sequence  Extension Primer
  Primer
tcctctgtgaagccttccccacctc

SEQ ID NO: 7191 - DNA, 25 bp, Artificial sequence  Extension Primer
  Primer
ccagaacaaatgaatgaaataaggt

SEQ ID NO: 7192 - DNA, 25 bp, Artificial sequence  Extension Primer
  Primer
aatggttatggagtaaggcacaact

SEQ ID NO: 7193 - DNA, 25 bp, Artificial sequence  Extension Primer
  Primer
ccttacaaccacctctgcacatcca

SEQ ID NO: 7194 - DNA, 25 bp, Artificial sequence  Extension Primer
  Primer
actgttgtgctgaaaattcctgtga

SEQ ID NO: 7195 - DNA, 25 bp, Artificial sequence  Extension Primer
  Primer
ttctcttttccacatggaactctca

SEQ ID NO: 7196 - DNA, 25 bp, Artificial sequence  Extension Primer
  Primer
ttcagaatgaacctaatgaattttg

SEQ ID NO: 7197 - DNA, 25 bp, Artificial sequence  Extension Primer
  Primer
caaatttgcttattctaccaacaat

SEQ ID NO: 7198 - DNA, 25 bp, Artificial sequence  Extension Primer
  Primer
gttctctgcacaaacttgaagtaaa

SEQ ID NO: 7199 - DNA, 25 bp, Artificial sequence  Extension Primer
  Primer
ccacagctgttctcragtaaatgtc

SEQ ID NO: 7200 - DNA, 25 bp, Artificial sequence  Extension Primer
  Primer
gcttcggcgcctgcgggcggggcga

SEQ ID NO: 7201 - DNA, 25 bp, Artificial sequence  Extension Primer
  Primer
ttagggtagatggtgtgtacctata

SEQ ID NO: 7202 - DNA, 25 bp, Artificial sequence  Extension Primer
  Primer
gctccttacctactgtctatctttc

SEQ ID NO: 7203 - DNA, 25 bp, Artificial sequence  Extension Primer
  Primer
ggttagtaccccaggtgttttgata

SEQ ID NO: 7204 - DNA, 25 bp, Artificial sequence  Extension Primer
  Primer
gccagggatagaggtgggattgggt

SEQ ID NO: 7205 - DNA, 25 bp, Artificial sequence  Extension Primer
  Primer
tacctcagcatattagatttctttc

SEQ ID NO: 7206 - DNA, 25 bp, Artificial sequence  Extension Primer
  Primer
acaaatccacatgttaatgtaggta

SEQ ID NO: 7207 - DNA, 25 bp, Artificial sequence  Extension Primer
  Primer
ggggtagcaggacgtgatgggtgtg

SEQ ID NO: 7208 - DNA, 25 bp, Artificial sequence  Extension Primer
  Primer
tctttgtttcatatttaagaaagaa

SEQ ID NO: 7209 - DNA, 25 bp, Artificial sequence  Extension Primer
  Primer
ttagcatcactctggtaaatgtact

SEQ ID NO: 7210 - DNA, 25 bp, Artificial sequence  Extension Primer
  Primer
tgagacatcagtgcccacaggtttg

SEQ ID NO: 7211 - DNA, 25 bp, Artificial sequence  Extension Primer
  Primer
aggcattttcttctaccagcacaag

SEQ ID NO: 7212 - DNA, 25 bp, Artificial sequence  Extension Primer
  Primer
aatatggaaatacacttctcctttg

SEQ ID NO: 7213 - DNA, 25 bp, Artificial sequence  Extension Primer
  Primer
agggttggaagataattagcaatgt

SEQ ID NO: 7214 - DNA, 25 bp, Artificial sequence  Extension Primer
  Primer
gccacacgatgtctgtggggcgctc

SEQ ID NO: 7215 - DNA, 25 bp, Artificial sequence  Extension Primer
  Primer
tcatctatgcagagaaacacagtga

SEQ ID NO: 7216 - DNA, 25 bp, Artificial sequence  Extension Primer
  Primer
tccatcataggttattataagatat

SEQ ID NO: 7217 - DNA, 25 bp, Artificial sequence  Extension Primer
  Primer
gacgtttcaaacgttacaattcctc

SEQ ID NO: 7218 - DNA, 25 bp, Artificial sequence  Extension Primer
  Primer
gatgaggacaactgagcatctgtaa

SEQ ID NO: 7219 - DNA, 22 bp, Artificial sequence  Extension Primer
  Primer
tgcaccacggtgtcctgaagca

SEQ ID NO: 7220 - DNA, 25 bp, Artificial sequence  Extension Primer
  Primer
atttaacatctctacttactgtgct

SEQ ID NO: 7221 - DNA, 25 bp, Artificial sequence  Extension Primer
  Primer
actggacccactgtgaggcaaatct

SEQ ID NO: 7222 - DNA, 25 bp, Artificial sequence  Extension Primer
  Primer
ataaaaatatttttgctaatacaaa

SEQ ID NO: 7223 - DNA, 25 bp, Artificial sequence  Extension Primer
  Primer
ggagtttaagttataatctctctct

SEQ ID NO: 7224 - DNA, 25 bp, Artificial sequence  Extension Primer
  Primer
aatttacctgctcatatgagaaaga

SEQ ID NO: 7225 - DNA, 25 bp, Artificial sequence  Extension Primer
  Primer
cttcattggtgtgagatgcgccttt

SEQ ID NO: 7226 - DNA, 25 bp, Artificial sequence  Extension Primer
  Primer
ttggagtttgcctgcttgtgttact

SEQ ID NO: 7227 - DNA, 25 bp, Artificial sequence  Extension Primer
  Primer
ctaccaaataaagcctgatggtgct

SEQ ID NO: 7228 - DNA, 25 bp, Artificial sequence  Extension Primer
  Primer
cctaaatcgttgatattggagtcat

SEQ ID NO: 7229 - DNA, 25 bp, Artificial sequence  Extension Primer
  Primer
atttgtggttgtttagaatggaggc

SEQ ID NO: 7230 - DNA, 25 bp, Artificial sequence  Extension Primer
  Primer
aaccttagccaatattttgtctcca

SEQ ID NO: 7231 - DNA, 25 bp, Artificial sequence  Extension Primer
  Primer
tgctccttaagatcactaatttctt

SEQ ID NO: 7232 - DNA, 25 bp, Artificial sequence  Extension Primer
  Primer
ggttctggggcaggggagtgtcttc

SEQ ID NO: 7233 - DNA, 22 bp, Artificial sequence  Extension Primer
  Primer
aattctgtgattctgtattttg

SEQ ID NO: 7234 - DNA, 25 bp, Artificial sequence  Extension Primer
  Primer
ggtttagggatggtgtggatggttt

SEQ ID NO: 7235 - DNA, 22 bp, Artificial sequence  Extension Primer
  Primer
attccctatgatccatcaattc

SEQ ID NO: 7236 - DNA, 25 bp, Artificial sequence  Extension Primer
  Primer
tctacttactgtgctstatgttacc

SEQ ID NO: 7237 - DNA, 25 bp, Artificial sequence  Extension Primer
  Primer
tgttttattttctataaggccctcc

SEQ ID NO: 7238 - DNA, 22 bp, Artificial sequence  Extension Primer
  Primer
caataaaggtttaaaatttgga

SEQ ID NO: 7239 - DNA, 25 bp, Artificial sequence  Extension Primer
  Primer
atcaagaacatatttatgagctata

SEQ ID NO: 7240 - DNA, 25 bp, Artificial sequence  Extension Primer
  Primer
ttaactgtgcctctgacagacacac

SEQ ID NO: 7241 - DNA, 25 bp, Artificial sequence  Extension Primer
  Primer
tttycacgctccactacccggggaa

SEQ ID NO: 7242 - DNA, 25 bp, Artificial sequence  Extension Primer
  Primer
ttactctcttctccatccttctccc

SEQ ID NO: 7243 - DNA, 25 bp, Artificial sequence  Extension Primer
  Primer
attatttggcccagtwgaaaaaagt

SEQ ID NO: 7244 - DNA, 25 bp, Artificial sequence  Extension Primer
  Primer
tgtgtgtgctctcgcagctagcagt

SEQ ID NO: 7245 - DNA, 25 bp, Artificial sequence  Extension Primer
  Primer
tttctggattttgtttctaattctt

SEQ ID NO: 7246 - DNA, 25 bp, Artificial sequence  Extension Primer
  Primer
ctcctcctaagagagttttttccct

SEQ ID NO: 7247 - DNA, 25 bp, Artificial sequence  Extension Primer
  Primer
tgacactcacaaaataagtagtcat

SEQ ID NO: 7248 - DNA, 25 bp, Artificial sequence  Extension Primer
  Primer
agcagtgcttacattaaaggcacaa

SEQ ID NO: 7249 - DNA, 25 bp, Artificial sequence  Extension Primer
  Primer
cttattctatacagctattagtgtc

SEQ ID NO: 7250 - DNA, 25 bp, Artificial sequence  Extension Primer
  Primer
tgggctgttctgagtttctggaact

SEQ ID NO: 7251 - DNA, 25 bp, Artificial sequence  Extension Primer
  Primer
gatggaaccatggtccaagatgaga

SEQ ID NO: 7252 - DNA, 25 bp, Artificial sequence  Extension Primer
  Primer
gcttcctactcaagtcttgtcctct

SEQ ID NO: 7253 - DNA, 25 bp, Artificial sequence  Extension Primer
  Primer
tcctggagacgcagacgtggctgtt

SEQ ID NO: 7254 - DNA, 25 bp, Artificial sequence  Extension Primer
  Primer
ggccgtgagttatgcttagagtatt

SEQ ID NO: 7255 - DNA, 25 bp, Artificial sequence  Extension Primer
  Primer
tggttgcgttgtcatttcactgtca

SEQ ID NO: 7256 - DNA, 25 bp, Artificial sequence  Extension Primer
  Primer
aggcacattgttagttacaacatct

SEQ ID NO: 7257 - DNA, 25 bp, Artificial sequence  Extension Primer
  Primer
ttttactaccactgatgtgacagga

SEQ ID NO: 7258 - DNA, 25 bp, Artificial sequence  Extension Primer
  Primer
gcatgactctgacattcttcaagca

SEQ ID NO: 7259 - DNA, 25 bp, Artificial sequence  Extension Primer
  Primer
acagcatgggcttgggcacaatata

SEQ ID NO: 7260 - DNA, 25 bp, Artificial sequence  Extension Primer
  Primer
graaaaccctcattccattgctcca

SEQ ID NO: 7261 - DNA, 25 bp, Artificial sequence  Extension Primer
  Primer
gtgggcagcaggcagaggggaagcg

SEQ ID NO: 7262 - DNA, 25 bp, Artificial sequence  Extension Primer
  Primer
gaggcctcttttgcccccttactgc

SEQ ID NO: 7263 - DNA, 25 bp, Artificial sequence  Extension Primer
  Primer
agctgccggaactctgtgttcaacc

SEQ ID NO: 7264 - DNA, 25 bp, Artificial sequence  Extension Primer
  Primer
ttacccctcgtgaattcaactctta

SEQ ID NO: 7265 - DNA, 25 bp, Artificial sequence  Extension Primer
  Primer
tctgatgtgaagccagcttgttccc

SEQ ID NO: 7266 - DNA, 25 bp, Artificial sequence  Extension Primer
  Primer
tgctgaagacactgagggccaamtg

SEQ ID NO: 7267 - DNA, 25 bp, Artificial sequence  Extension Primer
  Primer
ttacctttytccatcctgttttgtg

SEQ ID NO: 7268 - DNA, 25 bp, Artificial sequence  Extension Primer
  Primer
tgttgagagtctatcctttatcttc

SEQ ID NO: 7269 - DNA, 25 bp, Artificial sequence  Extension Primer
  Primer
cataattttcataagaatttgcatt

SEQ ID NO: 7270 - DNA, 25 bp, Artificial sequence  Extension Primer
  Primer
cacagagaacagggtaagtcacttt

SEQ ID NO: 7271 - DNA, 25 bp, Artificial sequence  Extension Primer
  Primer
aaagctcccagttctgtcaagaata

SEQ ID NO: 7272 - DNA, 25 bp, Artificial sequence  Extension Primer
  Primer
gtcaagcacccaggtctcttaatcc

SEQ ID NO: 7273 - DNA, 25 bp, Artificial sequence  Extension Primer
  Primer
tttctttcctcctttccttctgagt

SEQ ID NO: 7274 - DNA, 25 bp, Artificial sequence  Extension Primer
  Primer
cattcaagtgagtcacatggatttt

SEQ ID NO: 7275 - DNA, 25 bp, Artificial sequence  Extension Primer
  Primer
aagtctcagagacttaaaatcaagc

SEQ ID NO: 7276 - DNA, 25 bp, Artificial sequence  Extension Primer
  Primer
gtgtatttctgatttaatggcaaaa

SEQ ID NO: 7277 - DNA, 25 bp, Artificial sequence  Extension Primer
  Primer
ttaatcatcgcttctgtccctgcac

SEQ ID NO: 7278 - DNA, 25 bp, Artificial sequence  Extension Primer
  Primer
gctgctaagggacacagtgcttcca

SEQ ID NO: 7279 - DNA, 25 bp, Artificial sequence  Extension Primer
  Primer
aagggaaactatgagtagaagcaaa

SEQ ID NO: 7280 - DNA, 25 bp, Artificial sequence  Extension Primer
  Primer
gcagtctggtccatctttgcattcc

SEQ ID NO: 7281 - DNA, 25 bp, Artificial sequence  Extension Primer
  Primer
gggatgctccagtcacagaaaggta

SEQ ID NO: 7282 - DNA, 25 bp, Artificial sequence  Extension Primer
  Primer
gtctccacattcctcattctgcttg

SEQ ID NO: 7283 - DNA, 25 bp, Artificial sequence  Extension Primer
  Primer
acactcacaaaataagtagtcatrt

SEQ ID NO: 7284 - DNA, 25 bp, Artificial sequence  Extension Primer
  Primer
agtcaatcttctttctgtgaatgag

SEQ ID NO: 7285 - DNA, 25 bp, Artificial sequence  Extension Primer
  Primer
acaaaaatcaagttctggcacataa

SEQ ID NO: 7286 - DNA, 25 bp, Artificial sequence  Extension Primer
  Primer
tcttcaaatagctaaaatttaggag

SEQ ID NO: 7287 - DNA, 25 bp, Artificial sequence  Extension Primer
  Primer
tgataacaatcaggttaacagtaaa

SEQ ID NO: 7288 - DNA, 25 bp, Artificial sequence  Extension Primer
  Primer
aagaaaagctggggaccatctgggc

SEQ ID NO: 7289 - DNA, 25 bp, Artificial sequence  Extension Primer
  Primer
ctgttcagcaaacttaaaacacttc

SEQ ID NO: 7290 - DNA, 25 bp, Artificial sequence  Extension Primer
  Primer
ggagttaggagaatctccatcccag

SEQ ID NO: 7291 - DNA, 25 bp, Artificial sequence  Extension Primer
  Primer
aaattgaaaaggaacatagcaaaca

SEQ ID NO: 7292 - DNA, 25 bp, Artificial sequence  Extension Primer
  Primer
taatgactggaaggactctctgagg

SEQ ID NO: 7293 - DNA, 25 bp, Artificial sequence  Extension Primer
  Primer
ccactgcctatarcagcatttgttt

SEQ ID NO: 7294 - DNA, 25 bp, Artificial sequence  Extension Primer
  Primer
tattgataagatgaatttattgccg

SEQ ID NO: 7295 - DNA, 25 bp, Artificial sequence  Extension Primer
  Primer
ccctggtgtgagcaactctgatcca

SEQ ID NO: 7296 - DNA, 25 bp, Artificial sequence  Extension Primer
  Primer
tctttccagcatttggagaccacgc

SEQ ID NO: 7297 - DNA, 25 bp, Artificial sequence  Extension Primer
  Primer
gcgactgtcattaagatccatcagt

SEQ ID NO: 7298 - DNA, 25 bp, Artificial sequence  Extension Primer
  Primer
tcagtcatttttggcaccagggact

SEQ ID NO: 7299 - DNA, 25 bp, Artificial sequence  Extension Primer
  Primer
caggragtatcattggtagagtaga

SEQ ID NO: 7300 - DNA, 25 bp, Artificial sequence  Extension Primer
  Primer
cagataaagggcagtsaatatcttc

SEQ ID NO: 7301 - DNA, 25 bp, Artificial sequence  Extension Primer
  Primer
tctttggacacctgctstgcatgta

SEQ ID NO: 7302 - DNA, 25 bp, Artificial sequence  Extension Primer
  Primer
tactatatgatttccttattatgtt

SEQ ID NO: 7303 - DNA, 25 bp, Artificial sequence  Extension Primer
  Primer
agagaggcgggaggcagactagtga

SEQ ID NO: 7304 - DNA, 25 bp, Artificial sequence  Extension Primer
  Primer
ggctgcattctttatgactgcatac

SEQ ID NO: 7305 - DNA, 25 bp, Artificial sequence  Extension Primer
  Primer
acacatacaaacctagatgggtatg

SEQ ID NO: 7306 - DNA, 25 bp, Artificial sequence  Extension Primer
  Primer
tactaagtacactcaaataactgta

SEQ ID NO: 7307 - DNA, 25 bp, Artificial sequence  Extension Primer
  Primer
aagggatacaagcagagtcaaggtg

SEQ ID NO: 7308 - DNA, 25 bp, Artificial sequence  Extension Primer
  Primer
aggctgcacagcgagtgagtggtag

SEQ ID NO: 7309 - DNA, 25 bp, Artificial sequence  Extension Primer
  Primer
gaaacagtactggaggttccagcct

SEQ ID NO: 7310 - DNA, 25 bp, Artificial sequence  Extension Primer
  Primer
tgggcggcgcaccttacctggtctc

SEQ ID NO: 7311 - DNA, 25 bp, Artificial sequence  Extension Primer
  Primer
ccacctgggtggacaccagcagata

SEQ ID NO: 7312 - DNA, 25 bp, Artificial sequence  Extension Primer
  Primer
gtagcagatacaatctggagatgag

SEQ ID NO: 7313 - DNA, 25 bp, Artificial sequence  Extension Primer
  Primer
tttaaaatcaaaatgtattgctgac

SEQ ID NO: 7314 - DNA, 25 bp, Artificial sequence  Extension Primer
  Primer
tgcagatgtggagtmcaaawagggc

SEQ ID NO: 7315 - DNA, 25 bp, Artificial sequence  Extension Primer
  Primer
acccacatgtacacactcatgtata

SEQ ID NO: 7316 - DNA, 25 bp, Artificial sequence  Extension Primer
  Primer
tcgcaaagagtcggacacgacttag

SEQ ID NO: 7317 - DNA, 25 bp, Artificial sequence  Extension Primer
  Primer
ccaaatcttagaccctcattgttct

SEQ ID NO: 7318 - DNA, 25 bp, Artificial sequence  Extension Primer
  Primer
gttttcttcctcagattaaagttat

SEQ ID NO: 7319 - DNA, 25 bp, Artificial sequence  Extension Primer
  Primer
tttttgcttaagtgtatctcactca

SEQ ID NO: 7320 - DNA, 25 bp, Artificial sequence  Extension Primer
  Primer
aaggaataatattaccacactgtga

SEQ ID NO: 7321 - DNA, 25 bp, Artificial sequence  Extension Primer
  Primer
ttaatttctgtcatggcaccaccat

SEQ ID NO: 7322 - DNA, 25 bp, Artificial sequence  Extension Primer
  Primer
aaacacttctgagattctaaaactt

SEQ ID NO: 7323 - DNA, 25 bp, Artificial sequence  Extension Primer
  Primer
catgataaaaatacatcctcttaga

SEQ ID NO: 7324 - DNA, 25 bp, Artificial sequence  Extension Primer
  Primer
atgggatatgaaggagagtcataat

SEQ ID NO: 7325 - DNA, 25 bp, Artificial sequence  Extension Primer
  Primer
catcactttgaacagcagcctgtac

SEQ ID NO: 7326 - DNA, 25 bp, Artificial sequence  Extension Primer
  Primer
gagcttctattcctgcccactgaat

SEQ ID NO: 7327 - DNA, 25 bp, Artificial sequence  Extension Primer
  Primer
cttattccatatagttaggttgatt

SEQ ID NO: 7328 - DNA, 25 bp, Artificial sequence  Extension Primer
  Primer
agcttgagaggttgtctcagagaat

SEQ ID NO: 7329 - DNA, 25 bp, Artificial sequence  Extension Primer
  Primer
tcaggcatcttttaagattgtctca

SEQ ID NO: 7330 - DNA, 25 bp, Artificial sequence  Extension Primer
  Primer
gaaatccattcatactatgaaacct

SEQ ID NO: 7331 - DNA, 25 bp, Artificial sequence  Extension Primer
  Primer
gtgtagaaacaaattaagggatggt

SEQ ID NO: 7332 - DNA, 25 bp, Artificial sequence  Extension Primer
  Primer
cttttataagtaatcatttatatgc

SEQ ID NO: 7333 - DNA, 25 bp, Artificial sequence  Extension Primer
  Primer
gtggaacgccactgacagcactcct

SEQ ID NO: 7334 - DNA, 25 bp, Artificial sequence  Extension Primer
  Primer
aaaatattgactggtagtgtgcttc

SEQ ID NO: 7335 - DNA, 25 bp, Artificial sequence  Extension Primer
  Primer
tgaaagagttttccaataggtaata

SEQ ID NO: 7336 - DNA, 25 bp, Artificial sequence  Extension Primer
  Primer
aaaaagaatagatatttgtatatgt

SEQ ID NO: 7337 - DNA, 25 bp, Artificial sequence  Extension Primer
  Primer
cacccattgggcatatgactgtgta

SEQ ID NO: 7338 - DNA, 25 bp, Artificial sequence  Extension Primer
  Primer
ccagggtagtagctccagaagaaac

SEQ ID NO: 7339 - DNA, 25 bp, Artificial sequence  Extension Primer
  Primer
ttatctttatgctgaaagacctcac

SEQ ID NO: 7340 - DNA, 25 bp, Artificial sequence  Extension Primer
  Primer
gcagcgtccccttgaatggaattat

SEQ ID NO: 7341 - DNA, 25 bp, Artificial sequence  Extension Primer
  Primer
tttcccttaaacaaaaggataccac

SEQ ID NO: 7342 - DNA, 25 bp, Artificial sequence  Extension Primer
  Primer
cactggaagtattggaagacgtggg

SEQ ID NO: 7343 - DNA, 25 bp, Artificial sequence  Extension Primer
  Primer
gccccaaatgtctagaattttacta

SEQ ID NO: 7344 - DNA, 25 bp, Artificial sequence  Extension Primer
  Primer
agagtacttaccattagtttttaat

SEQ ID NO: 7345 - DNA, 25 bp, Artificial sequence  Extension Primer
  Primer
cacttcctttacaaatgaagaaatc

SEQ ID NO: 7346 - DNA, 25 bp, Artificial sequence  Extension Primer
  Primer
cactataaaggcagacatggcaacc

SEQ ID NO: 7347 - DNA, 25 bp, Artificial sequence  Extension Primer
  Primer
tctattacatttcattagtattccc

SEQ ID NO: 7348 - DNA, 25 bp, Artificial sequence  Extension Primer
  Primer
catcagaggatttaggggttccagg

SEQ ID NO: 7349 - DNA, 25 bp, Artificial sequence  Extension Primer
  Primer
atgggaagtgaccagatttatrgag

SEQ ID NO: 7350 - DNA, 25 bp, Artificial sequence  Extension Primer
  Primer
cctcatataacattatatagagttc

SEQ ID NO: 7351 - DNA, 25 bp, Artificial sequence  Extension Primer
  Primer
ctgaattagacccccaaaacttact

SEQ ID NO: 7352 - DNA, 25 bp, Artificial sequence  Extension Primer
  Primer
gccataatatgtagctcaaggaaaa

SEQ ID NO: 7353 - DNA, 25 bp, Artificial sequence  Extension Primer
  Primer
gggaagacgaaattgcagaagggga

SEQ ID NO: 7354 - DNA, 25 bp, Artificial sequence  Extension Primer
  Primer
cagtacttggggaaacctgagagtt

SEQ ID NO: 7355 - DNA, 25 bp, Artificial sequence  Extension Primer
  Primer
gcaagtcacattagatcaagtctcg

SEQ ID NO: 7356 - DNA, 25 bp, Artificial sequence  Extension Primer
  Primer
tctctcataatgcttggaaggaaga

SEQ ID NO: 7357 - DNA, 25 bp, Artificial sequence  Extension Primer
  Primer
ttcctgacaasaataaatgagctgt

SEQ ID NO: 7358 - DNA, 25 bp, Artificial sequence  Extension Primer
  Primer
cttgacatgatgtggagttttgttt

SEQ ID NO: 7359 - DNA, 25 bp, Artificial sequence  Extension Primer
  Primer
aacactgcaaaagttaagtgcaggt

SEQ ID NO: 7360 - DNA, 25 bp, Artificial sequence  Extension Primer
  Primer
tgttgtctggccctctctgagcctc

SEQ ID NO: 7361 - DNA, 22 bp, Artificial sequence  Extension Primer
  Primer
accatttctctctattgcttaa

SEQ ID NO: 7362 - DNA, 25 bp, Artificial sequence  Extension Primer
  Primer
agtacttcatttattcttttgagga

SEQ ID NO: 7363 - DNA, 22 bp, Artificial sequence  Extension Primer
  Primer
tagcagatatcatgctaaacat

SEQ ID NO: 7364 - DNA, 25 bp, Artificial sequence  Extension Primer
  Primer
ttggtggtgattttattctggtttt

SEQ ID NO: 7365 - DNA, 25 bp, Artificial sequence  Extension Primer
  Primer
ttctctctcactcaaagcctcctac

SEQ ID NO: 7366 - DNA, 25 bp, Artificial sequence  Extension Primer
  Primer
catttgtaaaaatgggactggagtg

SEQ ID NO: 7367 - DNA, 25 bp, Artificial sequence  Extension Primer
  Primer
ctcctgcctctttgatcctagaaaa

SEQ ID NO: 7368 - DNA, 25 bp, Artificial sequence  Extension Primer
  Primer
tcctcaatgatgtttttacatgtgt

SEQ ID NO: 7369 - DNA, 25 bp, Artificial sequence  Extension Primer
  Primer
ccacacactaagagggctagttcaa

SEQ ID NO: 7370 - DNA, 25 bp, Artificial sequence  Extension Primer
  Primer
caaataataaagttaagcattaagt

SEQ ID NO: 7371 - DNA, 25 bp, Artificial sequence  Extension Primer
  Primer
gaaaacacaggtgtaaatcttcatt

SEQ ID NO: 7372 - DNA, 25 bp, Artificial sequence  Extension Primer
  Primer
gtctcacttcctagactctggacac

SEQ ID NO: 7373 - DNA, 22 bp, Artificial sequence  Extension Primer
  Primer
ccacacccactgatggaaggta

SEQ ID NO: 7374 - DNA, 25 bp, Artificial sequence  Extension Primer
  Primer
tgacactcttaaccagagacgacca

SEQ ID NO: 7375 - DNA, 25 bp, Artificial sequence  Extension Primer
  Primer
gtcccttctgatcttaaaacaaatc

SEQ ID NO: 7376 - DNA, 25 bp, Artificial sequence  Extension Primer
  Primer
tggcckcattgagataaagagatgt

SEQ ID NO: 7377 - DNA, 25 bp, Artificial sequence  Extension Primer
  Primer
ccaaactgctagctcactacccttt

SEQ ID NO: 7378 - DNA, 25 bp, Artificial sequence  Extension Primer
  Primer
cattcccatggtgaagctctgttta

SEQ ID NO: 7379 - DNA, 25 bp, Artificial sequence  Extension Primer
  Primer
atggtggagattttggaaggggtga

SEQ ID NO: 7380 - DNA, 25 bp, Artificial sequence  Extension Primer
  Primer
cctgagattatacgtagaacaaaat

SEQ ID NO: 7381 - DNA, 25 bp, Artificial sequence  Extension Primer
  Primer
gtgatttccttctctctctctttac

SEQ ID NO: 7382 - DNA, 25 bp, Artificial sequence  Extension Primer
  Primer
ttgcatataaagtgacaagcctaat

SEQ ID NO: 7383 - DNA, 25 bp, Artificial sequence  Extension Primer
  Primer
tatccttttcaccctgtagcacagt

SEQ ID NO: 7384 - DNA, 22 bp, Artificial sequence  Extension Primer
  Primer
gcacaaattrtagtcagatagc

SEQ ID NO: 7385 - DNA, 25 bp, Artificial sequence  Extension Primer
  Primer
ctgcctcaatcttatcctctttaga

SEQ ID NO: 7386 - DNA, 25 bp, Artificial sequence  Extension Primer
  Primer
tgacaggagaacatccctgagataa

SEQ ID NO: 7387 - DNA, 25 bp, Artificial sequence  Extension Primer
  Primer
actgtctagattaaacattattgaa

SEQ ID NO: 7388 - DNA, 25 bp, Artificial sequence  Extension Primer
  Primer
acactacccatgggtctcacttctg

SEQ ID NO: 7389 - DNA, 25 bp, Artificial sequence  Extension Primer
  Primer
ggccacttactgagacctcagtcta

SEQ ID NO: 7390 - DNA, 25 bp, Artificial sequence  Extension Primer
  Primer
atgattttttggaacttgttttaat

SEQ ID NO: 7391 - DNA, 25 bp, Artificial sequence  Extension Primer
  Primer
agaatgcaaygagatatgattctag

SEQ ID NO: 7392 - DNA, 25 bp, Artificial sequence  Extension Primer
  Primer
taaatattacatgaataaagtaaat

SEQ ID NO: 7393 - DNA, 25 bp, Artificial sequence  Extension Primer
  Primer
gctcttcagacagctcgggtaagga

SEQ ID NO: 7394 - DNA, 25 bp, Artificial sequence  Extension Primer
  Primer
agagccattaatcattccatttgcg

SEQ ID NO: 7395 - DNA, 25 bp, Artificial sequence  Extension Primer
  Primer
tatgtagtcccctcttacattatac

SEQ ID NO: 7396 - DNA, 25 bp, Artificial sequence  Extension Primer
  Primer
taagctctgctgctgctgctaagtc

SEQ ID NO: 7397 - DNA, 25 bp, Artificial sequence  Extension Primer
  Primer
tctcttttttcttccatttagagtc

SEQ ID NO: 7398 - DNA, 25 bp, Artificial sequence  Extension Primer
  Primer
ggcagtagaaaagggtgaaaccaag

SEQ ID NO: 7399 - DNA, 25 bp, Artificial sequence  Extension Primer
  Primer
tggcataagaatttgagagtaggaa

SEQ ID NO: 7400 - DNA, 25 bp, Artificial sequence  Extension Primer
  Primer
aatttctacctttctgtttgaacaa

SEQ ID NO: 7401 - DNA, 25 bp, Artificial sequence  Extension Primer
  Primer
taatattcttttgaggctttaaaat

SEQ ID NO: 7402 - DNA, 25 bp, Artificial sequence  Extension Primer
  Primer
tgtctcaagccagcttatatggtaa

SEQ ID NO: 7403 - DNA, 25 bp, Artificial sequence  Extension Primer
  Primer
agggtaggaactgatgtgagcgaag

SEQ ID NO: 7404 - DNA, 22 bp, Artificial sequence  Extension Primer
  Primer
tatcccaagcctcatactctgc

SEQ ID NO: 7405 - DNA, 25 bp, Artificial sequence  Extension Primer
  Primer
atagacaaaaggccacgaagaaaga

SEQ ID NO: 7406 - DNA, 25 bp, Artificial sequence  Extension Primer
  Primer
gtgmtgtctttttatgctgatgtgc

SEQ ID NO: 7407 - DNA, 25 bp, Artificial sequence  Extension Primer
  Primer
ctctatgtctaygtttytattcctg

SEQ ID NO: 7408 - DNA, 25 bp, Artificial sequence  Extension Primer
  Primer
aagacagaaaacatttcacaacttc

SEQ ID NO: 7409 - DNA, 25 bp, Artificial sequence  Extension Primer
  Primer
agggggatttctctcagccaagtcc

SEQ ID NO: 7410 - DNA, 25 bp, Artificial sequence  Extension Primer
  Primer
gcagggtctggcacccccacccttt

SEQ ID NO: 7411 - DNA, 25 bp, Artificial sequence  Extension Primer
  Primer
gagcacagcctctcackgggctggg

SEQ ID NO: 7412 - DNA, 25 bp, Artificial sequence  Extension Primer
  Primer
gttctaaaatatcccaaccttttct

SEQ ID NO: 7413 - DNA, 25 bp, Artificial sequence  Extension Primer
  Primer
ctgttgtttcccagaaggggctggg

SEQ ID NO: 7414 - DNA, 25 bp, Artificial sequence  Extension Primer
  Primer
acctgtgatggctcccaataaagtt

SEQ ID NO: 7415 - DNA, 25 bp, Artificial sequence  Extension Primer
  Primer
ctctttaactgagttgtaacctggg

SEQ ID NO: 7416 - DNA, 25 bp, Artificial sequence  Extension Primer
  Primer
gaagaggatcatagtgggcttagtg

SEQ ID NO: 7417 - DNA, 25 bp, Artificial sequence  Extension Primer
  Primer
actgtggacagtggtatgacagttt

SEQ ID NO: 7418 - DNA, 25 bp, Artificial sequence  Extension Primer
  Primer
tgcactacataaacaaatttcctga

SEQ ID NO: 7419 - DNA, 25 bp, Artificial sequence  Extension Primer
  Primer
gactatatgcatacactcattttta

SEQ ID NO: 7420 - DNA, 25 bp, Artificial sequence  Extension Primer
  Primer
attttgatacagatgtactctctac

SEQ ID NO: 7421 - DNA, 25 bp, Artificial sequence  Extension Primer
  Primer
tggtagtgcagtcagtaaaaaatct

SEQ ID NO: 7422 - DNA, 22 bp, Artificial sequence  Extension Primer
  Primer
ggaccccataccctaaagcctg

SEQ ID NO: 7423 - DNA, 25 bp, Artificial sequence  Extension Primer
  Primer
gactggaaaacacagtccacggatt

SEQ ID NO: 7424 - DNA, 25 bp, Artificial sequence  Extension Primer
  Primer
caaaagagtgsaaaagctccagwrc

SEQ ID NO: 7425 - DNA, 25 bp, Artificial sequence  Extension Primer
  Primer
gagaagtactgttctcaggaacctt

SEQ ID NO: 7426 - DNA, 25 bp, Artificial sequence  Extension Primer
  Primer
tccctggaaaccagtagctatcagt

SEQ ID NO: 7427 - DNA, 25 bp, Artificial sequence  Extension Primer
  Primer
cttccatgaagaaactttgcaataa

SEQ ID NO: 7428 - DNA, 25 bp, Artificial sequence  Extension Primer
  Primer
actgagcaaggtggctatttcctaa

SEQ ID NO: 7429 - DNA, 25 bp, Artificial sequence  Extension Primer
  Primer
ctctcaaatcttttctccaatatac

SEQ ID NO: 7430 - DNA, 25 bp, Artificial sequence  Extension Primer
  Primer
ccgctcatctccactcattataccc

SEQ ID NO: 7431 - DNA, 25 bp, Artificial sequence  Extension Primer
  Primer
tcctcttatgtaggcatcatcctct

SEQ ID NO: 7432 - DNA, 25 bp, Artificial sequence  Extension Primer
  Primer
ggaagagcggggctagtccttactc

SEQ ID NO: 7433 - DNA, 25 bp, Artificial sequence  Extension Primer
  Primer
acccatcttcaacctactcstgatc

SEQ ID NO: 7434 - DNA, 25 bp, Artificial sequence  Extension Primer
  Primer
gatctgttctgactggttaacaaga

SEQ ID NO: 7435 - DNA, 25 bp, Artificial sequence  Extension Primer
  Primer
actggaaaacagcttaaaagaaaaa

SEQ ID NO: 7436 - DNA, 25 bp, Artificial sequence  Extension Primer
  Primer
gagtcttgaaatcagccggcccagg

SEQ ID NO: 7437 - DNA, 25 bp, Artificial sequence  Extension Primer
  Primer
atcaggcttaggcatcccgccccct

SEQ ID NO: 7438 - DNA, 25 bp, Artificial sequence  Extension Primer
  Primer
ttgtcaaccactcttacatttttat

SEQ ID NO: 7439 - DNA, 25 bp, Artificial sequence  Extension Primer
  Primer
gcctctctgtttacctgggcctgcg

SEQ ID NO: 7440 - DNA, 25 bp, Artificial sequence  Extension Primer
  Primer
caggtgctcggtacggagcaggggg

SEQ ID NO: 7441 - DNA, 25 bp, Artificial sequence  Extension Primer
  Primer
tcgagtcaaacagaagccttatctc

SEQ ID NO: 7442 - DNA, 25 bp, Artificial sequence  Extension Primer
  Primer
taaagacagctaatcatgatattat

SEQ ID NO: 7443 - DNA, 25 bp, Artificial sequence  Extension Primer
  Primer
acctttgccagctggtttccaatgg

SEQ ID NO: 7444 - DNA, 25 bp, Artificial sequence  Extension Primer
  Primer
aaggcccttctccaatcccggtgta

SEQ ID NO: 7445 - DNA, 25 bp, Artificial sequence  Extension Primer
  Primer
actgcctgaaaaaaagacagcaaat

SEQ ID NO: 7446 - DNA, 25 bp, Artificial sequence  Extension Primer
  Primer
tccaggaatgacttttactacatgg

SEQ ID NO: 7447 - DNA, 25 bp, Artificial sequence  Extension Primer
  Primer
caccctgacatgttcataaataact

SEQ ID NO: 7448 - DNA, 25 bp, Artificial sequence  Extension Primer
  Primer
gactgctgggtgctggccagagggg

SEQ ID NO: 7449 - DNA, 22 bp, Artificial sequence  Extension Primer
  Primer
aaacyggtgattttactctttc

SEQ ID NO: 7450 - DNA, 25 bp, Artificial sequence  Extension Primer
  Primer
taagtaaccatgtgatcatagatga

SEQ ID NO: 7451 - DNA, 25 bp, Artificial sequence  Extension Primer
  Primer
caaaaagaaaaaagtcaaggaatca

SEQ ID NO: 7452 - DNA, 25 bp, Artificial sequence  Extension Primer
  Primer
atttcatcaattgttatacaataac

SEQ ID NO: 7453 - DNA, 25 bp, Artificial sequence  Extension Primer
  Primer
ctgtctagctcactgtggaattcac

SEQ ID NO: 7454 - DNA, 25 bp, Artificial sequence  Extension Primer
  Primer
cactgctgaagacactgagggccaa

SEQ ID NO: 7455 - DNA, 25 bp, Artificial sequence  Extension Primer
  Primer
tgctgattggctggcattgtaaatg

SEQ ID NO: 7456 - DNA, 25 bp, Artificial sequence  Extension Primer
  Primer
cactacyaatgttatcattatcctt

SEQ ID NO: 7457 - DNA, 25 bp, Artificial sequence  Extension Primer
  Primer
attaattttctgagcatttgggtgg

SEQ ID NO: 7458 - DNA, 25 bp, Artificial sequence  Extension Primer
  Primer
ctggagagaaatgatgcatgcacac

SEQ ID NO: 7459 - DNA, 25 bp, Artificial sequence  Extension Primer
  Primer
tcacacctgataaaaattagcaatg

SEQ ID NO: 7460 - DNA, 25 bp, Artificial sequence  Extension Primer
  Primer
gactaatgaaaatattcatcaagat

SEQ ID NO: 7461 - DNA, 25 bp, Artificial sequence  Extension Primer
  Primer
attgacagagacactttaaaagagc

SEQ ID NO: 7462 - DNA, 25 bp, Artificial sequence  Extension Primer
  Primer
cctgtgcccaagaaactctttacaa

SEQ ID NO: 7463 - DNA, 25 bp, Artificial sequence  Extension Primer
  Primer
attcatttatattcacatcaatcag

SEQ ID NO: 7464 - DNA, 25 bp, Artificial sequence  Extension Primer
  Primer
cttttaatcattattcagattcagg

SEQ ID NO: 7465 - DNA, 25 bp, Artificial sequence  Extension Primer
  Primer
attaacttgcaattaaaatagctta

SEQ ID NO: 7466 - DNA, 25 bp, Artificial sequence  Extension Primer
  Primer
gcttgtcaagagtccaacctatgaa

SEQ ID NO: 7467 - DNA, 25 bp, Artificial sequence  Extension Primer
  Primer
atgagccagttgatatgtcattctt

SEQ ID NO: 7468 - DNA, 25 bp, Artificial sequence  Extension Primer
  Primer
atatgttattttaaatggtgacaca

SEQ ID NO: 7469 - DNA, 25 bp, Artificial sequence  Extension Primer
  Primer
tctgtgtttttcttggccattctac

SEQ ID NO: 7470 - DNA, 25 bp, Artificial sequence  Extension Primer
  Primer
accggagccctttgttagcgagaac

SEQ ID NO: 7471 - DNA, 25 bp, Artificial sequence  Extension Primer
  Primer
ggagagtcttttgattagtaaaatc

SEQ ID NO: 7472 - DNA, 25 bp, Artificial sequence  Extension Primer
  Primer
agctgtggtataggaagaagtgaac

SEQ ID NO: 7473 - DNA, 25 bp, Artificial sequence  Extension Primer
  Primer
cccttcccttttaaacaccataaac

SEQ ID NO: 7474 - DNA, 25 bp, Artificial sequence  Extension Primer
  Primer
tacaaaggcctctcttctgaagaca

SEQ ID NO: 7475 - DNA, 25 bp, Artificial sequence  Extension Primer
  Primer
ttgtgcggtgtatgtctgtgctgag

SEQ ID NO: 7476 - DNA, 25 bp, Artificial sequence  Extension Primer
  Primer
tccatctctgtgcgaccccatagac

SEQ ID NO: 7477 - DNA, 25 bp, Artificial sequence  Extension Primer
  Primer
tgatgagcctttgccctcaccatcc

SEQ ID NO: 7478 - DNA, 22 bp, Artificial sequence  Extension Primer
  Primer
tccaggctttgagctcctgggg

SEQ ID NO: 7479 - DNA, 25 bp, Artificial sequence  Extension Primer
  Primer
aagacattttctaaatacaaaagca

SEQ ID NO: 7480 - DNA, 25 bp, Artificial sequence  Extension Primer
  Primer
ttggagaaactctaccagaggcttc

SEQ ID NO: 7481 - DNA, 25 bp, Artificial sequence  Extension Primer
  Primer
atagcccccttttcctcaaaccaag

SEQ ID NO: 7482 - DNA, 25 bp, Artificial sequence  Extension Primer
  Primer
cttacagctgcacagggacagtgtc

SEQ ID NO: 7483 - DNA, 25 bp, Artificial sequence  Extension Primer
  Primer
gcccttgaaacgtaggttcagattc

SEQ ID NO: 7484 - DNA, 25 bp, Artificial sequence  Extension Primer
  Primer
ttatctgcratatttaatccaaatt

SEQ ID NO: 7485 - DNA, 25 bp, Artificial sequence  Extension Primer
  Primer
cagggagcattctatgcttcattgt

SEQ ID NO: 7486 - DNA, 25 bp, Artificial sequence  Extension Primer
  Primer
ggtgttttgcttatttctgaatctc

SEQ ID NO: 7487 - DNA, 25 bp, Artificial sequence  Extension Primer
  Primer
agaatcagttaggtgctgtttgtca

SEQ ID NO: 7488 - DNA, 25 bp, Artificial sequence  Extension Primer
  Primer
attggagaagccctctggtgttaat

SEQ ID NO: 7489 - DNA, 25 bp, Artificial sequence  Extension Primer
  Primer
attttgtgtattttgaggagtttta

SEQ ID NO: 7490 - DNA, 25 bp, Artificial sequence  Extension Primer
  Primer
tttgcaaagtgcttttaaaatttac

SEQ ID NO: 7491 - DNA, 25 bp, Artificial sequence  Extension Primer
  Primer
tagttcacaaaatacttctttctag

SEQ ID NO: 7492 - DNA, 25 bp, Artificial sequence  Extension Primer
  Primer
ttttttttgttgttgttgctttgcc

SEQ ID NO: 7493 - DNA, 25 bp, Artificial sequence  Extension Primer
  Primer
cttgccaaccaggagccatccctat

SEQ ID NO: 7494 - DNA, 25 bp, Artificial sequence  Extension Primer
  Primer
ccccgggttacccccaatgcaagca

SEQ ID NO: 7495 - DNA, 25 bp, Artificial sequence  Extension Primer
  Primer
cagatggtttgtgtgtgtggagtgc

SEQ ID NO: 7496 - DNA, 25 bp, Artificial sequence  Extension Primer
  Primer
agatactctgacgataaatggtgct

SEQ ID NO: 7497 - DNA, 25 bp, Artificial sequence  Extension Primer
  Primer
aacatataaacagtatcagccaaca

SEQ ID NO: 7498 - DNA, 25 bp, Artificial sequence  Extension Primer
  Primer
aattattctaccttaaatcttctat

SEQ ID NO: 7499 - DNA, 25 bp, Artificial sequence  Extension Primer
  Primer
ttaaagtttgttttccgttttgttt

SEQ ID NO: 7500 - DNA, 25 bp, Artificial sequence  Extension Primer
  Primer
gtgagattgatgggatgacacagca

SEQ ID NO: 7501 - DNA, 25 bp, Artificial sequence  Extension Primer
  Primer
atgttagttcctgttatacaacyta

SEQ ID NO: 7502 - DNA, 25 bp, Artificial sequence  Extension Primer
  Primer
aaaacaacaatagaaacgttctcaa

SEQ ID NO: 7503 - DNA, 25 bp, Artificial sequence  Extension Primer
  Primer
cagtgttgcagtttcatcacatcta

SEQ ID NO: 7504 - DNA, 25 bp, Artificial sequence  Extension Primer
  Primer
tttatcacagaatgaatttttgaag

SEQ ID NO: 7505 - DNA, 25 bp, Artificial sequence  Extension Primer
  Primer
cagcaacactgaattttccctcctg

SEQ ID NO: 7506 - DNA, 25 bp, Artificial sequence  Extension Primer
  Primer
tcccctacccatcttcaacctactc

SEQ ID NO: 7507 - DNA, 25 bp, Artificial sequence  Extension Primer
  Primer
gcaaacagggccatttttaatggac

SEQ ID NO: 7508 - DNA, 25 bp, Artificial sequence  Extension Primer
  Primer
acaactgagcagctgaactgatgtt

SEQ ID NO: 7509 - DNA, 25 bp, Artificial sequence  Extension Primer
  Primer
aaaaaaaaaaaaaaaaaagagggag

SEQ ID NO: 7510 - DNA, 25 bp, Artificial sequence  Extension Primer
  Primer
cacacacagcattcctgctgtcatc

SEQ ID NO: 7511 - DNA, 25 bp, Artificial sequence  Extension Primer
  Primer
tactttggtagtatgtggtttctag

SEQ ID NO: 7512 - DNA, 25 bp, Artificial sequence  Extension Primer
  Primer
aaatttttaattatagttgcctttg

SEQ ID NO: 7513 - DNA, 25 bp, Artificial sequence  Extension Primer
  Primer
ctacttaaaccattcagaatcctct

SEQ ID NO: 7514 - DNA, 25 bp, Artificial sequence  Extension Primer
  Primer
tgcaaattcattcatgaacttgatc

SEQ ID NO: 7515 - DNA, 25 bp, Artificial sequence  Extension Primer
  Primer
gctagtctctgagatattccatgaa

SEQ ID NO: 7516 - DNA, 25 bp, Artificial sequence  Extension Primer
  Primer
aaaaagatcttatggcccccgcaag

SEQ ID NO: 7517 - DNA, 25 bp, Artificial sequence  Extension Primer
  Primer
ttttgcttcatttatattctccttt

SEQ ID NO: 7518 - DNA, 25 bp, Artificial sequence  Extension Primer
  Primer
ggttttgtttttcgctaagaggata

SEQ ID NO: 7519 - DNA, 25 bp, Artificial sequence  Extension Primer
  Primer
atcaaatatacattgttttatttct

SEQ ID NO: 7520 - DNA, 25 bp, Artificial sequence  Extension Primer
  Primer
ccctagtgcccttccctagatatta

SEQ ID NO: 7521 - DNA, 25 bp, Artificial sequence  Extension Primer
  Primer
ttaaggaggagggaaagcgagctgg

SEQ ID NO: 7522 - DNA, 25 bp, Artificial sequence  Extension Primer
  Primer
tactccaattacaagttaaggaaaa

SEQ ID NO: 7523 - DNA, 25 bp, Artificial sequence  Extension Primer
  Primer
ctttactagccacaggaaaagctcc

SEQ ID NO: 7524 - DNA, 25 bp, Artificial sequence  Extension Primer
  Primer
ggagaatcatgttttgctcctgagt

SEQ ID NO: 7525 - DNA, 25 bp, Artificial sequence  Extension Primer
  Primer
tcagaagggaagcgacacttcaaat

SEQ ID NO: 7526 - DNA, 25 bp, Artificial sequence  Extension Primer
  Primer
cagttctctgaaagggtcagtaaaa

SEQ ID NO: 7527 - DNA, 25 bp, Artificial sequence  Extension Primer
  Primer
ggttttaggatatatagaaagaaga

SEQ ID NO: 7528 - DNA, 25 bp, Artificial sequence  Extension Primer
  Primer
gtttttcaaggctcaggagtgatta

SEQ ID NO: 7529 - DNA, 25 bp, Artificial sequence  Extension Primer
  Primer
tactgttttctgatggacaggctct

SEQ ID NO: 7530 - DNA, 25 bp, Artificial sequence  Extension Primer
  Primer
tattagatcttggggtggagggaac

SEQ ID NO: 7531 - DNA, 25 bp, Artificial sequence  Extension Primer
  Primer
ggctgatgctctgtgtgggtctttg

SEQ ID NO: 7532 - DNA, 25 bp, Artificial sequence  Extension Primer
  Primer
accgaatgtccgtcattactttact

SEQ ID NO: 7533 - DNA, 25 bp, Artificial sequence  Extension Primer
  Primer
cacagtttttgaaaaacataggaaa

SEQ ID NO: 7534 - DNA, 25 bp, Artificial sequence  Extension Primer
  Primer
gaatttccgaacagtcattatctgc

SEQ ID NO: 7535 - DNA, 25 bp, Artificial sequence  Extension Primer
  Primer
tgaacttgcatctttgttttgttcc

SEQ ID NO: 7536 - DNA, 25 bp, Artificial sequence  Extension Primer
  Primer
agctactcctcagtggcagaaaaac

SEQ ID NO: 7537 - DNA, 25 bp, Artificial sequence  Extension Primer
  Primer
atatgctgacacagatgctaaatga

SEQ ID NO: 7538 - DNA, 25 bp, Artificial sequence  Extension Primer
  Primer
gtttattctatatgatactgtagtt

SEQ ID NO: 7539 - DNA, 25 bp, Artificial sequence  Extension Primer
  Primer
cgctgttgccatggcacccacctgg

SEQ ID NO: 7540 - DNA, 25 bp, Artificial sequence  Extension Primer
  Primer
aggagaaaagcggcccaaatagagt

SEQ ID NO: 7541 - DNA, 25 bp, Artificial sequence  Extension Primer
  Primer
gaggtgtttgacaggcagatgaacc

SEQ ID NO: 7542 - DNA, 25 bp, Artificial sequence  Extension Primer
  Primer
gcgcttgaaggccttgccgcactcg

SEQ ID NO: 7543 - DNA, 25 bp, Artificial sequence  Extension Primer
  Primer
ctgaactaccagaacacggctttag

SEQ ID NO: 7544 - DNA, 25 bp, Artificial sequence  Extension Primer
  Primer
ccacatcgcacgagccagtgcagga

SEQ ID NO: 7545 - DNA, 25 bp, Artificial sequence  Extension Primer
  Primer
tcagattaagtaccagttcctcaga

SEQ ID NO: 7546 - DNA, 25 bp, Artificial sequence  Extension Primer
  Primer
ttgaaataaaattcatggcagtata

SEQ ID NO: 7547 - DNA, 25 bp, Artificial sequence  Extension Primer
  Primer
ctgtgaaagactacctctgttgttt

SEQ ID NO: 7548 - DNA, 25 bp, Artificial sequence  Extension Primer
  Primer
tttttaactacttaagagaatcttg

SEQ ID NO: 7549 - DNA, 25 bp, Artificial sequence  Extension Primer
  Primer
tatttacctaagtggagccttttgt

SEQ ID NO: 7550 - DNA, 25 bp, Artificial sequence  Extension Primer
  Primer
tatttgtatactgaatattagttac

SEQ ID NO: 7551 - DNA, 25 bp, Artificial sequence  Extension Primer
  Primer
attaaaaacatgaaaataaaaatag

SEQ ID NO: 7552 - DNA, 25 bp, Artificial sequence  Extension Primer
  Primer
gtgaaggagctctgagaacccctct

SEQ ID NO: 7553 - DNA, 25 bp, Artificial sequence  Extension Primer
  Primer
ccatccctcctccaaccctctcccc

SEQ ID NO: 7554 - DNA, 25 bp, Artificial sequence  Extension Primer
  Primer
gagtctaaacgatttgtttggattt

SEQ ID NO: 7555 - DNA, 25 bp, Artificial sequence  Extension Primer
  Primer
caggccgggtttccaattcattttt

SEQ ID NO: 7556 - DNA, 25 bp, Artificial sequence  Extension Primer
  Primer
taaaccaactgtgtacaggcaagtc

SEQ ID NO: 7557 - DNA, 22 bp, Artificial sequence  Extension Primer
  Primer
tcttgataataatatgcataag

SEQ ID NO: 7558 - DNA, 25 bp, Artificial sequence  Extension Primer
  Primer
agtttcatctagcagaggagaaaga

SEQ ID NO: 7559 - DNA, 25 bp, Artificial sequence  Extension Primer
  Primer
aaggcctaggcggctaggtgggagc

SEQ ID NO: 7560 - DNA, 25 bp, Artificial sequence  Extension Primer
  Primer
gatgttaacaagtaagcagtttggt

SEQ ID NO: 7561 - DNA, 25 bp, Artificial sequence  Extension Primer
  Primer
atcctgtagaaagtatttttcgatt

SEQ ID NO: 7562 - DNA, 25 bp, Artificial sequence  Extension Primer
  Primer
cttgtctattaacacttgcagaatt

SEQ ID NO: 7563 - DNA, 25 bp, Artificial sequence  Extension Primer
  Primer
tcaaccaactattgtccaatataaa

SEQ ID NO: 7564 - DNA, 25 bp, Artificial sequence  Extension Primer
  Primer
tattccagttcagccccactcacat

SEQ ID NO: 7565 - DNA, 25 bp, Artificial sequence  Extension Primer
  Primer
aactaccagaacacggctttagytc

SEQ ID NO: 7566 - DNA, 25 bp, Artificial sequence  Extension Primer
  Primer
tctgcagataatcatgagccaaaat

SEQ ID NO: 7567 - DNA, 25 bp, Artificial sequence  Extension Primer
  Primer
actctgttatgcccaaatgttacat

SEQ ID NO: 7568 - DNA, 25 bp, Artificial sequence  Extension Primer
  Primer
gatccttctctcctgactttggtga

SEQ ID NO: 7569 - DNA, 25 bp, Artificial sequence  Extension Primer
  Primer
ctggttatctattttacatatggta

SEQ ID NO: 7570 - DNA, 25 bp, Artificial sequence  Extension Primer
  Primer
caaagaaaccagcctgggaaatgaa

SEQ ID NO: 7571 - DNA, 25 bp, Artificial sequence  Extension Primer
  Primer
ctatggtgcaacagcaaaatgagca

SEQ ID NO: 7572 - DNA, 25 bp, Artificial sequence  Extension Primer
  Primer
gtttaaaggaagacaagaccaagag

SEQ ID NO: 7573 - DNA, 25 bp, Artificial sequence  Extension Primer
  Primer
tcacacattggacatttacaaaatg

SEQ ID NO: 7574 - DNA, 25 bp, Artificial sequence  Extension Primer
  Primer
tccagtcctctactaskgcctccca

SEQ ID NO: 7575 - DNA, 25 bp, Artificial sequence  Extension Primer
  Primer
gaaaaggatattcttgttctccata

SEQ ID NO: 7576 - DNA, 25 bp, Artificial sequence  Extension Primer
  Primer
tatttctcattcattcattcagcac

SEQ ID NO: 7577 - DNA, 22 bp, Artificial sequence  Extension Primer
  Primer
cattaaaaataattatatgtca

SEQ ID NO: 7578 - DNA, 25 bp, Artificial sequence  Extension Primer
  Primer
gatttggtgttataactattattag

SEQ ID NO: 7579 - DNA, 25 bp, Artificial sequence  Extension Primer
  Primer
gcctcacgtcttcaggttaactctt

SEQ ID NO: 7580 - DNA, 25 bp, Artificial sequence  Extension Primer
  Primer
ttaaattgttctatgaagagaaaat

SEQ ID NO: 7581 - DNA, 25 bp, Artificial sequence  Extension Primer
  Primer
gagttaagcaaatcagcatgggcat

SEQ ID NO: 7582 - DNA, 25 bp, Artificial sequence  Extension Primer
  Primer
gcctgaaataaaggtagttggttga

SEQ ID NO: 7583 - DNA, 25 bp, Artificial sequence  Extension Primer
  Primer
agacacaatctcaggaagatgaaga

SEQ ID NO: 7584 - DNA, 25 bp, Artificial sequence  Extension Primer
  Primer
tctaatgactcaactgcttaaattc

SEQ ID NO: 7585 - DNA, 25 bp, Artificial sequence  Extension Primer
  Primer
cacttgctccttcttggtcttactc

SEQ ID NO: 7586 - DNA, 25 bp, Artificial sequence  Extension Primer
  Primer
tgtttataattatagagacaagaaa

SEQ ID NO: 7587 - DNA, 25 bp, Artificial sequence  Extension Primer
  Primer
gaagaatcctgaaaataatcacaca

SEQ ID NO: 7588 - DNA, 22 bp, Artificial sequence  Extension Primer
  Primer
gttgtatgagtgacaggttcaa

SEQ ID NO: 7589 - DNA, 22 bp, Artificial sequence  Extension Primer
  Primer
gggagggmacaggcactgtctc

SEQ ID NO: 7590 - DNA, 25 bp, Artificial sequence  Extension Primer
  Primer
aaaattgcataatgttctatataac

SEQ ID NO: 7591 - DNA, 25 bp, Artificial sequence  Extension Primer
  Primer
cactgttttggaaaaaatgactaca

SEQ ID NO: 7592 - DNA, 25 bp, Artificial sequence  Extension Primer
  Primer
gactggcaaaaagtgtggattaaaa

SEQ ID NO: 7593 - DNA, 25 bp, Artificial sequence  Extension Primer
  Primer
aggaaagcaactgctactggaagag

SEQ ID NO: 7594 - DNA, 25 bp, Artificial sequence  Extension Primer
  Primer
aacacacaagggatgacttgagtgc

SEQ ID NO: 7595 - DNA, 25 bp, Artificial sequence  Extension Primer
  Primer
ctcatttatgcatcatttaaaataa

SEQ ID NO: 7596 - DNA, 25 bp, Artificial sequence  Extension Primer
  Primer
aaatacagattatttcaaaaaggtc

SEQ ID NO: 7597 - DNA, 25 bp, Artificial sequence  Extension Primer
  Primer
caatactgaaaatactgagtgtgag

SEQ ID NO: 7598 - DNA, 25 bp, Artificial sequence  Extension Primer
  Primer
mactgagagtcyggattccctaaag

SEQ ID NO: 7599 - DNA, 25 bp, Artificial sequence  Extension Primer
  Primer
ttttatttagacagaaggatgacag

SEQ ID NO: 7600 - DNA, 25 bp, Artificial sequence  Extension Primer
  Primer
aagtaaccggagaggtttgtttaga

SEQ ID NO: 7601 - DNA, 25 bp, Artificial sequence  Extension Primer
  Primer
gtatactgaaagtgtctggacagtt

SEQ ID NO: 7602 - DNA, 25 bp, Artificial sequence  Extension Primer
  Primer
cacatgcaagtatatacagaagctt

SEQ ID NO: 7603 - DNA, 25 bp, Artificial sequence  Extension Primer
  Primer
catgtgaagcactccacatattttg

SEQ ID NO: 7604 - DNA, 25 bp, Artificial sequence  Extension Primer
  Primer
aatttagttaaccatggtggaataa

SEQ ID NO: 7605 - DNA, 25 bp, Artificial sequence  Extension Primer
  Primer
ccataaatgcatgcaaagtagagca

SEQ ID NO: 7606 - DNA, 25 bp, Artificial sequence  Extension Primer
  Primer
atctcacaaaaatactgaggtactc

SEQ ID NO: 7607 - DNA, 22 bp, Artificial sequence  Extension Primer
  Primer
gccatccctatyatatgactcc

SEQ ID NO: 7608 - DNA, 25 bp, Artificial sequence  Extension Primer
  Primer
ttgcttatttctgaatctcyggctc

SEQ ID NO: 7609 - DNA, 25 bp, Artificial sequence  Extension Primer
  Primer
gtacagttggcatctggctttgttc

SEQ ID NO: 7610 - DNA, 25 bp, Artificial sequence  Extension Primer
  Primer
agagatgaaggtgcccgcccgcaga

SEQ ID NO: 7611 - DNA, 25 bp, Artificial sequence  Extension Primer
  Primer
ttataatgtcagagtgtccttggga

SEQ ID NO: 7612 - DNA, 25 bp, Artificial sequence  Extension Primer
  Primer
tcctgcagaaagcaccacygaaggc

SEQ ID NO: 7613 - DNA, 25 bp, Artificial sequence  Extension Primer
  Primer
tcctaaccactggactgacagggaa

SEQ ID NO: 7614 - DNA, 25 bp, Artificial sequence  Extension Primer
  Primer
aaagtatttttcgattygacccatt

SEQ ID NO: 7615 - DNA, 25 bp, Artificial sequence  Extension Primer
  Primer
ccaaagggtgggaggagtcattgta

SEQ ID NO: 7616 - DNA, 25 bp, Artificial sequence  Extension Primer
  Primer
ccacacagaaaagcgatgaaagaag

SEQ ID NO: 7617 - DNA, 25 bp, Artificial sequence  Extension Primer
  Primer
ttttagcttcctttctgtagtctta

SEQ ID NO: 7618 - DNA, 25 bp, Artificial sequence  Extension Primer
  Primer
gaatccagagaatgagaaaaagtga

SEQ ID NO: 7619 - DNA, 25 bp, Artificial sequence  Extension Primer
  Primer
aggaaaactaccaccagacagagga

SEQ ID NO: 7620 - DNA, 25 bp, Artificial sequence  Extension Primer
  Primer
catctggaaagtgggattatggtag

SEQ ID NO: 7621 - DNA, 25 bp, Artificial sequence  Extension Primer
  Primer
aagaaagagagaatcaagcctaaag

SEQ ID NO: 7622 - DNA, 25 bp, Artificial sequence  Extension Primer
  Primer
aacaaaaaaaacattcttacttttc

SEQ ID NO: 7623 - DNA, 25 bp, Artificial sequence  Extension Primer
  Primer
gaacaatattttgttttattttcaa

SEQ ID NO: 7624 - DNA, 25 bp, Artificial sequence  Extension Primer
  Primer
cagtggaggaaragttaagcatcat

SEQ ID NO: 7625 - DNA, 25 bp, Artificial sequence  Extension Primer
  Primer
acggaatatagcccaccaggctcct

SEQ ID NO: 7626 - DNA, 25 bp, Artificial sequence  Extension Primer
  Primer
agatacacaaacatagagaacaaat

SEQ ID NO: 7627 - DNA, 25 bp, Artificial sequence  Extension Primer
  Primer
cgacaggcaggggcaagtgtgggct

SEQ ID NO: 7628 - DNA, 25 bp, Artificial sequence  Extension Primer
  Primer
gcttaataaaatacatttttaagtt

SEQ ID NO: 7629 - DNA, 25 bp, Artificial sequence  Extension Primer
  Primer
accaaagacagaaytggtgacctcc

SEQ ID NO: 7630 - DNA, 25 bp, Artificial sequence  Extension Primer
  Primer
gtcagagcttttgcactcacacata

SEQ ID NO: 7631 - DNA, 25 bp, Artificial sequence  Extension Primer
  Primer
gtcctcatttggaatctgaaaggcc

SEQ ID NO: 7632 - DNA, 25 bp, Artificial sequence  Extension Primer
  Primer
ctctttgtgaccccatggactgtaa

SEQ ID NO: 7633 - DNA, 25 bp, Artificial sequence  Extension Primer
  Primer
aagtgatagtctctttttctgtcaa

SEQ ID NO: 7634 - DNA, 25 bp, Artificial sequence  Extension Primer
  Primer
aaggcaaaaaagtaaagtgacatgt

SEQ ID NO: 7635 - DNA, 25 bp, Artificial sequence  Extension Primer
  Primer
aggaaagtggtcatcccttagactg

SEQ ID NO: 7636 - DNA, 25 bp, Artificial sequence  Extension Primer
  Primer
caagaatttaatacataagcataac

SEQ ID NO: 7637 - DNA, 25 bp, Artificial sequence  Extension Primer
  Primer
aaaaataaatagttgagaaaactta

SEQ ID NO: 7638 - DNA, 25 bp, Artificial sequence  Extension Primer
  Primer
tagttttgtctgtcttccagaattg

SEQ ID NO: 7639 - DNA, 25 bp, Artificial sequence  Extension Primer
  Primer
tcctctgttctattttttctccttt

SEQ ID NO: 7640 - DNA, 25 bp, Artificial sequence  Extension Primer
  Primer
ggtagcactgtctatgttgtttatc

SEQ ID NO: 7641 - DNA, 25 bp, Artificial sequence  Extension Primer
  Primer
tttaccactggcaccattatattct

SEQ ID NO: 7642 - DNA, 25 bp, Artificial sequence  Extension Primer
  Primer
caggcagcagaagggggtgggaggc

SEQ ID NO: 7643 - DNA, 25 bp, Artificial sequence  Extension Primer
  Primer
tmattgcaaatacattgtgaatttc

SEQ ID NO: 7644 - DNA, 25 bp, Artificial sequence  Extension Primer
  Primer
tgagatataattgacatatagcatt

SEQ ID NO: 7645 - DNA, 25 bp, Artificial sequence  Extension Primer
  Primer
ggggtctttgttccctacttatcag

SEQ ID NO: 7646 - DNA, 25 bp, Artificial sequence  Extension Primer
  Primer
aactgttctattgggtctcacaact

SEQ ID NO: 7647 - DNA, 25 bp, Artificial sequence  Extension Primer
  Primer
taaatatttctttgctttacatctg

SEQ ID NO: 7648 - DNA, 25 bp, Artificial sequence  Extension Primer
  Primer
tcatttcagtttaacctgagaaagc

SEQ ID NO: 7649 - DNA, 25 bp, Artificial sequence  Extension Primer
  Primer
ggttctcacgctgtctagctcagaa

SEQ ID NO: 7650 - DNA, 25 bp, Artificial sequence  Extension Primer
  Primer
ctcctcttacgaaaaataaatgcta

SEQ ID NO: 7651 - DNA, 25 bp, Artificial sequence  Extension Primer
  Primer
acttcctctctccccaaaggaatcc

SEQ ID NO: 7652 - DNA, 25 bp, Artificial sequence  Extension Primer
  Primer
cagatttgttaggagaaagggagag

SEQ ID NO: 7653 - DNA, 25 bp, Artificial sequence  Extension Primer
  Primer
tgctggtagatgttactggtatcac

SEQ ID NO: 7654 - DNA, 25 bp, Artificial sequence  Extension Primer
  Primer
ttgaggtaatggggcatttgcaagt

SEQ ID NO: 7655 - DNA, 25 bp, Artificial sequence  Extension Primer
  Primer
actcactcagcaaaaagcaagcact

SEQ ID NO: 7656 - DNA, 25 bp, Artificial sequence  Extension Primer
  Primer
ctgacataagtcccttctggggtcc

SEQ ID NO: 7657 - DNA, 25 bp, Artificial sequence  Extension Primer
  Primer
cttacttcagacatgtaaactccca

SEQ ID NO: 7658 - DNA, 25 bp, Artificial sequence  Extension Primer
  Primer
ggaggcagcgctgagctcctgaggg

SEQ ID NO: 7659 - DNA, 25 bp, Artificial sequence  Extension Primer
  Primer
atcatcctctcatagctcgtgtcca

SEQ ID NO: 7660 - DNA, 25 bp, Artificial sequence  Extension Primer
  Primer
tactgcggaccaggcgtgcctgtyc

SEQ ID NO: 7661 - DNA, 22 bp, Artificial sequence  Extension Primer
  Primer
gataccatttcytctaaaatcc

SEQ ID NO: 7662 - DNA, 25 bp, Artificial sequence  Extension Primer
  Primer
tgaggcaaatgaaacattcaaatca

SEQ ID NO: 7663 - DNA, 25 bp, Artificial sequence  Extension Primer
  Primer
atggacacaaattttacattttatt

SEQ ID NO: 7664 - DNA, 22 bp, Artificial sequence  Extension Primer
  Primer
atagccccaaatacattgcctt

SEQ ID NO: 7665 - DNA, 25 bp, Artificial sequence  Extension Primer
  Primer
ccagctcagtctgactcaatgaaat

SEQ ID NO: 7666 - DNA, 25 bp, Artificial sequence  Extension Primer
  Primer
cagtgaaacagaatgggaaggggac

SEQ ID NO: 7667 - DNA, 25 bp, Artificial sequence  Extension Primer
  Primer
aaatggtaaaagttctagatttcag

SEQ ID NO: 7668 - DNA, 25 bp, Artificial sequence  Extension Primer
  Primer
atagcagagaactcggtattgggcc

SEQ ID NO: 7669 - DNA, 25 bp, Artificial sequence  Extension Primer
  Primer
aaagaacattccaagtaactaattt

SEQ ID NO: 7670 - DNA, 25 bp, Artificial sequence  Extension Primer
  Primer
tgtaatactaatccagtagatggtt

SEQ ID NO: 7671 - DNA, 25 bp, Artificial sequence  Extension Primer
  Primer
aaaattttgctgttagtataagtac

SEQ ID NO: 7672 - DNA, 25 bp, Artificial sequence  Extension Primer
  Primer
caagagagtacagtctttggagtca

SEQ ID NO: 7673 - DNA, 25 bp, Artificial sequence  Extension Primer
  Primer
aaactgctttaggaaaacaaatagt

SEQ ID NO: 7674 - DNA, 25 bp, Artificial sequence  Extension Primer
  Primer
gccagtttgcaagggcacaagatta

SEQ ID NO: 7675 - DNA, 25 bp, Artificial sequence  Extension Primer
  Primer
ctggtttaagacttcagcatgtcac

SEQ ID NO: 7676 - DNA, 25 bp, Artificial sequence  Extension Primer
  Primer
tgctctctcctctcaatctacgtca

SEQ ID NO: 7677 - DNA, 25 bp, Artificial sequence  Extension Primer
  Primer
caggagaagaatgaactcccagaaa

SEQ ID NO: 7678 - DNA, 25 bp, Artificial sequence  Extension Primer
  Primer
catttctacctctgttgcaatcact

SEQ ID NO: 7679 - DNA, 25 bp, Artificial sequence  Extension Primer
  Primer
aatgagagaacccagggatggagtc

SEQ ID NO: 7680 - DNA, 25 bp, Artificial sequence  Extension Primer
  Primer
ttcctagattactctgagaaattgc

SEQ ID NO: 7681 - DNA, 25 bp, Artificial sequence  Extension Primer
  Primer
taacatatacttaacgtaaaactta

SEQ ID NO: 7682 - DNA, 25 bp, Artificial sequence  Extension Primer
  Primer
gactgttattcagtgaaatgcytaa

SEQ ID NO: 7683 - DNA, 25 bp, Artificial sequence  Extension Primer
  Primer
ttccacctgatacattatttaattc

SEQ ID NO: 7684 - DNA, 25 bp, Artificial sequence  Extension Primer
  Primer
ttaacctggctatatttcaagtgtt

SEQ ID NO: 7685 - DNA, 25 bp, Artificial sequence  Extension Primer
  Primer
ctacggttattacctggaaggcgtc

SEQ ID NO: 7686 - DNA, 25 bp, Artificial sequence  Extension Primer
  Primer
ttttcttttctaagaaacccttcaa

SEQ ID NO: 7687 - DNA, 25 bp, Artificial sequence  Extension Primer
  Primer
attccactgctttctagtttgagtt

SEQ ID NO: 7688 - DNA, 25 bp, Artificial sequence  Extension Primer
  Primer
tcataaactaagcacatatgtctta

SEQ ID NO: 7689 - DNA, 25 bp, Artificial sequence  Extension Primer
  Primer
gcatgccggggcagcgtggggagag

SEQ ID NO: 7690 - DNA, 25 bp, Artificial sequence  Extension Primer
  Primer
gaggtataatgtaatagttggtgaa

SEQ ID NO: 7691 - DNA, 25 bp, Artificial sequence  Extension Primer
  Primer
cttaccataacagaccaccacgccg

SEQ ID NO: 7692 - DNA, 22 bp, Artificial sequence  Extension Primer
  Primer
gtggtctgtgagaggccttctg

SEQ ID NO: 7693 - DNA, 25 bp, Artificial sequence  Extension Primer
  Primer
aaacaaatttagaggtattgttagc

SEQ ID NO: 7694 - DNA, 25 bp, Artificial sequence  Extension Primer
  Primer
aggtagagaggacaatttcagtgtg

SEQ ID NO: 7695 - DNA, 25 bp, Artificial sequence  Extension Primer
  Primer
tgcccagccttaccctaagaaaaag

SEQ ID NO: 7696 - DNA, 25 bp, Artificial sequence  Extension Primer
  Primer
gggtttagactcagaagcctctaag

SEQ ID NO: 7697 - DNA, 25 bp, Artificial sequence  Extension Primer
  Primer
agtaaagacaatgatcagaatttca

SEQ ID NO: 7698 - DNA, 25 bp, Artificial sequence  Extension Primer
  Primer
cttgattatacactcacttgtaaga

SEQ ID NO: 7699 - DNA, 25 bp, Artificial sequence  Extension Primer
  Primer
ctagcgtattgtgtcatctcaaata

SEQ ID NO: 7700 - DNA, 25 bp, Artificial sequence  Extension Primer
  Primer
ccatgtgaatcagccrcccagaaac

SEQ ID NO: 7701 - DNA, 25 bp, Artificial sequence  Extension Primer
  Primer
aatctcaactgacatccttttgaaa

SEQ ID NO: 7702 - DNA, 25 bp, Artificial sequence  Extension Primer
  Primer
gcttggatgttttgaacatctggat

SEQ ID NO: 7703 - DNA, 25 bp, Artificial sequence  Extension Primer
  Primer
aagtcaaatcaaaataatgttcgcc

SEQ ID NO: 7704 - DNA, 25 bp, Artificial sequence  Extension Primer
  Primer
taattcctaactgattttgaaattg

SEQ ID NO: 7705 - DNA, 25 bp, Artificial sequence  Extension Primer
  Primer
cctggtctgcctccttggaactgct

SEQ ID NO: 7706 - DNA, 25 bp, Artificial sequence  Extension Primer
  Primer
tgaatggttccagtatttctgaccc

SEQ ID NO: 7707 - DNA, 25 bp, Artificial sequence  Extension Primer
  Primer
cttggtgctggtattgtaaattggt

SEQ ID NO: 7708 - DNA, 25 bp, Artificial sequence  Extension Primer
  Primer
cagcaccacrgcactcattatgtac

SEQ ID NO: 7709 - DNA, 25 bp, Artificial sequence  Extension Primer
  Primer
tctacaatccatatggcaaagtgct

SEQ ID NO: 7710 - DNA, 25 bp, Artificial sequence  Extension Primer
  Primer
acgttgttacccacattaatttcca

SEQ ID NO: 7711 - DNA, 25 bp, Artificial sequence  Extension Primer
  Primer
cgggaaatgtagttctaacatggtc

SEQ ID NO: 7712 - DNA, 25 bp, Artificial sequence  Extension Primer
  Primer
agccaaatataagaaatgaaaaact

SEQ ID NO: 7713 - DNA, 25 bp, Artificial sequence  Extension Primer
  Primer
gaccaggtgtcccgcccccctgctc

SEQ ID NO: 7714 - DNA, 25 bp, Artificial sequence  Extension Primer
  Primer
acgatatccacattttctctttccc

SEQ ID NO: 7715 - DNA, 25 bp, Artificial sequence  Extension Primer
  Primer
acaagggtaatggtccatgctgact

SEQ ID NO: 7716 - DNA, 25 bp, Artificial sequence  Extension Primer
  Primer
tattaactcactcaagagggacgca

SEQ ID NO: 7717 - DNA, 25 bp, Artificial sequence  Extension Primer
  Primer
aggctttgaaatgaagaggagggaa

SEQ ID NO: 7718 - DNA, 25 bp, Artificial sequence  Extension Primer
  Primer
ctgaaggagccaactcaggtcacat

SEQ ID NO: 7719 - DNA, 25 bp, Artificial sequence  Extension Primer
  Primer
gaaaattgagtcctgaacaaaagtc

SEQ ID NO: 7720 - DNA, 25 bp, Artificial sequence  Extension Primer
  Primer
gataacagtggctttcaggcttcct

SEQ ID NO: 7721 - DNA, 25 bp, Artificial sequence  Extension Primer
  Primer
tccagcttctaaattttgttctgtc

SEQ ID NO: 7722 - DNA, 25 bp, Artificial sequence  Extension Primer
  Primer
cacaaagggtctaaatgtgcctgcc

SEQ ID NO: 7723 - DNA, 25 bp, Artificial sequence  Extension Primer
  Primer
agagggggagatttataaaacatct

SEQ ID NO: 7724 - DNA, 25 bp, Artificial sequence  Extension Primer
  Primer
tgtcaaacaagtagttaaaatggaa

SEQ ID NO: 7725 - DNA, 25 bp, Artificial sequence  Extension Primer
  Primer
ttaactcatttctgaatctatttgt

SEQ ID NO: 7726 - DNA, 25 bp, Artificial sequence  Extension Primer
  Primer
gcaaataaacaaagttctactgtac

SEQ ID NO: 7727 - DNA, 25 bp, Artificial sequence  Extension Primer
  Primer
yggagctagaagagacttagcccac

SEQ ID NO: 7728 - DNA, 25 bp, Artificial sequence  Extension Primer
  Primer
actgttaggtatctgcctcagcctt

SEQ ID NO: 7729 - DNA, 25 bp, Artificial sequence  Extension Primer
  Primer
ctgtcttatatctacaagagaagta

SEQ ID NO: 7730 - DNA, 25 bp, Artificial sequence  Extension Primer
  Primer
gaagtaygaaacttttggattattt

SEQ ID NO: 7731 - DNA, 25 bp, Artificial sequence  Extension Primer
  Primer
acctgkgttaaattgttctgtaagc

SEQ ID NO: 7732 - DNA, 25 bp, Artificial sequence  Extension Primer
  Primer
gtactctgaatctcagctccaccac

SEQ ID NO: 7733 - DNA, 25 bp, Artificial sequence  Extension Primer
  Primer
gcacgcagacacacatacaaacaca

SEQ ID NO: 7734 - DNA, 25 bp, Artificial sequence  Extension Primer
  Primer
ggatccgggtttgtgtaatgaggtt

SEQ ID NO: 7735 - DNA, 25 bp, Artificial sequence  Extension Primer
  Primer
tgtgtttgctttaggtatattctga

SEQ ID NO: 7736 - DNA, 25 bp, Artificial sequence  Extension Primer
  Primer
aatttggggaaggttctctttaaca

SEQ ID NO: 7737 - DNA, 25 bp, Artificial sequence  Extension Primer
  Primer
atattctatatttgttattttcatt

SEQ ID NO: 7738 - DNA, 25 bp, Artificial sequence  Extension Primer
  Primer
tattctagtctattcatgcctgttt

SEQ ID NO: 7739 - DNA, 25 bp, Artificial sequence  Extension Primer
  Primer
gctgtttaacctcatgcttagaaca

SEQ ID NO: 7740 - DNA, 25 bp, Artificial sequence  Extension Primer
  Primer
agaacaaaacaaacgctaaggttga

SEQ ID NO: 7741 - DNA, 25 bp, Artificial sequence  Extension Primer
  Primer
acgccgagtccctcgtggagaccta

SEQ ID NO: 7742 - DNA, 25 bp, Artificial sequence  Extension Primer
  Primer
gccgttcaaatcctatatccgcagt

SEQ ID NO: 7743 - DNA, 25 bp, Artificial sequence  Extension Primer
  Primer
agaaggrcatgacagcaaagagcac

SEQ ID NO: 7744 - DNA, 25 bp, Artificial sequence  Extension Primer
  Primer
tgcaaatccacccgctaaataaagt

SEQ ID NO: 7745 - DNA, 25 bp, Artificial sequence  Extension Primer
  Primer
agcagtaagcttataaactaggggg

SEQ ID NO: 7746 - DNA, 25 bp, Artificial sequence  Extension Primer
  Primer
aagaatcacagaaatttataagaca

SEQ ID NO: 7747 - DNA, 25 bp, Artificial sequence  Extension Primer
  Primer
ctccaamacaaggaaacgtggaccc

SEQ ID NO: 7748 - DNA, 25 bp, Artificial sequence  Extension Primer
  Primer
ttacttataagccatagattgtgct

SEQ ID NO: 7749 - DNA, 25 bp, Artificial sequence  Extension Primer
  Primer
gtatttgcttcgacaggtgatctca

SEQ ID NO: 7750 - DNA, 25 bp, Artificial sequence  Extension Primer
  Primer
ctgattccacagttgttactggttt

SEQ ID NO: 7751 - DNA, 25 bp, Artificial sequence  Extension Primer
  Primer
ccacacagcgcaaccctcagaccay

SEQ ID NO: 7752 - DNA, 25 bp, Artificial sequence  Extension Primer
  Primer
tctacctttccatggtaacctcttc

SEQ ID NO: 7753 - DNA, 22 bp, Artificial sequence  Extension Primer
  Primer
tttctttagatgtcatctatct

SEQ ID NO: 7754 - DNA, 25 bp, Artificial sequence  Extension Primer
  Primer
gtgggtctggggaactaaatctaca

SEQ ID NO: 7755 - DNA, 25 bp, Artificial sequence  Extension Primer
  Primer
actttctttgttctcttgtaagcca

SEQ ID NO: 7756 - DNA, 25 bp, Artificial sequence  Extension Primer
  Primer
tcctgcctcttcttcatcctaaata

SEQ ID NO: 7757 - DNA, 25 bp, Artificial sequence  Extension Primer
  Primer
atttcagccatcccggctttttctg

SEQ ID NO: 7758 - DNA, 25 bp, Artificial sequence  Extension Primer
  Primer
gacaaaacatcttctgaagtatcac

SEQ ID NO: 7759 - DNA, 25 bp, Artificial sequence  Extension Primer
  Primer
cgacgttcccagggacccacagaaa

SEQ ID NO: 7760 - DNA, 25 bp, Artificial sequence  Extension Primer
  Primer
atattgcttcctgtatccaaactgg

SEQ ID NO: 7761 - DNA, 25 bp, Artificial sequence  Extension Primer
  Primer
tcactccaagtggagataagcccaa

SEQ ID NO: 7762 - DNA, 25 bp, Artificial sequence  Extension Primer
  Primer
cttttctacataaaagtgtttaata

SEQ ID NO: 7763 - DNA, 25 bp, Artificial sequence  Extension Primer
  Primer
cttattttgactgtttgattgaaag

SEQ ID NO: 7764 - DNA, 25 bp, Artificial sequence  Extension Primer
  Primer
gctcactatgcaaaatcaaaacaca

SEQ ID NO: 7765 - DNA, 25 bp, Artificial sequence  Extension Primer
  Primer
cttgagacagttagagtatagaggt

SEQ ID NO: 7766 - DNA, 25 bp, Artificial sequence  Extension Primer
  Primer
gtcaaatcttaatattcaagtaatg

SEQ ID NO: 7767 - DNA, 25 bp, Artificial sequence  Extension Primer
  Primer
cgtacatagaaaaaattaactctgt

SEQ ID NO: 7768 - DNA, 25 bp, Artificial sequence  Extension Primer
  Primer
tactaacccacccttaacaaggacc

SEQ ID NO: 7769 - DNA, 25 bp, Artificial sequence  Extension Primer
  Primer
ttcctgtacgtgctcctggcttgtg

SEQ ID NO: 7770 - DNA, 25 bp, Artificial sequence  Extension Primer
  Primer
gacagcttggcgggaagtccctgga

SEQ ID NO: 7771 - DNA, 25 bp, Artificial sequence  Extension Primer
  Primer
cccttcatctgaccaggcacacctc

SEQ ID NO: 7772 - DNA, 25 bp, Artificial sequence  Extension Primer
  Primer
tagaaaattcacctaaaatggagca

SEQ ID NO: 7773 - DNA, 25 bp, Artificial sequence  Extension Primer
  Primer
ctcctaaaagccccaccgatgctcc

SEQ ID NO: 7774 - DNA, 25 bp, Artificial sequence  Extension Primer
  Primer
tgatgtgaccactatgactcactga

SEQ ID NO: 7775 - DNA, 25 bp, Artificial sequence  Extension Primer
  Primer
gagccatgaagccggacaaacagac

SEQ ID NO: 7776 - DNA, 25 bp, Artificial sequence  Extension Primer
  Primer
ctggtgcacagtaagccctcatcaa

SEQ ID NO: 7777 - DNA, 25 bp, Artificial sequence  Extension Primer
  Primer
ctgtagttataacagactttgaact

SEQ ID NO: 7778 - DNA, 25 bp, Artificial sequence  Extension Primer
  Primer
gtgtttcaaaatgctgggaagagat

SEQ ID NO: 7779 - DNA, 25 bp, Artificial sequence  Extension Primer
  Primer
tactgcgttcatttgtatttaatgg

SEQ ID NO: 7780 - DNA, 25 bp, Artificial sequence  Extension Primer
  Primer
aactgaagcacagagaggtcaagta

SEQ ID NO: 7781 - DNA, 25 bp, Artificial sequence  Extension Primer
  Primer
ttgcaacctccagcaaatataaaga

SEQ ID NO: 7782 - DNA, 25 bp, Artificial sequence  Extension Primer
  Primer
aaagtcaaagaataatacatactgc

SEQ ID NO: 7783 - DNA, 25 bp, Artificial sequence  Extension Primer
  Primer
tgtctggtgcacgaccccaagaggt

SEQ ID NO: 7784 - DNA, 25 bp, Artificial sequence  Extension Primer
  Primer
tttgcctcagccttggctgctattt

SEQ ID NO: 7785 - DNA, 25 bp, Artificial sequence  Extension Primer
  Primer
cacttaggatgaatcatttcaccta

SEQ ID NO: 7786 - DNA, 25 bp, Artificial sequence  Extension Primer
  Primer
aagagytatggcaaatatgatatag

SEQ ID NO: 7787 - DNA, 25 bp, Artificial sequence  Extension Primer
  Primer
ttggcctttgcgatctaaagtaccg

SEQ ID NO: 7788 - DNA, 25 bp, Artificial sequence  Extension Primer
  Primer
cccayccccaacccttgccccacca

SEQ ID NO: 7789 - DNA, 25 bp, Artificial sequence  Extension Primer
  Primer
gctgtgaagttaagtttttaataat

SEQ ID NO: 7790 - DNA, 25 bp, Artificial sequence  Extension Primer
  Primer
tgactgatggtagagaaagaaggta

SEQ ID NO: 7791 - DNA, 25 bp, Artificial sequence  Extension Primer
  Primer
agatgtatccacaagtggaagcagg

SEQ ID NO: 7792 - DNA, 25 bp, Artificial sequence  Extension Primer
  Primer
ctcacacatgatctgcatgggtcag

SEQ ID NO: 7793 - DNA, 25 bp, Artificial sequence  Extension Primer
  Primer
gtactttgtgatggggtatcacctg

SEQ ID NO: 7794 - DNA, 25 bp, Artificial sequence  Extension Primer
  Primer
tttccttggctccccaatgcccaca

SEQ ID NO: 7795 - DNA, 25 bp, Artificial sequence  Extension Primer
  Primer
agaaatcaagagaagtcagtgcatc

SEQ ID NO: 7796 - DNA, 25 bp, Artificial sequence  Extension Primer
  Primer
gagaggttggagcgcgcagaattaa

SEQ ID NO: 7797 - DNA, 25 bp, Artificial sequence  Extension Primer
  Primer
ttcactctggatttctccgttgcct

SEQ ID NO: 7798 - DNA, 25 bp, Artificial sequence  Extension Primer
  Primer
actcttggacctcyctcctacccct

SEQ ID NO: 7799 - DNA, 25 bp, Artificial sequence  Extension Primer
  Primer
tactatcacatcccttgttcctttt

SEQ ID NO: 7800 - DNA, 25 bp, Artificial sequence  Extension Primer
  Primer
aatctaggaaactgacttctgggct

SEQ ID NO: 7801 - DNA, 25 bp, Artificial sequence  Extension Primer
  Primer
aaggacagtagcagcatctacccag

SEQ ID NO: 7802 - DNA, 25 bp, Artificial sequence  Extension Primer
  Primer
taaactgcacacagtccttgtccat

SEQ ID NO: 7803 - DNA, 25 bp, Artificial sequence  Extension Primer
  Primer
ggccatggaaatcacacagtgtctc

SEQ ID NO: 7804 - DNA, 25 bp, Artificial sequence  Extension Primer
  Primer
gtgcacaakgcgctggcattacaga

SEQ ID NO: 7805 - DNA, 25 bp, Artificial sequence  Extension Primer
  Primer
cagccctggaggagcaacaggtgcc

SEQ ID NO: 7806 - DNA, 25 bp, Artificial sequence  Extension Primer
  Primer
gaaggaaattgatgacttaaatgtg

SEQ ID NO: 7807 - DNA, 25 bp, Artificial sequence  Extension Primer
  Primer
taagcaaagcttacatgaaagtgac

SEQ ID NO: 7808 - DNA, 25 bp, Artificial sequence  Extension Primer
  Primer
ccagagccccttgctgcaggctttc

SEQ ID NO: 7809 - DNA, 25 bp, Artificial sequence  Extension Primer
  Primer
cagctttttattacttaatcacatc

SEQ ID NO: 7810 - DNA, 25 bp, Artificial sequence  Extension Primer
  Primer
cgacagtattgtgtgtatggtggca

SEQ ID NO: 7811 - DNA, 25 bp, Artificial sequence  Extension Primer
  Primer
aattaatcatgataacccagataga

SEQ ID NO: 7812 - DNA, 25 bp, Artificial sequence  Extension Primer
  Primer
gtattgtggraaaaaaaaaaaggta

SEQ ID NO: 7813 - DNA, 25 bp, Artificial sequence  Extension Primer
  Primer
acagatggttctttgagaagggaaa

SEQ ID NO: 7814 - DNA, 25 bp, Artificial sequence  Extension Primer
  Primer
accattagaccacaagggagattcc

SEQ ID NO: 7815 - DNA, 25 bp, Artificial sequence  Extension Primer
  Primer
ttctactaagctgtggagacctttt

SEQ ID NO: 7816 - DNA, 25 bp, Artificial sequence  Extension Primer
  Primer
tgagtaagtaaaagtccaactgctt

SEQ ID NO: 7817 - DNA, 25 bp, Artificial sequence  Extension Primer
  Primer
taaaactatttggaaatgcttatat

SEQ ID NO: 7818 - DNA, 25 bp, Artificial sequence  Extension Primer
  Primer
taatgtcagatcagcacaatacttt

SEQ ID NO: 7819 - DNA, 25 bp, Artificial sequence  Extension Primer
  Primer
cccttttgtctgcctagttttagat

SEQ ID NO: 7820 - DNA, 25 bp, Artificial sequence  Extension Primer
  Primer
gcccttatcatgttggttcattaaa

SEQ ID NO: 7821 - DNA, 25 bp, Artificial sequence  Extension Primer
  Primer
tgctgtgtgtagcagggtttctcaa

SEQ ID NO: 7822 - DNA, 25 bp, Artificial sequence  Extension Primer
  Primer
tcatctgtggttaattgagtaaaac

SEQ ID NO: 7823 - DNA, 25 bp, Artificial sequence  Extension Primer
  Primer
tcacaaggccctgacatccctcaag

SEQ ID NO: 7824 - DNA, 25 bp, Artificial sequence  Extension Primer
  Primer
gacggagttggggagggataaatta

SEQ ID NO: 7825 - DNA, 25 bp, Artificial sequence  Extension Primer
  Primer
ctattgaatgggtgagtctgtcatt

SEQ ID NO: 7826 - DNA, 25 bp, Artificial sequence  Extension Primer
  Primer
gtctatagaaccacatgtaaaaaat

SEQ ID NO: 7827 - DNA, 25 bp, Artificial sequence  Extension Primer
  Primer
gtcaaaatgttgatttatgttaagg

SEQ ID NO: 7828 - DNA, 25 bp, Artificial sequence  Extension Primer
  Primer
cataaatgacagtttttgtgtctgt

SEQ ID NO: 7829 - DNA, 25 bp, Artificial sequence  Extension Primer
  Primer
aacactgtatccatyagctatttca

SEQ ID NO: 7830 - DNA, 25 bp, Artificial sequence  Extension Primer
  Primer
ggtaatgagtagctatctgatcaaa

SEQ ID NO: 7831 - DNA, 25 bp, Artificial sequence  Extension Primer
  Primer
taatgtttatcaagtgctgttaagt

SEQ ID NO: 7832 - DNA, 25 bp, Artificial sequence  Extension Primer
  Primer
ataaagcaagctgaggctaccgtcc

SEQ ID NO: 7833 - DNA, 25 bp, Artificial sequence  Extension Primer
  Primer
tcatacaaaaccagagaagagggag

SEQ ID NO: 7834 - DNA, 25 bp, Artificial sequence  Extension Primer
  Primer
gtgaaatctgttgatagtgactctg

SEQ ID NO: 7835 - DNA, 25 bp, Artificial sequence  Extension Primer
  Primer
tgtcagtcaaaggcagagtattaag

SEQ ID NO: 7836 - DNA, 25 bp, Artificial sequence  Extension Primer
  Primer
aaatatgaaggaacttccattcttc

SEQ ID NO: 7837 - DNA, 25 bp, Artificial sequence  Extension Primer
  Primer
gtgttaatggggtccgcagctctat

SEQ ID NO: 7838 - DNA, 25 bp, Artificial sequence  Extension Primer
  Primer
tgtaataaaattataccaatgatta

SEQ ID NO: 7839 - DNA, 25 bp, Artificial sequence  Extension Primer
  Primer
tatatcattaaatttcaatttcccc

SEQ ID NO: 7840 - DNA, 25 bp, Artificial sequence  Extension Primer
  Primer
cactaaaatgtgaagttcagtgagg

SEQ ID NO: 7841 - DNA, 25 bp, Artificial sequence  Extension Primer
  Primer
ttaacaattcttwttgggtatagaa

SEQ ID NO: 7842 - DNA, 25 bp, Artificial sequence  Extension Primer
  Primer
ttttgtacatagtagtttgtacctc

SEQ ID NO: 7843 - DNA, 25 bp, Artificial sequence  Extension Primer
  Primer
aatcacagcaattgtttagaactta

SEQ ID NO: 7844 - DNA, 25 bp, Artificial sequence  Extension Primer
  Primer
attcctcccatgggaaacaatgatc

SEQ ID NO: 7845 - DNA, 25 bp, Artificial sequence  Extension Primer
  Primer
tatactcaagtatactgctgtttga

SEQ ID NO: 7846 - DNA, 25 bp, Artificial sequence  Extension Primer
  Primer
gcctcacatccaaaaagaaactgaa

SEQ ID NO: 7847 - DNA, 25 bp, Artificial sequence  Extension Primer
  Primer
tattagcagcatctgaaatatgaaa

SEQ ID NO: 7848 - DNA, 25 bp, Artificial sequence  Extension Primer
  Primer
caacctagaacagtacgagataaat

SEQ ID NO: 7849 - DNA, 25 bp, Artificial sequence  Extension Primer
  Primer
atgggaatattaatatttattatat

SEQ ID NO: 7850 - DNA, 25 bp, Artificial sequence  Extension Primer
  Primer
caagaatacctggaaaaataaaaat

SEQ ID NO: 7851 - DNA, 25 bp, Artificial sequence  Extension Primer
  Primer
taagtccttcttcacctccaattaa

SEQ ID NO: 7852 - DNA, 25 bp, Artificial sequence  Extension Primer
  Primer
attgttgatccacctgctttttctg

SEQ ID NO: 7853 - DNA, 25 bp, Artificial sequence  Extension Primer
  Primer
ccagactcttgcatcttcccatata

SEQ ID NO: 7854 - DNA, 25 bp, Artificial sequence  Extension Primer
  Primer
atggcaccggggtgtctgtgttgac

SEQ ID NO: 7855 - DNA, 25 bp, Artificial sequence  Extension Primer
  Primer
ccattctggcagagctgacatgaac

SEQ ID NO: 7856 - DNA, 25 bp, Artificial sequence  Extension Primer
  Primer
acaaagatgacagcaagtacaacag

SEQ ID NO: 7857 - DNA, 25 bp, Artificial sequence  Extension Primer
  Primer
atgtttagtggaagaggttgttaaa

SEQ ID NO: 7858 - DNA, 25 bp, Artificial sequence  Extension Primer
  Primer
tacgcctaccccctttaaaagaaag

SEQ ID NO: 7859 - DNA, 25 bp, Artificial sequence  Extension Primer
  Primer
tctccggccttcagccctgtgtact

SEQ ID NO: 7860 - DNA, 25 bp, Artificial sequence  Extension Primer
  Primer
gtattctattgggatcaatcttgaa

SEQ ID NO: 7861 - DNA, 25 bp, Artificial sequence  Extension Primer
  Primer
cagagaagactgaattattgtctck

SEQ ID NO: 7862 - DNA, 22 bp, Artificial sequence  Extension Primer
  Primer
gaccccttgactgaaggagcca

SEQ ID NO: 7863 - DNA, 25 bp, Artificial sequence  Extension Primer
  Primer
acatttgttcccttctcatcaaccc

SEQ ID NO: 7864 - DNA, 25 bp, Artificial sequence  Extension Primer
  Primer
ctcctctgtgaggctccaatatgcc

SEQ ID NO: 7865 - DNA, 25 bp, Artificial sequence  Extension Primer
  Primer
agacaaacttttaacagatttcttk

SEQ ID NO: 7866 - DNA, 25 bp, Artificial sequence  Extension Primer
  Primer
atgtttgaattaatttaaaactgtc

SEQ ID NO: 7867 - DNA, 25 bp, Artificial sequence  Extension Primer
  Primer
cagatttcagagtatttataactgc

SEQ ID NO: 7868 - DNA, 25 bp, Artificial sequence  Extension Primer
  Primer
ccaatttataagagaggcacactac

SEQ ID NO: 7869 - DNA, 25 bp, Artificial sequence  Extension Primer
  Primer
gaaatttccaaagtcttcctgcttt

SEQ ID NO: 7870 - DNA, 22 bp, Artificial sequence  Extension Primer
  Primer
ggttgataagactaaccggcta

SEQ ID NO: 7871 - DNA, 25 bp, Artificial sequence  Extension Primer
  Primer
aatattcaaattcatctttcaaaag

SEQ ID NO: 7872 - DNA, 25 bp, Artificial sequence  Extension Primer
  Primer
aaaaggggcccattttgagggctca

SEQ ID NO: 7873 - DNA, 25 bp, Artificial sequence  Extension Primer
  Primer
aataatgacaataggcttgcttgac

SEQ ID NO: 7874 - DNA, 25 bp, Artificial sequence  Extension Primer
  Primer
gagagctgargtgaagtgtaacctg

SEQ ID NO: 7875 - DNA, 25 bp, Artificial sequence  Extension Primer
  Primer
ggtagggggctggggtgggactctt

SEQ ID NO: 7876 - DNA, 25 bp, Artificial sequence  Extension Primer
  Primer
tggagggcagtcaggccagcagtta

SEQ ID NO: 7877 - DNA, 25 bp, Artificial sequence  Extension Primer
  Primer
gaaatgtattcaaaccagtkcaagt

SEQ ID NO: 7878 - DNA, 25 bp, Artificial sequence  Extension Primer
  Primer
atagccccaaatacattgccttyct

SEQ ID NO: 7879 - DNA, 25 bp, Artificial sequence  Extension Primer
  Primer
attwaaaaagtcaattcctcaagtc

SEQ ID NO: 7880 - DNA, 25 bp, Artificial sequence  Extension Primer
  Primer
gttaccttccttaagggaggatgca

SEQ ID NO: 7881 - DNA, 25 bp, Artificial sequence  Extension Primer
  Primer
agtcagtcaatttttttaatgtgtt

SEQ ID NO: 7882 - DNA, 25 bp, Artificial sequence  Extension Primer
  Primer
aagagatttagcatttcctcagact

SEQ ID NO: 7883 - DNA, 25 bp, Artificial sequence  Extension Primer
  Primer
atttctgtgcacagcagacctactc

SEQ ID NO: 7884 - DNA, 25 bp, Artificial sequence  Extension Primer
  Primer
gtgtctttgtagatggttacgtctg

SEQ ID NO: 7885 - DNA, 25 bp, Artificial sequence  Extension Primer
  Primer
tgtctagcacagggaactcagcttg

SEQ ID NO: 7886 - DNA, 25 bp, Artificial sequence  Extension Primer
  Primer
cccagtactaggaactgagtcatca

SEQ ID NO: 7887 - DNA, 25 bp, Artificial sequence  Extension Primer
  Primer
gggcactcagcttgtagttaccatc

SEQ ID NO: 7888 - DNA, 25 bp, Artificial sequence  Extension Primer
  Primer
cttattatctaataaaaggaaatgc

SEQ ID NO: 7889 - DNA, 25 bp, Artificial sequence  Extension Primer
  Primer
cattttaaggtctgctagggayttc

SEQ ID NO: 7890 - DNA, 25 bp, Artificial sequence  Extension Primer
  Primer
gccctcccacctgttacccttctcc

SEQ ID NO: 7891 - DNA, 25 bp, Artificial sequence  Extension Primer
  Primer
gtagttataacagactttgaactyt

SEQ ID NO: 7892 - DNA, 25 bp, Artificial sequence  Extension Primer
  Primer
tgatttgttcactgttgtatctcar

SEQ ID NO: 7893 - DNA, 22 bp, Artificial sequence  Extension Primer
  Primer
cctcatctgagctgtggccctg

SEQ ID NO: 7894 - DNA, 25 bp, Artificial sequence  Extension Primer
  Primer
tcctggtccaggctccaactctcag

SEQ ID NO: 7895 - DNA, 25 bp, Artificial sequence  Extension Primer
  Primer
attgtacttgagggcttattatgam

SEQ ID NO: 7896 - DNA, 25 bp, Artificial sequence  Extension Primer
  Primer
atgtcacactcaacctaatttaatg

SEQ ID NO: 7897 - DNA, 25 bp, Artificial sequence  Extension Primer
  Primer
taaacacattagtaaaaatgtcagg

SEQ ID NO: 7898 - DNA, 25 bp, Artificial sequence  Extension Primer
  Primer
aattccctgagtcttctcagggatc

SEQ ID NO: 7899 - DNA, 25 bp, Artificial sequence  Extension Primer
  Primer
caaatcactgtcactgggcaagcag

SEQ ID NO: 7900 - DNA, 25 bp, Artificial sequence  Extension Primer
  Primer
cagtgacttgaaaccaagaggaaaa

SEQ ID NO: 7901 - DNA, 25 bp, Artificial sequence  Extension Primer
  Primer
tgctaacttgctaattgctcttcct

SEQ ID NO: 7902 - DNA, 25 bp, Artificial sequence  Extension Primer
  Primer
cctcgactcaagtgacaggctcaac

SEQ ID NO: 7903 - DNA, 25 bp, Artificial sequence  Extension Primer
  Primer
cctccacccacatgaggggatgaaa

SEQ ID NO: 7904 - DNA, 25 bp, Artificial sequence  Extension Primer
  Primer
ttggggaatttggaaacatcccaca

SEQ ID NO: 7905 - DNA, 25 bp, Artificial sequence  Extension Primer
  Primer
tttttttgactattttagttctcaa

SEQ ID NO: 7906 - DNA, 25 bp, Artificial sequence  Extension Primer
  Primer
tactttgcattgtttacttttttcc

SEQ ID NO: 7907 - DNA, 25 bp, Artificial sequence  Extension Primer
  Primer
agttacaagttgcctgaattctata

SEQ ID NO: 7908 - DNA, 25 bp, Artificial sequence  Extension Primer
  Primer
tctacccatatgttaataacttcac

SEQ ID NO: 7909 - DNA, 25 bp, Artificial sequence  Extension Primer
  Primer
ggagcacaggactcttctcccaacg

SEQ ID NO: 7910 - DNA, 25 bp, Artificial sequence  Extension Primer
  Primer
ttaaaattgtaattatggagacagt

SEQ ID NO: 7911 - DNA, 25 bp, Artificial sequence  Extension Primer
  Primer
gataagaaatacatacttggaaaag

SEQ ID NO: 7912 - DNA, 25 bp, Artificial sequence  Extension Primer
  Primer
ggaccgggagggacactcgctggag

SEQ ID NO: 7913 - DNA, 25 bp, Artificial sequence  Extension Primer
  Primer
attggataagaggaggctggtaaca

SEQ ID NO: 7914 - DNA, 25 bp, Artificial sequence  Extension Primer
  Primer
atctcaccccacaatactgctcctc

SEQ ID NO: 7915 - DNA, 25 bp, Artificial sequence  Extension Primer
  Primer
ggcacaaaagggcaaatattgtatg

SEQ ID NO: 7916 - DNA, 25 bp, Artificial sequence  Extension Primer
  Primer
acaacatgccaggctgtctaggctc

SEQ ID NO: 7917 - DNA, 25 bp, Artificial sequence  Extension Primer
  Primer
ttccactagtaagaactgrttgtrg

SEQ ID NO: 7918 - DNA, 25 bp, Artificial sequence  Extension Primer
  Primer
cagggaccagtgtctgttcctcaay

SEQ ID NO: 7919 - DNA, 25 bp, Artificial sequence  Extension Primer
  Primer
agaatccttgcccttcttctgtatc

SEQ ID NO: 7920 - DNA, 25 bp, Artificial sequence  Extension Primer
  Primer
cagcctaacaccacatccttgtgag

SEQ ID NO: 7921 - DNA, 25 bp, Artificial sequence  Extension Primer
  Primer
tgccttaaaaaaaaaaaaaaagact

SEQ ID NO: 7922 - DNA, 25 bp, Artificial sequence  Extension Primer
  Primer
gatattataaaaatcaggaataatc

SEQ ID NO: 7923 - DNA, 25 bp, Artificial sequence  Extension Primer
  Primer
tggtaatgacagttccagtgtgaaa

SEQ ID NO: 7924 - DNA, 25 bp, Artificial sequence  Extension Primer
  Primer
ttgcccttcctctctgtccgtcaat

SEQ ID NO: 7925 - DNA, 25 bp, Artificial sequence  Extension Primer
  Primer
aagataaacctttattttarcattg

SEQ ID NO: 7926 - DNA, 25 bp, Artificial sequence  Extension Primer
  Primer
aggacaaagtccggtgtccctggtc

SEQ ID NO: 7927 - DNA, 25 bp, Artificial sequence  Extension Primer
  Primer
accagaggctgagcgatgtctggga

SEQ ID NO: 7928 - DNA, 25 bp, Artificial sequence  Extension Primer
  Primer
ccaagagacagtctaagctacggaa

SEQ ID NO: 7929 - DNA, 25 bp, Artificial sequence  Extension Primer
  Primer
tcatattgcagaaaatctgccttcc

SEQ ID NO: 7930 - DNA, 25 bp, Artificial sequence  Extension Primer
  Primer
aagaagggtcatagagtaaaagatg

SEQ ID NO: 7931 - DNA, 25 bp, Artificial sequence  Extension Primer
  Primer
taaggaagagatggtaagcagtcct

SEQ ID NO: 7932 - DNA, 25 bp, Artificial sequence  Extension Primer
  Primer
gggcctgagcctggactctgcccat

SEQ ID NO: 7933 - DNA, 25 bp, Artificial sequence  Extension Primer
  Primer
gaattcttattaaaactgggttcta

SEQ ID NO: 7934 - DNA, 25 bp, Artificial sequence  Extension Primer
  Primer
acagtattcaataattacttttctt

SEQ ID NO: 7935 - DNA, 25 bp, Artificial sequence  Extension Primer
  Primer
aaataaatgcaaacccaaatactgt

SEQ ID NO: 7936 - DNA, 25 bp, Artificial sequence  Extension Primer
  Primer
gtcctattctactccccttctccca

SEQ ID NO: 7937 - DNA, 25 bp, Artificial sequence  Extension Primer
  Primer
ttctccatgaatgcaactaagtttt

SEQ ID NO: 7938 - DNA, 25 bp, Artificial sequence  Extension Primer
  Primer
acctcaatttttacccaaggtccca

SEQ ID NO: 7939 - DNA, 25 bp, Artificial sequence  Extension Primer
  Primer
aggggcttggtttcctattaagtgc

SEQ ID NO: 7940 - DNA, 25 bp, Artificial sequence  Extension Primer
  Primer
cgatcagagaagtctctggatccca

SEQ ID NO: 7941 - DNA, 25 bp, Artificial sequence  Extension Primer
  Primer
tgtttctctttttgttaatcaaagt

SEQ ID NO: 7942 - DNA, 25 bp, Artificial sequence  Extension Primer
  Primer
tggctctgaaactccacctttgtca

SEQ ID NO: 7943 - DNA, 25 bp, Artificial sequence  Extension Primer
  Primer
ccttcagatgctgccctggggctgc

SEQ ID NO: 7944 - DNA, 25 bp, Artificial sequence  Extension Primer
  Primer
gcatctctgagcttcatttctttta

SEQ ID NO: 7945 - DNA, 25 bp, Artificial sequence  Extension Primer
  Primer
tgtcaactcataattttactgggac

SEQ ID NO: 7946 - DNA, 25 bp, Artificial sequence  Extension Primer
  Primer
ctctggaagctgtctctctggaaac

SEQ ID NO: 7947 - DNA, 25 bp, Artificial sequence  Extension Primer
  Primer
atggcatactcctcctttaagagca

SEQ ID NO: 7948 - DNA, 25 bp, Artificial sequence  Extension Primer
  Primer
ttcatttgtgtgctggagaggggat

SEQ ID NO: 7949 - DNA, 25 bp, Artificial sequence  Extension Primer
  Primer
cccaccaccgtcttcccccatccat

SEQ ID NO: 7950 - DNA, 25 bp, Artificial sequence  Extension Primer
  Primer
agtccagcgcccttgtctgtactcc

SEQ ID NO: 7951 - DNA, 25 bp, Artificial sequence  Extension Primer
  Primer
ggtcctgtgtttgaaactaggtgat

SEQ ID NO: 7952 - DNA, 25 bp, Artificial sequence  Extension Primer
  Primer
catcctctatcctccatactctcta

SEQ ID NO: 7953 - DNA, 25 bp, Artificial sequence  Extension Primer
  Primer
ccatttagtctgtagttagttaatc

SEQ ID NO: 7954 - DNA, 25 bp, Artificial sequence  Extension Primer
  Primer
ttgtgtgctaggcagtgtgtagttc

SEQ ID NO: 7955 - DNA, 25 bp, Artificial sequence  Extension Primer
  Primer
aataattgggtagtgacactatccc

SEQ ID NO: 7956 - DNA, 25 bp, Artificial sequence  Extension Primer
  Primer
tcctctcaagtgaaggaaagaactc

SEQ ID NO: 7957 - DNA, 25 bp, Artificial sequence  Extension Primer
  Primer
cacaataaaatcttattccttagta

SEQ ID NO: 7958 - DNA, 25 bp, Artificial sequence  Extension Primer
  Primer
atgagttgtcacaacttgattcttt

SEQ ID NO: 7959 - DNA, 25 bp, Artificial sequence  Extension Primer
  Primer
aaaggcatcagagacagtggaggaa

SEQ ID NO: 7960 - DNA, 25 bp, Artificial sequence  Extension Primer
  Primer
gtttgctcatctgtaagatgctcca

SEQ ID NO: 7961 - DNA, 25 bp, Artificial sequence  Extension Primer
  Primer
catgtgtcacataactcgttcctcc

SEQ ID NO: 7962 - DNA, 25 bp, Artificial sequence  Extension Primer
  Primer
aacatttctcaattgtgtagctggg

SEQ ID NO: 7963 - DNA, 25 bp, Artificial sequence  Extension Primer
  Primer
ctccccactcccctgctgatttgct

SEQ ID NO: 7964 - DNA, 25 bp, Artificial sequence  Extension Primer
  Primer
actgagaaaacatttttaatcaacc

SEQ ID NO: 7965 - DNA, 25 bp, Artificial sequence  Extension Primer
  Primer
ggccccctgaggagtctggggccgc

SEQ ID NO: 7966 - DNA, 22 bp, Artificial sequence  Extension Primer
  Primer
gtcccagccctagtagcatctt

SEQ ID NO: 7967 - DNA, 25 bp, Artificial sequence  Extension Primer
  Primer
aagtgggatttctgcagtttttcta

SEQ ID NO: 7968 - DNA, 25 bp, Artificial sequence  Extension Primer
  Primer
ttgttcgtacattttctgtatccca

SEQ ID NO: 7969 - DNA, 25 bp, Artificial sequence  Extension Primer
  Primer
taaataaaatgctctaacaaataat

SEQ ID NO: 7970 - DNA, 25 bp, Artificial sequence  Extension Primer
  Primer
attcctggagaagggctgagaatga

SEQ ID NO: 7971 - DNA, 25 bp, Artificial sequence  Extension Primer
  Primer
aaaagagagtgaaaactattatrtc

SEQ ID NO: 7972 - DNA, 25 bp, Artificial sequence  Extension Primer
  Primer
ggaggtatgtacctgagtaactgcc

SEQ ID NO: 7973 - DNA, 25 bp, Artificial sequence  Extension Primer
  Primer
ttcctccctcaatttaggtcttaat

SEQ ID NO: 7974 - DNA, 25 bp, Artificial sequence  Extension Primer
  Primer
gtgctgatgatgattagccatggag

SEQ ID NO: 7975 - DNA, 25 bp, Artificial sequence  Extension Primer
  Primer
acttttccccaaagaaacgaagtgc

SEQ ID NO: 7976 - DNA, 25 bp, Artificial sequence  Extension Primer
  Primer
gtatgtcagacatcaatatatactt

SEQ ID NO: 7977 - DNA, 25 bp, Artificial sequence  Extension Primer
  Primer
aaatttgttttgccattttaatagt

SEQ ID NO: 7978 - DNA, 25 bp, Artificial sequence  Extension Primer
  Primer
cccctcctgaaagtgtagttgctac

SEQ ID NO: 7979 - DNA, 25 bp, Artificial sequence  Extension Primer
  Primer
ctaggctcagtggcttttcaagtgt

SEQ ID NO: 7980 - DNA, 25 bp, Artificial sequence  Extension Primer
  Primer
ggcctctggaacacggtgtgcyggg

SEQ ID NO: 7981 - DNA, 25 bp, Artificial sequence  Extension Primer
  Primer
tagattccaatttgaaaattaaccc

SEQ ID NO: 7982 - DNA, 25 bp, Artificial sequence  Extension Primer
  Primer
ggcttcaccytggcttccgtattac

SEQ ID NO: 7983 - DNA, 25 bp, Artificial sequence  Extension Primer
  Primer
actgctgcttccagaccacacaccc

SEQ ID NO: 7984 - DNA, 25 bp, Artificial sequence  Extension Primer
  Primer
cagtggagagaaaacaacacaaaaa

SEQ ID NO: 7985 - DNA, 25 bp, Artificial sequence  Extension Primer
  Primer
gttatcagtccccgtggaatattta

SEQ ID NO: 7986 - DNA, 25 bp, Artificial sequence  Extension Primer
  Primer
gtgaatgccgcacacagacacttac

SEQ ID NO: 7987 - DNA, 25 bp, Artificial sequence  Extension Primer
  Primer
tattaatgggcactagtgctacatc

SEQ ID NO: 7988 - DNA, 25 bp, Artificial sequence  Extension Primer
  Primer
ttgagagtagtctgtttcttattct

SEQ ID NO: 7989 - DNA, 25 bp, Artificial sequence  Extension Primer
  Primer
caatggtgtatggtcatgcaggtgt

SEQ ID NO: 7990 - DNA, 25 bp, Artificial sequence  Extension Primer
  Primer
tggagtatttcctgccgtatcagta

SEQ ID NO: 7991 - DNA, 25 bp, Artificial sequence  Extension Primer
  Primer
tcctcatgttctgacttatccttct

SEQ ID NO: 7992 - DNA, 25 bp, Artificial sequence  Extension Primer
  Primer
tggaaggatagtacagcatgagggc

SEQ ID NO: 7993 - DNA, 25 bp, Artificial sequence  Extension Primer
  Primer
tcctccattctctgtagtcatccct

SEQ ID NO: 7994 - DNA, 25 bp, Artificial sequence  Extension Primer
  Primer
aagaaagaagaaaattgaaaactag

SEQ ID NO: 7995 - DNA, 25 bp, Artificial sequence  Extension Primer
  Primer
ytggtttttagccaaacttgacaga

SEQ ID NO: 7996 - DNA, 25 bp, Artificial sequence  Extension Primer
  Primer
ggcatcttagacacaatctgcccca

SEQ ID NO: 7997 - DNA, 25 bp, Artificial sequence  Extension Primer
  Primer
aagtagaccaggtgttctgcataga

SEQ ID NO: 7998 - DNA, 25 bp, Artificial sequence  Extension Primer
  Primer
gtaaagatgaaggatttgctacaat

SEQ ID NO: 7999 - DNA, 25 bp, Artificial sequence  Extension Primer
  Primer
caaccactcttcgcttccaagcctg

SEQ ID NO: 8000 - DNA, 25 bp, Artificial sequence  Extension Primer
  Primer
catggagatgacactgatgatgtat

SEQ ID NO: 8001 - DNA, 25 bp, Artificial sequence  Extension Primer
  Primer
ttgctctttttcactcttatcctca

SEQ ID NO: 8002 - DNA, 25 bp, Artificial sequence  Extension Primer
  Primer
acggtgaagaggaaaatatctcaca

SEQ ID NO: 8003 - DNA, 25 bp, Artificial sequence  Extension Primer
  Primer
taaattattgtgatattgcattgct

SEQ ID NO: 8004 - DNA, 25 bp, Artificial sequence  Extension Primer
  Primer
atatcatttgtgaaatgcttacctc

SEQ ID NO: 8005 - DNA, 25 bp, Artificial sequence  Extension Primer
  Primer
gcttcttcttgccaataacttctaa

SEQ ID NO: 8006 - DNA, 25 bp, Artificial sequence  Extension Primer
  Primer
tcctccagcatcaacaactataaac

SEQ ID NO: 8007 - DNA, 25 bp, Artificial sequence  Extension Primer
  Primer
gccctaagtatttcaagtttcccag

SEQ ID NO: 8008 - DNA, 25 bp, Artificial sequence  Extension Primer
  Primer
cggcagccgaccaggctcccccatc

SEQ ID NO: 8009 - DNA, 25 bp, Artificial sequence  Extension Primer
  Primer
accacatcratgcctrtttactaac

SEQ ID NO: 8010 - DNA, 25 bp, Artificial sequence  Extension Primer
  Primer
ccataaagctgattacaatactttc

SEQ ID NO: 8011 - DNA, 25 bp, Artificial sequence  Extension Primer
  Primer
gctcctaaggctgccctgggcagac

SEQ ID NO: 8012 - DNA, 25 bp, Artificial sequence  Extension Primer
  Primer
aaaagagtcagycagacaaaactta

SEQ ID NO: 8013 - DNA, 25 bp, Artificial sequence  Extension Primer
  Primer
ctgctttggatcggtattgttcctg

SEQ ID NO: 8014 - DNA, 25 bp, Artificial sequence  Extension Primer
  Primer
ttagccccaggtctcggcacacaag

SEQ ID NO: 8015 - DNA, 25 bp, Artificial sequence  Extension Primer
  Primer
tattggggcccgatttcatccatgc

SEQ ID NO: 8016 - DNA, 25 bp, Artificial sequence  Extension Primer
  Primer
tctggaggactggaactccgcatat

SEQ ID NO: 8017 - DNA, 25 bp, Artificial sequence  Extension Primer
  Primer
ggtccacatttttaaaatgtcttgt

SEQ ID NO: 8018 - DNA, 25 bp, Artificial sequence  Extension Primer
  Primer
gcttcggaaagtgccatcagcactc

SEQ ID NO: 8019 - DNA, 25 bp, Artificial sequence  Extension Primer
  Primer
tagaaaaaaggaatgcctcaaatgc

SEQ ID NO: 8020 - DNA, 25 bp, Artificial sequence  Extension Primer
  Primer
tttttcttatcgtttgctaaaaatt

SEQ ID NO: 8021 - DNA, 25 bp, Artificial sequence  Extension Primer
  Primer
ccactttcttcttggctccctttct

SEQ ID NO: 8022 - DNA, 25 bp, Artificial sequence  Extension Primer
  Primer
tccagaaactgcccaaaataaacac

SEQ ID NO: 8023 - DNA, 25 bp, Artificial sequence  Extension Primer
  Primer
attaattatctactcgttacccatt

SEQ ID NO: 8024 - DNA, 25 bp, Artificial sequence  Extension Primer
  Primer
attgtgagatgtgaggtgatgtaaa

SEQ ID NO: 8025 - DNA, 25 bp, Artificial sequence  Extension Primer
  Primer
tgcaaaatttaagaaaggccccaaa

SEQ ID NO: 8026 - DNA, 25 bp, Artificial sequence  Extension Primer
  Primer
taaatcagtcctaagccattttccc

SEQ ID NO: 8027 - DNA, 25 bp, Artificial sequence  Extension Primer
  Primer
aatgtattgtctctcaattatgaat

SEQ ID NO: 8028 - DNA, 25 bp, Artificial sequence  Extension Primer
  Primer
ggtgaagcaaggaaagattacaaag

SEQ ID NO: 8029 - DNA, 25 bp, Artificial sequence  Extension Primer
  Primer
agtccagcatagttaattattgaga

SEQ ID NO: 8030 - DNA, 25 bp, Artificial sequence  Extension Primer
  Primer
taaaagatttagctggtagttatag

SEQ ID NO: 8031 - DNA, 25 bp, Artificial sequence  Extension Primer
  Primer
acagtttctcctcttagaagcaggg

SEQ ID NO: 8032 - DNA, 25 bp, Artificial sequence  Extension Primer
  Primer
aaagacacaatttcatactctacta

SEQ ID NO: 8033 - DNA, 25 bp, Artificial sequence  Extension Primer
  Primer
tctcacattgaaaaaccctttgact

SEQ ID NO: 8034 - DNA, 25 bp, Artificial sequence  Extension Primer
  Primer
aaaaatgccaatcacacaaattaca

SEQ ID NO: 8035 - DNA, 25 bp, Artificial sequence  Extension Primer
  Primer
caaactaaggtcctaagacaatagc

SEQ ID NO: 8036 - DNA, 25 bp, Artificial sequence  Extension Primer
  Primer
aaatttctaataattcctgagtaat

SEQ ID NO: 8037 - DNA, 25 bp, Artificial sequence  Extension Primer
  Primer
ccagatggcgcacgcatgctaaatc

SEQ ID NO: 8038 - DNA, 25 bp, Artificial sequence  Extension Primer
  Primer
catcacaactttctttgttatcatt

SEQ ID NO: 8039 - DNA, 25 bp, Artificial sequence  Extension Primer
  Primer
catggctcagtggaattagctgtac

SEQ ID NO: 8040 - DNA, 25 bp, Artificial sequence  Extension Primer
  Primer
tttatagtggctttttttatattca

SEQ ID NO: 8041 - DNA, 25 bp, Artificial sequence  Extension Primer
  Primer
gtagtaagtccccaagtcatacctg

SEQ ID NO: 8042 - DNA, 25 bp, Artificial sequence  Extension Primer
  Primer
gcatatgttccagtaagccttcttc

SEQ ID NO: 8043 - DNA, 25 bp, Artificial sequence  Extension Primer
  Primer
taaccatgttctttatttagtcctt

SEQ ID NO: 8044 - DNA, 25 bp, Artificial sequence  Extension Primer
  Primer
agagatgtcgraaagtgagccaaag

SEQ ID NO: 8045 - DNA, 25 bp, Artificial sequence  Extension Primer
  Primer
taagacatttcctgatcttatttgt

SEQ ID NO: 8046 - DNA, 25 bp, Artificial sequence  Extension Primer
  Primer
tagctctctctgttttgtgtccatt

SEQ ID NO: 8047 - DNA, 25 bp, Artificial sequence  Extension Primer
  Primer
ttgaagtcaaccagtggaccaccag

SEQ ID NO: 8048 - DNA, 25 bp, Artificial sequence  Extension Primer
  Primer
gagaagaggtcacaccaaccagtca

SEQ ID NO: 8049 - DNA, 25 bp, Artificial sequence  Extension Primer
  Primer
gcagttctgtctctgggatttttat

SEQ ID NO: 8050 - DNA, 25 bp, Artificial sequence  Extension Primer
  Primer
tcaggcctttaatctaacttaattt

SEQ ID NO: 8051 - DNA, 25 bp, Artificial sequence  Extension Primer
  Primer
cactcaataacaatggctgccactt

SEQ ID NO: 8052 - DNA, 25 bp, Artificial sequence  Extension Primer
  Primer
atccagttcttacggactgtcccct

SEQ ID NO: 8053 - DNA, 25 bp, Artificial sequence  Extension Primer
  Primer
aatgatactattgtaatatcaattc

SEQ ID NO: 8054 - DNA, 25 bp, Artificial sequence  Extension Primer
  Primer
ctttagcaaagggctatccattcat

SEQ ID NO: 8055 - DNA, 25 bp, Artificial sequence  Extension Primer
  Primer
ttctctacttagcacctaaccacca

SEQ ID NO: 8056 - DNA, 25 bp, Artificial sequence  Extension Primer
  Primer
tagcagcttcagcctgtgggtttgc

SEQ ID NO: 8057 - DNA, 25 bp, Artificial sequence  Extension Primer
  Primer
gctccatgatgacgacaacagtagt

SEQ ID NO: 8058 - DNA, 25 bp, Artificial sequence  Extension Primer
  Primer
gtgaaaattatataaaattcaaatt

SEQ ID NO: 8059 - DNA, 25 bp, Artificial sequence  Extension Primer
  Primer
tctttatatcagtaaatagctgtga

SEQ ID NO: 8060 - DNA, 25 bp, Artificial sequence  Extension Primer
  Primer
tctttctayatgagaataaagtctg

SEQ ID NO: 8061 - DNA, 25 bp, Artificial sequence  Extension Primer
  Primer
agtgggccacatttggcctgcagac

SEQ ID NO: 8062 - DNA, 25 bp, Artificial sequence  Extension Primer
  Primer
ggtactggagctcctccgagcccac

SEQ ID NO: 8063 - DNA, 25 bp, Artificial sequence  Extension Primer
  Primer
aggctctttccgttattttactaac

SEQ ID NO: 8064 - DNA, 25 bp, Artificial sequence  Extension Primer
  Primer
tatccattttcaataccaggctcta

SEQ ID NO: 8065 - DNA, 25 bp, Artificial sequence  Extension Primer
  Primer
ctctgcagcaccacgtccccctggg

SEQ ID NO: 8066 - DNA, 25 bp, Artificial sequence  Extension Primer
  Primer
ttctttctgcctgatgctaaacttc

SEQ ID NO: 8067 - DNA, 25 bp, Artificial sequence  Extension Primer
  Primer
gacagcttaagcaacttgcccaaaa

SEQ ID NO: 8068 - DNA, 25 bp, Artificial sequence  Extension Primer
  Primer
ctttttaaaaggagagtattttgat

SEQ ID NO: 8069 - DNA, 25 bp, Artificial sequence  Extension Primer
  Primer
aatgacataacaaaggtaaagcact

SEQ ID NO: 8070 - DNA, 25 bp, Artificial sequence  Extension Primer
  Primer
agctgctgcgcttggcaccctcccc

SEQ ID NO: 8071 - DNA, 25 bp, Artificial sequence  Extension Primer
  Primer
aaagaaagttcagatttgtctacac

SEQ ID NO: 8072 - DNA, 25 bp, Artificial sequence  Extension Primer
  Primer
acacaacttgaccgttccaaaagst

SEQ ID NO: 8073 - DNA, 25 bp, Artificial sequence  Extension Primer
  Primer
tcagtgtctgccctttccaaggagc

SEQ ID NO: 8074 - DNA, 25 bp, Artificial sequence  Extension Primer
  Primer
ggagcttctgctcttgaacacgtgg

SEQ ID NO: 8075 - DNA, 25 bp, Artificial sequence  Extension Primer
  Primer
ggttggaggccccctccttgtcaag

SEQ ID NO: 8076 - DNA, 25 bp, Artificial sequence  Extension Primer
  Primer
ttcaatcagagtaatgaaggaaaaa

SEQ ID NO: 8077 - DNA, 25 bp, Artificial sequence  Extension Primer
  Primer
ctaaaagaacttttcctttaatgtg

SEQ ID NO: 8078 - DNA, 25 bp, Artificial sequence  Extension Primer
  Primer
gaatgyattattattccattttact

SEQ ID NO: 8079 - DNA, 25 bp, Artificial sequence  Extension Primer
  Primer
gtaaataaggtggtaagtaataygg

SEQ ID NO: 8080 - DNA, 25 bp, Artificial sequence  Extension Primer
  Primer
cctgctatcttgtttttattttact

SEQ ID NO: 8081 - DNA, 25 bp, Artificial sequence  Extension Primer
  Primer
gacaaacagtatcaaacaataagac

SEQ ID NO: 8082 - DNA, 25 bp, Artificial sequence  Extension Primer
  Primer
ctttgaaagtctccttctccactta

SEQ ID NO: 8083 - DNA, 25 bp, Artificial sequence  Extension Primer
  Primer
attcaaggaatattctaaacratta

SEQ ID NO: 8084 - DNA, 25 bp, Artificial sequence  Extension Primer
  Primer
gatctctgctgagcccctgtgtgyt

SEQ ID NO: 8085 - DNA, 25 bp, Artificial sequence  Extension Primer
  Primer
aaatctacatgccaagattttattc

SEQ ID NO: 8086 - DNA, 25 bp, Artificial sequence  Extension Primer
  Primer
gtttgaatcttcgttccaccattca

SEQ ID NO: 8087 - DNA, 25 bp, Artificial sequence  Extension Primer
  Primer
gcggctgtgcgctgggggctcactc

SEQ ID NO: 8088 - DNA, 25 bp, Artificial sequence  Extension Primer
  Primer
gttttgcaatgtccatcagcatctc

SEQ ID NO: 8089 - DNA, 25 bp, Artificial sequence  Extension Primer
  Primer
aattgccatatttataaattctgtt

SEQ ID NO: 8090 - DNA, 25 bp, Artificial sequence  Extension Primer
  Primer
gttttgcgatattttttttaccaag

SEQ ID NO: 8091 - DNA, 25 bp, Artificial sequence  Extension Primer
  Primer
tttcacgatgcctgaggcctgataa

SEQ ID NO: 8092 - DNA, 25 bp, Artificial sequence  Extension Primer
  Primer
cagatcagctctttaaaagctggga

SEQ ID NO: 8093 - DNA, 25 bp, Artificial sequence  Extension Primer
  Primer
agtctgggatcctccctggagacct

SEQ ID NO: 8094 - DNA, 25 bp, Artificial sequence  Extension Primer
  Primer
gagtgtcatttgattgggtctgtgc

SEQ ID NO: 8095 - DNA, 25 bp, Artificial sequence  Extension Primer
  Primer
tgggaagcttgagggctccgagtca

SEQ ID NO: 8096 - DNA, 25 bp, Artificial sequence  Extension Primer
  Primer
tatattttgcttctaggcaagcatc

SEQ ID NO: 8097 - DNA, 25 bp, Artificial sequence  Extension Primer
  Primer
agaagaggtcacaccaaccagtcay

SEQ ID NO: 8098 - DNA, 25 bp, Artificial sequence  Extension Primer
  Primer
ttaaggatgactgaagatccaagga

SEQ ID NO: 8099 - DNA, 25 bp, Artificial sequence  Extension Primer
  Primer
caagtgttataacaaagtgaggctc

SEQ ID NO: 8100 - DNA, 25 bp, Artificial sequence  Extension Primer
  Primer
ctgggctttgcatgttgagggcatc

SEQ ID NO: 8101 - DNA, 25 bp, Artificial sequence  Extension Primer
  Primer
ctgagcaaagttgctagccagaatc

SEQ ID NO: 8102 - DNA, 25 bp, Artificial sequence  Extension Primer
  Primer
tctcctaaaatgtgaacattatttc

SEQ ID NO: 8103 - DNA, 25 bp, Artificial sequence  Extension Primer
  Primer
ctcatatttcacatttggttatagc

SEQ ID NO: 8104 - DNA, 25 bp, Artificial sequence  Extension Primer
  Primer
tgaacacctgtgcatgaagcagtgc

SEQ ID NO: 8105 - DNA, 25 bp, Artificial sequence  Extension Primer
  Primer
tcagttaaacttcagcatgacttct

SEQ ID NO: 8106 - DNA, 25 bp, Artificial sequence  Extension Primer
  Primer
tagatccttgagtggaagctattta

SEQ ID NO: 8107 - DNA, 25 bp, Artificial sequence  Extension Primer
  Primer
ctaaaaatgtcccttasatgtaaca

SEQ ID NO: 8108 - DNA, 25 bp, Artificial sequence  Extension Primer
  Primer
tgttagtgcaaaatgcttctgtacc

SEQ ID NO: 8109 - DNA, 25 bp, Artificial sequence  Extension Primer
  Primer
gatgtttggtgtttcctgggagatc

SEQ ID NO: 8110 - DNA, 25 bp, Artificial sequence  Extension Primer
  Primer
aaaggtatgcactgtcccagactta

SEQ ID NO: 8111 - DNA, 25 bp, Artificial sequence  Extension Primer
  Primer
ccctggagaccagctgcagcaagga

SEQ ID NO: 8112 - DNA, 25 bp, Artificial sequence  Extension Primer
  Primer
cctctgcaacagagacttgtcttga

SEQ ID NO: 8113 - DNA, 25 bp, Artificial sequence  Extension Primer
  Primer
tccgtgatgccacacacaggagaac

SEQ ID NO: 8114 - DNA, 25 bp, Artificial sequence  Extension Primer
  Primer
tcttttgtttaactgtttctaagga

SEQ ID NO: 8115 - DNA, 25 bp, Artificial sequence  Extension Primer
  Primer
gtgggtctacccaggacaatcacac

SEQ ID NO: 8116 - DNA, 25 bp, Artificial sequence  Extension Primer
  Primer
tcccctgaccttttctttacagcat

SEQ ID NO: 8117 - DNA, 25 bp, Artificial sequence  Extension Primer
  Primer
gcccttgtttggcagctggtgataa

SEQ ID NO: 8118 - DNA, 22 bp, Artificial sequence  Extension Primer
  Primer
tagtcctaataataaccaaatg

SEQ ID NO: 8119 - DNA, 25 bp, Artificial sequence  Extension Primer
  Primer
caatgagtctgttgattgcaaagta

SEQ ID NO: 8120 - DNA, 25 bp, Artificial sequence  Extension Primer
  Primer
ttcagtatccgtggctctcatgtcc

SEQ ID NO: 8121 - DNA, 25 bp, Artificial sequence  Extension Primer
  Primer
accttgagtcttcagaaaagaagca

SEQ ID NO: 8122 - DNA, 25 bp, Artificial sequence  Extension Primer
  Primer
ctctatgaaaccatagattaatgat

SEQ ID NO: 8123 - DNA, 25 bp, Artificial sequence  Extension Primer
  Primer
gattggtggagaggggctctcactt

SEQ ID NO: 8124 - DNA, 25 bp, Artificial sequence  Extension Primer
  Primer
acagaataatgtttaagagcacagc

SEQ ID NO: 8125 - DNA, 25 bp, Artificial sequence  Extension Primer
  Primer
cacttgaggatgatcacggaactcc

SEQ ID NO: 8126 - DNA, 25 bp, Artificial sequence  Extension Primer
  Primer
aggtgaaacatttcctgttttgcta

SEQ ID NO: 8127 - DNA, 25 bp, Artificial sequence  Extension Primer
  Primer
aggcycagagattcagataactcay

SEQ ID NO: 8128 - DNA, 25 bp, Artificial sequence  Extension Primer
  Primer
ctctgtgacgggaaggtcgggagaa

SEQ ID NO: 8129 - DNA, 25 bp, Artificial sequence  Extension Primer
  Primer
caactgtgtcgaaagatggaagtta

SEQ ID NO: 8130 - DNA, 25 bp, Artificial sequence  Extension Primer
  Primer
agccctcagataggtttatcaccaa

SEQ ID NO: 8131 - DNA, 25 bp, Artificial sequence  Extension Primer
  Primer
caatagaagcaacccctccataccc

SEQ ID NO: 8132 - DNA, 25 bp, Artificial sequence  Extension Primer
  Primer
ccagaaagtaatatggtatgagaac

SEQ ID NO: 8133 - DNA, 25 bp, Artificial sequence  Extension Primer
  Primer
acaggaaagctatccaaggactgag

SEQ ID NO: 8134 - DNA, 25 bp, Artificial sequence  Extension Primer
  Primer
cagyagagccaggggcaagagggga

SEQ ID NO: 8135 - DNA, 25 bp, Artificial sequence  Extension Primer
  Primer
ccagaggagacaccttatgccccta

SEQ ID NO: 8136 - DNA, 25 bp, Artificial sequence  Extension Primer
  Primer
agaaccgttagttttcatttcattg

SEQ ID NO: 8137 - DNA, 25 bp, Artificial sequence  Extension Primer
  Primer
acctccccggcttccccatctcact

SEQ ID NO: 8138 - DNA, 25 bp, Artificial sequence  Extension Primer
  Primer
atatttttcctctctgtttctacaa

SEQ ID NO: 8139 - DNA, 25 bp, Artificial sequence  Extension Primer
  Primer
aaatattttgccccaatattttgcc

SEQ ID NO: 8140 - DNA, 25 bp, Artificial sequence  Extension Primer
  Primer
taactgtaggtttaatgtggtctca

SEQ ID NO: 8141 - DNA, 25 bp, Artificial sequence  Extension Primer
  Primer
acatgatcagctaacaaggcaccgt

SEQ ID NO: 8142 - DNA, 25 bp, Artificial sequence  Extension Primer
  Primer
gacagaggtgcttaccaggagaata

SEQ ID NO: 8143 - DNA, 25 bp, Artificial sequence  Extension Primer
  Primer
aaagcaaactytaaattaacctgaa

SEQ ID NO: 8144 - DNA, 25 bp, Artificial sequence  Extension Primer
  Primer
acccatcatattcacagattattcc

SEQ ID NO: 8145 - DNA, 25 bp, Artificial sequence  Extension Primer
  Primer
aagcacgaatgttgtccacacccta

SEQ ID NO: 8146 - DNA, 25 bp, Artificial sequence  Extension Primer
  Primer
ctttatttattcaactgacctctaa

SEQ ID NO: 8147 - DNA, 25 bp, Artificial sequence  Extension Primer
  Primer
atcagatttacagcaaatacaaaaa

SEQ ID NO: 8148 - DNA, 25 bp, Artificial sequence  Extension Primer
  Primer
ccagcgtgttctgaagagcaccagg

SEQ ID NO: 8149 - DNA, 22 bp, Artificial sequence  Extension Primer
  Primer
tttggattgggaagacttattt

SEQ ID NO: 8150 - DNA, 25 bp, Artificial sequence  Extension Primer
  Primer
taaaaaccttctgcgttcatccctt

SEQ ID NO: 8151 - DNA, 25 bp, Artificial sequence  Extension Primer
  Primer
gttgcagaggttggacaataataca

SEQ ID NO: 8152 - DNA, 25 bp, Artificial sequence  Extension Primer
  Primer
aaaacgactttaagtgtattggttg

SEQ ID NO: 8153 - DNA, 25 bp, Artificial sequence  Extension Primer
  Primer
gagatttcaactgaattgagaagct

SEQ ID NO: 8154 - DNA, 25 bp, Artificial sequence  Extension Primer
  Primer
gtagcttttcatgaacgtactatgt

SEQ ID NO: 8155 - DNA, 25 bp, Artificial sequence  Extension Primer
  Primer
atccttagtgaacactgagctttgc

SEQ ID NO: 8156 - DNA, 25 bp, Artificial sequence  Extension Primer
  Primer
ggatgaagacgagggatggagtgac

SEQ ID NO: 8157 - DNA, 25 bp, Artificial sequence  Extension Primer
  Primer
aatgttgataagaatactaaatagg

SEQ ID NO: 8158 - DNA, 25 bp, Artificial sequence  Extension Primer
  Primer
ctttgcaccatgatcaggccaaggc

SEQ ID NO: 8159 - DNA, 25 bp, Artificial sequence  Extension Primer
  Primer
atcaaccatgctacttgccactgta

SEQ ID NO: 8160 - DNA, 25 bp, Artificial sequence  Extension Primer
  Primer
ttattctttcctcaaatgcattatc

SEQ ID NO: 8161 - DNA, 25 bp, Artificial sequence  Extension Primer
  Primer
aaaaactgtgaaaatatgttgtatc

SEQ ID NO: 8162 - DNA, 25 bp, Artificial sequence  Extension Primer
  Primer
aatttgtagaattaaacataaactt

SEQ ID NO: 8163 - DNA, 25 bp, Artificial sequence  Extension Primer
  Primer
ctccactgcctgaatgtctccactt

SEQ ID NO: 8164 - DNA, 25 bp, Artificial sequence  Extension Primer
  Primer
gcaatattcaaggaatattctaaac

SEQ ID NO: 8165 - DNA, 25 bp, Artificial sequence  Extension Primer
  Primer
ctcacaaaggaccccaagttctaaa

SEQ ID NO: 8166 - DNA, 25 bp, Artificial sequence  Extension Primer
  Primer
gaatggcccgaaggcagagacacga

SEQ ID NO: 8167 - DNA, 25 bp, Artificial sequence  Extension Primer
  Primer
ctaacaaatgacattttcattggta

SEQ ID NO: 8168 - DNA, 25 bp, Artificial sequence  Extension Primer
  Primer
agcaacatctccagccttttaaatg

SEQ ID NO: 8169 - DNA, 25 bp, Artificial sequence  Extension Primer
  Primer
gcaggagggtcatatgggaactgct

SEQ ID NO: 8170 - DNA, 25 bp, Artificial sequence  Extension Primer
  Primer
gactctcctcttaactttcctatat

SEQ ID NO: 8171 - DNA, 25 bp, Artificial sequence  Extension Primer
  Primer
cctaaattataacattttgattttg

SEQ ID NO: 8172 - DNA, 25 bp, Artificial sequence  Extension Primer
  Primer
gtttggaacccttttctcctcaccc

SEQ ID NO: 8173 - DNA, 25 bp, Artificial sequence  Extension Primer
  Primer
cgtggtgtcagcttccgcatgcctt

SEQ ID NO: 8174 - DNA, 25 bp, Artificial sequence  Extension Primer
  Primer
gtattgtaaaaggaaaaggaagagg

SEQ ID NO: 8175 - DNA, 25 bp, Artificial sequence  Extension Primer
  Primer
ttattgctctatggatagttggtca

SEQ ID NO: 8176 - DNA, 25 bp, Artificial sequence  Extension Primer
  Primer
gaaacattcatttatcaatcttcct

SEQ ID NO: 8177 - DNA, 25 bp, Artificial sequence  Extension Primer
  Primer
tgacaccactgagctccgaggcagc

SEQ ID NO: 8178 - DNA, 25 bp, Artificial sequence  Extension Primer
  Primer
gattgtacttgagggcttattatga

SEQ ID NO: 8179 - DNA, 25 bp, Artificial sequence  Extension Primer
  Primer
agtaagtggaatttacattaatttt

SEQ ID NO: 8180 - DNA, 25 bp, Artificial sequence  Extension Primer
  Primer
tgcaaggaaaaaggcagggggcata

SEQ ID NO: 8181 - DNA, 25 bp, Artificial sequence  Extension Primer
  Primer
agtaaactcgaggtgtgtcgtccac

SEQ ID NO: 8182 - DNA, 25 bp, Artificial sequence  Extension Primer
  Primer
catgactgaagtctcagttgtaaac

SEQ ID NO: 8183 - DNA, 25 bp, Artificial sequence  Extension Primer
  Primer
gaacatggaccgggtcaaactccag

SEQ ID NO: 8184 - DNA, 25 bp, Artificial sequence  Extension Primer
  Primer
accatggcaggagagagcaaggctg

SEQ ID NO: 8185 - DNA, 25 bp, Artificial sequence  Extension Primer
  Primer
aaagtttcctctggacaacctagct

SEQ ID NO: 8186 - DNA, 25 bp, Artificial sequence  Extension Primer
  Primer
acactttcagtatggttcttcttag

SEQ ID NO: 8187 - DNA, 25 bp, Artificial sequence  Extension Primer
  Primer
tataagttcaaatgcttagatactt

SEQ ID NO: 8188 - DNA, 25 bp, Artificial sequence  Extension Primer
  Primer
tgggactttggacttggggaccctt

SEQ ID NO: 8189 - DNA, 25 bp, Artificial sequence  Extension Primer
  Primer
cccagatcaccatgttatcctctgc

SEQ ID NO: 8190 - DNA, 25 bp, Artificial sequence  Extension Primer
  Primer
gaaatggagttttgacttggcttaa

SEQ ID NO: 8191 - DNA, 25 bp, Artificial sequence  Extension Primer
  Primer
aagagaagcagggtgaacaaagtrc

SEQ ID NO: 8192 - DNA, 25 bp, Artificial sequence  Extension Primer
  Primer
aatagaagaggcagtgatgctctca

SEQ ID NO: 8193 - DNA, 25 bp, Artificial sequence  Extension Primer
  Primer
tatttcatattcggtctctgtaact

SEQ ID NO: 8194 - DNA, 25 bp, Artificial sequence  Extension Primer
  Primer
ctgacatgaccatcacagacagacg

SEQ ID NO: 8195 - DNA, 25 bp, Artificial sequence  Extension Primer
  Primer
ctattataccataaaaatgtcaagg

SEQ ID NO: 8196 - DNA, 25 bp, Artificial sequence  Extension Primer
  Primer
agtacatctcattttactgtttttg

SEQ ID NO: 8197 - DNA, 25 bp, Artificial sequence  Extension Primer
  Primer
tgaacctgaggcctcagcagtgaaa

SEQ ID NO: 8198 - DNA, 25 bp, Artificial sequence  Extension Primer
  Primer
acacagacacaccccgtggtcactg

SEQ ID NO: 8199 - DNA, 25 bp, Artificial sequence  Extension Primer
  Primer
cgaattaaaaaccaaaaaactgacc

SEQ ID NO: 8200 - DNA, 25 bp, Artificial sequence  Extension Primer
  Primer
aaaatgtcactggtaatatctgaag

SEQ ID NO: 8201 - DNA, 25 bp, Artificial sequence  Extension Primer
  Primer
gtgggaaattgtccgtcctccaaaa

SEQ ID NO: 8202 - DNA, 25 bp, Artificial sequence  Extension Primer
  Primer
ttttgaatcagtgagaaatttggga

SEQ ID NO: 8203 - DNA, 25 bp, Artificial sequence  Extension Primer
  Primer
acatacagatggtgaagcgcaccct

SEQ ID NO: 8204 - DNA, 22 bp, Artificial sequence  Extension Primer
  Primer
agggttcagaagcaaatcccaa

SEQ ID NO: 8205 - DNA, 25 bp, Artificial sequence  Extension Primer
  Primer
gaggctccctcctgcttgggtcttt

SEQ ID NO: 8206 - DNA, 25 bp, Artificial sequence  Extension Primer
  Primer
tttcacagcrgtcccacagagttta

SEQ ID NO: 8207 - DNA, 25 bp, Artificial sequence  Extension Primer
  Primer
agtggctaccattcattgaggcagc

SEQ ID NO: 8208 - DNA, 25 bp, Artificial sequence  Extension Primer
  Primer
cctttcaactaggtcctctacccat

SEQ ID NO: 8209 - DNA, 25 bp, Artificial sequence  Extension Primer
  Primer
tctccaagcacctatgtgcatgaca

SEQ ID NO: 8210 - DNA, 25 bp, Artificial sequence  Extension Primer
  Primer
ccatgttaaagcagcataaaaccag

SEQ ID NO: 8211 - DNA, 25 bp, Artificial sequence  Extension Primer
  Primer
ggttatacattctttcatacttaca

SEQ ID NO: 8212 - DNA, 25 bp, Artificial sequence  Extension Primer
  Primer
ccattatatttgtcctcttgtgaaa

SEQ ID NO: 8213 - DNA, 25 bp, Artificial sequence  Extension Primer
  Primer
agccctctgtttcactctgtaccat

SEQ ID NO: 8214 - DNA, 25 bp, Artificial sequence  Extension Primer
  Primer
tatggaacagctccgaggatctgcc

SEQ ID NO: 8215 - DNA, 25 bp, Artificial sequence  Extension Primer
  Primer
gattgacacctaactcaagattaca

SEQ ID NO: 8216 - DNA, 25 bp, Artificial sequence  Extension Primer
  Primer
aacctgccttacagtgcaggggatg

SEQ ID NO: 8217 - DNA, 25 bp, Artificial sequence  Extension Primer
  Primer
aactgtttaatgaaatggggagatg

SEQ ID NO: 8218 - DNA, 25 bp, Artificial sequence  Extension Primer
  Primer
ggagttgtgagaataggtccattta

SEQ ID NO: 8219 - DNA, 25 bp, Artificial sequence  Extension Primer
  Primer
gagaaaagtatcaggaaaaaaarac

SEQ ID NO: 8220 - DNA, 25 bp, Artificial sequence  Extension Primer
  Primer
gaagcctattaattgaagcctctct

SEQ ID NO: 8221 - DNA, 25 bp, Artificial sequence  Extension Primer
  Primer
ggcacgtgracacacaccgagggaa

SEQ ID NO: 8222 - DNA, 25 bp, Artificial sequence  Extension Primer
  Primer
acaggccgggatgggaggggctgct

SEQ ID NO: 8223 - DNA, 25 bp, Artificial sequence  Extension Primer
  Primer
aggacsggaatggcataagatgaat

SEQ ID NO: 8224 - DNA, 25 bp, Artificial sequence  Extension Primer
  Primer
ttctctggcacctcaagtgctctgt

SEQ ID NO: 8225 - DNA, 25 bp, Artificial sequence  Extension Primer
  Primer
acggagttgatgatayacctcaaac

SEQ ID NO: 8226 - DNA, 25 bp, Artificial sequence  Extension Primer
  Primer
ttctgatgtgtaatgcatttaaagg

SEQ ID NO: 8227 - DNA, 25 bp, Artificial sequence  Extension Primer
  Primer
taaaatgtcttgtyaggtatgggaa

SEQ ID NO: 8228 - DNA, 25 bp, Artificial sequence  Extension Primer
  Primer
tccactttagtggcctgataaccca

SEQ ID NO: 8229 - DNA, 25 bp, Artificial sequence  Extension Primer
  Primer
tattttgattctggcttttaatact

SEQ ID NO: 8230 - DNA, 25 bp, Artificial sequence  Extension Primer
  Primer
tagagaagaaagacacyctccccga

SEQ ID NO: 8231 - DNA, 25 bp, Artificial sequence  Extension Primer
  Primer
ctagtgaacagccagccacttgctt

SEQ ID NO: 8232 - DNA, 25 bp, Artificial sequence  Extension Primer
  Primer
ttgcattttgtaaagcccacacttt

SEQ ID NO: 8233 - DNA, 25 bp, Artificial sequence  Extension Primer
  Primer
caaaacttgtgttactcaaaattat

SEQ ID NO: 8234 - DNA, 25 bp, Artificial sequence  Extension Primer
  Primer
ttcctctttcatctctcctaaaaaa

SEQ ID NO: 8235 - DNA, 25 bp, Artificial sequence  Extension Primer
  Primer
tctgagatagaccttgtacctgcac

SEQ ID NO: 8236 - DNA, 25 bp, Artificial sequence  Extension Primer
  Primer
ggggaaacataaccctaaattggac

SEQ ID NO: 8237 - DNA, 25 bp, Artificial sequence  Extension Primer
  Primer
caggctacaccatgggacacttctt

SEQ ID NO: 8238 - DNA, 25 bp, Artificial sequence  Extension Primer
  Primer
aaggttagctagaagcaaackgtta

SEQ ID NO: 8239 - DNA, 25 bp, Artificial sequence  Extension Primer
  Primer
aatgtgacaaagcctttatccgttg

SEQ ID NO: 8240 - DNA, 25 bp, Artificial sequence  Extension Primer
  Primer
ytacttttttttttccttctaacta

SEQ ID NO: 8241 - DNA, 25 bp, Artificial sequence  Extension Primer
  Primer
tgaggcactaactagatagattctc

SEQ ID NO: 8242 - DNA, 25 bp, Artificial sequence  Extension Primer
  Primer
tagatccaggagcagacctttctca

SEQ ID NO: 8243 - DNA, 25 bp, Artificial sequence  Extension Primer
  Primer
aagcccacatgctctggagcaccca

SEQ ID NO: 8244 - DNA, 25 bp, Artificial sequence  Extension Primer
  Primer
ctcctcttagggccaaggagacttg

SEQ ID NO: 8245 - DNA, 25 bp, Artificial sequence  Extension Primer
  Primer
caagtaaatcaaacaacttgtcaac

SEQ ID NO: 8246 - DNA, 25 bp, Artificial sequence  Extension Primer
  Primer
caacatcagatccaacacagttatc

SEQ ID NO: 8247 - DNA, 25 bp, Artificial sequence  Extension Primer
  Primer
ttaaagtccatggggtcacaaaaga

SEQ ID NO: 8248 - DNA, 25 bp, Artificial sequence  Extension Primer
  Primer
gttggatttgttccagtgaatcaat

SEQ ID NO: 8249 - DNA, 25 bp, Artificial sequence  Extension Primer
  Primer
aatgaaatgtgatgacctttgaacg

SEQ ID NO: 8250 - DNA, 25 bp, Artificial sequence  Extension Primer
  Primer
actataaaatgccagacacataaga

SEQ ID NO: 8251 - DNA, 25 bp, Artificial sequence  Extension Primer
  Primer
aaagaagaaaaacacatagaagtgc

SEQ ID NO: 8252 - DNA, 25 bp, Artificial sequence  Extension Primer
  Primer
attttccaggcaagagtactggagt

SEQ ID NO: 8253 - DNA, 25 bp, Artificial sequence  Extension Primer
  Primer
ctttctgcctgatgctaaacttcrc

SEQ ID NO: 8254 - DNA, 25 bp, Artificial sequence  Extension Primer
  Primer
tttgaagcccctgtaacttagaact

SEQ ID NO: 8255 - DNA, 25 bp, Artificial sequence  Extension Primer
  Primer
agcgtggccacttctgaagaacaaa

SEQ ID NO: 8256 - DNA, 25 bp, Artificial sequence  Extension Primer
  Primer
caaggcccactaggggcgagtatgc

SEQ ID NO: 8257 - DNA, 25 bp, Artificial sequence  Extension Primer
  Primer
gaccttcctatatactctgcttggt

SEQ ID NO: 8258 - DNA, 25 bp, Artificial sequence  Extension Primer
  Primer
gatcaccactctaggttatctccac

SEQ ID NO: 8259 - DNA, 25 bp, Artificial sequence  Extension Primer
  Primer
tatttcagtgaatatggtagtctaa

SEQ ID NO: 8260 - DNA, 25 bp, Artificial sequence  Extension Primer
  Primer
tttgcaacagaagaatgggtacaga

SEQ ID NO: 8261 - DNA, 25 bp, Artificial sequence  Extension Primer
  Primer
gttgcccacaactgcctctgacctc

SEQ ID NO: 8262 - DNA, 25 bp, Artificial sequence  Extension Primer
  Primer
cacagctttctgtaaaaaagtagtt

SEQ ID NO: 8263 - DNA, 25 bp, Artificial sequence  Extension Primer
  Primer
aaatgcacagtaacttactgcagaa

SEQ ID NO: 8264 - DNA, 25 bp, Artificial sequence  Extension Primer
  Primer
gctatttcatttgaatatgtttttc

SEQ ID NO: 8265 - DNA, 25 bp, Artificial sequence  Extension Primer
  Primer
asttttcagttagaatcattcatct

SEQ ID NO: 8266 - DNA, 25 bp, Artificial sequence  Extension Primer
  Primer
ttttgtaagcagtggactaaaatat

SEQ ID NO: 8267 - DNA, 25 bp, Artificial sequence  Extension Primer
  Primer
tcttttgttggaaggcgtttaatag

SEQ ID NO: 8268 - DNA, 25 bp, Artificial sequence  Extension Primer
  Primer
atgccttgagcaatggaggatgctc

SEQ ID NO: 8269 - DNA, 25 bp, Artificial sequence  Extension Primer
  Primer
tttctgctttgtctttagagaatat

SEQ ID NO: 8270 - DNA, 25 bp, Artificial sequence  Extension Primer
  Primer
agaatgaactttttaagaggtatca

SEQ ID NO: 8271 - DNA, 25 bp, Artificial sequence  Extension Primer
  Primer
cttacctggtgaatagatatgaaag

SEQ ID NO: 8272 - DNA, 25 bp, Artificial sequence  Extension Primer
  Primer
tgcacacaagatggacacagttatc

SEQ ID NO: 8273 - DNA, 25 bp, Artificial sequence  Extension Primer
  Primer
gcttataacaccaccaggagaaact

SEQ ID NO: 8274 - DNA, 25 bp, Artificial sequence  Extension Primer
  Primer
gcatcccacgattcactgataggtc

SEQ ID NO: 8275 - DNA, 25 bp, Artificial sequence  Extension Primer
  Primer
gctggaggccacaaaaagaaatctt

SEQ ID NO: 8276 - DNA, 22 bp, Artificial sequence  Extension Primer
  Primer
gaccaaccccaagrgatggtgg

SEQ ID NO: 8277 - DNA, 25 bp, Artificial sequence  Extension Primer
  Primer
agctttgtaattctcttttatctac

SEQ ID NO: 8278 - DNA, 25 bp, Artificial sequence  Extension Primer
  Primer
cgcatctgcgtctctgctgcccaga

SEQ ID NO: 8279 - DNA, 25 bp, Artificial sequence  Extension Primer
  Primer
ccctgcgtggggtgaagcctgagga

SEQ ID NO: 8280 - DNA, 25 bp, Artificial sequence  Extension Primer
  Primer
ataattttacctctaactacgcctt

SEQ ID NO: 8281 - DNA, 25 bp, Artificial sequence  Extension Primer
  Primer
aaacaaaatgccattatgatttcta

SEQ ID NO: 8282 - DNA, 25 bp, Artificial sequence  Extension Primer
  Primer
tatcacctgccagaattagggaaga

SEQ ID NO: 8283 - DNA, 25 bp, Artificial sequence  Extension Primer
  Primer
agtccacaggttgaaaatgtgagag

SEQ ID NO: 8284 - DNA, 25 bp, Artificial sequence  Extension Primer
  Primer
aactgtaagatactaaaaggaaagc

SEQ ID NO: 8285 - DNA, 25 bp, Artificial sequence  Extension Primer
  Primer
caatgcatcaactgtcagaagagtc

SEQ ID NO: 8286 - DNA, 25 bp, Artificial sequence  Extension Primer
  Primer
tctayaccayacataggctcccacc

SEQ ID NO: 8287 - DNA, 25 bp, Artificial sequence  Extension Primer
  Primer
ccttaaaaattgctcagtgcttagg

SEQ ID NO: 8288 - DNA, 25 bp, Artificial sequence  Extension Primer
  Primer
agtctcagaattttctggcaacctc

SEQ ID NO: 8289 - DNA, 25 bp, Artificial sequence  Extension Primer
  Primer
ggggctgctgcctcttctgtcacag

SEQ ID NO: 8290 - DNA, 25 bp, Artificial sequence  Extension Primer
  Primer
aggtaaagtgcttgggaaagccctc

SEQ ID NO: 8291 - DNA, 25 bp, Artificial sequence  Extension Primer
  Primer
gaaagttaccacctccctgattctt

SEQ ID NO: 8292 - DNA, 25 bp, Artificial sequence  Extension Primer
  Primer
ttactacacttactcatctcagagt

SEQ ID NO: 8293 - DNA, 25 bp, Artificial sequence  Extension Primer
  Primer
taatttttcatcacgttatcactct

SEQ ID NO: 8294 - DNA, 25 bp, Artificial sequence  Extension Primer
  Primer
ggatgaacacaggaagcggctgatc

SEQ ID NO: 8295 - DNA, 25 bp, Artificial sequence  Extension Primer
  Primer
aaagccaggaaccagagcagagaga

SEQ ID NO: 8296 - DNA, 25 bp, Artificial sequence  Extension Primer
  Primer
tcagcatctcttgagctttttgagg

SEQ ID NO: 8297 - DNA, 25 bp, Artificial sequence  Extension Primer
  Primer
ccctttcactacgacaaggctgtga

SEQ ID NO: 8298 - DNA, 25 bp, Artificial sequence  Extension Primer
  Primer
gagcttagaaataagagttatacta

SEQ ID NO: 8299 - DNA, 25 bp, Artificial sequence  Extension Primer
  Primer
tcccaaagcagggtgcatctgtgag

SEQ ID NO: 8300 - DNA, 25 bp, Artificial sequence  Extension Primer
  Primer
gtcatatttctttccatacgacatg

SEQ ID NO: 8301 - DNA, 25 bp, Artificial sequence  Extension Primer
  Primer
acatgrgttttcatcttatttcccc

SEQ ID NO: 8302 - DNA, 25 bp, Artificial sequence  Extension Primer
  Primer
actgcatatcgtttagtttcccctc

SEQ ID NO: 8303 - DNA, 25 bp, Artificial sequence  Extension Primer
  Primer
tcagatatatgatttataaactttt

SEQ ID NO: 8304 - DNA, 25 bp, Artificial sequence  Extension Primer
  Primer
agaaaggctgacrctaaattcattt

SEQ ID NO: 8305 - DNA, 25 bp, Artificial sequence  Extension Primer
  Primer
aataatgtctggaacatgcctaaac

SEQ ID NO: 8306 - DNA, 25 bp, Artificial sequence  Extension Primer
  Primer
agcactttgtaattactgaattttc

SEQ ID NO: 8307 - DNA, 25 bp, Artificial sequence  Extension Primer
  Primer
ccaatgcctgcttaaccactgtgct

SEQ ID NO: 8308 - DNA, 25 bp, Artificial sequence  Extension Primer
  Primer
ttggggggaggggggtaagaaaagc

SEQ ID NO: 8309 - DNA, 25 bp, Artificial sequence  Extension Primer
  Primer
gcggaggaagaagacaggagagtgt

SEQ ID NO: 8310 - DNA, 25 bp, Artificial sequence  Extension Primer
  Primer
tggccctcatcctgtatcacacrcc

SEQ ID NO: 8311 - DNA, 25 bp, Artificial sequence  Extension Primer
  Primer
gcttgcttgtggtgtttggcactgg

SEQ ID NO: 8312 - DNA, 25 bp, Artificial sequence  Extension Primer
  Primer
aggtaacagaaatcagaacagcggc

SEQ ID NO: 8313 - DNA, 25 bp, Artificial sequence  Extension Primer
  Primer
aggaaacgaagctgacagataaagc

SEQ ID NO: 8314 - DNA, 25 bp, Artificial sequence  Extension Primer
  Primer
ccgtaaagcactcttcaagtggaag

SEQ ID NO: 8315 - DNA, 25 bp, Artificial sequence  Extension Primer
  Primer
ggaacatacttccaggggactgatc

SEQ ID NO: 8316 - DNA, 25 bp, Artificial sequence  Extension Primer
  Primer
caggctgatggaaagggtttagaca

SEQ ID NO: 8317 - DNA, 25 bp, Artificial sequence  Extension Primer
  Primer
tagaggtgatttaccattgagcatc

SEQ ID NO: 8318 - DNA, 25 bp, Artificial sequence  Extension Primer
  Primer
gaagccatgaccttgggcacccagy

SEQ ID NO: 8319 - DNA, 25 bp, Artificial sequence  Extension Primer
  Primer
tctctgtaaataaaaagctatragt

SEQ ID NO: 8320 - DNA, 25 bp, Artificial sequence  Extension Primer
  Primer
ctgtggtttcagcctgcacaatgaa

SEQ ID NO: 8321 - DNA, 25 bp, Artificial sequence  Extension Primer
  Primer
ttgtaactcatgggaaaaaggaaga

SEQ ID NO: 8322 - DNA, 25 bp, Artificial sequence  Extension Primer
  Primer
tatcttcttcatgggatgttctcca

SEQ ID NO: 8323 - DNA, 25 bp, Artificial sequence  Extension Primer
  Primer
gaggcycagagattcagataactca

SEQ ID NO: 8324 - DNA, 25 bp, Artificial sequence  Extension Primer
  Primer
cctgcctccagcttttgggccccgc

SEQ ID NO: 8325 - DNA, 25 bp, Artificial sequence  Extension Primer
  Primer
tcactgaataaacaagggtcattgg

SEQ ID NO: 8326 - DNA, 25 bp, Artificial sequence  Extension Primer
  Primer
attggrtaaaatatggtacattaga

SEQ ID NO: 8327 - DNA, 25 bp, Artificial sequence  Extension Primer
  Primer
tgaggatatcagctccctgtgaggc

SEQ ID NO: 8328 - DNA, 25 bp, Artificial sequence  Extension Primer
  Primer
catctttaggatatgatcttcccac

SEQ ID NO: 8329 - DNA, 25 bp, Artificial sequence  Extension Primer
  Primer
aatttgttattcccttctgtctctc

SEQ ID NO: 8330 - DNA, 25 bp, Artificial sequence  Extension Primer
  Primer
cattgccattttcttcaaaattctg

SEQ ID NO: 8331 - DNA, 25 bp, Artificial sequence  Extension Primer
  Primer
tagaaaaaatacaccccaactccaa

SEQ ID NO: 8332 - DNA, 25 bp, Artificial sequence  Extension Primer
  Primer
cttcacatgtgatacacagttaatg

SEQ ID NO: 8333 - DNA, 25 bp, Artificial sequence  Extension Primer
  Primer
gaagtcaagaccaaactgcccattw

SEQ ID NO: 8334 - DNA, 25 bp, Artificial sequence  Extension Primer
  Primer
aacagcagacagagaagtggactga

SEQ ID NO: 8335 - DNA, 25 bp, Artificial sequence  Extension Primer
  Primer
ctaaatgtcgggggagggggaggac

SEQ ID NO: 8336 - DNA, 25 bp, Artificial sequence  Extension Primer
  Primer
tgctgaatcaactcctatcttagtt

SEQ ID NO: 8337 - DNA, 25 bp, Artificial sequence  Extension Primer
  Primer
ctgaactttttatattctaagattc

SEQ ID NO: 8338 - DNA, 25 bp, Artificial sequence  Extension Primer
  Primer
caaggagaacaggcgcccctaaagc

SEQ ID NO: 8339 - DNA, 25 bp, Artificial sequence  Extension Primer
  Primer
caccggtgctacaaaatgttccttt

SEQ ID NO: 8340 - DNA, 25 bp, Artificial sequence  Extension Primer
  Primer
tttgtatacaatatttttacacata

SEQ ID NO: 8341 - DNA, 25 bp, Artificial sequence  Extension Primer
  Primer
ccaatattcttgcctgggaaatccc

SEQ ID NO: 8342 - DNA, 25 bp, Artificial sequence  Extension Primer
  Primer
ttatgttgccctctcttcctttgga

SEQ ID NO: 8343 - DNA, 25 bp, Artificial sequence  Extension Primer
  Primer
taaagggttagaaactagaaagaaa

SEQ ID NO: 8344 - DNA, 25 bp, Artificial sequence  Extension Primer
  Primer
gcattagccaagccaagatctgtat

SEQ ID NO: 8345 - DNA, 25 bp, Artificial sequence  Extension Primer
  Primer
gatgttctagaacaaaaatcacaat

SEQ ID NO: 8346 - DNA, 25 bp, Artificial sequence  Extension Primer
  Primer
gactcacaggttttcgtataaaata

SEQ ID NO: 8347 - DNA, 25 bp, Artificial sequence  Extension Primer
  Primer
cagtggcactagagaagaaagacac

SEQ ID NO: 8348 - DNA, 25 bp, Artificial sequence  Extension Primer
  Primer
ctcacttgcaaaacttaaccttgga

SEQ ID NO: 8349 - DNA, 25 bp, Artificial sequence  Extension Primer
  Primer
aaagatgtcttctaaagtggtagga

SEQ ID NO: 8350 - DNA, 25 bp, Artificial sequence  Extension Primer
  Primer
agcactgaataactgctggatgaat

SEQ ID NO: 8351 - DNA, 25 bp, Artificial sequence  Extension Primer
  Primer
tgagcttcttttggtcaatcttttt

SEQ ID NO: 8352 - DNA, 25 bp, Artificial sequence  Extension Primer
  Primer
cccttctgtaactattcaaactgat

SEQ ID NO: 8353 - DNA, 25 bp, Artificial sequence  Extension Primer
  Primer
caaatgaaaacctgctggaaaagga

SEQ ID NO: 8354 - DNA, 25 bp, Artificial sequence  Extension Primer
  Primer
tcaatcctcccaaaccctgtgagtc

SEQ ID NO: 8355 - DNA, 25 bp, Artificial sequence  Extension Primer
  Primer
taaatttatttagaacaatgtttct

SEQ ID NO: 8356 - DNA, 25 bp, Artificial sequence  Extension Primer
  Primer
ggggatgtgggaattctctccgtac

SEQ ID NO: 8357 - DNA, 25 bp, Artificial sequence  Extension Primer
  Primer
tctttccctcctctgcttcctgccc

SEQ ID NO: 8358 - DNA, 25 bp, Artificial sequence  Extension Primer
  Primer
aatgtgaatgtcaaaaatgcccttt

SEQ ID NO: 8359 - DNA, 25 bp, Artificial sequence  Extension Primer
  Primer
tgcagtagagttccctgtgctgtac

SEQ ID NO: 8360 - DNA, 25 bp, Artificial sequence  Extension Primer
  Primer
aatattttatattttgtaaatatca

SEQ ID NO: 8361 - DNA, 25 bp, Artificial sequence  Extension Primer
  Primer
aagcagttgttttctttgttagtat

SEQ ID NO: 8362 - DNA, 25 bp, Artificial sequence  Extension Primer
  Primer
tgcttatttagtggagtttcatttc

SEQ ID NO: 8363 - DNA, 25 bp, Artificial sequence  Extension Primer
  Primer
tgccagggatcagctgaatggtaaa

SEQ ID NO: 8364 - DNA, 25 bp, Artificial sequence  Extension Primer
  Primer
tgaggtcatcatagccccagtcctg

SEQ ID NO: 8365 - DNA, 25 bp, Artificial sequence  Extension Primer
  Primer
tatgacacacttaagtgtcttcatc

SEQ ID NO: 8366 - DNA, 25 bp, Artificial sequence  Extension Primer
  Primer
agaaccaggtggtgaaaccttggag

SEQ ID NO: 8367 - DNA, 25 bp, Artificial sequence  Extension Primer
  Primer
tcccacaaagcgaacatctccctaa

SEQ ID NO: 8368 - DNA, 25 bp, Artificial sequence  Extension Primer
  Primer
atcctggctctgtcacaccaaactg

SEQ ID NO: 8369 - DNA, 25 bp, Artificial sequence  Extension Primer
  Primer
ctctggccaaccatggagagctaaa

SEQ ID NO: 8370 - DNA, 25 bp, Artificial sequence  Extension Primer
  Primer
cttcttgcttgcttgttgattgcta

SEQ ID NO: 8371 - DNA, 25 bp, Artificial sequence  Extension Primer
  Primer
gtagatagctgactttgtttagatg

SEQ ID NO: 8372 - DNA, 25 bp, Artificial sequence  Extension Primer
  Primer
cctcctgttaccttaatttctatat

SEQ ID NO: 8373 - DNA, 25 bp, Artificial sequence  Extension Primer
  Primer
tcctctcttcacaggcccgggatgc

SEQ ID NO: 8374 - DNA, 25 bp, Artificial sequence  Extension Primer
  Primer
gtccaatgtataagataagattcat

SEQ ID NO: 8375 - DNA, 25 bp, Artificial sequence  Extension Primer
  Primer
aagaagagattgagaacatcaaagg

SEQ ID NO: 8376 - DNA, 25 bp, Artificial sequence  Extension Primer
  Primer
gtaggcacccaaaatatcaataaca

SEQ ID NO: 8377 - DNA, 25 bp, Artificial sequence  Extension Primer
  Primer
rtattatacagactgaagcaagtca

SEQ ID NO: 8378 - DNA, 25 bp, Artificial sequence  Extension Primer
  Primer
acgccccagctcagctgcacccaga

SEQ ID NO: 8379 - DNA, 25 bp, Artificial sequence  Extension Primer
  Primer
ccatcatcaccctggccacagtcct

SEQ ID NO: 8380 - DNA, 25 bp, Artificial sequence  Extension Primer
  Primer
gctttgacatcttccatttttagca

SEQ ID NO: 8381 - DNA, 25 bp, Artificial sequence  Extension Primer
  Primer
aacatcagagcatacagtacaaggt

SEQ ID NO: 8382 - DNA, 25 bp, Artificial sequence  Extension Primer
  Primer
gcttcattttactaagttcagccaa

SEQ ID NO: 8383 - DNA, 25 bp, Artificial sequence  Extension Primer
  Primer
ccttttaagaatttttggagaagat

SEQ ID NO: 8384 - DNA, 25 bp, Artificial sequence  Extension Primer
  Primer
gaagcaactcttctatttagtccac

SEQ ID NO: 8385 - DNA, 25 bp, Artificial sequence  Extension Primer
  Primer
tttaatgcttaatggaactctgctg

SEQ ID NO: 8386 - DNA, 25 bp, Artificial sequence  Extension Primer
  Primer
taaacataaagccagctaacccaac

SEQ ID NO: 8387 - DNA, 25 bp, Artificial sequence  Extension Primer
  Primer
taaayggagtcacgttgccctcatt

SEQ ID NO: 8388 - DNA, 25 bp, Artificial sequence  Extension Primer
  Primer
tctcaatgtrtctcaactstaagat

SEQ ID NO: 8389 - DNA, 25 bp, Artificial sequence  Extension Primer
  Primer
gagaaaagcaggggacaacttaaat

SEQ ID NO: 8390 - DNA, 25 bp, Artificial sequence  Extension Primer
  Primer
tctgttgcaaacacttctcaaaagg

SEQ ID NO: 8391 - DNA, 25 bp, Artificial sequence  Extension Primer
  Primer
ggtaattggactcagaattccaaga

SEQ ID NO: 8392 - DNA, 25 bp, Artificial sequence  Extension Primer
  Primer
tgggatcctgctgctgcccacactc

SEQ ID NO: 8393 - DNA, 25 bp, Artificial sequence  Extension Primer
  Primer
aatagacagaatccagatttatgat

SEQ ID NO: 8394 - DNA, 22 bp, Artificial sequence  Extension Primer
  Primer
gttggttgagtgagggaatggc

SEQ ID NO: 8395 - DNA, 22 bp, Artificial sequence  Extension Primer
  Primer
ggaaccctcatcacacatcatc

SEQ ID NO: 8396 - DNA, 25 bp, Artificial sequence  Extension Primer
  Primer
tgtgagacagagtcaagtggcaatg

SEQ ID NO: 8397 - DNA, 25 bp, Artificial sequence  Extension Primer
  Primer
aggcactaaaacaaaaaaaggagtt

SEQ ID NO: 8398 - DNA, 25 bp, Artificial sequence  Extension Primer
  Primer
catgtcagattcacagatggaatta

SEQ ID NO: 8399 - DNA, 25 bp, Artificial sequence  Extension Primer
  Primer
gcacatgactgaggaaccacgaaac

SEQ ID NO: 8400 - DNA, 25 bp, Artificial sequence  Extension Primer
  Primer
caatgacaaactgtggccttggaag

SEQ ID NO: 8401 - DNA, 25 bp, Artificial sequence  Extension Primer
  Primer
ttttccaggcaagagtactggaatg

SEQ ID NO: 8402 - DNA, 25 bp, Artificial sequence  Extension Primer
  Primer
ttttacctcctgggctttgggggag

SEQ ID NO: 8403 - DNA, 25 bp, Artificial sequence  Extension Primer
  Primer
agccgctggcagcagatcactcatg

SEQ ID NO: 8404 - DNA, 25 bp, Artificial sequence  Extension Primer
  Primer
gttcagtgcaccccttaaaatgaga

SEQ ID NO: 8405 - DNA, 25 bp, Artificial sequence  Extension Primer
  Primer
tcccactagacttaattagtcatgg

SEQ ID NO: 8406 - DNA, 25 bp, Artificial sequence  Extension Primer
  Primer
atttaacacgtaaccacataataca

SEQ ID NO: 8407 - DNA, 25 bp, Artificial sequence  Extension Primer
  Primer
tgctcaagctcttgggggtgaaagg

SEQ ID NO: 8408 - DNA, 25 bp, Artificial sequence  Extension Primer
  Primer
ttggtaatatgcataagtgtctack

SEQ ID NO: 8409 - DNA, 25 bp, Artificial sequence  Extension Primer
  Primer
gagatgatgagagagccagaggcaa

SEQ ID NO: 8410 - DNA, 25 bp, Artificial sequence  Extension Primer
  Primer
gggacatttcattcaaagaggatgt

SEQ ID NO: 8411 - DNA, 25 bp, Artificial sequence  Extension Primer
  Primer
tgacaacccagttcagtaaacaagc

SEQ ID NO: 8412 - DNA, 25 bp, Artificial sequence  Extension Primer
  Primer
ctcctacatttctctctgtcatagc

SEQ ID NO: 8413 - DNA, 25 bp, Artificial sequence  Extension Primer
  Primer
gagtgacttgcttcaggtacccttt

SEQ ID NO: 8414 - DNA, 25 bp, Artificial sequence  Extension Primer
  Primer
ggatttgtggagagaaggtgagtag

SEQ ID NO: 8415 - DNA, 25 bp, Artificial sequence  Extension Primer
  Primer
aggcaaacagcaagttaactaactg

SEQ ID NO: 8416 - DNA, 25 bp, Artificial sequence  Extension Primer
  Primer
acccaggccccctgcattgggagca

SEQ ID NO: 8417 - DNA, 25 bp, Artificial sequence  Extension Primer
  Primer
acattctctcttcaagaagctggca

SEQ ID NO: 8418 - DNA, 25 bp, Artificial sequence  Extension Primer
  Primer
gcctggctctgagaagggtaggaga

SEQ ID NO: 8419 - DNA, 25 bp, Artificial sequence  Extension Primer
  Primer
agcccaagggagaaaaatgaaatac

SEQ ID NO: 8420 - DNA, 25 bp, Artificial sequence  Extension Primer
  Primer
gataactaaaggctacagagatttc

SEQ ID NO: 8421 - DNA, 25 bp, Artificial sequence  Extension Primer
  Primer
aaaatctgttcttacatcttacact

SEQ ID NO: 8422 - DNA, 25 bp, Artificial sequence  Extension Primer
  Primer
agaaattcggacatagttatatctc

SEQ ID NO: 8423 - DNA, 25 bp, Artificial sequence  Extension Primer
  Primer
aagayatgcctttacattgccatcc

SEQ ID NO: 8424 - DNA, 25 bp, Artificial sequence  Extension Primer
  Primer
tacatacatatttcaaagtatttct

SEQ ID NO: 8425 - DNA, 25 bp, Artificial sequence  Extension Primer
  Primer
ctccagcacacgtgggccatacagc

SEQ ID NO: 8426 - DNA, 25 bp, Artificial sequence  Extension Primer
  Primer
ggtactcaataaatgaccacagatc

SEQ ID NO: 8427 - DNA, 25 bp, Artificial sequence  Extension Primer
  Primer
taaagatgtttagcacagagcctgg

SEQ ID NO: 8428 - DNA, 25 bp, Artificial sequence  Extension Primer
  Primer
atctcctgtcctttgcaagtgaagt

SEQ ID NO: 8429 - DNA, 25 bp, Artificial sequence  Extension Primer
  Primer
ctctgataagttatgtgatgttctt

SEQ ID NO: 8430 - DNA, 25 bp, Artificial sequence  Extension Primer
  Primer
ggcctctgggctgaactggcacctc

SEQ ID NO: 8431 - DNA, 25 bp, Artificial sequence  Extension Primer
  Primer
ggctgttaaaactaagaagggcaga

SEQ ID NO: 8432 - DNA, 25 bp, Artificial sequence  Extension Primer
  Primer
aggcatagcttgtccccggctcctg

SEQ ID NO: 8433 - DNA, 25 bp, Artificial sequence  Extension Primer
  Primer
acctccagttagaggataaatatct

SEQ ID NO: 8434 - DNA, 25 bp, Artificial sequence  Extension Primer
  Primer
aggagacaggccagtggttctcacc

SEQ ID NO: 8435 - DNA, 25 bp, Artificial sequence  Extension Primer
  Primer
gtacaacacttttgtataaatacat

SEQ ID NO: 8436 - DNA, 25 bp, Artificial sequence  Extension Primer
  Primer
cgagtctctgctttgaatyggtagc

SEQ ID NO: 8437 - DNA, 25 bp, Artificial sequence  Extension Primer
  Primer
gagatgtcctgatgtctgcaagtgc

SEQ ID NO: 8438 - DNA, 25 bp, Artificial sequence  Extension Primer
  Primer
caacctacttcagagaaacaagtaa

SEQ ID NO: 8439 - DNA, 25 bp, Artificial sequence  Extension Primer
  Primer
tcataccagggctcagagctgagag

SEQ ID NO: 8440 - DNA, 25 bp, Artificial sequence  Extension Primer
  Primer
cttcagtgtgaggtttgatgccctg

SEQ ID NO: 8441 - DNA, 25 bp, Artificial sequence  Extension Primer
  Primer
accgaagagagctgcacagagacaa

SEQ ID NO: 8442 - DNA, 25 bp, Artificial sequence  Extension Primer
  Primer
ctaaatagcaacaattttaaagatc

SEQ ID NO: 8443 - DNA, 25 bp, Artificial sequence  Extension Primer
  Primer
atttgctccaattaacagaagactg

SEQ ID NO: 8444 - DNA, 25 bp, Artificial sequence  Extension Primer
  Primer
cattttatgagcactaactgcattc

SEQ ID NO: 8445 - DNA, 25 bp, Artificial sequence  Extension Primer
  Primer
tgttcaatgaactttttacatcaga

SEQ ID NO: 8446 - DNA, 25 bp, Artificial sequence  Extension Primer
  Primer
agattcagagctctggccagaaata

SEQ ID NO: 8447 - DNA, 25 bp, Artificial sequence  Extension Primer
  Primer
tctcatcttccaggcagttaggagc

SEQ ID NO: 8448 - DNA, 25 bp, Artificial sequence  Extension Primer
  Primer
aaggggctgggtaagcatcagaaag

SEQ ID NO: 8449 - DNA, 25 bp, Artificial sequence  Extension Primer
  Primer
tggatcctccacaaatgtggaagac

SEQ ID NO: 8450 - DNA, 25 bp, Artificial sequence  Extension Primer
  Primer
ttccaggatttgacctagaaagaat

SEQ ID NO: 8451 - DNA, 25 bp, Artificial sequence  Extension Primer
  Primer
tggaaggtctggayggctgcccagg

SEQ ID NO: 8452 - DNA, 25 bp, Artificial sequence  Extension Primer
  Primer
tgccaattgtcattaaaacattttc

SEQ ID NO: 8453 - DNA, 25 bp, Artificial sequence  Extension Primer
  Primer
agtttggcccactaatgctcttatc

SEQ ID NO: 8454 - DNA, 25 bp, Artificial sequence  Extension Primer
  Primer
ccacagaaagctgcttgttgcattc

SEQ ID NO: 8455 - DNA, 25 bp, Artificial sequence  Extension Primer
  Primer
gccagcaagagaggttttgtgcaca

SEQ ID NO: 8456 - DNA, 25 bp, Artificial sequence  Extension Primer
  Primer
tcaggatgcagctccgaaggtctca

SEQ ID NO: 8457 - DNA, 25 bp, Artificial sequence  Extension Primer
  Primer
ctgtgaggtggtctctcagatccat

SEQ ID NO: 8458 - DNA, 25 bp, Artificial sequence  Extension Primer
  Primer
cctctatgcctcagatcccaaactt

SEQ ID NO: 8459 - DNA, 25 bp, Artificial sequence  Extension Primer
  Primer
gggctttgaaatgtgttttatcaca

SEQ ID NO: 8460 - DNA, 25 bp, Artificial sequence  Extension Primer
  Primer
gcaaacgagacatccggcgcctgta

SEQ ID NO: 8461 - DNA, 25 bp, Artificial sequence  Extension Primer
  Primer
atgaattaggcattagggagagatg

SEQ ID NO: 8462 - DNA, 25 bp, Artificial sequence  Extension Primer
  Primer
taatgatttggccccaatcctatct

SEQ ID NO: 8463 - DNA, 25 bp, Artificial sequence  Extension Primer
  Primer
ccatggcacctaaaaatgtccctta

SEQ ID NO: 8464 - DNA, 25 bp, Artificial sequence  Extension Primer
  Primer
agtattcttactttgttcactcagc

SEQ ID NO: 8465 - DNA, 25 bp, Artificial sequence  Extension Primer
  Primer
tcatcaaggcttcacatcatgtaaa

SEQ ID NO: 8466 - DNA, 25 bp, Artificial sequence  Extension Primer
  Primer
ttctccaaatttccgactttctgaa

SEQ ID NO: 8467 - DNA, 25 bp, Artificial sequence  Extension Primer
  Primer
actctcccttttttagtttttaagc

SEQ ID NO: 8468 - DNA, 25 bp, Artificial sequence  Extension Primer
  Primer
ccctggttccaaattactctgtgtg

SEQ ID NO: 8469 - DNA, 25 bp, Artificial sequence  Extension Primer
  Primer
tcaaggtccgaacacatgattcatc

SEQ ID NO: 8470 - DNA, 25 bp, Artificial sequence  Extension Primer
  Primer
ggcatttctgaaggcagtatattgg

SEQ ID NO: 8471 - DNA, 25 bp, Artificial sequence  Extension Primer
  Primer
atggtactgggctccatgtgccttg

SEQ ID NO: 8472 - DNA, 25 bp, Artificial sequence  Extension Primer
  Primer
aaagaatcaactttgtgaatgagaa

SEQ ID NO: 8473 - DNA, 25 bp, Artificial sequence  Extension Primer
  Primer
ggatgggaggagtgggtgggtgaag

SEQ ID NO: 8474 - DNA, 25 bp, Artificial sequence  Extension Primer
  Primer
agaccacatgtgggaagagtaacac

SEQ ID NO: 8475 - DNA, 25 bp, Artificial sequence  Extension Primer
  Primer
tcactcatattgtacagacagtagc

SEQ ID NO: 8476 - DNA, 25 bp, Artificial sequence  Extension Primer
  Primer
tcataactggtctctctgtaatctt

SEQ ID NO: 8477 - DNA, 25 bp, Artificial sequence  Extension Primer
  Primer
actcagcagygagatgggagggatg

SEQ ID NO: 8478 - DNA, 25 bp, Artificial sequence  Extension Primer
  Primer
tctctttagccaggctcagataaca

SEQ ID NO: 8479 - DNA, 25 bp, Artificial sequence  Extension Primer
  Primer
cccaggaattttctcagcccccaga

SEQ ID NO: 8480 - DNA, 25 bp, Artificial sequence  Extension Primer
  Primer
ccaggaattttctcagcccccagay

SEQ ID NO: 8481 - DNA, 25 bp, Artificial sequence  Extension Primer
  Primer
atgaaataactattcctattgtaga

SEQ ID NO: 8482 - DNA, 25 bp, Artificial sequence  Extension Primer
  Primer
aaatattaaccgtattgagcatcac

SEQ ID NO: 8483 - DNA, 25 bp, Artificial sequence  Extension Primer
  Primer
gaaggggagataacttgaagatgtc

SEQ ID NO: 8484 - DNA, 25 bp, Artificial sequence  Extension Primer
  Primer
actgaagcaattgataaactgagtt

SEQ ID NO: 8485 - DNA, 25 bp, Artificial sequence  Extension Primer
  Primer
tctcttcccgcctcatcttaagtac

SEQ ID NO: 8486 - DNA, 25 bp, Artificial sequence  Extension Primer
  Primer
ggttaaaattccaaaactgtaagga

SEQ ID NO: 8487 - DNA, 25 bp, Artificial sequence  Extension Primer
  Primer
aaatttaacaactgactcaccaaca

SEQ ID NO: 8488 - DNA, 25 bp, Artificial sequence  Extension Primer
  Primer
tcagtgaatctgaaaaaaacaaccc

SEQ ID NO: 8489 - DNA, 25 bp, Artificial sequence  Extension Primer
  Primer
tctcttacattccctgatctccact

SEQ ID NO: 8490 - DNA, 25 bp, Artificial sequence  Extension Primer
  Primer
gaaattagcaagggagaggagaaag

SEQ ID NO: 8491 - DNA, 25 bp, Artificial sequence  Extension Primer
  Primer
tcttcaggaagcactctgaagatcc

SEQ ID NO: 8492 - DNA, 25 bp, Artificial sequence  Extension Primer
  Primer
caggaagcactctgaagatcckccc

SEQ ID NO: 8493 - DNA, 25 bp, Artificial sequence  Extension Primer
  Primer
gtacgagtcacctgcagcacatcca

SEQ ID NO: 8494 - DNA, 25 bp, Artificial sequence  Extension Primer
  Primer
gatatttgtggcaaaacaaaagaac

SEQ ID NO: 8495 - DNA, 25 bp, Artificial sequence  Extension Primer
  Primer
ttcttgtaaacatgcttttctccct

SEQ ID NO: 8496 - DNA, 25 bp, Artificial sequence  Extension Primer
  Primer
tgatggccctcatcctgtatcacac

SEQ ID NO: 8497 - DNA, 25 bp, Artificial sequence  Extension Primer
  Primer
actcttggcacttagctcttcagac

SEQ ID NO: 8498 - DNA, 25 bp, Artificial sequence  Extension Primer
  Primer
taaccctactcgagcagagaggaaa

SEQ ID NO: 8499 - DNA, 25 bp, Artificial sequence  Extension Primer
  Primer
agaattcagataaataacacagtat

SEQ ID NO: 8500 - DNA, 25 bp, Artificial sequence  Extension Primer
  Primer
cttcacgcgggatgggggcaaatcc

SEQ ID NO: 8501 - DNA, 25 bp, Artificial sequence  Extension Primer
  Primer
aaggcttagagattgtgggccaagg

SEQ ID NO: 8502 - DNA, 25 bp, Artificial sequence  Extension Primer
  Primer
tctttcccatctctaratttcccca

SEQ ID NO: 8503 - DNA, 25 bp, Artificial sequence  Extension Primer
  Primer
ggcattatcctcctcgttccataac

SEQ ID NO: 8504 - DNA, 25 bp, Artificial sequence  Extension Primer
  Primer
gcctggaagtaggaacaagtcccct

SEQ ID NO: 8505 - DNA, 25 bp, Artificial sequence  Extension Primer
  Primer
aaaaaccctctgcaagttccactgc

SEQ ID NO: 8506 - DNA, 25 bp, Artificial sequence  Extension Primer
  Primer
caaggtcagggccaacgcggcgctc

SEQ ID NO: 8507 - DNA, 25 bp, Artificial sequence  Extension Primer
  Primer
agaaggacttcttgaccaggtctca

SEQ ID NO: 8508 - DNA, 25 bp, Artificial sequence  Extension Primer
  Primer
ataccccttaagtcaagcagcattg

SEQ ID NO: 8509 - DNA, 25 bp, Artificial sequence  Extension Primer
  Primer
ggtaaaagaagctggaaggcagttc

SEQ ID NO: 8510 - DNA, 25 bp, Artificial sequence  Extension Primer
  Primer
ttctagaagccaaaccccatctctc

SEQ ID NO: 8511 - DNA, 25 bp, Artificial sequence  Extension Primer
  Primer
tgttcttcctcttttgcctccactg

SEQ ID NO: 8512 - DNA, 25 bp, Artificial sequence  Extension Primer
  Primer
acaatgataattaccaatttctgga

SEQ ID NO: 8513 - DNA, 25 bp, Artificial sequence  Extension Primer
  Primer
actcttcagataaccaagacattaa

SEQ ID NO: 8514 - DNA, 25 bp, Artificial sequence  Extension Primer
  Primer
tgcaaactgccatccatctctcccc

SEQ ID NO: 8515 - DNA, 25 bp, Artificial sequence  Extension Primer
  Primer
acctctgcaccggaagcctcttats

SEQ ID NO: 8516 - DNA, 25 bp, Artificial sequence  Extension Primer
  Primer
tcctttccagctcggaacgtctccc

SEQ ID NO: 8517 - DNA, 25 bp, Artificial sequence  Extension Primer
  Primer
cgcatgctgaaactaagacctggtg

SEQ ID NO: 8518 - DNA, 25 bp, Artificial sequence  Extension Primer
  Primer
accttcctcatgtgccaagctcccc

SEQ ID NO: 8519 - DNA, 25 bp, Artificial sequence  Extension Primer
  Primer
aggggagcttacactggggtcttga

SEQ ID NO: 8520 - DNA, 25 bp, Artificial sequence  Extension Primer
  Primer
gcccaacagagctaacagtgatagt

SEQ ID NO: 8521 - DNA, 25 bp, Artificial sequence  Extension Primer
  Primer
tcttgaggtaactagcttcactatc

SEQ ID NO: 8522 - DNA, 25 bp, Artificial sequence  Extension Primer
  Primer
tgagaattaaataataattcgtatt

SEQ ID NO: 8523 - DNA, 25 bp, Artificial sequence  Extension Primer
  Primer
tgaacccaccaagggtcagcaaact

SEQ ID NO: 8524 - DNA, 25 bp, Artificial sequence  Extension Primer
  Primer
gagacattagctgatctctccagac

SEQ ID NO: 8525 - DNA, 25 bp, Artificial sequence  Extension Primer
  Primer
aggatgaaaaaccattttaaatact

SEQ ID NO: 8526 - DNA, 25 bp, Artificial sequence  Extension Primer
  Primer
tgcatttgtaacggatgcattaggc

SEQ ID NO: 8527 - DNA, 25 bp, Artificial sequence  Extension Primer
  Primer
aaaaacatgtttgtgcttacacctc

SEQ ID NO: 8528 - DNA, 25 bp, Artificial sequence  Extension Primer
  Primer
tcagctccacttctgtgctgctctg

SEQ ID NO: 8529 - DNA, 25 bp, Artificial sequence  Extension Primer
  Primer
ggcatgtttagtgtttgtaattaga

SEQ ID NO: 8530 - DNA, 25 bp, Artificial sequence  Extension Primer
  Primer
gtgtgtggttccctttcccactgtg

SEQ ID NO: 8531 - DNA, 25 bp, Artificial sequence  Extension Primer
  Primer
agggcactggcccggaagccagaag

SEQ ID NO: 8532 - DNA, 25 bp, Artificial sequence  Extension Primer
  Primer
gaatagttgtgttgaaattagcatc

SEQ ID NO: 8533 - DNA, 25 bp, Artificial sequence  Extension Primer
  Primer
cacagagtcatcaagaggatcagaa

SEQ ID NO: 8534 - DNA, 25 bp, Artificial sequence  Extension Primer
  Primer
agtcacttgcaattgtgcttctcat

SEQ ID NO: 8535 - DNA, 25 bp, Artificial sequence  Extension Primer
  Primer
tgcatggaaagttataaaggactat

SEQ ID NO: 8536 - DNA, 25 bp, Artificial sequence  Extension Primer
  Primer
attaacttaataatccaaagtgggg

SEQ ID NO: 8537 - DNA, 25 bp, Artificial sequence  Extension Primer
  Primer
tgtggttttccatattctttatgct

SEQ ID NO: 8538 - DNA, 25 bp, Artificial sequence  Extension Primer
  Primer
gaactgtgatccacagcatattaca

SEQ ID NO: 8539 - DNA, 25 bp, Artificial sequence  Extension Primer
  Primer
gagtcagggatgttctcccatacct

SEQ ID NO: 8540 - DNA, 25 bp, Artificial sequence  Extension Primer
  Primer
aattacatatttctgttaatgtttt

SEQ ID NO: 8541 - DNA, 25 bp, Artificial sequence  Extension Primer
  Primer
aggctagattaagcagtatatcttc

SEQ ID NO: 8542 - DNA, 25 bp, Artificial sequence  Extension Primer
  Primer
ktacctttttgttcaaaggaatgag

SEQ ID NO: 8543 - DNA, 25 bp, Artificial sequence  Extension Primer
  Primer
cttgagatggtgggaggaggaagac

SEQ ID NO: 8544 - DNA, 25 bp, Artificial sequence  Extension Primer
  Primer
ccttggtgctcccacaaaatctaat

SEQ ID NO: 8545 - DNA, 25 bp, Artificial sequence  Extension Primer
  Primer
ctttgatgtcccttgcaccttgccc

SEQ ID NO: 8546 - DNA, 25 bp, Artificial sequence  Extension Primer
  Primer
tgtattgtttatagtgtatctaact

SEQ ID NO: 8547 - DNA, 25 bp, Artificial sequence  Extension Primer
  Primer
gggacattgtgtggacatagctgat

SEQ ID NO: 8548 - DNA, 25 bp, Artificial sequence  Extension Primer
  Primer
gattggggacaacatcatgaaactt

SEQ ID NO: 8549 - DNA, 25 bp, Artificial sequence  Extension Primer
  Primer
cacacctgggtggccgagccttcct

SEQ ID NO: 8550 - DNA, 25 bp, Artificial sequence  Extension Primer
  Primer
aggccaggatccagactaagtgaca

SEQ ID NO: 8551 - DNA, 25 bp, Artificial sequence  Extension Primer
  Primer
gagccccatcacggtcatgagagca

SEQ ID NO: 8552 - DNA, 25 bp, Artificial sequence  Extension Primer
  Primer
gttagccagtaactggagctggagc

SEQ ID NO: 8553 - DNA, 25 bp, Artificial sequence  Extension Primer
  Primer
tgaaactgtwattaaaatttcaaag

SEQ ID NO: 8554 - DNA, 25 bp, Artificial sequence  Extension Primer
  Primer
catcacggcattatacyacgttaya

SEQ ID NO: 8555 - DNA, 25 bp, Artificial sequence  Extension Primer
  Primer
acacctgaaatcatccatctatgca

SEQ ID NO: 8556 - DNA, 25 bp, Artificial sequence  Extension Primer
  Primer
ggagggagcactggcccagggaagc

SEQ ID NO: 8557 - DNA, 25 bp, Artificial sequence  Extension Primer
  Primer
tttctaactatgatgagtgcttctt

SEQ ID NO: 8558 - DNA, 25 bp, Artificial sequence  Extension Primer
  Primer
accagtccatctctgcatatttgtt

SEQ ID NO: 8559 - DNA, 25 bp, Artificial sequence  Extension Primer
  Primer
gggactggctggaccagagtggcct

SEQ ID NO: 8560 - DNA, 25 bp, Artificial sequence  Extension Primer
  Primer
gttccctttggggagacagcagtgc

SEQ ID NO: 8561 - DNA, 25 bp, Artificial sequence  Extension Primer
  Primer
tttctacaaagtggcaggtgagaac

SEQ ID NO: 8562 - DNA, 25 bp, Artificial sequence  Extension Primer
  Primer
agcccacagcctcctgtctttcacc

SEQ ID NO: 8563 - DNA, 25 bp, Artificial sequence  Extension Primer
  Primer
agcaaaaataaatttcacttccatt

SEQ ID NO: 8564 - DNA, 25 bp, Artificial sequence  Extension Primer
  Primer
cagtgaacagactgatttccctccc

SEQ ID NO: 8565 - DNA, 25 bp, Artificial sequence  Extension Primer
  Primer
ggtctgccaggagttgacgatcaga

SEQ ID NO: 8566 - DNA, 25 bp, Artificial sequence  Extension Primer
  Primer
caagtgtaataaatccatgggcttt

SEQ ID NO: 8567 - DNA, 25 bp, Artificial sequence  Extension Primer
  Primer
cagatgcaaatctgaagtggggaga

SEQ ID NO: 8568 - DNA, 25 bp, Artificial sequence  Extension Primer
  Primer
tgacacataacaaattctcagtaaa

SEQ ID NO: 8569 - DNA, 25 bp, Artificial sequence  Extension Primer
  Primer
gtgagctgaaggatttctcccaatg

SEQ ID NO: 8570 - DNA, 25 bp, Artificial sequence  Extension Primer
  Primer
agtttaggtcattttgagctggggt

SEQ ID NO: 8571 - DNA, 25 bp, Artificial sequence  Extension Primer
  Primer
ccacttcaaatggcccttagaacac

SEQ ID NO: 8572 - DNA, 25 bp, Artificial sequence  Extension Primer
  Primer
tatttgattttgggctgtgctgggt

SEQ ID NO: 8573 - DNA, 25 bp, Artificial sequence  Extension Primer
  Primer
gtggttgggtgacctttgaccgcag

SEQ ID NO: 8574 - DNA, 25 bp, Artificial sequence  Extension Primer
  Primer
aagccccttcaccgtaacgaagttg

SEQ ID NO: 8575 - DNA, 25 bp, Artificial sequence  Extension Primer
  Primer
ggacacaggcaaagcattttgtgaa

SEQ ID NO: 8576 - DNA, 25 bp, Artificial sequence  Extension Primer
  Primer
aacacagcctttgaatgttggaagc

SEQ ID NO: 8577 - DNA, 25 bp, Artificial sequence  Extension Primer
  Primer
tccccacaggtctgtgcctttgccc

SEQ ID NO: 8578 - DNA, 25 bp, Artificial sequence  Extension Primer
  Primer
gcattatggagaaaatatacatagt

SEQ ID NO: 8579 - DNA, 25 bp, Artificial sequence  Extension Primer
  Primer
ctcagcaattcctgtgtgaacataa

SEQ ID NO: 8580 - DNA, 25 bp, Artificial sequence  Extension Primer
  Primer
tcaagcctttccatgaattcagaat

SEQ ID NO: 8581 - DNA, 25 bp, Artificial sequence  Extension Primer
  Primer
tgcccctccttcattcccaccttaa

SEQ ID NO: 8582 - DNA, 25 bp, Artificial sequence  Extension Primer
  Primer
ttgccttttcgagtatgtgacccaa

SEQ ID NO: 8583 - DNA, 25 bp, Artificial sequence  Extension Primer
  Primer
acggtgggcattcaactgacctgca

SEQ ID NO: 8584 - DNA, 25 bp, Artificial sequence  Extension Primer
  Primer
tttctaacttcctgggcacaaatgc

SEQ ID NO: 8585 - DNA, 25 bp, Artificial sequence  Extension Primer
  Primer
ctcatcattacaggccttcagctct

SEQ ID NO: 8586 - DNA, 25 bp, Artificial sequence  Extension Primer
  Primer
ttttgtttttaactggcaggtggtg

SEQ ID NO: 8587 - DNA, 25 bp, Artificial sequence  Extension Primer
  Primer
agtgaataatcataacagccaatag

SEQ ID NO: 8588 - DNA, 25 bp, Artificial sequence  Extension Primer
  Primer
tttttggaataatttatttccgagg

SEQ ID NO: 8589 - DNA, 25 bp, Artificial sequence  Extension Primer
  Primer
agggaagcttttattactggtaatt

SEQ ID NO: 8590 - DNA, 25 bp, Artificial sequence  Extension Primer
  Primer
gtctcccaytggaatttatctggta

SEQ ID NO: 8591 - DNA, 25 bp, Artificial sequence  Extension Primer
  Primer
cccctccattaaggaagtcctgtgg

SEQ ID NO: 8592 - DNA, 25 bp, Artificial sequence  Extension Primer
  Primer
gggaattttttttaagacacaggtg

SEQ ID NO: 8593 - DNA, 22 bp, Artificial sequence  Extension Primer
  Primer
tgggttggggaggctcgagtgg

SEQ ID NO: 8594 - DNA, 25 bp, Artificial sequence  Extension Primer
  Primer
caaggaatgttgagaggagatacag

SEQ ID NO: 8595 - DNA, 25 bp, Artificial sequence  Extension Primer
  Primer
cgcccgcccgcccgtctgaccttgt

SEQ ID NO: 8596 - DNA, 25 bp, Artificial sequence  Extension Primer
  Primer
ttcaaaggtgatcttcagcataaaa

SEQ ID NO: 8597 - DNA, 25 bp, Artificial sequence  Extension Primer
  Primer
agtcttcttttgtgaacgtatcaga

SEQ ID NO: 8598 - DNA, 25 bp, Artificial sequence  Extension Primer
  Primer
gcagcggtctttccatttactgatc

SEQ ID NO: 8599 - DNA, 25 bp, Artificial sequence  Extension Primer
  Primer
tgtactatttttaaaagctctccag

SEQ ID NO: 8600 - DNA, 25 bp, Artificial sequence  Extension Primer
  Primer
tgcagagtgatccggagggcaaaag

SEQ ID NO: 8601 - DNA, 25 bp, Artificial sequence  Extension Primer
  Primer
tttaaacctaaagctcttgcacgct

SEQ ID NO: 8602 - DNA, 25 bp, Artificial sequence  Extension Primer
  Primer
ttcccctgatacctgagaaaagtga

SEQ ID NO: 8603 - DNA, 25 bp, Artificial sequence  Extension Primer
  Primer
tcaccctgctctgacaggtgggaaa

SEQ ID NO: 8604 - DNA, 25 bp, Artificial sequence  Extension Primer
  Primer
cctgaatagcactagagttgaccct

SEQ ID NO: 8605 - DNA, 25 bp, Artificial sequence  Extension Primer
  Primer
acttttgacatccattagtctagat

SEQ ID NO: 8606 - DNA, 25 bp, Artificial sequence  Extension Primer
  Primer
gaaaggctttagtcccatcaggtga

SEQ ID NO: 8607 - DNA, 25 bp, Artificial sequence  Extension Primer
  Primer
ctccttatttatattaagactcagt

SEQ ID NO: 8608 - DNA, 25 bp, Artificial sequence  Extension Primer
  Primer
aaaacctcaagtcaagaaacattct

SEQ ID NO: 8609 - DNA, 25 bp, Artificial sequence  Extension Primer
  Primer
ttacactcttctagaatgttttaat

SEQ ID NO: 8610 - DNA, 25 bp, Artificial sequence  Extension Primer
  Primer
agatcatatggtaacagtggtgctt

SEQ ID NO: 8611 - DNA, 25 bp, Artificial sequence  Extension Primer
  Primer
tggtcagtgcagcatgggtgatggg

SEQ ID NO: 8612 - DNA, 25 bp, Artificial sequence  Extension Primer
  Primer
agggagactaactaaccttggagtc

SEQ ID NO: 8613 - DNA, 25 bp, Artificial sequence  Extension Primer
  Primer
gaaatgaatttgaaagcctctggtt

SEQ ID NO: 8614 - DNA, 25 bp, Artificial sequence  Extension Primer
  Primer
caaacggaagttaggaccattttca

SEQ ID NO: 8615 - DNA, 25 bp, Artificial sequence  Extension Primer
  Primer
cagataggatgtgaaggacgctgga

SEQ ID NO: 8616 - DNA, 25 bp, Artificial sequence  Extension Primer
  Primer
taaagtggggaagttcatagtttca

SEQ ID NO: 8617 - DNA, 25 bp, Artificial sequence  Extension Primer
  Primer
gtgtcattccaaaatctatttctcc

SEQ ID NO: 8618 - DNA, 25 bp, Artificial sequence  Extension Primer
  Primer
aagaggctgaaagtgtattgaggag

SEQ ID NO: 8619 - DNA, 25 bp, Artificial sequence  Extension Primer
  Primer
acatagaatgttaacaagctcctga

SEQ ID NO: 8620 - DNA, 25 bp, Artificial sequence  Extension Primer
  Primer
actgcacagtggtgagtctcagccc

SEQ ID NO: 8621 - DNA, 25 bp, Artificial sequence  Extension Primer
  Primer
ctttgaactgagactaagatttgct

SEQ ID NO: 8622 - DNA, 25 bp, Artificial sequence  Extension Primer
  Primer
gtgtaaggctcagtctctctcaccc

SEQ ID NO: 8623 - DNA, 25 bp, Artificial sequence  Extension Primer
  Primer
tctttttggctaccctggctcttct

SEQ ID NO: 8624 - DNA, 25 bp, Artificial sequence  Extension Primer
  Primer
gtaattggaaatgagcgctttgttg

SEQ ID NO: 8625 - DNA, 25 bp, Artificial sequence  Extension Primer
  Primer
gtaaatgcagtggttctggccctat

SEQ ID NO: 8626 - DNA, 25 bp, Artificial sequence  Extension Primer
  Primer
atattatgtacatgtgcaagtgttc

SEQ ID NO: 8627 - DNA, 25 bp, Artificial sequence  Extension Primer
  Primer
aacctggaaagggaaatcagcaaca

SEQ ID NO: 8628 - DNA, 25 bp, Artificial sequence  Extension Primer
  Primer
aggagaaagggaaccaaagacagaa

SEQ ID NO: 8629 - DNA, 25 bp, Artificial sequence  Extension Primer
  Primer
cctgctgttcactaacttaacttac

SEQ ID NO: 8630 - DNA, 25 bp, Artificial sequence  Extension Primer
  Primer
gggaggagtatattggagccacata

SEQ ID NO: 8631 - DNA, 25 bp, Artificial sequence  Extension Primer
  Primer
gtggaattgggagatgttgtttgct

SEQ ID NO: 8632 - DNA, 25 bp, Artificial sequence  Extension Primer
  Primer
taaagaagtctcatgtacccttcac

SEQ ID NO: 8633 - DNA, 25 bp, Artificial sequence  Extension Primer
  Primer
ctggggaaacagacaaatgcaaaac

SEQ ID NO: 8634 - DNA, 25 bp, Artificial sequence  Extension Primer
  Primer
atcaattcacaagggcttcccaggc

SEQ ID NO: 8635 - DNA, 25 bp, Artificial sequence  Extension Primer
  Primer
tttcacttccttgaacatctggact

SEQ ID NO: 8636 - DNA, 25 bp, Artificial sequence  Extension Primer
  Primer
cagtctagcttgatcaggaacacaa

SEQ ID NO: 8637 - DNA, 25 bp, Artificial sequence  Extension Primer
  Primer
gtcaggtttttattcactcctgttt

SEQ ID NO: 8638 - DNA, 25 bp, Artificial sequence  Extension Primer
  Primer
ataaaaccctgagctttatattcaa

SEQ ID NO: 8639 - DNA, 25 bp, Artificial sequence  Extension Primer
  Primer
tctctaggtctgcaaccatggtgcc

SEQ ID NO: 8640 - DNA, 25 bp, Artificial sequence  Extension Primer
  Primer
tgcctcccattggcccaatgtttaa

SEQ ID NO: 8641 - DNA, 25 bp, Artificial sequence  Extension Primer
  Primer
gactacctcaatattttgaaatacc

SEQ ID NO: 8642 - DNA, 25 bp, Artificial sequence  Extension Primer
  Primer
tattcaagccatctaacaaatctta

SEQ ID NO: 8643 - DNA, 25 bp, Artificial sequence  Extension Primer
  Primer
gggcaacctgcaaagagaagaggga

SEQ ID NO: 8644 - DNA, 25 bp, Artificial sequence  Extension Primer
  Primer
tgtggtgtggggaagggttcagagc

SEQ ID NO: 8645 - DNA, 25 bp, Artificial sequence  Extension Primer
  Primer
ccagtaggacaccattaccaaaaga

SEQ ID NO: 8646 - DNA, 25 bp, Artificial sequence  Extension Primer
  Primer
aaacctagataattgaagtgactca

SEQ ID NO: 8647 - DNA, 25 bp, Artificial sequence  Extension Primer
  Primer
gctagatgggaaagctcatatgttg

SEQ ID NO: 8648 - DNA, 25 bp, Artificial sequence  Extension Primer
  Primer
tgccctggcttctttccccttatcc

SEQ ID NO: 8649 - DNA, 25 bp, Artificial sequence  Extension Primer
  Primer
ctgatgttggtcaggtgatgttagc

SEQ ID NO: 8650 - DNA, 25 bp, Artificial sequence  Extension Primer
  Primer
aatgcaacagactgtggctaaatct

SEQ ID NO: 8651 - DNA, 25 bp, Artificial sequence  Extension Primer
  Primer
ccatctggtatgtgcccgtccccac

SEQ ID NO: 8652 - DNA, 25 bp, Artificial sequence  Extension Primer
  Primer
ttaaaaaaaaaaaaaaaaaaaacta

SEQ ID NO: 8653 - DNA, 25 bp, Artificial sequence  Extension Primer
  Primer
tgctgcccggcgcctggatcccaaa

SEQ ID NO: 8654 - DNA, 25 bp, Artificial sequence  Extension Primer
  Primer
cgtgacattaaagtcagtaaattcc

SEQ ID NO: 8655 - DNA, 25 bp, Artificial sequence  Extension Primer
  Primer
aggagggccagagcccaggtcagaa

SEQ ID NO: 8656 - DNA, 25 bp, Artificial sequence  Extension Primer
  Primer
cagggcccagggggcgagcccagaa

SEQ ID NO: 8657 - DNA, 25 bp, Artificial sequence  Extension Primer
  Primer
tgaagacaaatgtacataagacaaa

SEQ ID NO: 8658 - DNA, 25 bp, Artificial sequence  Extension Primer
  Primer
tcgagctgcacagggaaggtctcaa

SEQ ID NO: 8659 - DNA, 25 bp, Artificial sequence  Extension Primer
  Primer
cagggtgtaaagctcttaaaaaaaa

SEQ ID NO: 8660 - DNA, 25 bp, Artificial sequence  Extension Primer
  Primer
aggccttcccacaggaattgcattc

SEQ ID NO: 8661 - DNA, 25 bp, Artificial sequence  Extension Primer
  Primer
ctgagcctctggcatattccaccta

SEQ ID NO: 8662 - DNA, 25 bp, Artificial sequence  Extension Primer
  Primer
aaccattgcatagacagcagtaata

SEQ ID NO: 8663 - DNA, 25 bp, Artificial sequence  Extension Primer
  Primer
gcctctgcttgacacctgtttcccc

SEQ ID NO: 8664 - DNA, 25 bp, Artificial sequence  Extension Primer
  Primer
acacagagcactgtgcaacatccta

SEQ ID NO: 8665 - DNA, 25 bp, Artificial sequence  Extension Primer
  Primer
atctaatgtgattttatgtcctact

SEQ ID NO: 8666 - DNA, 25 bp, Artificial sequence  Extension Primer
  Primer
gagagcagagctctgcctcctgatt

SEQ ID NO: 8667 - DNA, 25 bp, Artificial sequence  Extension Primer
  Primer
ggaggtcacagaaaaaaatgattaa

SEQ ID NO: 8668 - DNA, 25 bp, Artificial sequence  Extension Primer
  Primer
atcacattctgcaaattaaatttca

SEQ ID NO: 8669 - DNA, 25 bp, Artificial sequence  Extension Primer
  Primer
atcatcacgcagaaacttataagga

SEQ ID NO: 8670 - DNA, 25 bp, Artificial sequence  Extension Primer
  Primer
acaatcactgtacactgaaaaatat

SEQ ID NO: 8671 - DNA, 25 bp, Artificial sequence  Extension Primer
  Primer
agggacctaactatcaccaaaagca

SEQ ID NO: 8672 - DNA, 25 bp, Artificial sequence  Extension Primer
  Primer
tgaaagtagaaattttagaacaaaa

SEQ ID NO: 8673 - DNA, 25 bp, Artificial sequence  Extension Primer
  Primer
ccttaatcctacccttccttcctcc

SEQ ID NO: 8674 - DNA, 25 bp, Artificial sequence  Extension Primer
  Primer
aatcattcctttgcttctctctatg

SEQ ID NO: 8675 - DNA, 25 bp, Artificial sequence  Extension Primer
  Primer
ccaggagctgggtggctttcgccgc

SEQ ID NO: 8676 - DNA, 22 bp, Artificial sequence  Extension Primer
  Primer
aagctgggaatctagtaaacag

SEQ ID NO: 8677 - DNA, 25 bp, Artificial sequence  Extension Primer
  Primer
cacaaagccaataaaactagggcaa

SEQ ID NO: 8678 - DNA, 25 bp, Artificial sequence  Extension Primer
  Primer
tcaatactcaatatactcaataaac

SEQ ID NO: 8679 - DNA, 25 bp, Artificial sequence  Extension Primer
  Primer
taaaaaaaaagaaagccaaatctta

SEQ ID NO: 8680 - DNA, 25 bp, Artificial sequence  Extension Primer
  Primer
aaatttgatgtataatcaagaataa

SEQ ID NO: 8681 - DNA, 25 bp, Artificial sequence  Extension Primer
  Primer
attaataatttaacrataagaaaag

SEQ ID NO: 8682 - DNA, 25 bp, Artificial sequence  Extension Primer
  Primer
tctgccactaattctctgtgtgaca

SEQ ID NO: 8683 - DNA, 25 bp, Artificial sequence  Extension Primer
  Primer
attacaaacttcatcttagaattta

SEQ ID NO: 8684 - DNA, 25 bp, Artificial sequence  Extension Primer
  Primer
ttcatgaggcagggaacggttttgt

SEQ ID NO: 8685 - DNA, 25 bp, Artificial sequence  Extension Primer
  Primer
tttttaaagkattcataaaataggs

SEQ ID NO: 8686 - DNA, 25 bp, Artificial sequence  Extension Primer
  Primer
acaagcatctggactatctgcctta

SEQ ID NO: 8687 - DNA, 25 bp, Artificial sequence  Extension Primer
  Primer
aggactaagcaggggcagatgaggt

SEQ ID NO: 8688 - DNA, 25 bp, Artificial sequence  Extension Primer
  Primer
caaaaagggatcattatgaacaaat

SEQ ID NO: 8689 - DNA, 25 bp, Artificial sequence  Extension Primer
  Primer
gcccacatgccagaaagcactctaa

SEQ ID NO: 8690 - DNA, 25 bp, Artificial sequence  Extension Primer
  Primer
aaagaaggtgaataagccctcagta

SEQ ID NO: 8691 - DNA, 25 bp, Artificial sequence  Extension Primer
  Primer
agatcaagaggaagaagagcatcta

SEQ ID NO: 8692 - DNA, 25 bp, Artificial sequence  Extension Primer
  Primer
aaatgctttgtgtgaaaataagaaa

SEQ ID NO: 8693 - DNA, 25 bp, Artificial sequence  Extension Primer
  Primer
ctcttcaaaatgatggtgtttattt

SEQ ID NO: 8694 - DNA, 25 bp, Artificial sequence  Extension Primer
  Primer
tccccaacctttttggcaccaagga

SEQ ID NO: 8695 - DNA, 25 bp, Artificial sequence  Extension Primer
  Primer
agatcatactagtccctactcctag

SEQ ID NO: 8696 - DNA, 25 bp, Artificial sequence  Extension Primer
  Primer
aatggaaactgtgattcacaagaga

SEQ ID NO: 8697 - DNA, 25 bp, Artificial sequence  Extension Primer
  Primer
cttcttcarttgcatcaggcctcca

SEQ ID NO: 8698 - DNA, 25 bp, Artificial sequence  Extension Primer
  Primer
gatggtatccctgagccatgtctaa

SEQ ID NO: 8699 - DNA, 25 bp, Artificial sequence  Extension Primer
  Primer
caagggaacagtacaagtattttga

SEQ ID NO: 8700 - DNA, 25 bp, Artificial sequence  Extension Primer
  Primer
cagtgatgattccactgattctcat

SEQ ID NO: 8701 - DNA, 25 bp, Artificial sequence  Extension Primer
  Primer
attgaaatagggaaatgacaaaagt

SEQ ID NO: 8702 - DNA, 25 bp, Artificial sequence  Extension Primer
  Primer
gggaagcgccatyggaagaaccact

SEQ ID NO: 8703 - DNA, 25 bp, Artificial sequence  Extension Primer
  Primer
gagtgacggaaattcagtgtacttt

SEQ ID NO: 8704 - DNA, 25 bp, Artificial sequence  Extension Primer
  Primer
tccaaattccatttggcaaagaata

SEQ ID NO: 8705 - DNA, 25 bp, Artificial sequence  Extension Primer
  Primer
atcctgcttgcaggccgtgagcttt

SEQ ID NO: 8706 - DNA, 25 bp, Artificial sequence  Extension Primer
  Primer
cgctgtcagtctcctgtctgccgag

SEQ ID NO: 8707 - DNA, 25 bp, Artificial sequence  Extension Primer
  Primer
ctctcaagagtcttttctagcacca

SEQ ID NO: 8708 - DNA, 25 bp, Artificial sequence  Extension Primer
  Primer
ctcgctccccgaccaattttctgaa

SEQ ID NO: 8709 - DNA, 25 bp, Artificial sequence  Extension Primer
  Primer
gtrtctgctgaaaacagcccccgac

SEQ ID NO: 8710 - DNA, 25 bp, Artificial sequence  Extension Primer
  Primer
ttttagatacttggggagccccgag

SEQ ID NO: 8711 - DNA, 25 bp, Artificial sequence  Extension Primer
  Primer
tttgctagatgccatagtgctggag

SEQ ID NO: 8712 - DNA, 25 bp, Artificial sequence  Extension Primer
  Primer
ggcttgaagaactgtattttgtcct

SEQ ID NO: 8713 - DNA, 25 bp, Artificial sequence  Extension Primer
  Primer
cacttatttatgtttcttccactgc

SEQ ID NO: 8714 - DNA, 25 bp, Artificial sequence  Extension Primer
  Primer
ggagcatgaatgsctccaaccaact

SEQ ID NO: 8715 - DNA, 25 bp, Artificial sequence  Extension Primer
  Primer
ctcactctyaactttgcacatttag

SEQ ID NO: 8716 - DNA, 25 bp, Artificial sequence  Extension Primer
  Primer
acaggattgaaaaggaacttagcac

SEQ ID NO: 8717 - DNA, 25 bp, Artificial sequence  Extension Primer
  Primer
tcttatcctgaattaagcattcctg

SEQ ID NO: 8718 - DNA, 25 bp, Artificial sequence  Extension Primer
  Primer
tcagttgtttccttcccattgacta

SEQ ID NO: 8719 - DNA, 25 bp, Artificial sequence  Extension Primer
  Primer
gttttattaacatctcctcattata

SEQ ID NO: 8720 - DNA, 25 bp, Artificial sequence  Extension Primer
  Primer
gaccatctgygttgtgctggggata

SEQ ID NO: 8721 - DNA, 25 bp, Artificial sequence  Extension Primer
  Primer
atggtagttttaaagaggggggcag

SEQ ID NO: 8722 - DNA, 25 bp, Artificial sequence  Extension Primer
  Primer
aggcagaatggtacagcctgtatac

SEQ ID NO: 8723 - DNA, 25 bp, Artificial sequence  Extension Primer
  Primer
tagattcctgcttcacaaactacca

SEQ ID NO: 8724 - DNA, 25 bp, Artificial sequence  Extension Primer
  Primer
ctctgacctcaactgtccaaataca

SEQ ID NO: 8725 - DNA, 25 bp, Artificial sequence  Extension Primer
  Primer
aatggttgatttcattaatattcag

SEQ ID NO: 8726 - DNA, 25 bp, Artificial sequence  Extension Primer
  Primer
gatcaacattaattgtggcaaaact

SEQ ID NO: 8727 - DNA, 25 bp, Artificial sequence  Extension Primer
  Primer
tcagcagccgctcctacaaacagtt

SEQ ID NO: 8728 - DNA, 25 bp, Artificial sequence  Extension Primer
  Primer
tacaaacagttmcttattgcatgga

SEQ ID NO: 8729 - DNA, 25 bp, Artificial sequence  Extension Primer
  Primer
gggaccgacatttcataatcaccac

SEQ ID NO: 8730 - DNA, 25 bp, Artificial sequence  Extension Primer
  Primer
actgccagttaacatgcatttcact

SEQ ID NO: 8731 - DNA, 25 bp, Artificial sequence  Extension Primer
  Primer
tcattcacactgacaattctgaaaa

SEQ ID NO: 8732 - DNA, 25 bp, Artificial sequence  Extension Primer
  Primer
ctgttccattcttgattcctgccca

SEQ ID NO: 8733 - DNA, 25 bp, Artificial sequence  Extension Primer
  Primer
ttgtcttcagaggctgagagcagac

SEQ ID NO: 8734 - DNA, 25 bp, Artificial sequence  Extension Primer
  Primer
aacacgttgatattttgattttgaa

SEQ ID NO: 8735 - DNA, 25 bp, Artificial sequence  Extension Primer
  Primer
actttacacactcaaataaacatgc

SEQ ID NO: 8736 - DNA, 25 bp, Artificial sequence  Extension Primer
  Primer
tagctagacactataakacacatgc

SEQ ID NO: 8737 - DNA, 25 bp, Artificial sequence  Extension Primer
  Primer
aaaaggtctgggatagagatgggca

SEQ ID NO: 8738 - DNA, 25 bp, Artificial sequence  Extension Primer
  Primer
tagtacaaggaaaggttgaaaataa

SEQ ID NO: 8739 - DNA, 25 bp, Artificial sequence  Extension Primer
  Primer
atggagccaagggacttcctgtttt

SEQ ID NO: 8740 - DNA, 25 bp, Artificial sequence  Extension Primer
  Primer
tgcctggaaaacctccttcttgaga

SEQ ID NO: 8741 - DNA, 25 bp, Artificial sequence  Extension Primer
  Primer
actgccttgaatgatatattgacac

SEQ ID NO: 8742 - DNA, 25 bp, Artificial sequence  Extension Primer
  Primer
gggcaggaagtcaataaagggtatg

SEQ ID NO: 8743 - DNA, 25 bp, Artificial sequence  Extension Primer
  Primer
atccagcattcaccctggacaggaa

SEQ ID NO: 8744 - DNA, 25 bp, Artificial sequence  Extension Primer
  Primer
tgatcaggccaacctgtgttcaaat

SEQ ID NO: 8745 - DNA, 25 bp, Artificial sequence  Extension Primer
  Primer
ctgtcctaaagaagggtaagagtaa

SEQ ID NO: 8746 - DNA, 25 bp, Artificial sequence  Extension Primer
  Primer
gcgttggggtaaactgcttgarcct

SEQ ID NO: 8747 - DNA, 25 bp, Artificial sequence  Extension Primer
  Primer
cagtgtaggaagagctgtattttag

SEQ ID NO: 8748 - DNA, 25 bp, Artificial sequence  Extension Primer
  Primer
ctggcttagtgaaagtttaaagatt

SEQ ID NO: 8749 - DNA, 25 bp, Artificial sequence  Extension Primer
  Primer
caacccaaggtggctccagcacatc

SEQ ID NO: 8750 - DNA, 25 bp, Artificial sequence  Extension Primer
  Primer
aggcaaagccataatttcctgttca

SEQ ID NO: 8751 - DNA, 25 bp, Artificial sequence  Extension Primer
  Primer
aagtmcatacaaataatggaattgt

SEQ ID NO: 8752 - DNA, 25 bp, Artificial sequence  Extension Primer
  Primer
agtgctccttctcatttatttcctt

SEQ ID NO: 8753 - DNA, 25 bp, Artificial sequence  Extension Primer
  Primer
ggaggccttgccccaaattgaccac

SEQ ID NO: 8754 - DNA, 25 bp, Artificial sequence  Extension Primer
  Primer
cttccctttcagtttaatcctacag

SEQ ID NO: 8755 - DNA, 25 bp, Artificial sequence  Extension Primer
  Primer
cagagaatccaaacactatccccct

SEQ ID NO: 8756 - DNA, 25 bp, Artificial sequence  Extension Primer
  Primer
tgtgagagtcaagttctgaccagta

SEQ ID NO: 8757 - DNA, 25 bp, Artificial sequence  Extension Primer
  Primer
gaaacctatgatcatcaaaacctga

SEQ ID NO: 8758 - DNA, 25 bp, Artificial sequence  Extension Primer
  Primer
agaaatcttcaggtctgtgtgaatt

SEQ ID NO: 8759 - DNA, 25 bp, Artificial sequence  Extension Primer
  Primer
tactgagtctagatgaatttgaaga

SEQ ID NO: 8760 - DNA, 25 bp, Artificial sequence  Extension Primer
  Primer
ttatatcgcaaagtgggaagactga

SEQ ID NO: 8761 - DNA, 22 bp, Artificial sequence  Extension Primer
  Primer
tctgcatttcttacgtctgagt

SEQ ID NO: 8762 - DNA, 25 bp, Artificial sequence  Extension Primer
  Primer
gactgatgaatttcaaagcccctaa

SEQ ID NO: 8763 - DNA, 25 bp, Artificial sequence  Extension Primer
  Primer
aactgcttaaggctgccaaggacag

SEQ ID NO: 8764 - DNA, 25 bp, Artificial sequence  Extension Primer
  Primer
gacagggctggaggcaaaggaatgt

SEQ ID NO: 8765 - DNA, 25 bp, Artificial sequence  Extension Primer
  Primer
ttaaaaatatttgatccactatggt

SEQ ID NO: 8766 - DNA, 25 bp, Artificial sequence  Extension Primer
  Primer
tacagatacccaggaagtgagtggc

SEQ ID NO: 8767 - DNA, 25 bp, Artificial sequence  Extension Primer
  Primer
gcatccccaggtagtaagtggcccc

SEQ ID NO: 8768 - DNA, 25 bp, Artificial sequence  Extension Primer
  Primer
catgactgaagcgacttagcatgca

SEQ ID NO: 8769 - DNA, 25 bp, Artificial sequence  Extension Primer
  Primer
aagyaaccgaagtaaaatcycagga

SEQ ID NO: 8770 - DNA, 25 bp, Artificial sequence  Extension Primer
  Primer
gaccaaactactaaaagtttggggc

SEQ ID NO: 8771 - DNA, 25 bp, Artificial sequence  Extension Primer
  Primer
atggataygcacaattgacaattta

SEQ ID NO: 8772 - DNA, 25 bp, Artificial sequence  Extension Primer
  Primer
gtttttactgctatactgttgtcct

SEQ ID NO: 8773 - DNA, 25 bp, Artificial sequence  Extension Primer
  Primer
tcctgtccatgggattctccaggta

SEQ ID NO: 8774 - DNA, 25 bp, Artificial sequence  Extension Primer
  Primer
ccaagttcttatcattcttctgatg

SEQ ID NO: 8775 - DNA, 25 bp, Artificial sequence  Extension Primer
  Primer
attgggcctgcatattatgagattg

SEQ ID NO: 8776 - DNA, 25 bp, Artificial sequence  Extension Primer
  Primer
tcccggataggactggaagttcctc

SEQ ID NO: 8777 - DNA, 25 bp, Artificial sequence  Extension Primer
  Primer
aaatagacaaagcaagtcacaaggc

SEQ ID NO: 8778 - DNA, 25 bp, Artificial sequence  Extension Primer
  Primer
ttagctcagttcaaacatcagtcag

SEQ ID NO: 8779 - DNA, 25 bp, Artificial sequence  Extension Primer
  Primer
attctcagtgaaaatgtgttgctga

SEQ ID NO: 8780 - DNA, 25 bp, Artificial sequence  Extension Primer
  Primer
aattcatttgccatagccaccttcc

SEQ ID NO: 8781 - DNA, 25 bp, Artificial sequence  Extension Primer
  Primer
tttgaggacacatttgaaaaaaggg

SEQ ID NO: 8782 - DNA, 25 bp, Artificial sequence  Extension Primer
  Primer
atacaaattctaatgtagaaacata

SEQ ID NO: 8783 - DNA, 25 bp, Artificial sequence  Extension Primer
  Primer
cggtacttaatcactgtggaaagaa

SEQ ID NO: 8784 - DNA, 25 bp, Artificial sequence  Extension Primer
  Primer
gcttattaaatgcaggttctaattc

SEQ ID NO: 8785 - DNA, 25 bp, Artificial sequence  Extension Primer
  Primer
ccagaggctcatgccacagttgcta

SEQ ID NO: 8786 - DNA, 25 bp, Artificial sequence  Extension Primer
  Primer
aactgccttgtcagttagttaccat

SEQ ID NO: 8787 - DNA, 25 bp, Artificial sequence  Extension Primer
  Primer
ggataccctttccatgggctcttcc

SEQ ID NO: 8788 - DNA, 25 bp, Artificial sequence  Extension Primer
  Primer
gtcctatgttttgagagccatccta

SEQ ID NO: 8789 - DNA, 25 bp, Artificial sequence  Extension Primer
  Primer
atcctgaagttattttccagcagag

SEQ ID NO: 8790 - DNA, 25 bp, Artificial sequence  Extension Primer
  Primer
caccatagagccgctggtctcccac

SEQ ID NO: 8791 - DNA, 25 bp, Artificial sequence  Extension Primer
  Primer
cttcttaaggtcttttytcttcatt

SEQ ID NO: 8792 - DNA, 25 bp, Artificial sequence  Extension Primer
  Primer
taaggcatgaatggtagagagaagg

SEQ ID NO: 8793 - DNA, 25 bp, Artificial sequence  Extension Primer
  Primer
taatcctcctgctaatgcaaagacc

SEQ ID NO: 8794 - DNA, 25 bp, Artificial sequence  Extension Primer
  Primer
gctgattctcctgcaaggtcttccc

SEQ ID NO: 8795 - DNA, 25 bp, Artificial sequence  Extension Primer
  Primer
aggccctaccccaaactaaacattg

SEQ ID NO: 8796 - DNA, 25 bp, Artificial sequence  Extension Primer
  Primer
atagtttggtgtatcaggggagaac

SEQ ID NO: 8797 - DNA, 25 bp, Artificial sequence  Extension Primer
  Primer
ttgacagaaatgggactactgggct

SEQ ID NO: 8798 - DNA, 25 bp, Artificial sequence  Extension Primer
  Primer
acttttaagtaaccttaaactaata

SEQ ID NO: 8799 - DNA, 25 bp, Artificial sequence  Extension Primer
  Primer
accccaggggcacgtctaatatctg

SEQ ID NO: 8800 - DNA, 25 bp, Artificial sequence  Extension Primer
  Primer
tcctctagctatttcctttatagtg

SEQ ID NO: 8801 - DNA, 25 bp, Artificial sequence  Extension Primer
  Primer
tratgctgtaaaaactgtggtctaa

SEQ ID NO: 8802 - DNA, 25 bp, Artificial sequence  Extension Primer
  Primer
gtctactatgtgatttgcaagaatt

SEQ ID NO: 8803 - DNA, 25 bp, Artificial sequence  Extension Primer
  Primer
gcctattcagtgttgtttcctttaa

SEQ ID NO: 8804 - DNA, 25 bp, Artificial sequence  Extension Primer
  Primer
gctaggccaagagaaaacagccaag

SEQ ID NO: 8805 - DNA, 25 bp, Artificial sequence  Extension Primer
  Primer
cttatgactgtgggcagaactcttt

SEQ ID NO: 8806 - DNA, 25 bp, Artificial sequence  Extension Primer
  Primer
ttacagatgggagctcattgatagc

SEQ ID NO: 8807 - DNA, 25 bp, Artificial sequence  Extension Primer
  Primer
tcatgcatgtaagaagaaacaccaa

SEQ ID NO: 8808 - DNA, 25 bp, Artificial sequence  Extension Primer
  Primer
accacacacaaaaagaagaaactct

SEQ ID NO: 8809 - DNA, 25 bp, Artificial sequence  Extension Primer
  Primer
tggtgctcatgttccgtggatcttt

SEQ ID NO: 8810 - DNA, 25 bp, Artificial sequence  Extension Primer
  Primer
ttgtgatcttaaggtggacatatat

SEQ ID NO: 8811 - DNA, 25 bp, Artificial sequence  Extension Primer
  Primer
aagcatctatatgtgcaggactcat

SEQ ID NO: 8812 - DNA, 25 bp, Artificial sequence  Extension Primer
  Primer
ggtcttaaaamaattatgaaaaaaa

SEQ ID NO: 8813 - DNA, 25 bp, Artificial sequence  Extension Primer
  Primer
tatggaataattcagatatttttct

SEQ ID NO: 8814 - DNA, 25 bp, Artificial sequence  Extension Primer
  Primer
taagccccacgtgtggtctttgctg

SEQ ID NO: 8815 - DNA, 25 bp, Artificial sequence  Extension Primer
  Primer
tgtgctgggggaacaattcaggcca

SEQ ID NO: 8816 - DNA, 25 bp, Artificial sequence  Extension Primer
  Primer
agcaaaaggcagctcaagatgtcac

SEQ ID NO: 8817 - DNA, 25 bp, Artificial sequence  Extension Primer
  Primer
agggaagactctgaccgcccggaag

SEQ ID NO: 8818 - DNA, 25 bp, Artificial sequence  Extension Primer
  Primer
agcaagggagcaatcaggattcaag

SEQ ID NO: 8819 - DNA, 25 bp, Artificial sequence  Extension Primer
  Primer
acacaatgcccaggcactcatattg

SEQ ID NO: 8820 - DNA, 25 bp, Artificial sequence  Extension Primer
  Primer
tatctgtgtgaagatatatcctgag

SEQ ID NO: 8821 - DNA, 25 bp, Artificial sequence  Extension Primer
  Primer
ctggggagaaaggcagtaatagacc

SEQ ID NO: 8822 - DNA, 25 bp, Artificial sequence  Extension Primer
  Primer
aatgaaaaggggtcagggaaaagag

SEQ ID NO: 8823 - DNA, 25 bp, Artificial sequence  Extension Primer
  Primer
cccaggggttgctccctggaataag

SEQ ID NO: 8824 - DNA, 25 bp, Artificial sequence  Extension Primer
  Primer
aaagaaaaaaacacgatttctgagc

SEQ ID NO: 8825 - DNA, 25 bp, Artificial sequence  Extension Primer
  Primer
gtcagggaaaagagkgttgcagatt

SEQ ID NO: 8826 - DNA, 25 bp, Artificial sequence  Extension Primer
  Primer
ttggtgttgaaataaagagaacatt

SEQ ID NO: 8827 - DNA, 25 bp, Artificial sequence  Extension Primer
  Primer
tgccatgcctctagtctggcayttt

SEQ ID NO: 8828 - DNA, 25 bp, Artificial sequence  Extension Primer
  Primer
cctgagcactttcttgtctctgggc

SEQ ID NO: 8829 - DNA, 25 bp, Artificial sequence  Extension Primer
  Primer
caatcacttgggcctttcaagatga

SEQ ID NO: 8830 - DNA, 25 bp, Artificial sequence  Extension Primer
  Primer
atggtgagtgggcgttcggggtgct

SEQ ID NO: 8831 - DNA, 25 bp, Artificial sequence  Extension Primer
  Primer
tccwtaccccttcctcaccctttac

SEQ ID NO: 8832 - DNA, 25 bp, Artificial sequence  Extension Primer
  Primer
actggactagccactgtcagcagac

SEQ ID NO: 8833 - DNA, 25 bp, Artificial sequence  Extension Primer
  Primer
gatctcatttgctgtatgtgggatt

SEQ ID NO: 8834 - DNA, 25 bp, Artificial sequence  Extension Primer
  Primer
acccccggggctgtcaaaagggcac

SEQ ID NO: 8835 - DNA, 25 bp, Artificial sequence  Extension Primer
  Primer
tattagactaaggaggcaaagctga

SEQ ID NO: 8836 - DNA, 25 bp, Artificial sequence  Extension Primer
  Primer
tagaaagaaatatgtgacaccagat

SEQ ID NO: 8837 - DNA, 25 bp, Artificial sequence  Extension Primer
  Primer
taggtaaatccttttgtgacccaca

SEQ ID NO: 8838 - DNA, 25 bp, Artificial sequence  Extension Primer
  Primer
gagggacagtggacctgttscggat

SEQ ID NO: 8839 - DNA, 25 bp, Artificial sequence  Extension Primer
  Primer
ctccctcacgtgcttcctatgcaga

SEQ ID NO: 8840 - DNA, 25 bp, Artificial sequence  Extension Primer
  Primer
aataaacacatttgttgtaaatgat

SEQ ID NO: 8841 - DNA, 25 bp, Artificial sequence  Extension Primer
  Primer
tgattaaacttctaaacattcagag

SEQ ID NO: 8842 - DNA, 25 bp, Artificial sequence  Extension Primer
  Primer
tatatcattttcagagttatggcta

SEQ ID NO: 8843 - DNA, 25 bp, Artificial sequence  Extension Primer
  Primer
ccctcctcatcctgctttccagtca

SEQ ID NO: 8844 - DNA, 25 bp, Artificial sequence  Extension Primer
  Primer
aatttagaatgctaatgagttaagt

SEQ ID NO: 8845 - DNA, 22 bp, Artificial sequence  Extension Primer
  Primer
ttttgtttttggtggtgacagt

SEQ ID NO: 8846 - DNA, 25 bp, Artificial sequence  Extension Primer
  Primer
gaaccaactgtactagcaaattatt

SEQ ID NO: 8847 - DNA, 25 bp, Artificial sequence  Extension Primer
  Primer
agagagagggagagagaaggaaggc

SEQ ID NO: 8848 - DNA, 25 bp, Artificial sequence  Extension Primer
  Primer
tgtgtcagttttgcttcgtatattt

SEQ ID NO: 8849 - DNA, 25 bp, Artificial sequence  Extension Primer
  Primer
ctgcaggtggattttttacctccca

SEQ ID NO: 8850 - DNA, 25 bp, Artificial sequence  Extension Primer
  Primer
gtttccacttttcgtttttcaagag

SEQ ID NO: 8851 - DNA, 25 bp, Artificial sequence  Extension Primer
  Primer
tgggtattagcttatgcgtgtcacc

SEQ ID NO: 8852 - DNA, 25 bp, Artificial sequence  Extension Primer
  Primer
taaaaacatctatttggaatgtagc

SEQ ID NO: 8853 - DNA, 22 bp, Artificial sequence  Extension Primer
  Primer
tgatgttcccagattgactcct

SEQ ID NO: 8854 - DNA, 25 bp, Artificial sequence  Extension Primer
  Primer
gattacttctctcacaatgttagac

SEQ ID NO: 8855 - DNA, 25 bp, Artificial sequence  Extension Primer
  Primer
cactctcattgttctaartagttaa

SEQ ID NO: 8856 - DNA, 25 bp, Artificial sequence  Extension Primer
  Primer
cgctcttcagcgcttcctgggtcct

SEQ ID NO: 8857 - DNA, 25 bp, Artificial sequence  Extension Primer
  Primer
tccttccctcacccctgaagtctag

SEQ ID NO: 8858 - DNA, 25 bp, Artificial sequence  Extension Primer
  Primer
cttgagcagttgtctcatatactca

SEQ ID NO: 8859 - DNA, 25 bp, Artificial sequence  Extension Primer
  Primer
cagtaatatttacaattccttctcc

SEQ ID NO: 8860 - DNA, 25 bp, Artificial sequence  Extension Primer
  Primer
caaccacggcacacgcgggcccagc

SEQ ID NO: 8861 - DNA, 25 bp, Artificial sequence  Extension Primer
  Primer
tcagcgytgtccagcaagttcccaa

SEQ ID NO: 8862 - DNA, 25 bp, Artificial sequence  Extension Primer
  Primer
caacacatatacatatgtataaaag

SEQ ID NO: 8863 - DNA, 25 bp, Artificial sequence  Extension Primer
  Primer
tgcagcatgaggagatgattctgtg

SEQ ID NO: 8864 - DNA, 25 bp, Artificial sequence  Extension Primer
  Primer
gctccagaaagccccctccatcctc

SEQ ID NO: 8865 - DNA, 25 bp, Artificial sequence  Extension Primer
  Primer
agcccagcaggagcccagcagaagc

SEQ ID NO: 8866 - DNA, 25 bp, Artificial sequence  Extension Primer
  Primer
attttatattttaagtgtacagttc

SEQ ID NO: 8867 - DNA, 25 bp, Artificial sequence  Extension Primer
  Primer
gtcaactggcttgccaggacaaaag

SEQ ID NO: 8868 - DNA, 25 bp, Artificial sequence  Extension Primer
  Primer
tgggagagatgaagcaagtatcaca

SEQ ID NO: 8869 - DNA, 25 bp, Artificial sequence  Extension Primer
  Primer
taaccgagttcctatgatgtactgg

SEQ ID NO: 8870 - DNA, 25 bp, Artificial sequence  Extension Primer
  Primer
acaaaatagatggtcaatagtaagc

SEQ ID NO: 8871 - DNA, 25 bp, Artificial sequence  Extension Primer
  Primer
tgaatgtaagcaataatacaggaag

SEQ ID NO: 8872 - DNA, 25 bp, Artificial sequence  Extension Primer
  Primer
ttcttgatagatttgtgcaaagcct

SEQ ID NO: 8873 - DNA, 25 bp, Artificial sequence  Extension Primer
  Primer
tatcaatatttatagaagactaaaa

SEQ ID NO: 8874 - DNA, 25 bp, Artificial sequence  Extension Primer
  Primer
atcccttgtgttagaagaacattct

SEQ ID NO: 8875 - DNA, 25 bp, Artificial sequence  Extension Primer
  Primer
tttytctaacaccattgtctctgag

SEQ ID NO: 8876 - DNA, 25 bp, Artificial sequence  Extension Primer
  Primer
gacgtactttgggagagacgtactt

SEQ ID NO: 8877 - DNA, 25 bp, Artificial sequence  Extension Primer
  Primer
acttaacctttcaagatttcagttt

SEQ ID NO: 8878 - DNA, 25 bp, Artificial sequence  Extension Primer
  Primer
aaaaattactttaaacgtggcaaag

SEQ ID NO: 8879 - DNA, 25 bp, Artificial sequence  Extension Primer
  Primer
ttctgcaaaaacatgtggtttattw

SEQ ID NO: 8880 - DNA, 25 bp, Artificial sequence  Extension Primer
  Primer
actcctatagctaaaaggagagtat

SEQ ID NO: 8881 - DNA, 25 bp, Artificial sequence  Extension Primer
  Primer
atagaaattctgtttagttttttgg

SEQ ID NO: 8882 - DNA, 25 bp, Artificial sequence  Extension Primer
  Primer
agatagtcacaaatgcctccaccgc

SEQ ID NO: 8883 - DNA, 25 bp, Artificial sequence  Extension Primer
  Primer
tggggggaaaaaaccctacatgaaa

SEQ ID NO: 8884 - DNA, 25 bp, Artificial sequence  Extension Primer
  Primer
cattatcaaaaccaaggtgctattt

SEQ ID NO: 8885 - DNA, 25 bp, Artificial sequence  Extension Primer
  Primer
gaaagtgaaaggagaagtgagagtg

SEQ ID NO: 8886 - DNA, 25 bp, Artificial sequence  Extension Primer
  Primer
ttagtctccattgtagctgtgaaga

SEQ ID NO: 8887 - DNA, 25 bp, Artificial sequence  Extension Primer
  Primer
gaattcaaacagacyyaagcaggca

SEQ ID NO: 8888 - DNA, 25 bp, Artificial sequence  Extension Primer
  Primer
tgaaaataagaaaygatgcccaact

SEQ ID NO: 8889 - DNA, 22 bp, Artificial sequence  Extension Primer
  Primer
caggaccaggaactgagagaga

SEQ ID NO: 8890 - DNA, 25 bp, Artificial sequence  Extension Primer
  Primer
aaaaaaaaaaaacctgttcccatga

SEQ ID NO: 8891 - DNA, 25 bp, Artificial sequence  Extension Primer
  Primer
aaactttactaaagtggaaaastgc

SEQ ID NO: 8892 - DNA, 25 bp, Artificial sequence  Extension Primer
  Primer
gagtgattaatcttatttcaaggta

SEQ ID NO: 8893 - DNA, 25 bp, Artificial sequence  Extension Primer
  Primer
acagatacagacacagggcctccac

SEQ ID NO: 8894 - DNA, 25 bp, Artificial sequence  Extension Primer
  Primer
tatgaggtcactcatgatttacaga

SEQ ID NO: 8895 - DNA, 25 bp, Artificial sequence  Extension Primer
  Primer
atggtaaatccaccaaacaattama

SEQ ID NO: 8896 - DNA, 25 bp, Artificial sequence  Extension Primer
  Primer
gccctgttccctaacacagtaagga

SEQ ID NO: 8897 - DNA, 25 bp, Artificial sequence  Extension Primer
  Primer
gaatrgaccttgttgacttatggag

SEQ ID NO: 8898 - DNA, 25 bp, Artificial sequence  Extension Primer
  Primer
attaccttcaggcccttaaataaga

SEQ ID NO: 8899 - DNA, 25 bp, Artificial sequence  Extension Primer
  Primer
aataatgttttaaagaaagaaaata

SEQ ID NO: 8900 - DNA, 25 bp, Artificial sequence  Extension Primer
  Primer
ccagtgacattgtaaattttaatct

SEQ ID NO: 8901 - DNA, 25 bp, Artificial sequence  Extension Primer
  Primer
attgttattagagacctagttaaag

SEQ ID NO: 8902 - DNA, 25 bp, Artificial sequence  Extension Primer
  Primer
atttaaaatattaggtgactagaca

SEQ ID NO: 8903 - DNA, 25 bp, Artificial sequence  Extension Primer
  Primer
gaagtacaggatgccatgtgttata

SEQ ID NO: 8904 - DNA, 25 bp, Artificial sequence  Extension Primer
  Primer
agacctgaacactccaaaggatata

SEQ ID NO: 8905 - DNA, 25 bp, Artificial sequence  Extension Primer
  Primer
aatttcggtagagaaaaggtgtgtc

SEQ ID NO: 8906 - DNA, 25 bp, Artificial sequence  Extension Primer
  Primer
ttacattttcagcagaaacacttaa

SEQ ID NO: 8907 - DNA, 25 bp, Artificial sequence  Extension Primer
  Primer
tatttccaataacagctctcatttt

SEQ ID NO: 8908 - DNA, 25 bp, Artificial sequence  Extension Primer
  Primer
agcagttctctctcagatgtgtctt

SEQ ID NO: 8909 - DNA, 25 bp, Artificial sequence  Extension Primer
  Primer
aacgccaatacactccctcttaaat

SEQ ID NO: 8910 - DNA, 25 bp, Artificial sequence  Extension Primer
  Primer
cctactcaaatctgcttttgaatcc

SEQ ID NO: 8911 - DNA, 25 bp, Artificial sequence  Extension Primer
  Primer
aactatccaattgtgacaacttgtt

SEQ ID NO: 8912 - DNA, 25 bp, Artificial sequence  Extension Primer
  Primer
gaagagtctgtttcaaattcaaatg

SEQ ID NO: 8913 - DNA, 25 bp, Artificial sequence  Extension Primer
  Primer
atgccagggcactggaaagttctaa

SEQ ID NO: 8914 - DNA, 25 bp, Artificial sequence  Extension Primer
  Primer
tttttgctttttcatactgttcatg

SEQ ID NO: 8915 - DNA, 25 bp, Artificial sequence  Extension Primer
  Primer
tgggtttattctacttggagtatac

SEQ ID NO: 8916 - DNA, 25 bp, Artificial sequence  Extension Primer
  Primer
gctatgctttatgaggaagatcaca

SEQ ID NO: 8917 - DNA, 25 bp, Artificial sequence  Extension Primer
  Primer
cgtcatgtaaactttatgaagaaat

SEQ ID NO: 8918 - DNA, 25 bp, Artificial sequence  Extension Primer
  Primer
ctgccctccctgggctctgggtttg

SEQ ID NO: 8919 - DNA, 25 bp, Artificial sequence  Extension Primer
  Primer
ttcatttccgtagattagtatgtcc

SEQ ID NO: 8920 - DNA, 25 bp, Artificial sequence  Extension Primer
  Primer
ctgcctacaagtgtcttttccaaca

SEQ ID NO: 8921 - DNA, 25 bp, Artificial sequence  Extension Primer
  Primer
actttagtgggtagaatcaccaaac

SEQ ID NO: 8922 - DNA, 22 bp, Artificial sequence  Extension Primer
  Primer
caataatgtatgggtcagctat

SEQ ID NO: 8923 - DNA, 25 bp, Artificial sequence  Extension Primer
  Primer
attttggctgaactcacattttttt

SEQ ID NO: 8924 - DNA, 25 bp, Artificial sequence  Extension Primer
  Primer
ttttcctttgacttttttagcgaac

SEQ ID NO: 8925 - DNA, 25 bp, Artificial sequence  Extension Primer
  Primer
tctctagcaccttctctagcataac

SEQ ID NO: 8926 - DNA, 25 bp, Artificial sequence  Extension Primer
  Primer
tcataaaagtttgtaagaaggaaaa

SEQ ID NO: 8927 - DNA, 25 bp, Artificial sequence  Extension Primer
  Primer
tgacgtctgcaaacaccagtgaata

SEQ ID NO: 8928 - DNA, 25 bp, Artificial sequence  Extension Primer
  Primer
gccctattctgcgggagacttgctc

SEQ ID NO: 8929 - DNA, 25 bp, Artificial sequence  Extension Primer
  Primer
tagaagataaaggcaaagaggactt

SEQ ID NO: 8930 - DNA, 25 bp, Artificial sequence  Extension Primer
  Primer
cttcccaaattaataaatagactct

SEQ ID NO: 8931 - DNA, 25 bp, Artificial sequence  Extension Primer
  Primer
aggagagataaggcttcacctgtga

SEQ ID NO: 8932 - DNA, 25 bp, Artificial sequence  Extension Primer
  Primer
gggtgtggtggctcttaacaggtca

SEQ ID NO: 8933 - DNA, 25 bp, Artificial sequence  Extension Primer
  Primer
tttattttagtactctactggcttc

SEQ ID NO: 8934 - DNA, 25 bp, Artificial sequence  Extension Primer
  Primer
cctcctctcccaccccccaggtttg

SEQ ID NO: 8935 - DNA, 25 bp, Artificial sequence  Extension Primer
  Primer
ggtttgctctggggccacagcctca

SEQ ID NO: 8936 - DNA, 25 bp, Artificial sequence  Extension Primer
  Primer
gtctgagggtctctgagtggacttt

SEQ ID NO: 8937 - DNA, 25 bp, Artificial sequence  Extension Primer
  Primer
atctcctgcattccactgcaaaacc

SEQ ID NO: 8938 - DNA, 25 bp, Artificial sequence  Extension Primer
  Primer
gattcgcttgaaaaccgacgcggag

SEQ ID NO: 8939 - DNA, 25 bp, Artificial sequence  Extension Primer
  Primer
ggtgaattttatgttatgcatatta

SEQ ID NO: 8940 - DNA, 25 bp, Artificial sequence  Extension Primer
  Primer
gaacttctatcttgaccacccctta

SEQ ID NO: 8941 - DNA, 25 bp, Artificial sequence  Extension Primer
  Primer
aacaacacaaaacataggctcttca

SEQ ID NO: 8942 - DNA, 25 bp, Artificial sequence  Extension Primer
  Primer
ttttcacctcatttagtaaccctcc

SEQ ID NO: 8943 - DNA, 25 bp, Artificial sequence  Extension Primer
  Primer
tatcaactcaaagaatgaaagagcc

SEQ ID NO: 8944 - DNA, 25 bp, Artificial sequence  Extension Primer
  Primer
tctcagagtgcagtgtttatatacc

SEQ ID NO: 8945 - DNA, 25 bp, Artificial sequence  Extension Primer
  Primer
gtatcaatatctttgaagcccaatg

SEQ ID NO: 8946 - DNA, 25 bp, Artificial sequence  Extension Primer
  Primer
agcccaagttccaaagtaaacgatt

SEQ ID NO: 8947 - DNA, 25 bp, Artificial sequence  Extension Primer
  Primer
ttttaatgatgctgctgtcataatg

SEQ ID NO: 8948 - DNA, 25 bp, Artificial sequence  Extension Primer
  Primer
acccccactcgggccagcagaagct

SEQ ID NO: 8949 - DNA, 25 bp, Artificial sequence  Extension Primer
  Primer
agaggtttataaatgtgctccctcc

SEQ ID NO: 8950 - DNA, 22 bp, Artificial sequence  Extension Primer
  Primer
gatgagaacatgcttttgctcc

SEQ ID NO: 8951 - DNA, 25 bp, Artificial sequence  Extension Primer
  Primer
gactgccactggggcactccggacc

SEQ ID NO: 8952 - DNA, 25 bp, Artificial sequence  Extension Primer
  Primer
gagaacctatctaatttgagcttca

SEQ ID NO: 8953 - DNA, 25 bp, Artificial sequence  Extension Primer
  Primer
ggtggctctagaaaaaaatcccttc

SEQ ID NO: 8954 - DNA, 25 bp, Artificial sequence  Extension Primer
  Primer
agagtcttgaggaaagtcttcattt

SEQ ID NO: 8955 - DNA, 25 bp, Artificial sequence  Extension Primer
  Primer
actgaaaggtgagagatgyygaggg

SEQ ID NO: 8956 - DNA, 25 bp, Artificial sequence  Extension Primer
  Primer
ccctctatccaaaacaatgtattca

SEQ ID NO: 8957 - DNA, 25 bp, Artificial sequence  Extension Primer
  Primer
ggcatctcatggctgagcacaaccc

SEQ ID NO: 8958 - DNA, 25 bp, Artificial sequence  Extension Primer
  Primer
aatgtaaaaggacaaagcgattctt

SEQ ID NO: 8959 - DNA, 25 bp, Artificial sequence  Extension Primer
  Primer
gtcacacacactcatgcgagaaaga

SEQ ID NO: 8960 - DNA, 25 bp, Artificial sequence  Extension Primer
  Primer
gtaaatgtggaaaagccttttccca

SEQ ID NO: 8961 - DNA, 25 bp, Artificial sequence  Extension Primer
  Primer
aggagcggagcacacatgcacagtg

SEQ ID NO: 8962 - DNA, 25 bp, Artificial sequence  Extension Primer
  Primer
acctttgttcacctaaataacagag

SEQ ID NO: 8963 - DNA, 25 bp, Artificial sequence  Extension Primer
  Primer
acagcccttccctgatcctctgcca

SEQ ID NO: 8964 - DNA, 22 bp, Artificial sequence  Extension Primer
  Primer
aaggtgcgtgcgccccgcgtgc

SEQ ID NO: 8965 - DNA, 25 bp, Artificial sequence  Extension Primer
  Primer
ggttgttgcctcacacactgcttca

SEQ ID NO: 8966 - DNA, 25 bp, Artificial sequence  Extension Primer
  Primer
acacraacagaattttatgcagata

SEQ ID NO: 8967 - DNA, 25 bp, Artificial sequence  Extension Primer
  Primer
ccatrtatctgcataaaattctgtt

SEQ ID NO: 8968 - DNA, 25 bp, Artificial sequence  Extension Primer
  Primer
atagcaggaaggaaaaagatgtgtg

SEQ ID NO: 8969 - DNA, 25 bp, Artificial sequence  Extension Primer
  Primer
acctgtaaaaattataggaaattca

SEQ ID NO: 8970 - DNA, 25 bp, Artificial sequence  Extension Primer
  Primer
ggataaacaacaaggtcctaccgta

SEQ ID NO: 8971 - DNA, 25 bp, Artificial sequence  Extension Primer
  Primer
tgatacctaggttaaatagtcagaa

SEQ ID NO: 8972 - DNA, 25 bp, Artificial sequence  Extension Primer
  Primer
ttgtcaattcctcccaaagagagtg

SEQ ID NO: 8973 - DNA, 25 bp, Artificial sequence  Extension Primer
  Primer
tctaagctgggatcccagttatgac

SEQ ID NO: 8974 - DNA, 25 bp, Artificial sequence  Extension Primer
  Primer
actctccaccgattcataaagctcc

SEQ ID NO: 8975 - DNA, 25 bp, Artificial sequence  Extension Primer
  Primer
taacaataatagtcatttctaaaat

SEQ ID NO: 8976 - DNA, 25 bp, Artificial sequence  Extension Primer
  Primer
aattgctttacaatactggtttgat

SEQ ID NO: 8977 - DNA, 25 bp, Artificial sequence  Extension Primer
  Primer
gtcctttccaacttggcagggtcca

SEQ ID NO: 8978 - DNA, 25 bp, Artificial sequence  Extension Primer
  Primer
tcataaattcagaattattttgatc

SEQ ID NO: 8979 - DNA, 25 bp, Artificial sequence  Extension Primer
  Primer
tccctgagagggaggtggggtcctc

SEQ ID NO: 8980 - DNA, 25 bp, Artificial sequence  Extension Primer
  Primer
gttagaatagttaagaaaactgaat

SEQ ID NO: 8981 - DNA, 25 bp, Artificial sequence  Extension Primer
  Primer
gtaagatttcacacatttaaaactg

SEQ ID NO: 8982 - DNA, 25 bp, Artificial sequence  Extension Primer
  Primer
acctcatgcatgtctccatcaacaa

SEQ ID NO: 8983 - DNA, 25 bp, Artificial sequence  Extension Primer
  Primer
gtctcattatcaggaaaatggactc

SEQ ID NO: 8984 - DNA, 22 bp, Artificial sequence  Extension Primer
  Primer
tcagggttagaagtctgaaact

SEQ ID NO: 8985 - DNA, 25 bp, Artificial sequence  Extension Primer
  Primer
aatctaattacaagagaacacattc

SEQ ID NO: 8986 - DNA, 25 bp, Artificial sequence  Extension Primer
  Primer
cctgcgtctgcagattgcggtgttc

SEQ ID NO: 8987 - DNA, 25 bp, Artificial sequence  Extension Primer
  Primer
atggactcrgggaggggtgagtgtg

SEQ ID NO: 8988 - DNA, 25 bp, Artificial sequence  Extension Primer
  Primer
gcctggggaagggacatgacactag

SEQ ID NO: 8989 - DNA, 25 bp, Artificial sequence  Extension Primer
  Primer
ccaagaaaaatgcagagaaacttta

SEQ ID NO: 8990 - DNA, 25 bp, Artificial sequence  Extension Primer
  Primer
ctgttttaccactgatgtgattttc

SEQ ID NO: 8991 - DNA, 25 bp, Artificial sequence  Extension Primer
  Primer
gaggacataaagatcctgggtgctg

SEQ ID NO: 8992 - DNA, 25 bp, Artificial sequence  Extension Primer
  Primer
gtaggagcgtgtacatgtattcata

SEQ ID NO: 8993 - DNA, 25 bp, Artificial sequence  Extension Primer
  Primer
aggtcttgttaaacacacagcagga

SEQ ID NO: 8994 - DNA, 25 bp, Artificial sequence  Extension Primer
  Primer
gccatggaccgctgatcctgctccg

SEQ ID NO: 8995 - DNA, 25 bp, Artificial sequence  Extension Primer
  Primer
aatacaatggactttattctagcag

SEQ ID NO: 8996 - DNA, 25 bp, Artificial sequence  Extension Primer
  Primer
ccaaacttgtgtggtccttagattc

SEQ ID NO: 8997 - DNA, 25 bp, Artificial sequence  Extension Primer
  Primer
atatagaaaatacactgatgcacta

SEQ ID NO: 8998 - DNA, 25 bp, Artificial sequence  Extension Primer
  Primer
gccaggcacacgacacagctctccc

SEQ ID NO: 8999 - DNA, 25 bp, Artificial sequence  Extension Primer
  Primer
ggactcrgggaggggtgagtgtgya

SEQ ID NO: 9000 - DNA, 25 bp, Artificial sequence  Extension Primer
  Primer
tcagttacatagaaaattattctct

SEQ ID NO: 9001 - DNA, 25 bp, Artificial sequence  Extension Primer
  Primer
gaacctcagtttcaccatctctgcg

SEQ ID NO: 9002 - DNA, 25 bp, Artificial sequence  Extension Primer
  Primer
gtttgatacggtgttaagaatgatg

SEQ ID NO: 9003 - DNA, 25 bp, Artificial sequence  Extension Primer
  Primer
gaatatccctatcatgtcatctgtc

SEQ ID NO: 9004 - DNA, 25 bp, Artificial sequence  Extension Primer
  Primer
actgatgtattattcatttgtaaag

SEQ ID NO: 9005 - DNA, 25 bp, Artificial sequence  Extension Primer
  Primer
caaaggcatataaaacattttagat

SEQ ID NO: 9006 - DNA, 25 bp, Artificial sequence  Extension Primer
  Primer
tgatgggtatgggaaagggaaaaay

SEQ ID NO: 9007 - DNA, 25 bp, Artificial sequence  Extension Primer
  Primer
ttcataactcctctgtcagacaaat

SEQ ID NO: 9008 - DNA, 25 bp, Artificial sequence  Extension Primer
  Primer
gcaacataattgtcctcatttcaca

SEQ ID NO: 9009 - DNA, 25 bp, Artificial sequence  Extension Primer
  Primer
taagaaattaggagataaaagtcta

SEQ ID NO: 9010 - DNA, 25 bp, Artificial sequence  Extension Primer
  Primer
tctggaagagacagacacagataaa

SEQ ID NO: 9011 - DNA, 25 bp, Artificial sequence  Extension Primer
  Primer
atcccgactctccatgttcacagca

SEQ ID NO: 9012 - DNA, 25 bp, Artificial sequence  Extension Primer
  Primer
tgcagtctgcatatacastcctgga

SEQ ID NO: 9013 - DNA, 25 bp, Artificial sequence  Extension Primer
  Primer
gtcttgacatctgctgacgggaggg

SEQ ID NO: 9014 - DNA, 25 bp, Artificial sequence  Extension Primer
  Primer
gggggctctgcagccagcccaccca

SEQ ID NO: 9015 - DNA, 25 bp, Artificial sequence  Extension Primer
  Primer
tatagtttgtactattcctatttaa

SEQ ID NO: 9016 - DNA, 25 bp, Artificial sequence  Extension Primer
  Primer
gagatgtaattgaaaacacccaagg

SEQ ID NO: 9017 - DNA, 25 bp, Artificial sequence  Extension Primer
  Primer
agtggctgggcaatcagagctcggc

SEQ ID NO: 9018 - DNA, 25 bp, Artificial sequence  Extension Primer
  Primer
tttttttttagctctaatattacac

SEQ ID NO: 9019 - DNA, 25 bp, Artificial sequence  Extension Primer
  Primer
acttggcatacgccaagcgaaagaa

SEQ ID NO: 9020 - DNA, 25 bp, Artificial sequence  Extension Primer
  Primer
agaatagaagaaagcatgtcattca

SEQ ID NO: 9021 - DNA, 25 bp, Artificial sequence  Extension Primer
  Primer
ttgacaaggactaaattaaacacga

SEQ ID NO: 9022 - DNA, 25 bp, Artificial sequence  Extension Primer
  Primer
aytrtgttattttcccaaattttat

SEQ ID NO: 9023 - DNA, 25 bp, Artificial sequence  Extension Primer
  Primer
atctaaattaaggttgctgggctgc

SEQ ID NO: 9024 - DNA, 25 bp, Artificial sequence  Extension Primer
  Primer
aaaatagcacgtaggctataagtaa

SEQ ID NO: 9025 - DNA, 25 bp, Artificial sequence  Extension Primer
  Primer
cttaagatggttttatattcctgaa

SEQ ID NO: 9026 - DNA, 25 bp, Artificial sequence  Extension Primer
  Primer
agtcatcrtaaaagcacccctccca

SEQ ID NO: 9027 - DNA, 25 bp, Artificial sequence  Extension Primer
  Primer
aaaaagagaaatctaaaaatagtgc

SEQ ID NO: 9028 - DNA, 25 bp, Artificial sequence  Extension Primer
  Primer
ctgatttactaagtttgaggcacac

SEQ ID NO: 9029 - DNA, 25 bp, Artificial sequence  Extension Primer
  Primer
aactcccacaccagtttctgtaatg

SEQ ID NO: 9030 - DNA, 25 bp, Artificial sequence  Extension Primer
  Primer
gagttaaattaatcatgggttaaaa

SEQ ID NO: 9031 - DNA, 25 bp, Artificial sequence  Extension Primer
  Primer
cttagagactaaaccaccaccaacc

SEQ ID NO: 9032 - DNA, 25 bp, Artificial sequence  Extension Primer
  Primer
gaatgtattctgctcattctagccc

SEQ ID NO: 9033 - DNA, 25 bp, Artificial sequence  Extension Primer
  Primer
gctatrcagttcctcaggactttcc

SEQ ID NO: 9034 - DNA, 25 bp, Artificial sequence  Extension Primer
  Primer
tcaagcttccatcacggcattatac

SEQ ID NO: 9035 - DNA, 25 bp, Artificial sequence  Extension Primer
  Primer
gacaagccaccaaatacccagaccc

SEQ ID NO: 9036 - DNA, 25 bp, Artificial sequence  Extension Primer
  Primer
ttcagtacagtttttscccccttcc

SEQ ID NO: 9037 - DNA, 25 bp, Artificial sequence  Extension Primer
  Primer
tataaatgcatggatctgagcagag

SEQ ID NO: 9038 - DNA, 25 bp, Artificial sequence  Extension Primer
  Primer
tataatttaattcactaaagttttc

SEQ ID NO: 9039 - DNA, 25 bp, Artificial sequence  Extension Primer
  Primer
ctctccactgggctggttctgagga

SEQ ID NO: 9040 - DNA, 25 bp, Artificial sequence  Extension Primer
  Primer
actttctctgcacagccctggtgga

SEQ ID NO: 9041 - DNA, 25 bp, Artificial sequence  Extension Primer
  Primer
gggacaccccagagccactttttca

SEQ ID NO: 9042 - DNA, 25 bp, Artificial sequence  Extension Primer
  Primer
gtaatgagtgctgtgtccttaaaga

SEQ ID NO: 9043 - DNA, 25 bp, Artificial sequence  Extension Primer
  Primer
agcacctgtgaaacattctgaccta

SEQ ID NO: 9044 - DNA, 25 bp, Artificial sequence  Extension Primer
  Primer
aacaaacctagtcataaggggctcc

SEQ ID NO: 9045 - DNA, 25 bp, Artificial sequence  Extension Primer
  Primer
ggggtgcttttaygatgactgtgac

SEQ ID NO: 9046 - DNA, 25 bp, Artificial sequence  Extension Primer
  Primer
tcagaattgccagcccccataatca

SEQ ID NO: 9047 - DNA, 25 bp, Artificial sequence  Extension Primer
  Primer
agattttaacactaccaattttaac

SEQ ID NO: 9048 - DNA, 25 bp, Artificial sequence  Extension Primer
  Primer
tgctaaattccctaagatggaagtg

SEQ ID NO: 9049 - DNA, 25 bp, Artificial sequence  Extension Primer
  Primer
gtatttgtttttctctgtctgactt

SEQ ID NO: 9050 - DNA, 25 bp, Artificial sequence  Extension Primer
  Primer
aacttctggggaatttgaatagaac

SEQ ID NO: 9051 - DNA, 25 bp, Artificial sequence  Extension Primer
  Primer
cattttagatgccttaaagaatcaa

SEQ ID NO: 9052 - DNA, 25 bp, Artificial sequence  Extension Primer
  Primer
gcattattcctgatgacagtaccat

SEQ ID NO: 9053 - DNA, 25 bp, Artificial sequence  Extension Primer
  Primer
gctagctctgttctggaaaataaaa

SEQ ID NO: 9054 - DNA, 22 bp, Artificial sequence  Extension Primer
  Primer
ttctaagcaagccatgctcaat

SEQ ID NO: 9055 - DNA, 25 bp, Artificial sequence  Extension Primer
  Primer
tgacagaaaggatcctttgatttag

SEQ ID NO: 9056 - DNA, 25 bp, Artificial sequence  Extension Primer
  Primer
acactagcagactggatttgtaatc

SEQ ID NO: 9057 - DNA, 25 bp, Artificial sequence  Extension Primer
  Primer
tgtttatcccagggactattttctc

SEQ ID NO: 9058 - DNA, 25 bp, Artificial sequence  Extension Primer
  Primer
tgtgcattcaacatagcttgtaaac

SEQ ID NO: 9059 - DNA, 25 bp, Artificial sequence  Extension Primer
  Primer
ttgccttctctgtccccatctcccc

SEQ ID NO: 9060 - DNA, 25 bp, Artificial sequence  Extension Primer
  Primer
ctcacttttatgtgaatctttctta

SEQ ID NO: 9061 - DNA, 25 bp, Artificial sequence  Extension Primer
  Primer
cctactgtccttttataaatacttg

SEQ ID NO: 9062 - DNA, 25 bp, Artificial sequence  Extension Primer
  Primer
tcaatgagctctgagttcaaccacg

SEQ ID NO: 9063 - DNA, 25 bp, Artificial sequence  Extension Primer
  Primer
cagagaaaaggaggatgctcaaaag

SEQ ID NO: 9064 - DNA, 25 bp, Artificial sequence  Extension Primer
  Primer
attattgtaaagctgaaacttttct

SEQ ID NO: 9065 - DNA, 25 bp, Artificial sequence  Extension Primer
  Primer
ttatccctcccctagccctttccca

SEQ ID NO: 9066 - DNA, 25 bp, Artificial sequence  Extension Primer
  Primer
attcgcaatctgatgtcctgactgt

SEQ ID NO: 9067 - DNA, 25 bp, Artificial sequence  Extension Primer
  Primer
tatttaaaaagaggctggtgatgtg

SEQ ID NO: 9068 - DNA, 25 bp, Artificial sequence  Extension Primer
  Primer
tgaaggataattacaatattgtgat

SEQ ID NO: 9069 - DNA, 25 bp, Artificial sequence  Extension Primer
  Primer
acattcagccagttgtgtggatttt

SEQ ID NO: 9070 - DNA, 22 bp, Artificial sequence  Extension Primer
  Primer
aagggttgaacacttgctgtca

SEQ ID NO: 9071 - DNA, 25 bp, Artificial sequence  Extension Primer
  Primer
tggacttatttcctccttcaagagt

SEQ ID NO: 9072 - DNA, 25 bp, Artificial sequence  Extension Primer
  Primer
tttttaaatgtgcgtattaattttt

SEQ ID NO: 9073 - DNA, 25 bp, Artificial sequence  Extension Primer
  Primer
gagagctgatgggtgctcccaggct

SEQ ID NO: 9074 - DNA, 25 bp, Artificial sequence  Extension Primer
  Primer
tcagagaaggtgggagccagcatac

SEQ ID NO: 9075 - DNA, 25 bp, Artificial sequence  Extension Primer
  Primer
tttctgttccagtgtttccatctat

SEQ ID NO: 9076 - DNA, 25 bp, Artificial sequence  Extension Primer
  Primer
tgccagtaaataaaagtttccagtg

SEQ ID NO: 9077 - DNA, 25 bp, Artificial sequence  Extension Primer
  Primer
cttgagccgcgggtgtggaggagca

SEQ ID NO: 9078 - DNA, 25 bp, Artificial sequence  Extension Primer
  Primer
aactcggcttctccccacagaacac

SEQ ID NO: 9079 - DNA, 25 bp, Artificial sequence  Extension Primer
  Primer
acaaaatcttactttatcttgtgct

SEQ ID NO: 9080 - DNA, 25 bp, Artificial sequence  Extension Primer
  Primer
gagttctgtactttcggtccagggc

SEQ ID NO: 9081 - DNA, 25 bp, Artificial sequence  Extension Primer
  Primer
tgagggcctacttccgaagtggctc

SEQ ID NO: 9082 - DNA, 25 bp, Artificial sequence  Extension Primer
  Primer
tccaattaatcctgctccccactaa

SEQ ID NO: 9083 - DNA, 25 bp, Artificial sequence  Extension Primer
  Primer
ccttgttttgatttcaaagaaaata

SEQ ID NO: 9084 - DNA, 25 bp, Artificial sequence  Extension Primer
  Primer
gtggcttgaccgacagaactgaatc

SEQ ID NO: 9085 - DNA, 25 bp, Artificial sequence  Extension Primer
  Primer
gtgggctggagtactcaggtgtgtc

SEQ ID NO: 9086 - DNA, 25 bp, Artificial sequence  Extension Primer
  Primer
cttacttcctcaataagtggtactt

SEQ ID NO: 9087 - DNA, 25 bp, Artificial sequence  Extension Primer
  Primer
ataacgatgccaaatgatgccttac

SEQ ID NO: 9088 - DNA, 25 bp, Artificial sequence  Extension Primer
  Primer
tgatctctgatgttcagtcagtgtc

SEQ ID NO: 9089 - DNA, 25 bp, Artificial sequence  Extension Primer
  Primer
aaagaaaattcaatattgggttcat

SEQ ID NO: 9090 - DNA, 25 bp, Artificial sequence  Extension Primer
  Primer
tgcaagtgtaggggcagaggggaca

SEQ ID NO: 9091 - DNA, 25 bp, Artificial sequence  Extension Primer
  Primer
ggggtaatttatgccgtcacctttc

SEQ ID NO: 9092 - DNA, 25 bp, Artificial sequence  Extension Primer
  Primer
ataccagtgggttcaagaatgagtt

SEQ ID NO: 9093 - DNA, 25 bp, Artificial sequence  Extension Primer
  Primer
aggaatttagagcaaggggtaaaca

SEQ ID NO: 9094 - DNA, 25 bp, Artificial sequence  Extension Primer
  Primer
tgtagcagctgggtctttgttgaat

SEQ ID NO: 9095 - DNA, 25 bp, Artificial sequence  Extension Primer
  Primer
attttttagaactttttggtaactc

SEQ ID NO: 9096 - DNA, 25 bp, Artificial sequence  Extension Primer
  Primer
tagtttataaaagtttcagtttcct

SEQ ID NO: 9097 - DNA, 25 bp, Artificial sequence  Extension Primer
  Primer
aagaaatccaccacaagaaacatca

SEQ ID NO: 9098 - DNA, 25 bp, Artificial sequence  Extension Primer
  Primer
agacttaaaagcagctaaaacatat

SEQ ID NO: 9099 - DNA, 25 bp, Artificial sequence  Extension Primer
  Primer
ctcttattacatcattaatctatct

SEQ ID NO: 9100 - DNA, 25 bp, Artificial sequence  Extension Primer
  Primer
taattattgataagacattcaacta

SEQ ID NO: 9101 - DNA, 25 bp, Artificial sequence  Extension Primer
  Primer
ccagtggggttttagtacctatatc

SEQ ID NO: 9102 - DNA, 25 bp, Artificial sequence  Extension Primer
  Primer
gtggtacagtctctgagactctgct

SEQ ID NO: 9103 - DNA, 25 bp, Artificial sequence  Extension Primer
  Primer
caagaagcctaagaagctgtctcct

SEQ ID NO: 9104 - DNA, 25 bp, Artificial sequence  Extension Primer
  Primer
aaaccaacaaataacaaaagtcaca

SEQ ID NO: 9105 - DNA, 25 bp, Artificial sequence  Extension Primer
  Primer
ggaaaaattaaatgaagcaggtttt

SEQ ID NO: 9106 - DNA, 25 bp, Artificial sequence  Extension Primer
  Primer
tcttcagaagaactcatctacaagt

SEQ ID NO: 9107 - DNA, 25 bp, Artificial sequence  Extension Primer
  Primer
gcaccccaagacccagtaaacacaa

SEQ ID NO: 9108 - DNA, 25 bp, Artificial sequence  Extension Primer
  Primer
aacagcagaattactcatagctccc

SEQ ID NO: 9109 - DNA, 25 bp, Artificial sequence  Extension Primer
  Primer
gtggggactatccctcagagatcaa

SEQ ID NO: 9110 - DNA, 25 bp, Artificial sequence  Extension Primer
  Primer
acatatatttagtaggtatgcacac

SEQ ID NO: 9111 - DNA, 25 bp, Artificial sequence  Extension Primer
  Primer
aygaaaagacaaatttctgttgctt

SEQ ID NO: 9112 - DNA, 25 bp, Artificial sequence  Extension Primer
  Primer
acttctttccatggcattgaccttg

SEQ ID NO: 9113 - DNA, 25 bp, Artificial sequence  Extension Primer
  Primer
aaacagtaaaaagtggaaatccctt

SEQ ID NO: 9114 - DNA, 25 bp, Artificial sequence  Extension Primer
  Primer
actcctgccagcatttttaaatgaa

SEQ ID NO: 9115 - DNA, 25 bp, Artificial sequence  Extension Primer
  Primer
atagtgtgaacaattttactagaga

SEQ ID NO: 9116 - DNA, 25 bp, Artificial sequence  Extension Primer
  Primer
cctgcacaccccccatgtacttctt

SEQ ID NO: 9117 - DNA, 25 bp, Artificial sequence  Extension Primer
  Primer
tgacagtgtcttcactgtctccctc

SEQ ID NO: 9118 - DNA, 25 bp, Artificial sequence  Extension Primer
  Primer
aagtctgaaaagctcacttattccg

SEQ ID NO: 9119 - DNA, 25 bp, Artificial sequence  Extension Primer
  Primer
gtcattgcagtcaatcaccttaaaa

SEQ ID NO: 9120 - DNA, 25 bp, Artificial sequence  Extension Primer
  Primer
gtctgagagtcagaagttccttcca

SEQ ID NO: 9121 - DNA, 25 bp, Artificial sequence  Extension Primer
  Primer
cgtgtgtcactgtgccctgagctgc

SEQ ID NO: 9122 - DNA, 25 bp, Artificial sequence  Extension Primer
  Primer
ggctcagagrttaaagcatttgcct

SEQ ID NO: 9123 - DNA, 25 bp, Artificial sequence  Extension Primer
  Primer
gctccctcgagtttctggaagacac

SEQ ID NO: 9124 - DNA, 25 bp, Artificial sequence  Extension Primer
  Primer
tgctgctttgtgagaataaaggcag

SEQ ID NO: 9125 - DNA, 25 bp, Artificial sequence  Extension Primer
  Primer
tatccaaagtaaacagtaattatga

SEQ ID NO: 9126 - DNA, 25 bp, Artificial sequence  Extension Primer
  Primer
caggttttattttctcaagagtaca

SEQ ID NO: 9127 - DNA, 25 bp, Artificial sequence  Extension Primer
  Primer
tacttaatttccttaaagttgagtt

SEQ ID NO: 9128 - DNA, 25 bp, Artificial sequence  Extension Primer
  Primer
acttagctattttctttagatgtgt

SEQ ID NO: 9129 - DNA, 25 bp, Artificial sequence  Extension Primer
  Primer
tcatattcaaaagctaagattcaac

SEQ ID NO: 9130 - DNA, 25 bp, Artificial sequence  Extension Primer
  Primer
tgttagtaatatgagtaggtctggt

SEQ ID NO: 9131 - DNA, 25 bp, Artificial sequence  Extension Primer
  Primer
tgcctgaaagatcttcatattacct

SEQ ID NO: 9132 - DNA, 25 bp, Artificial sequence  Extension Primer
  Primer
gcataattgctaagtgtgggaatat

SEQ ID NO: 9133 - DNA, 25 bp, Artificial sequence  Extension Primer
  Primer
ggcaaaaacaatacagtgtgatggt

SEQ ID NO: 9134 - DNA, 25 bp, Artificial sequence  Extension Primer
  Primer
tctatcctccatactctctayacca

SEQ ID NO: 9135 - DNA, 25 bp, Artificial sequence  Extension Primer
  Primer
ggggcagggagagggcggatggtga

SEQ ID NO: 9136 - DNA, 25 bp, Artificial sequence  Extension Primer
  Primer
ctgtcagttcaagagggcagctttc

SEQ ID NO: 9137 - DNA, 25 bp, Artificial sequence  Extension Primer
  Primer
ccagctctaaacaccttcagatgtt

SEQ ID NO: 9138 - DNA, 25 bp, Artificial sequence  Extension Primer
  Primer
agcaagtcagctcatggctgaaaca

SEQ ID NO: 9139 - DNA, 25 bp, Artificial sequence  Extension Primer
  Primer
tgcaggcttggggcaaggaaggcag

SEQ ID NO: 9140 - DNA, 25 bp, Artificial sequence  Extension Primer
  Primer
ttaagattgctttaactgaggtaac

SEQ ID NO: 9141 - DNA, 25 bp, Artificial sequence  Extension Primer
  Primer
ttcactaggaaataaaacaggtaca

SEQ ID NO: 9142 - DNA, 25 bp, Artificial sequence  Extension Primer
  Primer
acatgggaaacaaattttttaaact

SEQ ID NO: 9143 - DNA, 25 bp, Artificial sequence  Extension Primer
  Primer
cctccatccaggcataacaattcta

SEQ ID NO: 9144 - DNA, 25 bp, Artificial sequence  Extension Primer
  Primer
agtagatccagaaaaagatatcatc

SEQ ID NO: 9145 - DNA, 25 bp, Artificial sequence  Extension Primer
  Primer
aaagttcattcctctagtctrgtag

SEQ ID NO: 9146 - DNA, 25 bp, Artificial sequence  Extension Primer
  Primer
ggatgagtaggagttcaccaagtgg

SEQ ID NO: 9147 - DNA, 25 bp, Artificial sequence  Extension Primer
  Primer
tcatggctacagaatataaaacccc

SEQ ID NO: 9148 - DNA, 25 bp, Artificial sequence  Extension Primer
  Primer
gcttaatttcagaagtggttagata

SEQ ID NO: 9149 - DNA, 25 bp, Artificial sequence  Extension Primer
  Primer
tagacaagcaggggatgatagagga

SEQ ID NO: 9150 - DNA, 25 bp, Artificial sequence  Extension Primer
  Primer
tctctttcctgagacttctgaaggg

SEQ ID NO: 9151 - DNA, 25 bp, Artificial sequence  Extension Primer
  Primer
acggctgagactctaagacatggct

SEQ ID NO: 9152 - DNA, 25 bp, Artificial sequence  Extension Primer
  Primer
cttttgaaatgcagcacactttgtt

SEQ ID NO: 9153 - DNA, 25 bp, Artificial sequence  Extension Primer
  Primer
gtctccttccttatgaagatgatgg

SEQ ID NO: 9154 - DNA, 25 bp, Artificial sequence  Extension Primer
  Primer
atccaaagaaagttacttagttcac

SEQ ID NO: 9155 - DNA, 25 bp, Artificial sequence  Extension Primer
  Primer
aactgagtttggtggtgggttcgta

SEQ ID NO: 9156 - DNA, 25 bp, Artificial sequence  Extension Primer
  Primer
gacagtgtcttcactgtctccctcy

SEQ ID NO: 9157 - DNA, 25 bp, Artificial sequence  Extension Primer
  Primer
ttctaggactggatgacctgttgcc

SEQ ID NO: 9158 - DNA, 25 bp, Artificial sequence  Extension Primer
  Primer
gatataatatattaagtttagacag

SEQ ID NO: 9159 - DNA, 25 bp, Artificial sequence  Extension Primer
  Primer
gagtgcaggcctgggagtcaggctt

SEQ ID NO: 9160 - DNA, 22 bp, Artificial sequence  Extension Primer
  Primer
atggggaggaaaaacttctacc

SEQ ID NO: 9161 - DNA, 25 bp, Artificial sequence  Extension Primer
  Primer
tgaactgcagaatggacttttactg

SEQ ID NO: 9162 - DNA, 25 bp, Artificial sequence  Extension Primer
  Primer
atttatcacaatttggcaagataca

SEQ ID NO: 9163 - DNA, 22 bp, Artificial sequence  Extension Primer
  Primer
tgagaacgccttctctaaactg

SEQ ID NO: 9164 - DNA, 25 bp, Artificial sequence  Extension Primer
  Primer
actattttcctcattgtttttccaa

SEQ ID NO: 9165 - DNA, 25 bp, Artificial sequence  Extension Primer
  Primer
cccaagcacagttgygatcatattg

SEQ ID NO: 9166 - DNA, 25 bp, Artificial sequence  Extension Primer
  Primer
aatgattgtgctttctcaagtgtat

SEQ ID NO: 9167 - DNA, 25 bp, Artificial sequence  Extension Primer
  Primer
ggtgtttgtggcaaaacttgaattg

SEQ ID NO: 9168 - DNA, 25 bp, Artificial sequence  Extension Primer
  Primer
ctccctggggtggggagataaaata

SEQ ID NO: 9169 - DNA, 25 bp, Artificial sequence  Extension Primer
  Primer
accrctgctttgtgaaccttctctt

SEQ ID NO: 9170 - DNA, 25 bp, Artificial sequence  Extension Primer
  Primer
cagccaggtccaaatctctcactac

SEQ ID NO: 9171 - DNA, 25 bp, Artificial sequence  Extension Primer
  Primer
caattctgagggattctttcattca

SEQ ID NO: 9172 - DNA, 25 bp, Artificial sequence  Extension Primer
  Primer
tttgcaccttgcacagtgctcggca

SEQ ID NO: 9173 - DNA, 25 bp, Artificial sequence  Extension Primer
  Primer
tttcatttggctaagaatacatggc

SEQ ID NO: 9174 - DNA, 25 bp, Artificial sequence  Extension Primer
  Primer
cagtcttaaggaagcaacatgagcc

SEQ ID NO: 9175 - DNA, 25 bp, Artificial sequence  Extension Primer
  Primer
acctggcgcataccactaatggaaa

SEQ ID NO: 9176 - DNA, 25 bp, Artificial sequence  Extension Primer
  Primer
aataacaaacatggagaagaggaaa

SEQ ID NO: 9177 - DNA, 25 bp, Artificial sequence  Extension Primer
  Primer
gaaaatcacaaggtcatgacagaac

SEQ ID NO: 9178 - DNA, 25 bp, Artificial sequence  Extension Primer
  Primer
cctgtataacaagctgccacggaat

SEQ ID NO: 9179 - DNA, 25 bp, Artificial sequence  Extension Primer
  Primer
ctgctgctctctgatgttcccttgc

SEQ ID NO: 9180 - DNA, 25 bp, Artificial sequence  Extension Primer
  Primer
atggagtccctgagtatcttttgga

SEQ ID NO: 9181 - DNA, 25 bp, Artificial sequence  Extension Primer
  Primer
ctttgttaactcctgacttgtcacc

SEQ ID NO: 9182 - DNA, 22 bp, Artificial sequence  Extension Primer
  Primer
gtggaaaagcaaacttttcaga

SEQ ID NO: 9183 - DNA, 25 bp, Artificial sequence  Extension Primer
  Primer
gtttagggatggtgtggatggttty

SEQ ID NO: 9184 - DNA, 25 bp, Artificial sequence  Extension Primer
  Primer
tgcaaagtgcttttaaaatttacyc

SEQ ID NO: 9185 - DNA, 25 bp, Artificial sequence  Extension Primer
  Primer
aagcattaagtraggagaaaacttt

SEQ ID NO: 9186 - DNA, 25 bp, Artificial sequence  Extension Primer
  Primer
ggtcacaagaattgggcccaactta

SEQ ID NO: 9187 - DNA, 25 bp, Artificial sequence  Extension Primer
  Primer
tcaaaacagtggtgagaatataagt

SEQ ID NO: 9188 - DNA, 25 bp, Artificial sequence  Extension Primer
  Primer
ccatgcacagaaaatcaccaaactc

SEQ ID NO: 9189 - DNA, 25 bp, Artificial sequence  Extension Primer
  Primer
gaattagcctcatcagataatgaag

SEQ ID NO: 9190 - DNA, 25 bp, Artificial sequence  Extension Primer
  Primer
ccaatatgagcatctcccagacagc

SEQ ID NO: 9191 - DNA, 25 bp, Artificial sequence  Extension Primer
  Primer
atccactcctgccagtcctgcctga

SEQ ID NO: 9192 - DNA, 25 bp, Artificial sequence  Extension Primer
  Primer
cacatgatcaggagtccttggaatt

SEQ ID NO: 9193 - DNA, 25 bp, Artificial sequence  Extension Primer
  Primer
agacgtgagagctagttccctgacc

SEQ ID NO: 9194 - DNA, 25 bp, Artificial sequence  Extension Primer
  Primer
gggctggttcctgtgtgagcgtcca

SEQ ID NO: 9195 - DNA, 25 bp, Artificial sequence  Extension Primer
  Primer
aacctgaacccactaaaaaagtctt

SEQ ID NO: 9196 - DNA, 25 bp, Artificial sequence  Extension Primer
  Primer
cacttcacactgtcatttgttcaaa

SEQ ID NO: 9197 - DNA, 25 bp, Artificial sequence  Extension Primer
  Primer
ctcgagtacaaccccaacaggtagg

SEQ ID NO: 9198 - DNA, 25 bp, Artificial sequence  Extension Primer
  Primer
aacagagtaagtatgggactcttaa

SEQ ID NO: 9199 - DNA, 25 bp, Artificial sequence  Extension Primer
  Primer
ayttgtaaagcctagtctgattttt

SEQ ID NO: 9200 - DNA, 25 bp, Artificial sequence  Extension Primer
  Primer
tcattctaagtctaacatacaaaaa

SEQ ID NO: 9201 - DNA, 25 bp, Artificial sequence  Extension Primer
  Primer
cttggcagggttatttctccggttg

SEQ ID NO: 9202 - DNA, 25 bp, Artificial sequence  Extension Primer
  Primer
tccaatgcctggttttcagtttctc

SEQ ID NO: 9203 - DNA, 25 bp, Artificial sequence  Extension Primer
  Primer
tctgatgttgtgactgttttctcca

SEQ ID NO: 9204 - DNA, 25 bp, Artificial sequence  Extension Primer
  Primer
gaaggtggaattaaggaagggaggc

SEQ ID NO: 9205 - DNA, 25 bp, Artificial sequence  Extension Primer
  Primer
gcataactcctttctagtagcttct

SEQ ID NO: 9206 - DNA, 25 bp, Artificial sequence  Extension Primer
  Primer
tttgaagtgttaatatattaaaata

SEQ ID NO: 9207 - DNA, 25 bp, Artificial sequence  Extension Primer
  Primer
ttctgttatccacttgaaaattacc

SEQ ID NO: 9208 - DNA, 25 bp, Artificial sequence  Extension Primer
  Primer
actgaggagtagcaaaggaaacagc

SEQ ID NO: 9209 - DNA, 25 bp, Artificial sequence  Extension Primer
  Primer
ttgaacaccaaacccttagctcaac

SEQ ID NO: 9210 - DNA, 25 bp, Artificial sequence  Extension Primer
  Primer
acctctaacgccagaggtaacaacc

SEQ ID NO: 9211 - DNA, 25 bp, Artificial sequence  Extension Primer
  Primer
ttcattaaattgattcacttagaaa

SEQ ID NO: 9212 - DNA, 25 bp, Artificial sequence  Extension Primer
  Primer
ggggcgctcacccattgcttcactg

SEQ ID NO: 9213 - DNA, 25 bp, Artificial sequence  Extension Primer
  Primer
gctggaagggaacactgtaatattk

SEQ ID NO: 9214 - DNA, 25 bp, Artificial sequence  Extension Primer
  Primer
tcttatgtaaactccatgggtaagc

SEQ ID NO: 9215 - DNA, 25 bp, Artificial sequence  Extension Primer
  Primer
ttcccttactaagccttgagttcct

SEQ ID NO: 9216 - DNA, 25 bp, Artificial sequence  Extension Primer
  Primer
ttagaaacatgtcaatgattctcct

SEQ ID NO: 9217 - DNA, 25 bp, Artificial sequence  Extension Primer
  Primer
gaaagaggagtgatgtaagcatgcc

SEQ ID NO: 9218 - DNA, 25 bp, Artificial sequence  Extension Primer
  Primer
atgacaaascaagaatgcagagaaa

SEQ ID NO: 9219 - DNA, 25 bp, Artificial sequence  Extension Primer
  Primer
tttcccactggcagaagccccatga

SEQ ID NO: 9220 - DNA, 25 bp, Artificial sequence  Extension Primer
  Primer
aggggaatgagggagtggaaggggg

SEQ ID NO: 9221 - DNA, 25 bp, Artificial sequence  Extension Primer
  Primer
gtgagaacagtctacttcagatcca

SEQ ID NO: 9222 - DNA, 25 bp, Artificial sequence  Extension Primer
  Primer
ggcaatctgcttccactgcaaagaa

SEQ ID NO: 9223 - DNA, 25 bp, Artificial sequence  Extension Primer
  Primer
atgtgctgggtaataagaatgacac

SEQ ID NO: 9224 - DNA, 25 bp, Artificial sequence  Extension Primer
  Primer
aataggaggcaagccaacccccacc

SEQ ID NO: 9225 - DNA, 25 bp, Artificial sequence  Extension Primer
  Primer
gggtggcttcagttaataatgtcca

SEQ ID NO: 9226 - DNA, 25 bp, Artificial sequence  Extension Primer
  Primer
tgtgttcagctgttgcatctatgat

SEQ ID NO: 9227 - DNA, 25 bp, Artificial sequence  Extension Primer
  Primer
aatgtagtaarttgcaacaaataca

SEQ ID NO: 9228 - DNA, 25 bp, Artificial sequence  Extension Primer
  Primer
catgtcaactcagttgctccagact

SEQ ID NO: 9229 - DNA, 22 bp, Artificial sequence  Extension Primer
  Primer
cttccggaaggggcaccggggc

SEQ ID NO: 9230 - DNA, 25 bp, Artificial sequence  Extension Primer
  Primer
ccgttcgtccccgtgtgccctcaac

SEQ ID NO: 9231 - DNA, 25 bp, Artificial sequence  Extension Primer
  Primer
tctcttgtagccaaatcgctgcttc

SEQ ID NO: 9232 - DNA, 25 bp, Artificial sequence  Extension Primer
  Primer
gccactgtaactgcttgcttgtcac

SEQ ID NO: 9233 - DNA, 25 bp, Artificial sequence  Extension Primer
  Primer
arggaacaagccgagggtttcttct

SEQ ID NO: 9234 - DNA, 25 bp, Artificial sequence  Extension Primer
  Primer
taaaatattgaaaacttcttaaaag

SEQ ID NO: 9235 - DNA, 25 bp, Artificial sequence  Extension Primer
  Primer
ggctcttcgtgctgatgcctgtaag

SEQ ID NO: 9236 - DNA, 25 bp, Artificial sequence  Extension Primer
  Primer
ccctccctgacaaagatgcacactc

SEQ ID NO: 9237 - DNA, 25 bp, Artificial sequence  Extension Primer
  Primer
gacaatcaattcagcagataaaaat

SEQ ID NO: 9238 - DNA, 25 bp, Artificial sequence  Extension Primer
  Primer
cttcactgtggaaataaatagtaaa

SEQ ID NO: 9239 - DNA, 25 bp, Artificial sequence  Extension Primer
  Primer
ctttggccttcaatctttcccgtat

SEQ ID NO: 9240 - DNA, 25 bp, Artificial sequence  Extension Primer
  Primer
atatttagagatttcccttctcagt

SEQ ID NO: 9241 - DNA, 25 bp, Artificial sequence  Extension Primer
  Primer
ccaatagcttgaaaagaataatatg

SEQ ID NO: 9242 - DNA, 25 bp, Artificial sequence  Extension Primer
  Primer
atctaggtgttctaggcctttctcc

SEQ ID NO: 9243 - DNA, 25 bp, Artificial sequence  Extension Primer
  Primer
ttcaacaagaggaaagatgcttgag

SEQ ID NO: 9244 - DNA, 25 bp, Artificial sequence  Extension Primer
  Primer
catccaagtgactgctcttctactg

SEQ ID NO: 9245 - DNA, 25 bp, Artificial sequence  Extension Primer
  Primer
tgtctatagcaagcaactccaactt

SEQ ID NO: 9246 - DNA, 25 bp, Artificial sequence  Extension Primer
  Primer
acctgcagccaggcgtctgaacata

SEQ ID NO: 9247 - DNA, 25 bp, Artificial sequence  Extension Primer
  Primer
tgaaaataattacttctacatctgc

SEQ ID NO: 9248 - DNA, 25 bp, Artificial sequence  Extension Primer
  Primer
ttctaaacagaaagggggagataat

SEQ ID NO: 9249 - DNA, 25 bp, Artificial sequence  Extension Primer
  Primer
tttatttyttttccccattgactta

SEQ ID NO: 9250 - DNA, 25 bp, Artificial sequence  Extension Primer
  Primer
tagggaaggatggcagctccccaca

SEQ ID NO: 9251 - DNA, 25 bp, Artificial sequence  Extension Primer
  Primer
aaatataaccatttagaactacttc

SEQ ID NO: 9252 - DNA, 25 bp, Artificial sequence  Extension Primer
  Primer
tttcctacacataagtgtttcctaa

SEQ ID NO: 9253 - DNA, 25 bp, Artificial sequence  Extension Primer
  Primer
ctgattcatatagatgttacatgac

SEQ ID NO: 9254 - DNA, 25 bp, Artificial sequence  Extension Primer
  Primer
ctacctaaagagtggcccccaaacc

SEQ ID NO: 9255 - DNA, 25 bp, Artificial sequence  Extension Primer
  Primer
gctaaacacttttaaacattccatt

SEQ ID NO: 9256 - DNA, 25 bp, Artificial sequence  Extension Primer
  Primer
ctggtgtttgacttcaaatctaagc

SEQ ID NO: 9257 - DNA, 25 bp, Artificial sequence  Extension Primer
  Primer
ggtgtgagaactcaaagtggaataa

SEQ ID NO: 9258 - DNA, 25 bp, Artificial sequence  Extension Primer
  Primer
agactcatccattcatcaaaaccaa

SEQ ID NO: 9259 - DNA, 25 bp, Artificial sequence  Extension Primer
  Primer
gtaaggatacagatgagattggact

SEQ ID NO: 9260 - DNA, 25 bp, Artificial sequence  Extension Primer
  Primer
tcaagtgcttttcaaatatgttcaa

SEQ ID NO: 9261 - DNA, 25 bp, Artificial sequence  Extension Primer
  Primer
ttccaaattaatgttacaatactac

SEQ ID NO: 9262 - DNA, 25 bp, Artificial sequence  Extension Primer
  Primer
cagcttcaaatatctttaaacctta

SEQ ID NO: 9263 - DNA, 25 bp, Artificial sequence  Extension Primer
  Primer
tagtgcttagtcttggtgtaatttt

SEQ ID NO: 9264 - DNA, 25 bp, Artificial sequence  Extension Primer
  Primer
gggatcagaacccatgacttcctta

SEQ ID NO: 9265 - DNA, 25 bp, Artificial sequence  Extension Primer
  Primer
actgagaggtaactccaacctcaaa

SEQ ID NO: 9266 - DNA, 25 bp, Artificial sequence  Extension Primer
  Primer
cacacgatgtgcctcactatgagcc

SEQ ID NO: 9267 - DNA, 25 bp, Artificial sequence  Extension Primer
  Primer
aagataagatasataaaccccatga

SEQ ID NO: 9268 - DNA, 25 bp, Artificial sequence  Extension Primer
  Primer
ttcctaatttttcagctttactctt

SEQ ID NO: 9269 - DNA, 25 bp, Artificial sequence  Extension Primer
  Primer
cagctcagacttctcatcctgtgaa

SEQ ID NO: 9270 - DNA, 25 bp, Artificial sequence  Extension Primer
  Primer
acttaaatcccttctcatttccata

SEQ ID NO: 9271 - DNA, 25 bp, Artificial sequence  Extension Primer
  Primer
aagaaagttcagcctcggacgcacc

SEQ ID NO: 9272 - DNA, 25 bp, Artificial sequence  Extension Primer
  Primer
actgtaactgtgagctagaaggaaa

SEQ ID NO: 9273 - DNA, 25 bp, Artificial sequence  Extension Primer
  Primer
cctatataagtttaagtatattttt

SEQ ID NO: 9274 - DNA, 22 bp, Artificial sequence  Extension Primer
  Primer
ctggttcctgagataccccaca

SEQ ID NO: 9275 - DNA, 25 bp, Artificial sequence  Extension Primer
  Primer
ctgtgcctacttgtccacttgcatt

SEQ ID NO: 9276 - DNA, 25 bp, Artificial sequence  Extension Primer
  Primer
ctttttaaacagcgcgttttcattc

SEQ ID NO: 9277 - DNA, 25 bp, Artificial sequence  Extension Primer
  Primer
tgttcttgtcagaattcttccagaa

SEQ ID NO: 9278 - DNA, 25 bp, Artificial sequence  Extension Primer
  Primer
tagaaatgaagaatgcctttgatgg

SEQ ID NO: 9279 - DNA, 25 bp, Artificial sequence  Extension Primer
  Primer
aggagagaaccagattgattactta

SEQ ID NO: 9280 - DNA, 25 bp, Artificial sequence  Extension Primer
  Primer
tcataacccagctaattcctcatcc

SEQ ID NO: 9281 - DNA, 25 bp, Artificial sequence  Extension Primer
  Primer
tcaaaaagtttatttataccgatgg

SEQ ID NO: 9282 - DNA, 25 bp, Artificial sequence  Extension Primer
  Primer
tacttgaactgccatccttactcca

SEQ ID NO: 9283 - DNA, 25 bp, Artificial sequence  Extension Primer
  Primer
aagattctgagttagttcgttataa

SEQ ID NO: 9284 - DNA, 25 bp, Artificial sequence  Extension Primer
  Primer
agccagacttagagtaaatttagcc

SEQ ID NO: 9285 - DNA, 25 bp, Artificial sequence  Extension Primer
  Primer
aggatgaaatggaaaccaagtatca

SEQ ID NO: 9286 - DNA, 25 bp, Artificial sequence  Extension Primer
  Primer
ttatttaaaaatggttcattttccc

SEQ ID NO: 9287 - DNA, 25 bp, Artificial sequence  Extension Primer
  Primer
aacctgaaaatgccaccttcccaag

SEQ ID NO: 9288 - DNA, 25 bp, Artificial sequence  Extension Primer
  Primer
ccgttctccaaaggacataacaagg

SEQ ID NO: 9289 - DNA, 25 bp, Artificial sequence  Extension Primer
  Primer
atcaaaacatagatggttagacccc

SEQ ID NO: 9290 - DNA, 25 bp, Artificial sequence  Extension Primer
  Primer
gttaaggcccataaaattatgcaat

SEQ ID NO: 9291 - DNA, 25 bp, Artificial sequence  Extension Primer
  Primer
acaccaaatgagttggagtacaagc

SEQ ID NO: 9292 - DNA, 25 bp, Artificial sequence  Extension Primer
  Primer
gttgtttgggattttatttgctctc

SEQ ID NO: 9293 - DNA, 25 bp, Artificial sequence  Extension Primer
  Primer
tcttgtgtgtttttaagctaataag

SEQ ID NO: 9294 - DNA, 25 bp, Artificial sequence  Extension Primer
  Primer
gtgtttgggagatttgcaagcttta

SEQ ID NO: 9295 - DNA, 25 bp, Artificial sequence  Extension Primer
  Primer
gccagtatcactcaccaatgagcaa

SEQ ID NO: 9296 - DNA, 25 bp, Artificial sequence  Extension Primer
  Primer
ctaaaagcactgaatcaaatgttat

SEQ ID NO: 9297 - DNA, 25 bp, Artificial sequence  Extension Primer
  Primer
aataacaatgaactgtgagtattga

SEQ ID NO: 9298 - DNA, 25 bp, Artificial sequence  Extension Primer
  Primer
cccagcgcccacacctcccccatga

SEQ ID NO: 9299 - DNA, 25 bp, Artificial sequence  Extension Primer
  Primer
ctctgtgtccagaaggaggcttgca

SEQ ID NO: 9300 - DNA, 25 bp, Artificial sequence  Extension Primer
  Primer
cgtgtggacagacgtggccacaacc

SEQ ID NO: 9301 - DNA, 25 bp, Artificial sequence  Extension Primer
  Primer
gccctcctttaaaaagctgtgtgct

SEQ ID NO: 9302 - DNA, 25 bp, Artificial sequence  Extension Primer
  Primer
aagcctgaaattaatttcctgaaat

SEQ ID NO: 9303 - DNA, 25 bp, Artificial sequence  Extension Primer
  Primer
gaaagagatgtggcgttcttcattt

SEQ ID NO: 9304 - DNA, 25 bp, Artificial sequence  Extension Primer
  Primer
ttggagaatggctgggagtgtaaca

SEQ ID NO: 9305 - DNA, 25 bp, Artificial sequence  Extension Primer
  Primer
atcgcccgcgcagacagaaacagag

SEQ ID NO: 9306 - DNA, 25 bp, Artificial sequence  Extension Primer
  Primer
caggactgacagttcatattccaaa

SEQ ID NO: 9307 - DNA, 25 bp, Artificial sequence  Extension Primer
  Primer
gctcaggagattatttggaacaatt

SEQ ID NO: 9308 - DNA, 25 bp, Artificial sequence  Extension Primer
  Primer
ccagccccaccaggattcttgggag

SEQ ID NO: 9309 - DNA, 25 bp, Artificial sequence  Extension Primer
  Primer
gcgcaacaaaaccacaaggacttcg

SEQ ID NO: 9310 - DNA, 25 bp, Artificial sequence  Extension Primer
  Primer
gctrtttattggacagtgaagaatg

SEQ ID NO: 9311 - DNA, 25 bp, Artificial sequence  Extension Primer
  Primer
cctacctcttaggacattacagata

SEQ ID NO: 9312 - DNA, 25 bp, Artificial sequence  Extension Primer
  Primer
gtccctggcagcagggatcattact

SEQ ID NO: 9313 - DNA, 25 bp, Artificial sequence  Extension Primer
  Primer
aaaattatcttactcatatgtgtgc

SEQ ID NO: 9314 - DNA, 25 bp, Artificial sequence  Extension Primer
  Primer
tattgataacttgaatttaaaaagc

SEQ ID NO: 9315 - DNA, 25 bp, Artificial sequence  Extension Primer
  Primer
agtgggtgggcgcaagaagtyaagg

SEQ ID NO: 9316 - DNA, 25 bp, Artificial sequence  Extension Primer
  Primer
acgtaaagagtgctgctttatgggg

SEQ ID NO: 9317 - DNA, 25 bp, Artificial sequence  Extension Primer
  Primer
tgattatagaaattttggaaggaga

SEQ ID NO: 9318 - DNA, 25 bp, Artificial sequence  Extension Primer
  Primer
ctcatttcttctttacaaggaaccc

SEQ ID NO: 9319 - DNA, 25 bp, Artificial sequence  Extension Primer
  Primer
ctgtggacrgtcctctgtcaatrgg

SEQ ID NO: 9320 - DNA, 25 bp, Artificial sequence  Extension Primer
  Primer
ggtatgcagatgggcagaaaaagtg

SEQ ID NO: 9321 - DNA, 25 bp, Artificial sequence  Extension Primer
  Primer
agaaggaaaatgaaatgcaagaatc

SEQ ID NO: 9322 - DNA, 25 bp, Artificial sequence  Extension Primer
  Primer
agctgtagtgtatagattgtggcat

SEQ ID NO: 9323 - DNA, 25 bp, Artificial sequence  Extension Primer
  Primer
catgtttattcttgaaaacattcca

SEQ ID NO: 9324 - DNA, 25 bp, Artificial sequence  Extension Primer
  Primer
gatggtgacaggcagtcatatcttt

SEQ ID NO: 9325 - DNA, 25 bp, Artificial sequence  Extension Primer
  Primer
tttcatttttttattgtaatgatgg

SEQ ID NO: 9326 - DNA, 25 bp, Artificial sequence  Extension Primer
  Primer
caagaaaaaatgtagaagggatgac

SEQ ID NO: 9327 - DNA, 25 bp, Artificial sequence  Extension Primer
  Primer
acagggaccacgtaccacgcgatta

SEQ ID NO: 9328 - DNA, 25 bp, Artificial sequence  Extension Primer
  Primer
tgaagataccaaaagcaagagatga

SEQ ID NO: 9329 - DNA, 25 bp, Artificial sequence  Extension Primer
  Primer
tagcttagaactcagaagggtttag

SEQ ID NO: 9330 - DNA, 25 bp, Artificial sequence  Extension Primer
  Primer
aatgaataaataatcccattgtact

SEQ ID NO: 9331 - DNA, 25 bp, Artificial sequence  Extension Primer
  Primer
gaagtaattttaaatgggcaaagac

SEQ ID NO: 9332 - DNA, 25 bp, Artificial sequence  Extension Primer
  Primer
gaaaggttggggaagaaatatactc

SEQ ID NO: 9333 - DNA, 25 bp, Artificial sequence  Extension Primer
  Primer
actttggtagccatggaaagatgcc

SEQ ID NO: 9334 - DNA, 22 bp, Artificial sequence  Extension Primer
  Primer
ttgaaatgaaagcactccataa

SEQ ID NO: 9335 - DNA, 25 bp, Artificial sequence  Extension Primer
  Primer
aattaaargatacatttttgagagt

SEQ ID NO: 9336 - DNA, 25 bp, Artificial sequence  Extension Primer
  Primer
ctcagcaaccaaactctaaatcaac

SEQ ID NO: 9337 - DNA, 25 bp, Artificial sequence  Extension Primer
  Primer
cagaagtggaaacagagggagcaga

SEQ ID NO: 9338 - DNA, 25 bp, Artificial sequence  Extension Primer
  Primer
aattgtcaggactcatgtctttact

SEQ ID NO: 9339 - DNA, 22 bp, Artificial sequence  Extension Primer
  Primer
tgctttgttgtaggtggctatc

SEQ ID NO: 9340 - DNA, 25 bp, Artificial sequence  Extension Primer
  Primer
ctgctaaaaagaaagaacaaataaa

SEQ ID NO: 9341 - DNA, 25 bp, Artificial sequence  Extension Primer
  Primer
atgatgatttcagagcagaaggaaa

SEQ ID NO: 9342 - DNA, 25 bp, Artificial sequence  Extension Primer
  Primer
tgaatttttatgactaccttgtgag

SEQ ID NO: 9343 - DNA, 25 bp, Artificial sequence  Extension Primer
  Primer
tattaggaggaaataacagattatg

SEQ ID NO: 9344 - DNA, 25 bp, Artificial sequence  Extension Primer
  Primer
ttcccgggcctgccactcaccctcc

SEQ ID NO: 9345 - DNA, 25 bp, Artificial sequence  Extension Primer
  Primer
agagaggagccaaggggttagatgc

SEQ ID NO: 9346 - DNA, 25 bp, Artificial sequence  Extension Primer
  Primer
atccattttgaactgatttcttggc

SEQ ID NO: 9347 - DNA, 25 bp, Artificial sequence  Extension Primer
  Primer
aactgagatctggggttctcactct

SEQ ID NO: 9348 - DNA, 25 bp, Artificial sequence  Extension Primer
  Primer
aacacaacaagtcttcctcacagca

SEQ ID NO: 9349 - DNA, 25 bp, Artificial sequence  Extension Primer
  Primer
gcttcataccataaggtagtgaaca

SEQ ID NO: 9350 - DNA, 25 bp, Artificial sequence  Extension Primer
  Primer
aaaatgttaccgttctctacatcta

SEQ ID NO: 9351 - DNA, 25 bp, Artificial sequence  Extension Primer
  Primer
acagacagcatcaaggccccagaca

SEQ ID NO: 9352 - DNA, 25 bp, Artificial sequence  Extension Primer
  Primer
tcagtccacttctttataggagtca

SEQ ID NO: 9353 - DNA, 25 bp, Artificial sequence  Extension Primer
  Primer
taaaaaatgctacatggcatgcagg

SEQ ID NO: 9354 - DNA, 25 bp, Artificial sequence  Extension Primer
  Primer
tgaaatgaaattccactgattccca

SEQ ID NO: 9355 - DNA, 25 bp, Artificial sequence  Extension Primer
  Primer
taaaagaggtgaggttggaaacatg

SEQ ID NO: 9356 - DNA, 25 bp, Artificial sequence  Extension Primer
  Primer
aatacttattatttgagaggaaaac

SEQ ID NO: 9357 - DNA, 25 bp, Artificial sequence  Extension Primer
  Primer
tggtaacctttaaagtcctactcta

SEQ ID NO: 9358 - DNA, 25 bp, Artificial sequence  Extension Primer
  Primer
ataaaacatccctcacactccaact

SEQ ID NO: 9359 - DNA, 25 bp, Artificial sequence  Extension Primer
  Primer
ggcagtgtctagacatacacggttc

SEQ ID NO: 9360 - DNA, 25 bp, Artificial sequence  Extension Primer
  Primer
gtagcttttctttgaactagacatc

SEQ ID NO: 9361 - DNA, 25 bp, Artificial sequence  Extension Primer
  Primer
cttgactgacagtctctctaaagtt

SEQ ID NO: 9362 - DNA, 25 bp, Artificial sequence  Extension Primer
  Primer
ggaaaaaaaaaaaaaacagaagatg

SEQ ID NO: 9363 - DNA, 25 bp, Artificial sequence  Extension Primer
  Primer
agaatcaaaactgacccattttggt

SEQ ID NO: 9364 - DNA, 25 bp, Artificial sequence  Extension Primer
  Primer
tttacagcatcctctagtaccccca

SEQ ID NO: 9365 - DNA, 25 bp, Artificial sequence  Extension Primer
  Primer
ttgtgttcttttacacaaatgagtg

SEQ ID NO: 9366 - DNA, 25 bp, Artificial sequence  Extension Primer
  Primer
gaagactcaacatattttctccctt

SEQ ID NO: 9367 - DNA, 25 bp, Artificial sequence  Extension Primer
  Primer
ttcatgaggagcctgcctgagagac

SEQ ID NO: 9368 - DNA, 25 bp, Artificial sequence  Extension Primer
  Primer
ttactagctgcatgatggtaggcaa

SEQ ID NO: 9369 - DNA, 25 bp, Artificial sequence  Extension Primer
  Primer
aacatgagggttttgcagtgtgctt

SEQ ID NO: 9370 - DNA, 25 bp, Artificial sequence  Extension Primer
  Primer
aagcacatttatagagtcccgtcac

SEQ ID NO: 9371 - DNA, 25 bp, Artificial sequence  Extension Primer
  Primer
taacttcaatcataatttctataca

SEQ ID NO: 9372 - DNA, 25 bp, Artificial sequence  Extension Primer
  Primer
gatgaagaaggattcctaagggctt

SEQ ID NO: 9373 - DNA, 25 bp, Artificial sequence  Extension Primer
  Primer
acacaggacactggagaacctggca

SEQ ID NO: 9374 - DNA, 25 bp, Artificial sequence  Extension Primer
  Primer
ccccaaccatctatgtccaatacaa

SEQ ID NO: 9375 - DNA, 25 bp, Artificial sequence  Extension Primer
  Primer
gtcaaaactccacggactcttctca

SEQ ID NO: 9376 - DNA, 25 bp, Artificial sequence  Extension Primer
  Primer
ctgctaaattataagaaatccccaa

SEQ ID NO: 9377 - DNA, 25 bp, Artificial sequence  Extension Primer
  Primer
ggagctgggctcaatgatctgataa

SEQ ID NO: 9378 - DNA, 25 bp, Artificial sequence  Extension Primer
  Primer
aattttgccacatttaaatactaat

SEQ ID NO: 9379 - DNA, 25 bp, Artificial sequence  Extension Primer
  Primer
tacttctttggaaagcccatgtttt

SEQ ID NO: 9380 - DNA, 25 bp, Artificial sequence  Extension Primer
  Primer
aagagcttattcttggatgggacac

SEQ ID NO: 9381 - DNA, 25 bp, Artificial sequence  Extension Primer
  Primer
ggatacgttacaaattcaaagaccc

SEQ ID NO: 9382 - DNA, 25 bp, Artificial sequence  Extension Primer
  Primer
cctcattctccatgaagcaagatgt

SEQ ID NO: 9383 - DNA, 25 bp, Artificial sequence  Extension Primer
  Primer
attccttccagattctgttattatt

SEQ ID NO: 9384 - DNA, 25 bp, Artificial sequence  Extension Primer
  Primer
cagatctgccagcccctcttttacc

SEQ ID NO: 9385 - DNA, 25 bp, Artificial sequence  Extension Primer
  Primer
ttttatctgattttcaggtgttcta

SEQ ID NO: 9386 - DNA, 25 bp, Artificial sequence  Extension Primer
  Primer
ctattcgatgctcagttagacacac

SEQ ID NO: 9387 - DNA, 25 bp, Artificial sequence  Extension Primer
  Primer
atcttgtgataaaccataatggaaa

SEQ ID NO: 9388 - DNA, 25 bp, Artificial sequence  Extension Primer
  Primer
tcaaaagaatcaaaacactgatgtt

SEQ ID NO: 9389 - DNA, 25 bp, Artificial sequence  Extension Primer
  Primer
atgtaaagtggtgaacacaattaga

SEQ ID NO: 9390 - DNA, 25 bp, Artificial sequence  Extension Primer
  Primer
tgcacctaaaattttgttgggttct

SEQ ID NO: 9391 - DNA, 25 bp, Artificial sequence  Extension Primer
  Primer
tgagccatgcaaataatttggatgc

SEQ ID NO: 9392 - DNA, 25 bp, Artificial sequence  Extension Primer
  Primer
agggmacataaaccatgagatattt

SEQ ID NO: 9393 - DNA, 25 bp, Artificial sequence  Extension Primer
  Primer
agcaggaaactacagatatagagac

SEQ ID NO: 9394 - DNA, 25 bp, Artificial sequence  Extension Primer
  Primer
aatgaatgcataaatgtggtaaaca

SEQ ID NO: 9395 - DNA, 25 bp, Artificial sequence  Extension Primer
  Primer
ctggattagaatggtgaaagtatga

SEQ ID NO: 9396 - DNA, 25 bp, Artificial sequence  Extension Primer
  Primer
agacagacgttgaacgagcaaggag

SEQ ID NO: 9397 - DNA, 25 bp, Artificial sequence  Extension Primer
  Primer
ttccaataatttaaaggagtgaaaa

SEQ ID NO: 9398 - DNA, 25 bp, Artificial sequence  Extension Primer
  Primer
tcatatacatttcaaacacaatccc

SEQ ID NO: 9399 - DNA, 25 bp, Artificial sequence  Extension Primer
  Primer
aggccttctgstgctggccacccac

SEQ ID NO: 9400 - DNA, 25 bp, Artificial sequence  Extension Primer
  Primer
actcagagtccttcctggtggagca

SEQ ID NO: 9401 - DNA, 25 bp, Artificial sequence  Extension Primer
  Primer
tttctcctgtcagagtgtgctttca

SEQ ID NO: 9402 - DNA, 25 bp, Artificial sequence  Extension Primer
  Primer
aagcaaggaaaccaacattctctgg

SEQ ID NO: 9403 - DNA, 25 bp, Artificial sequence  Extension Primer
  Primer
taaactgttccctgacatcaggtga

SEQ ID NO: 9404 - DNA, 25 bp, Artificial sequence  Extension Primer
  Primer
tctgagtgatctccaaaacagactg

SEQ ID NO: 9405 - DNA, 25 bp, Artificial sequence  Extension Primer
  Primer
tttgattctgccatctaacaagcca

SEQ ID NO: 9406 - DNA, 25 bp, Artificial sequence  Extension Primer
  Primer
gaaaaagctccggcagttggccact

SEQ ID NO: 9407 - DNA, 25 bp, Artificial sequence  Extension Primer
  Primer
gctgggcttttccctgactccctca

SEQ ID NO: 9408 - DNA, 25 bp, Artificial sequence  Extension Primer
  Primer
aaatattaatagcatgagatttagg

SEQ ID NO: 9409 - DNA, 25 bp, Artificial sequence  Extension Primer
  Primer
aacaggacaacagattgctcttcag

SEQ ID NO: 9410 - DNA, 25 bp, Artificial sequence  Extension Primer
  Primer
tgtgggccccatgaggcagcactcc

SEQ ID NO: 9411 - DNA, 25 bp, Artificial sequence  Extension Primer
  Primer
taggtaaactatatccaagaattac

SEQ ID NO: 9412 - DNA, 25 bp, Artificial sequence  Extension Primer
  Primer
ccaagtagcacaggcaagatagaga

SEQ ID NO: 9413 - DNA, 25 bp, Artificial sequence  Extension Primer
  Primer
gcaaatatgaatacgtagagtctac

SEQ ID NO: 9414 - DNA, 25 bp, Artificial sequence  Extension Primer
  Primer
gtattttaaaaacatcacccagcct

SEQ ID NO: 9415 - DNA, 25 bp, Artificial sequence  Extension Primer
  Primer
gaggccctcagagttacaagtaaac

SEQ ID NO: 9416 - DNA, 25 bp, Artificial sequence  Extension Primer
  Primer
atttaagggacttgcctggagtcac

SEQ ID NO: 9417 - DNA, 25 bp, Artificial sequence  Extension Primer
  Primer
attcagataggttataagtaaaaat

SEQ ID NO: 9418 - DNA, 25 bp, Artificial sequence  Extension Primer
  Primer
atgaagcctgagggatctggttctc

SEQ ID NO: 9419 - DNA, 25 bp, Artificial sequence  Extension Primer
  Primer
tgtctttgcccaacactatttctta

SEQ ID NO: 9420 - DNA, 25 bp, Artificial sequence  Extension Primer
  Primer
cagttgttcaaggaggaagaggaga

SEQ ID NO: 9421 - DNA, 25 bp, Artificial sequence  Extension Primer
  Primer
agatgatgaatgataattaaagtta

SEQ ID NO: 9422 - DNA, 25 bp, Artificial sequence  Extension Primer
  Primer
aaagtgaaagtttgccacagtgtac

SEQ ID NO: 9423 - DNA, 25 bp, Artificial sequence  Extension Primer
  Primer
gttttctgtgctcgtaaattaaaca

SEQ ID NO: 9424 - DNA, 25 bp, Artificial sequence  Extension Primer
  Primer
catttggtctgtttcagcaggtggt

SEQ ID NO: 9425 - DNA, 25 bp, Artificial sequence  Extension Primer
  Primer
tgagaagggcagggatgcacaggca

SEQ ID NO: 9426 - DNA, 25 bp, Artificial sequence  Extension Primer
  Primer
ataaaatggttaaaatggtaacttt

SEQ ID NO: 9427 - DNA, 25 bp, Artificial sequence  Extension Primer
  Primer
ctatgttataaaccaaatattcatg

SEQ ID NO: 9428 - DNA, 25 bp, Artificial sequence  Extension Primer
  Primer
ggtaccataatgtgggggatggggc

SEQ ID NO: 9429 - DNA, 25 bp, Artificial sequence  Extension Primer
  Primer
cactgtatttcaccaccatataccc

SEQ ID NO: 9430 - DNA, 25 bp, Artificial sequence  Extension Primer
  Primer
ttccaagtgagtgagaactctyggc

SEQ ID NO: 9431 - DNA, 25 bp, Artificial sequence  Extension Primer
  Primer
agtctccatctctactccacccaat

SEQ ID NO: 9432 - DNA, 25 bp, Artificial sequence  Extension Primer
  Primer
cctatgccatcagctctccagctct

SEQ ID NO: 9433 - DNA, 25 bp, Artificial sequence  Extension Primer
  Primer
atatcttagtagtagaaattataca

SEQ ID NO: 9434 - DNA, 25 bp, Artificial sequence  Extension Primer
  Primer
acattaacacaaaactgctttgata

SEQ ID NO: 9435 - DNA, 25 bp, Artificial sequence  Extension Primer
  Primer
acacacagacacagacatgctagtt

SEQ ID NO: 9436 - DNA, 25 bp, Artificial sequence  Extension Primer
  Primer
ggatgattgcttctgagtcatttgc

SEQ ID NO: 9437 - DNA, 25 bp, Artificial sequence  Extension Primer
  Primer
tctggccatgatgctaaagggtcac

SEQ ID NO: 9438 - DNA, 25 bp, Artificial sequence  Extension Primer
  Primer
ggtaccgtagggctcatatattagc

SEQ ID NO: 9439 - DNA, 25 bp, Artificial sequence  Extension Primer
  Primer
atatggtaaatccaccaaacaatta

SEQ ID NO: 9440 - DNA, 25 bp, Artificial sequence  Extension Primer
  Primer
cacgagacgagacgagtggaggggc

SEQ ID NO: 9441 - DNA, 25 bp, Artificial sequence  Extension Primer
  Primer
gccaggaacccatttccatggcaac

SEQ ID NO: 9442 - DNA, 25 bp, Artificial sequence  Extension Primer
  Primer
ctagtacagatcagcctgccatcca

SEQ ID NO: 9443 - DNA, 25 bp, Artificial sequence  Extension Primer
  Primer
atacacacatacacataaaataaaa

SEQ ID NO: 9444 - DNA, 25 bp, Artificial sequence  Extension Primer
  Primer
gactattttaataaactccaggcaa

SEQ ID NO: 9445 - DNA, 25 bp, Artificial sequence  Extension Primer
  Primer
aaaacatggtgtgactacaatggaa

SEQ ID NO: 9446 - DNA, 25 bp, Artificial sequence  Extension Primer
  Primer
attggatgcttactattgttcatat

SEQ ID NO: 9447 - DNA, 25 bp, Artificial sequence  Extension Primer
  Primer
aagaaatttttaaactcctgctccc

SEQ ID NO: 9448 - DNA, 25 bp, Artificial sequence  Extension Primer
  Primer
cattgctcacgtgctaggtgcggac

SEQ ID NO: 9449 - DNA, 25 bp, Artificial sequence  Extension Primer
  Primer
aagcacatttatagagtcccgtcac

SEQ ID NO: 9450 - DNA, 25 bp, Artificial sequence  Extension Primer
  Primer
taatcccgctactgccccactcaac

SEQ ID NO: 9451 - DNA, 22 bp, Artificial sequence  Extension Primer
  Primer
agggactccttcaccctcatct

SEQ ID NO: 9452 - DNA, 25 bp, Artificial sequence  Extension Primer
  Primer
atcatatcaacgaattaaccaaaat

SEQ ID NO: 9453 - DNA, 25 bp, Artificial sequence  Extension Primer
  Primer
aaaattacctacagtttggctctta

SEQ ID NO: 9454 - DNA, 25 bp, Artificial sequence  Extension Primer
  Primer
aatgaaacgcacgtccactgctgag

SEQ ID NO: 9455 - DNA, 25 bp, Artificial sequence  Extension Primer
  Primer
tactagaaatatgccaaaataacac

SEQ ID NO: 9456 - DNA, 25 bp, Artificial sequence  Extension Primer
  Primer
taagctgagtaataggtacattttt

SEQ ID NO: 9457 - DNA, 25 bp, Artificial sequence  Extension Primer
  Primer
cctgcactgtggtcccttgctggtt

SEQ ID NO: 9458 - DNA, 25 bp, Artificial sequence  Extension Primer
  Primer
ctgtcctccgtagtggctgtatcaa

SEQ ID NO: 9459 - DNA, 25 bp, Artificial sequence  Extension Primer
  Primer
ttccacaaagcacacgctgaagaga

SEQ ID NO: 9460 - DNA, 25 bp, Artificial sequence  Extension Primer
  Primer
gatcaagacatwtcaaactttcttt

SEQ ID NO: 9461 - DNA, 25 bp, Artificial sequence  Extension Primer
  Primer
gacatwtcaaactttctttrggagt

SEQ ID NO: 9462 - DNA, 25 bp, Artificial sequence  Extension Primer
  Primer
agaactgattcaaggtaacccactt

SEQ ID NO: 9463 - DNA, 25 bp, Artificial sequence  Extension Primer
  Primer
gtgctatattaatggcagtttattg

SEQ ID NO: 9464 - DNA, 25 bp, Artificial sequence  Extension Primer
  Primer
gcaaatatgaatacgtagagtctac

SEQ ID NO: 9465 - DNA, 25 bp, Artificial sequence  Extension Primer
  Primer
gtattttaaaaacatcacccagcct

SEQ ID NO: 9466 - DNA, 25 bp, Artificial sequence  Extension Primer
  Primer
gaggccctcagagttacaagtaaac

SEQ ID NO: 9467 - DNA, 25 bp, Artificial sequence  Extension Primer
  Primer
agatcacaagcctctgtttgtatca

SEQ ID NO: 9468 - DNA, 25 bp, Artificial sequence  Extension Primer
  Primer
tgtttagaagttgttaacattgggc

SEQ ID NO: 9469 - DNA, 25 bp, Artificial sequence  Extension Primer
  Primer
tatttgtggctttgcagtttgatct

SEQ ID NO: 9470 - DNA, 25 bp, Artificial sequence  Extension Primer
  Primer
cagtgctggctggtcatccatattt

SEQ ID NO: 9471 - DNA, 22 bp, Artificial sequence  Extension Primer
  Primer
aaatccacagataatctgttca

SEQ ID NO: 9472 - DNA, 25 bp, Artificial sequence  Extension Primer
  Primer
cggtctactgcactccccaccagca

SEQ ID NO: 9473 - DNA, 25 bp, Artificial sequence  Extension Primer
  Primer
tgggttgggaagatcccctggagga

SEQ ID NO: 9474 - DNA, 25 bp, Artificial sequence  Extension Primer
  Primer
aagagcttattcttggatgggacac

SEQ ID NO: 9475 - DNA, 25 bp, Artificial sequence  Extension Primer
  Primer
agagaaaacacatcatccatgtcca

SEQ ID NO: 9476 - DNA, 25 bp, Artificial sequence  Extension Primer
  Primer
attcagaggtaaacacattcatctt

SEQ ID NO: 9477 - DNA, 22 bp, Artificial sequence  Extension Primer
  Primer
cttttagtcaagtccaaaagta

SEQ ID NO: 9478 - DNA, 25 bp, Artificial sequence  Extension Primer
  Primer
atgcttaggagattgtgcagtgtaa

SEQ ID NO: 9479 - DNA, 25 bp, Artificial sequence  Extension Primer
  Primer
gtactccgtgttcacacgagttact

SEQ ID NO: 9480 - DNA, 25 bp, Artificial sequence  Extension Primer
  Primer
tcctcatttctcaccatcctcgcct

SEQ ID NO: 9481 - DNA, 25 bp, Artificial sequence  Extension Primer
  Primer
aagtcttcagtggttcctcaacaca

SEQ ID NO: 9482 - DNA, 25 bp, Artificial sequence  Extension Primer
  Primer
atagcaagccctaaataattttatg

SEQ ID NO: 9483 - DNA, 25 bp, Artificial sequence  Extension Primer
  Primer
atccagaaaattggattaaagrtat

SEQ ID NO: 9484 - DNA, 25 bp, Artificial sequence  Extension Primer
  Primer
tctcccttctgtttaatccaacctg

SEQ ID NO: 9485 - DNA, 25 bp, Artificial sequence  Extension Primer
  Primer
atttattgcttaagtgatgccatgc

SEQ ID NO: 9486 - DNA, 25 bp, Artificial sequence  Extension Primer
  Primer
gtcatatctggttctttgcaacccc

SEQ ID NO: 9487 - DNA, 25 bp, Artificial sequence  Extension Primer
  Primer
gagcgcggagtcgccagggcagagc

SEQ ID NO: 9488 - DNA, 25 bp, Artificial sequence  Extension Primer
  Primer
ttccatagttgaggcacacgggctc

SEQ ID NO: 9489 - DNA, 25 bp, Artificial sequence  Extension Primer
  Primer
tctcaggytcactggttcctgcatc

SEQ ID NO: 9490 - DNA, 25 bp, Artificial sequence  Extension Primer
  Primer
aaacctggggaccatggatattttt

SEQ ID NO: 9491 - DNA, 25 bp, Artificial sequence  Extension Primer
  Primer
acgggactttwgtgtacttacttca

SEQ ID NO: 9492 - DNA, 25 bp, Artificial sequence  Extension Primer
  Primer
atttaagggacttgcctggagtcac

SEQ ID NO: 9493 - DNA, 25 bp, Artificial sequence  Extension Primer
  Primer
attcagataggttataagtaaaaat

SEQ ID NO: 9494 - DNA, 25 bp, Artificial sequence  Extension Primer
  Primer
atgaagcctgagggatctggttctc

SEQ ID NO: 9495 - DNA, 25 bp, Artificial sequence  Extension Primer
  Primer
tgtctttgcccaacactatttctta

SEQ ID NO: 9496 - DNA, 25 bp, Artificial sequence  Extension Primer
  Primer
cagttgttcaaggaggaagaggaga

SEQ ID NO: 9497 - DNA, 25 bp, Artificial sequence  Extension Primer
  Primer
agatgatgaatgataattaaagtta

SEQ ID NO: 9498 - DNA, 25 bp, Artificial sequence  Extension Primer
  Primer
aaagtgaaagtttgccacagtgtac

SEQ ID NO: 9499 - DNA, 25 bp, Artificial sequence  Extension Primer
  Primer
gttttctgtgctcgtaaattaaaca

SEQ ID NO: 9500 - DNA, 25 bp, Artificial sequence  Extension Primer
  Primer
catttggtctgtttcagcaggtggt

SEQ ID NO: 9501 - DNA, 25 bp, Artificial sequence  Extension Primer
  Primer
tgagaagggcagggatgcacaggca

SEQ ID NO: 9502 - DNA, 25 bp, Artificial sequence  Extension Primer
  Primer
ataaaatggttaaaatggtaacttt

SEQ ID NO: 9503 - DNA, 25 bp, Artificial sequence  Extension Primer
  Primer
ctatgttataaaccaaatattcatg

SEQ ID NO: 9504 - DNA, 25 bp, Artificial sequence  Extension Primer
  Primer
ggtaccataatgtgggggatggggc

SEQ ID NO: 9505 - DNA, 25 bp, Artificial sequence  Extension Primer
  Primer
cactgtatttcaccaccatataccc

SEQ ID NO: 9506 - DNA, 22 bp, Artificial sequence  Extension Primer
  Primer
gtagaaaaagttaatattgata

SEQ ID NO: 9507 - DNA, 25 bp, Artificial sequence  Extension Primer
  Primer
tgaatcacaatttgttatataatac

SEQ ID NO: 9508 - DNA, 25 bp, Artificial sequence  Extension Primer
  Primer
catcaccgtcctatttatgcttggg

SEQ ID NO: 9509 - DNA, 25 bp, Artificial sequence  Extension Primer
  Primer
gtcttaccagtaggtatagaggcac

SEQ ID NO: 9510 - DNA, 25 bp, Artificial sequence  Extension Primer
  Primer
tttgttaaaaccagtaaagcaacac

SEQ ID NO: 9511 - DNA, 25 bp, Artificial sequence  Extension Primer
  Primer
cctatttcatagtctgtgaaacatc

SEQ ID NO: 9512 - DNA, 25 bp, Artificial sequence  Extension Primer
  Primer
tgagggaggcctccaaataacaacc

SEQ ID NO: 9513 - DNA, 25 bp, Artificial sequence  Extension Primer
  Primer
acatgtataaccttaatttcttaca

SEQ ID NO: 9514 - DNA, 25 bp, Artificial sequence  Extension Primer
  Primer
ttctatgtgaacttctttcgtgttg

SEQ ID NO: 9515 - DNA, 25 bp, Artificial sequence  Extension Primer
  Primer
atatctttcctgtcattactaattt

SEQ ID NO: 9516 - DNA, 25 bp, Artificial sequence  Extension Primer
  Primer
ctgggaacatgttaataatgctaat

SEQ ID NO: 9517 - DNA, 25 bp, Artificial sequence  Extension Primer
  Primer
atatgtgtttttttcagtcacttgt

SEQ ID NO: 9518 - DNA, 25 bp, Artificial sequence  Extension Primer
  Primer
ccaagcgtccatcattacagccccc

SEQ ID NO: 9519 - DNA, 25 bp, Artificial sequence  Extension Primer
  Primer
actcgtgtccagggaacaagagtag

SEQ ID NO: 9520 - DNA, 25 bp, Artificial sequence  Extension Primer
  Primer
ctgaatttaatttgtaccctcttat

SEQ ID NO: 9521 - DNA, 25 bp, Artificial sequence  Extension Primer
  Primer
tattgattggttgactgattagttc

SEQ ID NO: 9522 - DNA, 25 bp, Artificial sequence  Extension Primer
  Primer
tctctagttaacctatatatgaaac

SEQ ID NO: 9523 - DNA, 25 bp, Artificial sequence  Extension Primer
  Primer
agggcggtgggtgcctcaggtggca

SEQ ID NO: 9524 - DNA, 25 bp, Artificial sequence  Extension Primer
  Primer
aattctagaaactggatgtgctaaa

SEQ ID NO: 9525 - DNA, 25 bp, Artificial sequence  Extension Primer
  Primer
gtagggccagcaccatggactcagg

SEQ ID NO: 9526 - DNA, 25 bp, Artificial sequence  Extension Primer
  Primer
ccccaaccatctatgtccaatacaa

SEQ ID NO: 9527 - DNA, 25 bp, Artificial sequence  Extension Primer
  Primer
gagaattattttttacacctattca

SEQ ID NO: 9528 - DNA, 25 bp, Artificial sequence  Extension Primer
  Primer
attcctttgatcttgtattggtgct

SEQ ID NO: 9529 - DNA, 22 bp, Artificial sequence  Extension Primer
  Primer
ccaaagggtgaatgttccctgc

SEQ ID NO: 9530 - DNA, 25 bp, Artificial sequence  Extension Primer
  Primer
aggcctaggtatattcccatgaatg

SEQ ID NO: 9531 - DNA, 25 bp, Artificial sequence  Extension Primer
  Primer
acagcgctgtgtgagtttagggtat

SEQ ID NO: 9532 - DNA, 25 bp, Artificial sequence  Extension Primer
  Primer
taggagatatatatatatatagttt

SEQ ID NO: 9533 - DNA, 25 bp, Artificial sequence  Extension Primer
  Primer
cacwggggccaccaaggacgagacc

SEQ ID NO: 9534 - DNA, 25 bp, Artificial sequence  Extension Primer
  Primer
aacagggyccagagggccaggrtga

SEQ ID NO: 9535 - DNA, 25 bp, Artificial sequence  Extension Primer
  Primer
ataaaatagaaaggcagcctcggga

SEQ ID NO: 9536 - DNA, 25 bp, Artificial sequence  Extension Primer
  Primer
cacacttgaatgcttacagcaaatt

SEQ ID NO: 9537 - DNA, 25 bp, Artificial sequence  Extension Primer
  Primer
cctggggaaggaaggaaggatgtga

SEQ ID NO: 9538 - DNA, 25 bp, Artificial sequence  Extension Primer
  Primer
acctgcaacctgcgctgcggtgatg

SEQ ID NO: 9539 - DNA, 25 bp, Artificial sequence  Extension Primer
  Primer
gtcaaaactccacggactcttctca

SEQ ID NO: 9540 - DNA, 25 bp, Artificial sequence  Extension Primer
  Primer
ataatgtactaataatgtgatgtat

SEQ ID NO: 9541 - DNA, 25 bp, Artificial sequence  Extension Primer
  Primer
ctctccaggggtagaagaagcatga

SEQ ID NO: 9542 - DNA, 22 bp, Artificial sequence  Extension Primer
  Primer
ccctatacatatgtcaggtggc

SEQ ID NO: 9543 - DNA, 25 bp, Artificial sequence  Extension Primer
  Primer
aaagattgtgttttttaaaaactat

SEQ ID NO: 9544 - DNA, 25 bp, Artificial sequence  Extension Primer
  Primer
tatgggaggtgcctgtgtaacattt

SEQ ID NO: 9545 - DNA, 25 bp, Artificial sequence  Extension Primer
  Primer
cctgggagtggacgtgtgtgtctgt

SEQ ID NO: 9546 - DNA, 25 bp, Artificial sequence  Extension Primer
  Primer
aacatgagggttttgcagtgtgctt

SEQ ID NO: 9547 - DNA, 25 bp, Artificial sequence  Extension Primer
  Primer
gtgagctcctgagcctctatctcct

SEQ ID NO: 9548 - DNA, 25 bp, Artificial sequence  Extension Primer
  Primer
ttcctgcctttcacaccccagcaag

SEQ ID NO: 9549 - DNA, 25 bp, Artificial sequence  Extension Primer
  Primer
taacttcaatcataatttctataca

SEQ ID NO: 9550 - DNA, 25 bp, Artificial sequence  Extension Primer
  Primer
aggagggcccagagcatctggagag

SEQ ID NO: 9551 - DNA, 25 bp, Artificial sequence  Extension Primer
  Primer
ctgcctgattgaccagcggggctgc

SEQ ID NO: 9552 - DNA, 25 bp, Artificial sequence  Extension Primer
  Primer
acctgctacaaaaatgtagggaaaa

SEQ ID NO: 9553 - DNA, 25 bp, Artificial sequence  Extension Primer
  Primer
acattagtgaggaatagaataaaat

SEQ ID NO: 9554 - DNA, 25 bp, Artificial sequence  Extension Primer
  Primer
cattatcgggcagtagtagtggcaa

SEQ ID NO: 9555 - DNA, 25 bp, Artificial sequence  Extension Primer
  Primer
aggtaataattcagggttgttcact

SEQ ID NO: 9556 - DNA, 25 bp, Artificial sequence  Extension Primer
  Primer
gaacaagggtgagaacaaggagcca

SEQ ID NO: 9557 - DNA, 25 bp, Artificial sequence  Extension Primer
  Primer
catgggaccgaagaactgagttttc

SEQ ID NO: 9558 - DNA, 25 bp, Artificial sequence  Extension Primer
  Primer
caccctgccctggaaggtcccacac

SEQ ID NO: 9559 - DNA, 25 bp, Artificial sequence  Extension Primer
  Primer
actcagtttaggtcatctgcacacc

SEQ ID NO: 9560 - DNA, 25 bp, Artificial sequence  Extension Primer
  Primer
tgattttttttctttgagtcgacaa

SEQ ID NO: 9561 - DNA, 25 bp, Artificial sequence  Extension Primer
  Primer
ctgatagccagggccaggttgttta

SEQ ID NO: 9562 - DNA, 25 bp, Artificial sequence  Extension Primer
  Primer
caaaacccagtgctttatgacctgc

SEQ ID NO: 9563 - DNA, 25 bp, Artificial sequence  Extension Primer
  Primer
accttcatccccaccactgaagata

SEQ ID NO: 9564 - DNA, 25 bp, Artificial sequence  Extension Primer
  Primer
tctgtttatttcagacacacactaa

SEQ ID NO: 9565 - DNA, 25 bp, Artificial sequence  Extension Primer
  Primer
gcaataattcttgccctgtctatct

SEQ ID NO: 9566 - DNA, 25 bp, Artificial sequence  Extension Primer
  Primer
ggagctgggctcaatgatctgataa

SEQ ID NO: 9567 - DNA, 25 bp, Artificial sequence  Extension Primer
  Primer
ctcttctttctggtcacattgactg

SEQ ID NO: 9568 - DNA, 25 bp, Artificial sequence  Extension Primer
  Primer
gccccaatccagaacatgctcagga

SEQ ID NO: 9569 - DNA, 25 bp, Artificial sequence  Extension Primer
  Primer
ttttctcatcttttaaatgggagtg

SEQ ID NO: 9570 - DNA, 25 bp, Artificial sequence  Extension Primer
  Primer
ggttaacaccattttagagctcatg

SEQ ID NO: 9571 - DNA, 25 bp, Artificial sequence  Extension Primer
  Primer
agacaagaccctctcattcaaaatc

SEQ ID NO: 9572 - DNA, 25 bp, Artificial sequence  Extension Primer
  Primer
aggattgtctgggaagaggatctgt

SEQ ID NO: 9573 - DNA, 25 bp, Artificial sequence  Extension Primer
  Primer
tagaaattatcagacatcttcctac

SEQ ID NO: 9574 - DNA, 25 bp, Artificial sequence  Extension Primer
  Primer
tatttgttttcttataggtataaag

SEQ ID NO: 9575 - DNA, 22 bp, Artificial sequence  Extension Primer
  Primer
ttccagtcccaagagagctccc

SEQ ID NO: 9576 - DNA, 25 bp, Artificial sequence  Extension Primer
  Primer
ccctggctgagtgcctttcacatcc

SEQ ID NO: 9577 - DNA, 25 bp, Artificial sequence  Extension Primer
  Primer
gcttctacattttctcacttctcag

SEQ ID NO: 9578 - DNA, 25 bp, Artificial sequence  Extension Primer
  Primer
acgcgactctctgaaaatataatct

SEQ ID NO: 9579 - DNA, 25 bp, Artificial sequence  Extension Primer
  Primer
aagttgaattagtactgaaaaaaat

SEQ ID NO: 9580 - DNA, 25 bp, Artificial sequence  Extension Primer
  Primer
agatcttttactgccgagttattta

SEQ ID NO: 9581 - DNA, 25 bp, Artificial sequence  Extension Primer
  Primer
ccattggatattcaatgtgaaacaa

SEQ ID NO: 9582 - DNA, 25 bp, Artificial sequence  Extension Primer
  Primer
tttctagaagcattaacacgactgt

SEQ ID NO: 9583 - DNA, 25 bp, Artificial sequence  Extension Primer
  Primer
gcagttaatatcattgccaaaaaaa

SEQ ID NO: 9584 - DNA, 25 bp, Artificial sequence  Extension Primer
  Primer
ccctccaaatagatttcctggagat

SEQ ID NO: 9585 - DNA, 25 bp, Artificial sequence  Extension Primer
  Primer
tttcctttcttctctcacacatcat

SEQ ID NO: 9586 - DNA, 25 bp, Artificial sequence  Extension Primer
  Primer
ttcatggaccatcctgacctcgcct

SEQ ID NO: 9587 - DNA, 25 bp, Artificial sequence  Extension Primer
  Primer
ttattgaaataaaatacgtataaga

SEQ ID NO: 9588 - DNA, 25 bp, Artificial sequence  Extension Primer
  Primer
attgggcaggatacttgtagacaac

SEQ ID NO: 9589 - DNA, 25 bp, Artificial sequence  Extension Primer
  Primer
cacaccacccggcaagtgagtytca

SEQ ID NO: 9590 - DNA, 25 bp, Artificial sequence  Extension Primer
  Primer
tgaggcaaggaaaatgtggaccagg

SEQ ID NO: 9591 - DNA, 25 bp, Artificial sequence  Extension Primer
  Primer
attaaaaaatttcttctacataatc

SEQ ID NO: 9592 - DNA, 25 bp, Artificial sequence  Extension Primer
  Primer
aaatcatctagggtggagtgggaaa

SEQ ID NO: 9593 - DNA, 25 bp, Artificial sequence  Extension Primer
  Primer
cctgaaatctgcattgacttatatt

SEQ ID NO: 9594 - DNA, 25 bp, Artificial sequence  Extension Primer
  Primer
tcaggatactccagtgtccagcata

SEQ ID NO: 9595 - DNA, 25 bp, Artificial sequence  Extension Primer
  Primer
gacctgttaccagtatcgcagagaa

SEQ ID NO: 9596 - DNA, 25 bp, Artificial sequence  Extension Primer
  Primer
aacaatcagtgttttgggctgtgat

SEQ ID NO: 9597 - DNA, 25 bp, Artificial sequence  Extension Primer
  Primer
aactatacgttctagtgacaatggg

SEQ ID NO: 9598 - DNA, 25 bp, Artificial sequence  Extension Primer
  Primer
gtgaagacaagatttgagtgcagga

SEQ ID NO: 9599 - DNA, 25 bp, Artificial sequence  Extension Primer
  Primer
atggtcatgcttgtcatggcgttgt

SEQ ID NO: 9600 - DNA, 25 bp, Artificial sequence  Extension Primer
  Primer
tctgcagrtgggaggggtgctttta

SEQ ID NO: 9601 - DNA, 25 bp, Artificial sequence  Extension Primer
  Primer
ggctctcagctctactgcctgcaat

SEQ ID NO: 9602 - DNA, 25 bp, Artificial sequence  Extension Primer
  Primer
atgatgggagctaaacgcctgctaa

SEQ ID NO: 9603 - DNA, 25 bp, Artificial sequence  Extension Primer
  Primer
aattgaggtgcaatagggagagagg

SEQ ID NO: 9604 - DNA, 25 bp, Artificial sequence  Extension Primer
  Primer
tcggaatactcaagtaagtgaaggg

SEQ ID NO: 9605 - DNA, 25 bp, Artificial sequence  Extension Primer
  Primer
tcagaagccaatgcctccacttyca

SEQ ID NO: 9606 - DNA, 25 bp, Artificial sequence  Extension Primer
  Primer
agaacagttttgtggttgccaaagc

SEQ ID NO: 9607 - DNA, 25 bp, Artificial sequence  Extension Primer
  Primer
aatgcaatgtagatgagaattggga

SEQ ID NO: 9608 - DNA, 25 bp, Artificial sequence  Extension Primer
  Primer
ggaccatcagggaagtcccagcctt

SEQ ID NO: 9609 - DNA, 25 bp, Artificial sequence  Extension Primer
  Primer
ccgcayggattccaaggccaagtya

SEQ ID NO: 9610 - DNA, 25 bp, Artificial sequence  Extension Primer
  Primer
ccagggtgagacaggaatcaagtcc

SEQ ID NO: 9611 - DNA, 25 bp, Artificial sequence  Extension Primer
  Primer
aagtgggtgggggagatttcttaca

SEQ ID NO: 9612 - DNA, 25 bp, Artificial sequence  Extension Primer
  Primer
tcaggcctgtgaccacaggctcttk

SEQ ID NO: 9613 - DNA, 25 bp, Artificial sequence  Extension Primer
  Primer
ctttgatatacttgttgctgaagaa

SEQ ID NO: 9614 - DNA, 25 bp, Artificial sequence  Extension Primer
  Primer
tcaatggcagcacattttatctatg

SEQ ID NO: 9615 - DNA, 25 bp, Artificial sequence  Extension Primer
  Primer
aagagtaatatgagagcgtctacyc

SEQ ID NO: 9616 - DNA, 25 bp, Artificial sequence  Extension Primer
  Primer
aaaggctgttttcagccagtctggg

SEQ ID NO: 9617 - DNA, 25 bp, Artificial sequence  Extension Primer
  Primer
gtagtgggtaatggtggagaaaata

SEQ ID NO: 9618 - DNA, 25 bp, Artificial sequence  Extension Primer
  Primer
tttcctgaaatcattctagcaaact

SEQ ID NO: 9619 - DNA, 25 bp, Artificial sequence  Extension Primer
  Primer
ttgtagactgcaggttagctgtgtc

SEQ ID NO: 9620 - DNA, 22 bp, Artificial sequence  Extension Primer
  Primer
attctaaggtaatgtagacccc

SEQ ID NO: 9621 - DNA, 25 bp, Artificial sequence  Extension Primer
  Primer
ctttttcctgttcttcctgcctaca

SEQ ID NO: 9622 - DNA, 25 bp, Artificial sequence  Extension Primer
  Primer
actctcaaggactcctgttctcctc

SEQ ID NO: 9623 - DNA, 25 bp, Artificial sequence  Extension Primer
  Primer
ttcatgggaccactggacagctggc

SEQ ID NO: 9624 - DNA, 25 bp, Artificial sequence  Extension Primer
  Primer
cttaaagagacatctaactaatgct

SEQ ID NO: 9625 - DNA, 25 bp, Artificial sequence  Extension Primer
  Primer
acaaagagcagaagtaattatgatt

SEQ ID NO: 9626 - DNA, 25 bp, Artificial sequence  Extension Primer
  Primer
gttatattaaaaagtagaggcatta

SEQ ID NO: 9627 - DNA, 25 bp, Artificial sequence  Extension Primer
  Primer
gttcttccatgagatgcagtctctc

SEQ ID NO: 9628 - DNA, 25 bp, Artificial sequence  Extension Primer
  Primer
gtaagtaagttaagcctaattwtga

SEQ ID NO: 9629 - DNA, 25 bp, Artificial sequence  Extension Primer
  Primer
tcayatactacgtaagccgcttgtt

SEQ ID NO: 9630 - DNA, 25 bp, Artificial sequence  Extension Primer
  Primer
gatcttccctgatctgatttcacga

SEQ ID NO: 9631 - DNA, 25 bp, Artificial sequence  Extension Primer
  Primer
ggaagtggaagctgagggagattaa

SEQ ID NO: 9632 - DNA, 25 bp, Artificial sequence  Extension Primer
  Primer
tacaaagcagccctgtccattcttg

SEQ ID NO: 9633 - DNA, 25 bp, Artificial sequence  Extension Primer
  Primer
ccccacttgctgctaggttctgtcc

SEQ ID NO: 9634 - DNA, 25 bp, Artificial sequence  Extension Primer
  Primer
ttggcgaccctctcagggccatgag

SEQ ID NO: 9635 - DNA, 25 bp, Artificial sequence  Extension Primer
  Primer
tatgggatacatgccaaaactgatt

SEQ ID NO: 9636 - DNA, 25 bp, Artificial sequence  Extension Primer
  Primer
aatgagggatccggacaagagcgtg

SEQ ID NO: 9637 - DNA, 25 bp, Artificial sequence  Extension Primer
  Primer
tacagaaaagctaccttgggagtca

SEQ ID NO: 9638 - DNA, 25 bp, Artificial sequence  Extension Primer
  Primer
ctgctaaattataagaaatccccaa

SEQ ID NO: 9639 - DNA, 25 bp, Artificial sequence  Extension Primer
  Primer
acacctccaataragccccatcaag

SEQ ID NO: 9640 - DNA, 25 bp, Artificial sequence  Extension Primer
  Primer
ccactggcagaagccccatgasaac

SEQ ID NO: 9641 - DNA, 25 bp, Artificial sequence  Extension Primer
  Primer
atttcaaaatattgaggtagtctcc

SEQ ID NO: 9642 - DNA, 25 bp, Artificial sequence  Extension Primer
  Primer
ctttccctccacctgtgtgtatgac

SEQ ID NO: 9643 - DNA, 25 bp, Artificial sequence  Extension Primer
  Primer
gtgttcttccaaaatgaacatattc

SEQ ID NO: 9644 - DNA, 25 bp, Artificial sequence  Extension Primer
  Primer
agagcagactagggagaggacattt

SEQ ID NO: 9645 - DNA, 25 bp, Artificial sequence  Extension Primer
  Primer
actgtctataatgacaaaagattta

SEQ ID NO: 9646 - DNA, 25 bp, Artificial sequence  Extension Primer
  Primer
tccttcaacccatcttctattctgg

SEQ ID NO: 9647 - DNA, 25 bp, Artificial sequence  Extension Primer
  Primer
tgcttcctgccctaccctggctcct

SEQ ID NO: 9648 - DNA, 25 bp, Artificial sequence  Extension Primer
  Primer
caacctgtttgactttttagatttt

SEQ ID NO: 9649 - DNA, 25 bp, Artificial sequence  Extension Primer
  Primer
agggaacagtgatatgaagcagtta

SEQ ID NO: 9650 - DNA, 25 bp, Artificial sequence  Extension Primer
  Primer
ttgtgaggatgcagcaaatgacttg

SEQ ID NO: 9651 - DNA, 25 bp, Artificial sequence  Extension Primer
  Primer
ctcctcttaatgtcttttcatttct

SEQ ID NO: 9652 - DNA, 25 bp, Artificial sequence  Extension Primer
  Primer
gcctgcaggaaatgccccagctagt

SEQ ID NO: 9653 - DNA, 25 bp, Artificial sequence  Extension Primer
  Primer
gcctgttaaggccacgtctcctccg

SEQ ID NO: 9654 - DNA, 25 bp, Artificial sequence  Extension Primer
  Primer
taataacaacaacaaaaacagaagt

SEQ ID NO: 9655 - DNA, 25 bp, Artificial sequence  Extension Primer
  Primer
gttgcccaagggtgttttatatctt

SEQ ID NO: 9656 - DNA, 25 bp, Artificial sequence  Extension Primer
  Primer
aacccaagctagctatttcctatcc

SEQ ID NO: 9657 - DNA, 25 bp, Artificial sequence  Extension Primer
  Primer
gcacaaccctttcatgagcaaagca

SEQ ID NO: 9658 - DNA, 25 bp, Artificial sequence  Extension Primer
  Primer
gtgctcattgaggctgtcaggatgc

SEQ ID NO: 9659 - DNA, 25 bp, Artificial sequence  Extension Primer
  Primer
atatttcatctgtggacaaaactct

SEQ ID NO: 9660 - DNA, 25 bp, Artificial sequence  Extension Primer
  Primer
aagggtccaggttcaatccctggtc

SEQ ID NO: 9661 - DNA, 25 bp, Artificial sequence  Extension Primer
  Primer
cagccccttttgctaaaaaaaagag

SEQ ID NO: 9662 - DNA, 25 bp, Artificial sequence  Extension Primer
  Primer
taactaatgactgcagaaagctact

SEQ ID NO: 9663 - DNA, 25 bp, Artificial sequence  Extension Primer
  Primer
gaactaggctgagagtccaccacca

SEQ ID NO: 9664 - DNA, 25 bp, Artificial sequence  Extension Primer
  Primer
gcgggctgttgtaaaggaagctgct

SEQ ID NO: 9665 - DNA, 25 bp, Artificial sequence  Extension Primer
  Primer
attaatctctgcactggaattttag

SEQ ID NO: 9666 - DNA, 25 bp, Artificial sequence  Extension Primer
  Primer
gtagtaggaaagggtgatagaacaa

SEQ ID NO: 9667 - DNA, 25 bp, Artificial sequence  Extension Primer
  Primer
agagacacagtttgatattcagaga

SEQ ID NO: 9668 - DNA, 25 bp, Artificial sequence  Extension Primer
  Primer
cagccaaaggctgcattctctaaga

SEQ ID NO: 9669 - DNA, 25 bp, Artificial sequence  Extension Primer
  Primer
agaatctgaatatattcatcgaatc

SEQ ID NO: 9670 - DNA, 25 bp, Artificial sequence  Extension Primer
  Primer
cgcaccacccaaaccagccctaaac

SEQ ID NO: 9671 - DNA, 25 bp, Artificial sequence  Extension Primer
  Primer
cctctttattataaggtttggaaag

SEQ ID NO: 9672 - DNA, 25 bp, Artificial sequence  Extension Primer
  Primer
atccttgtgtccccagcacccagca

SEQ ID NO: 9673 - DNA, 25 bp, Artificial sequence  Extension Primer
  Primer
attgtttccattaatttcaacttgg

SEQ ID NO: 9674 - DNA, 25 bp, Artificial sequence  Extension Primer
  Primer
gattactacatggacttgtccctgc

SEQ ID NO: 9675 - DNA, 25 bp, Artificial sequence  Extension Primer
  Primer
ttcccccaggaacttatattgtgac

SEQ ID NO: 9676 - DNA, 25 bp, Artificial sequence  Extension Primer
  Primer
agggtgagtcaaagcttttgtttct

SEQ ID NO: 9677 - DNA, 25 bp, Artificial sequence  Extension Primer
  Primer
gaatctccttctcaaactacatcat

SEQ ID NO: 9678 - DNA, 25 bp, Artificial sequence  Extension Primer
  Primer
acccctgttccctacagtrgaagca

SEQ ID NO: 9679 - DNA, 25 bp, Artificial sequence  Extension Primer
  Primer
agaatggatatgcggggaggtggga

SEQ ID NO: 9680 - DNA, 25 bp, Artificial sequence  Extension Primer
  Primer
gttaaaacaaacaaacaaaaattcc

SEQ ID NO: 9681 - DNA, 25 bp, Artificial sequence  Extension Primer
  Primer
gggagctactgataccaaggagaac

SEQ ID NO: 9682 - DNA, 25 bp, Artificial sequence  Extension Primer
  Primer
tttagttaggactctaagctatttt

SEQ ID NO: 9683 - DNA, 22 bp, Artificial sequence  Extension Primer
  Primer
ctggctgtaaagcagtgggtca

SEQ ID NO: 9684 - DNA, 25 bp, Artificial sequence  Extension Primer
  Primer
tgttaaggaacacagagactagtgt

SEQ ID NO: 9685 - DNA, 25 bp, Artificial sequence  Extension Primer
  Primer
tattcgattcagtagaaacagaatt

SEQ ID NO: 9686 - DNA, 25 bp, Artificial sequence  Extension Primer
  Primer
agcaggacaaagggagagaaaacaa

SEQ ID NO: 9687 - DNA, 25 bp, Artificial sequence  Extension Primer
  Primer
ggtgtggatggccgccttggagcag

SEQ ID NO: 9688 - DNA, 25 bp, Artificial sequence  Extension Primer
  Primer
cttgcatggcagctcaggacttgag

SEQ ID NO: 9689 - DNA, 25 bp, Artificial sequence  Extension Primer
  Primer
caggtagaaattcacaatggaaatt

SEQ ID NO: 9690 - DNA, 25 bp, Artificial sequence  Extension Primer
  Primer
cctcagcaccattaaagagaaatat

SEQ ID NO: 9691 - DNA, 25 bp, Artificial sequence  Extension Primer
  Primer
gattgaggagaactctcataccacc

SEQ ID NO: 9692 - DNA, 25 bp, Artificial sequence  Extension Primer
  Primer
gcaaatgtgttagtggagatcctga

SEQ ID NO: 9693 - DNA, 25 bp, Artificial sequence  Extension Primer
  Primer
aattacactgtctccatcccccaag

SEQ ID NO: 9694 - DNA, 25 bp, Artificial sequence  Extension Primer
  Primer
agttttaggtgtgttctgattgggg

SEQ ID NO: 9695 - DNA, 25 bp, Artificial sequence  Extension Primer
  Primer
agaaaatcctgctgtcccttacccc

SEQ ID NO: 9696 - DNA, 25 bp, Artificial sequence  Extension Primer
  Primer
aatataatttgaaacattctagttt

SEQ ID NO: 9697 - DNA, 25 bp, Artificial sequence  Extension Primer
  Primer
acagaaagatcaatagttcactcca

SEQ ID NO: 9698 - DNA, 25 bp, Artificial sequence  Extension Primer
  Primer
acacagagccaggggttaagctacc

SEQ ID NO: 9699 - DNA, 22 bp, Artificial sequence  Extension Primer
  Primer
tttttgcttttgccttaatgcc

SEQ ID NO: 9700 - DNA, 25 bp, Artificial sequence  Extension Primer
  Primer
gaacttcccaatttttatgtaatac

SEQ ID NO: 9701 - DNA, 25 bp, Artificial sequence  Extension Primer
  Primer
acacaggacactggagaacctggca

SEQ ID NO: 9702 - DNA, 25 bp, Artificial sequence  Extension Primer
  Primer
gtttatcaagtattttgttaagtat

SEQ ID NO: 9703 - DNA, 25 bp, Artificial sequence  Extension Primer
  Primer
aagttaaagaagttaaagtctttgt

SEQ ID NO: 9704 - DNA, 25 bp, Artificial sequence  Extension Primer
  Primer
tgaggataaaatgagacagtgatgt

SEQ ID NO: 9705 - DNA, 25 bp, Artificial sequence  Extension Primer
  Primer
attcaaatctctgtccttcaccagg

SEQ ID NO: 9706 - DNA, 25 bp, Artificial sequence  Extension Primer
  Primer
aatctccaggcctgaaaaacaaatc

SEQ ID NO: 9707 - DNA, 25 bp, Artificial sequence  Extension Primer
  Primer
ttcaacttttattttctcactaaca

SEQ ID NO: 9708 - DNA, 25 bp, Artificial sequence  Extension Primer
  Primer
cccatgttgactacttttacagaaa

SEQ ID NO: 9709 - DNA, 25 bp, Artificial sequence  Extension Primer
  Primer
taccttaggtcttatttccacccct

SEQ ID NO: 9710 - DNA, 25 bp, Artificial sequence  Extension Primer
  Primer
ttttttagtgctatcttaaagcagt

SEQ ID NO: 9711 - DNA, 25 bp, Artificial sequence  Extension Primer
  Primer
ccaggacactcattttggcctacag

SEQ ID NO: 9712 - DNA, 25 bp, Artificial sequence  Extension Primer
  Primer
ccccagctattgtgcatccggaagt

SEQ ID NO: 9713 - DNA, 25 bp, Artificial sequence  Extension Primer
  Primer
ctcaccacaaaccctagcagtacat

SEQ ID NO: 9714 - DNA, 25 bp, Artificial sequence  Extension Primer
  Primer
taagattgtttataaaccatgagaa

SEQ ID NO: 9715 - DNA, 25 bp, Artificial sequence  Extension Primer
  Primer
attccttccagattctgttattatt

SEQ ID NO: 9716 - DNA, 25 bp, Artificial sequence  Extension Primer
  Primer
atgtcaagtgctggagagccgtcac

SEQ ID NO: 9717 - DNA, 25 bp, Artificial sequence  Extension Primer
  Primer
aaaatgcctccgtgtttctcacact

SEQ ID NO: 9718 - DNA, 25 bp, Artificial sequence  Extension Primer
  Primer
ctcagaggcagaagaaggtttctag

SEQ ID NO: 9719 - DNA, 25 bp, Artificial sequence  Extension Primer
  Primer
gttgagggaacaggattatttatgc

SEQ ID NO: 9720 - DNA, 25 bp, Artificial sequence  Extension Primer
  Primer
taaagtgttaggttggtgagctgtc

SEQ ID NO: 9721 - DNA, 25 bp, Artificial sequence  Extension Primer
  Primer
agtgccacagggggacctgcttgcc

SEQ ID NO: 9722 - DNA, 25 bp, Artificial sequence  Extension Primer
  Primer
taaagcaataccaaacattttatct

SEQ ID NO: 9723 - DNA, 25 bp, Artificial sequence  Extension Primer
  Primer
gatgaagaaggattcctaagggctt

SEQ ID NO: 9724 - DNA, 25 bp, Artificial sequence  Extension Primer
  Primer
gaatcctcctgcagtacagtagagc

SEQ ID NO: 9725 - DNA, 25 bp, Artificial sequence  Extension Primer
  Primer
ttcttaaaagcatttctaaaaattg

SEQ ID NO: 9726 - DNA, 25 bp, Artificial sequence  Extension Primer
  Primer
tcttaattatcttgactttccattt

SEQ ID NO: 9727 - DNA, 25 bp, Artificial sequence  Extension Primer
  Primer
tacttctttggaaagcccatgtttt

SEQ ID NO: 9728 - DNA, 25 bp, Artificial sequence  Extension Primer
  Primer
cctcattctccatgaagcaagatgt

SEQ ID NO: 9729 - DNA, 25 bp, Artificial sequence  Extension Primer
  Primer
aggtttggtatgtggtatgaggaga

SEQ ID NO: 9730 - DNA, 25 bp, Artificial sequence  Extension Primer
  Primer
agggagtcatgagacataggaagta

SEQ ID NO: 9731 - DNA, 25 bp, Artificial sequence  Extension Primer
  Primer
tattttcagagaaaaattgtgctgc

SEQ ID NO: 9732 - DNA, 22 bp, Artificial sequence  Extension Primer
  Primer
gccacaccagatcgaggccacc

SEQ ID NO: 9733 - DNA, 25 bp, Artificial sequence  Extension Primer
  Primer
tagtaaacaaatcatttgaaattca

SEQ ID NO: 9734 - DNA, 25 bp, Artificial sequence  Extension Primer
  Primer
tcactgagagtatggatgacatgct

SEQ ID NO: 9735 - DNA, 25 bp, Artificial sequence  Extension Primer
  Primer
aacaaccttatactaggtacaatgt

SEQ ID NO: 9736 - DNA, 25 bp, Artificial sequence  Extension Primer
  Primer
gaaatacagatgaaaagtagaaggt

SEQ ID NO: 9737 - DNA, 24 bp, Artificial sequence  Reverse Primer
  Primer
acttttgtccctcagcatactact

SEQ ID NO: 9738 - DNA, 22 bp, Artificial sequence  Reverse Primer
  Primer
ttacagtagcaggtggaaaaac

SEQ ID NO: 9739 - DNA, 26 bp, Artificial sequence  Reverse Primer
  Primer
ttttatatctcttcccctgagtagtg

SEQ ID NO: 9740 - DNA, 26 bp, Artificial sequence  Reverse Primer
  Primer
aattaattagcatagaaagaggtcca

SEQ ID NO: 9741 - DNA, 23 bp, Artificial sequence  Reverse Primer
  Primer
tgtgaaaaaatgaaaatgacgtt

SEQ ID NO: 9742 - DNA, 24 bp, Artificial sequence  Reverse Primer
  Primer
attagaaaaaactgtcaccatcct

SEQ ID NO: 9743 - DNA, 22 bp, Artificial sequence  Reverse Primer
  Primer
atatttcaaggtgaggctgatg

SEQ ID NO: 9744 - DNA, 18 bp, Artificial sequence  Reverse Primer
  Primer
agcagggaaggcagtgaa

SEQ ID NO: 9745 - DNA, 22 bp, Artificial sequence  Reverse Primer
  Primer
tatctgctttcagagatttccc

SEQ ID NO: 9746 - DNA, 18 bp, Artificial sequence  Reverse Primer
  Primer
caaggccaatcgatggaa

SEQ ID NO: 9747 - DNA, 18 bp, Artificial sequence  Reverse Primer
  Primer
aacatgtccaagtggccg

SEQ ID NO: 9748 - DNA, 24 bp, Artificial sequence  Reverse Primer
  Primer
aagaaaaacaaacaraagagcaag

SEQ ID NO: 9749 - DNA, 18 bp, Artificial sequence  Reverse Primer
  Primer
cctgagaccgcactccac

SEQ ID NO: 9750 - DNA, 21 bp, Artificial sequence  Reverse Primer
  Primer
aaatccctgataatggtctcc

SEQ ID NO: 9751 - DNA, 24 bp, Artificial sequence  Reverse Primer
  Primer
aaaaaatcaaaggggagatacttg

SEQ ID NO: 9752 - DNA, 19 bp, Artificial sequence  Reverse Primer
  Primer
actgccatcacacccattt

SEQ ID NO: 9753 - DNA, 21 bp, Artificial sequence  Reverse Primer
  Primer
agaattattcagggctttgga

SEQ ID NO: 9754 - DNA, 21 bp, Artificial sequence  Reverse Primer
  Primer
tccacccaagaactagaatgg

SEQ ID NO: 9755 - DNA, 22 bp, Artificial sequence  Reverse Primer
  Primer
ttatccctctggtggacaataa

SEQ ID NO: 9756 - DNA, 19 bp, Artificial sequence  Reverse Primer
  Primer
tttggacaagctccttcca

SEQ ID NO: 9757 - DNA, 18 bp, Artificial sequence  Reverse Primer
  Primer
tgcagcctccaactcgcc

SEQ ID NO: 9758 - DNA, 18 bp, Artificial sequence  Reverse Primer
  Primer
atgtaagtgcccacggag

SEQ ID NO: 9759 - DNA, 19 bp, Artificial sequence  Reverse Primer
  Primer
tgtaggacttggtggcaga

SEQ ID NO: 9760 - DNA, 27 bp, Artificial sequence  Reverse Primer
  Primer
tggagtagaacttgttttttgtacata

SEQ ID NO: 9761 - DNA, 26 bp, Artificial sequence  Reverse Primer
  Primer
taattttatacaggwcacttgcctta

SEQ ID NO: 9762 - DNA, 21 bp, Artificial sequence  Reverse Primer
  Primer
aacccttggtcatctagccta

SEQ ID NO: 9763 - DNA, 19 bp, Artificial sequence  Reverse Primer
  Primer
gcacgagcacataaatgca

SEQ ID NO: 9764 - DNA, 21 bp, Artificial sequence  Reverse Primer
  Primer
tttgtgtcagttccgattctt

SEQ ID NO: 9765 - DNA, 25 bp, Artificial sequence  Reverse Primer
  Primer
tagaggatttgagtgagaatgaaaa

SEQ ID NO: 9766 - DNA, 24 bp, Artificial sequence  Reverse Primer
  Primer
tttatgtgtctgtgtgtatgtatg

SEQ ID NO: 9767 - DNA, 23 bp, Artificial sequence  Reverse Primer
  Primer
taaaaactcagactggcttcaga

SEQ ID NO: 9768 - DNA, 26 bp, Artificial sequence  Reverse Primer
  Primer
aatatttccagtttgaagtttttcac

SEQ ID NO: 9769 - DNA, 21 bp, Artificial sequence  Reverse Primer
  Primer
aaaagaaaggggaaaaggaga

SEQ ID NO: 9770 - DNA, 21 bp, Artificial sequence  Reverse Primer
  Primer
ccactactgtcaaggatcagc

SEQ ID NO: 9771 - DNA, 28 bp, Artificial sequence  Reverse Primer
  Primer
agattatcttggcctacaataattaaaa

SEQ ID NO: 9772 - DNA, 18 bp, Artificial sequence  Reverse Primer
  Primer
actcagccctggaccgtc

SEQ ID NO: 9773 - DNA, 23 bp, Artificial sequence  Reverse Primer
  Primer
aagaatggaaacacaaatctctg

SEQ ID NO: 9774 - DNA, 18 bp, Artificial sequence  Reverse Primer
  Primer
tgtgagggggtctgcagt

SEQ ID NO: 9775 - DNA, 20 bp, Artificial sequence  Reverse Primer
  Primer
aaatcctgctgcagagaagc

SEQ ID NO: 9776 - DNA, 20 bp, Artificial sequence  Reverse Primer
  Primer
tggcctcttatggtttgagt

SEQ ID NO: 9777 - DNA, 21 bp, Artificial sequence  Reverse Primer
  Primer
taatgctttctctgctccacc

SEQ ID NO: 9778 - DNA, 23 bp, Artificial sequence  Reverse Primer
  Primer
aaataaaggtcaggaaacaggaa

SEQ ID NO: 9779 - DNA, 22 bp, Artificial sequence  Reverse Primer
  Primer
atatctggagagcggtagaagc

SEQ ID NO: 9780 - DNA, 28 bp, Artificial sequence  Reverse Primer
  Primer
ttgaataaagaacatacaaacatacaca

SEQ ID NO: 9781 - DNA, 22 bp, Artificial sequence  Reverse Primer
  Primer
agaatcaggagtcatggaactg

SEQ ID NO: 9782 - DNA, 18 bp, Artificial sequence  Reverse Primer
  Primer
taccgggacagggcactt

SEQ ID NO: 9783 - DNA, 22 bp, Artificial sequence  Reverse Primer
  Primer
attgtcaattttggctctacca

SEQ ID NO: 9784 - DNA, 24 bp, Artificial sequence  Reverse Primer
  Primer
aatttgaaggagaagaaagtcaaa

SEQ ID NO: 9785 - DNA, 25 bp, Artificial sequence  Reverse Primer
  Primer
aaagagttagattgattgcctagag

SEQ ID NO: 9786 - DNA, 22 bp, Artificial sequence  Reverse Primer
  Primer
gaatgtcattggactctgaatg

SEQ ID NO: 9787 - DNA, 22 bp, Artificial sequence  Reverse Primer
  Primer
tcagcttctggcaaatataatg

SEQ ID NO: 9788 - DNA, 27 bp, Artificial sequence  Reverse Primer
  Primer
taaagtaaaatgtctttractctgcaa

SEQ ID NO: 9789 - DNA, 28 bp, Artificial sequence  Reverse Primer
  Primer
agctgagatatagaagaacttcaaaaat

SEQ ID NO: 9790 - DNA, 21 bp, Artificial sequence  Reverse Primer
  Primer
tatgaaaggaaggggaatgtt

SEQ ID NO: 9791 - DNA, 22 bp, Artificial sequence  Reverse Primer
  Primer
taactattcacccattcatgca

SEQ ID NO: 9792 - DNA, 21 bp, Artificial sequence  Reverse Primer
  Primer
agttcagccttgttcttctgg

SEQ ID NO: 9793 - DNA, 20 bp, Artificial sequence  Reverse Primer
  Primer
tgatttacccaaccaacctc

SEQ ID NO: 9794 - DNA, 22 bp, Artificial sequence  Reverse Primer
  Primer
ttaaatgtcaagcaggcctatt

SEQ ID NO: 9795 - DNA, 19 bp, Artificial sequence  Reverse Primer
  Primer
atctgtgtgtgcaggcatg

SEQ ID NO: 9796 - DNA, 24 bp, Artificial sequence  Reverse Primer
  Primer
aacattttcaaatcaaataagctg

SEQ ID NO: 9797 - DNA, 24 bp, Artificial sequence  Reverse Primer
  Primer
agtacctcaattcctcagtggtac

SEQ ID NO: 9798 - DNA, 19 bp, Artificial sequence  Reverse Primer
  Primer
ttttcctgaactccaggct

SEQ ID NO: 9799 - DNA, 23 bp, Artificial sequence  Reverse Primer
  Primer
aatcctgaggaacasaagacttc

SEQ ID NO: 9800 - DNA, 20 bp, Artificial sequence  Reverse Primer
  Primer
catctccaactagccactgg

SEQ ID NO: 9801 - DNA, 18 bp, Artificial sequence  Reverse Primer
  Primer
tcgtcatcactgggacac

SEQ ID NO: 9802 - DNA, 26 bp, Artificial sequence  Reverse Primer
  Primer
aataagaagtcattaatggaaatgct

SEQ ID NO: 9803 - DNA, 30 bp, Artificial sequence  Reverse Primer
  Primer
tataatgtgatttataagaagtttaggaga

SEQ ID NO: 9804 - DNA, 24 bp, Artificial sequence  Reverse Primer
  Primer
ttgtctcataatacccacagctag

SEQ ID NO: 9805 - DNA, 27 bp, Artificial sequence  Reverse Primer
  Primer
tttcctatattttaagtacttggaggc

SEQ ID NO: 9806 - DNA, 23 bp, Artificial sequence  Reverse Primer
  Primer
attttgcagatattcatccctct

SEQ ID NO: 9807 - DNA, 21 bp, Artificial sequence  Reverse Primer
  Primer
tctggcataggaaagttctca

SEQ ID NO: 9808 - DNA, 21 bp, Artificial sequence  Reverse Primer
  Primer
aaaagaatggacagaccacac

SEQ ID NO: 9809 - DNA, 26 bp, Artificial sequence  Reverse Primer
  Primer
atagttcaaatctcacaggagaactc

SEQ ID NO: 9810 - DNA, 20 bp, Artificial sequence  Reverse Primer
  Primer
ttctcctgcagctcatctct

SEQ ID NO: 9811 - DNA, 26 bp, Artificial sequence  Reverse Primer
  Primer
tcacataaatatttgtgaattatgcc

SEQ ID NO: 9812 - DNA, 24 bp, Artificial sequence  Reverse Primer
  Primer
attttacaatcaggaaaaccatgt

SEQ ID NO: 9813 - DNA, 28 bp, Artificial sequence  Reverse Primer
  Primer
tgtgtacagttgtgtaagttgtacagtc

SEQ ID NO: 9814 - DNA, 19 bp, Artificial sequence  Reverse Primer
  Primer
cacagsctgacacagaacc

SEQ ID NO: 9815 - DNA, 26 bp, Artificial sequence  Reverse Primer
  Primer
caattctaagatttttgatctttgtg

SEQ ID NO: 9816 - DNA, 27 bp, Artificial sequence  Reverse Primer
  Primer
agataaatgtatttttccttatcatgg

SEQ ID NO: 9817 - DNA, 23 bp, Artificial sequence  Reverse Primer
  Primer
cttatgcaagtttacggagaagg

SEQ ID NO: 9818 - DNA, 20 bp, Artificial sequence  Reverse Primer
  Primer
tttcttygggaaactccttg

SEQ ID NO: 9819 - DNA, 23 bp, Artificial sequence  Reverse Primer
  Primer
ctccattctaaacaaccacaaat

SEQ ID NO: 9820 - DNA, 22 bp, Artificial sequence  Reverse Primer
  Primer
ttaatgattcaaacagtgacgc

SEQ ID NO: 9821 - DNA, 22 bp, Artificial sequence  Reverse Primer
  Primer
tttgcaacagaaaagtgaccta

SEQ ID NO: 9822 - DNA, 18 bp, Artificial sequence  Reverse Primer
  Primer
accggggatgtccctcac

SEQ ID NO: 9823 - DNA, 22 bp, Artificial sequence  Reverse Primer
  Primer
tttatagtcagccccattctgt

SEQ ID NO: 9824 - DNA, 23 bp, Artificial sequence  Reverse Primer
  Primer
ttagtttctgcaaaagctgtctg

SEQ ID NO: 9825 - DNA, 30 bp, Artificial sequence  Reverse Primer
  Primer
atagactgatatgtgtctaatatttttcaa

SEQ ID NO: 9826 - DNA, 21 bp, Artificial sequence  Reverse Primer
  Primer
aagatcttgtgacctcccttg

SEQ ID NO: 9827 - DNA, 22 bp, Artificial sequence  Reverse Primer
  Primer
catccactggtaaagtgcttct

SEQ ID NO: 9828 - DNA, 27 bp, Artificial sequence  Reverse Primer
  Primer
ttaataactttrcatatttgtgactgc

SEQ ID NO: 9829 - DNA, 24 bp, Artificial sequence  Reverse Primer
  Primer
aatttgccatctgatacatatgaa

SEQ ID NO: 9830 - DNA, 21 bp, Artificial sequence  Reverse Primer
  Primer
tgtgactgaataagtgggagg

SEQ ID NO: 9831 - DNA, 22 bp, Artificial sequence  Reverse Primer
  Primer
atattctggtagaggctggatg

SEQ ID NO: 9832 - DNA, 29 bp, Artificial sequence  Reverse Primer
  Primer
ataaagaagagagcttttatctgaatagc

SEQ ID NO: 9833 - DNA, 19 bp, Artificial sequence  Reverse Primer
  Primer
tggctgtgtccaaacaatg

SEQ ID NO: 9834 - DNA, 22 bp, Artificial sequence  Reverse Primer
  Primer
attacaatccaaggtaacaggc

SEQ ID NO: 9835 - DNA, 21 bp, Artificial sequence  Reverse Primer
  Primer
tggttagacttcayagggcag

SEQ ID NO: 9836 - DNA, 19 bp, Artificial sequence  Reverse Primer
  Primer
agagcttcagccaatctgg

SEQ ID NO: 9837 - DNA, 23 bp, Artificial sequence  Reverse Primer
  Primer
tagaaacttacgacaattggctt

SEQ ID NO: 9838 - DNA, 18 bp, Artificial sequence  Reverse Primer
  Primer
tgggctgcaagtacagga

SEQ ID NO: 9839 - DNA, 20 bp, Artificial sequence  Reverse Primer
  Primer
tctacgtggagacagaggca

SEQ ID NO: 9840 - DNA, 18 bp, Artificial sequence  Reverse Primer
  Primer
aaactccacccaggcctc

SEQ ID NO: 9841 - DNA, 20 bp, Artificial sequence  Reverse Primer
  Primer
tttccagaaacttggctttg

SEQ ID NO: 9842 - DNA, 21 bp, Artificial sequence  Reverse Primer
  Primer
agtttctagatggggctcctc

SEQ ID NO: 9843 - DNA, 21 bp, Artificial sequence  Reverse Primer
  Primer
ttttcctagctccatctctgg

SEQ ID NO: 9844 - DNA, 21 bp, Artificial sequence  Reverse Primer
  Primer
agtctctgtcctcaaacccag

SEQ ID NO: 9845 - DNA, 25 bp, Artificial sequence  Reverse Primer
  Primer
taagataccatctttcttacggatg

SEQ ID NO: 9846 - DNA, 27 bp, Artificial sequence  Reverse Primer
  Primer
actcccaattctctctctctaaactag

SEQ ID NO: 9847 - DNA, 24 bp, Artificial sequence  Reverse Primer
  Primer
aaatgtttcctttttgattcaact

SEQ ID NO: 9848 - DNA, 19 bp, Artificial sequence  Reverse Primer
  Primer
accctcagcagtacaaccc

SEQ ID NO: 9849 - DNA, 23 bp, Artificial sequence  Reverse Primer
  Primer
ataaaacaaaaaacccctgaaga

SEQ ID NO: 9850 - DNA, 18 bp, Artificial sequence  Reverse Primer
  Primer
attttgaggctgtggagg

SEQ ID NO: 9851 - DNA, 30 bp, Artificial sequence  Reverse Primer
  Primer
attctaattttatactactgtcatcttttc

SEQ ID NO: 9852 - DNA, 28 bp, Artificial sequence  Reverse Primer
  Primer
atctttgtagctcttttctatttttgtg

SEQ ID NO: 9853 - DNA, 27 bp, Artificial sequence  Reverse Primer
  Primer
aaatatgcaagatatccataaaagaga

SEQ ID NO: 9854 - DNA, 22 bp, Artificial sequence  Reverse Primer
  Primer
actgtgatcagtactccttccc

SEQ ID NO: 9855 - DNA, 25 bp, Artificial sequence  Reverse Primer
  Primer
aacttgaatatgttagcatagtgcc

SEQ ID NO: 9856 - DNA, 24 bp, Artificial sequence  Reverse Primer
  Primer
ggcaaatagttcagagaaaaattc

SEQ ID NO: 9857 - DNA, 27 bp, Artificial sequence  Reverse Primer
  Primer
aaaagttaatgtttatatgccatgtct

SEQ ID NO: 9858 - DNA, 23 bp, Artificial sequence  Reverse Primer
  Primer
cagagaaatcagtaagaatgcca

SEQ ID NO: 9859 - DNA, 24 bp, Artificial sequence  Reverse Primer
  Primer
ttcactagaaccaaaatgttgtcc

SEQ ID NO: 9860 - DNA, 30 bp, Artificial sequence  Reverse Primer
  Primer
gttaatgcagtctctctaatgktatttatt

SEQ ID NO: 9861 - DNA, 24 bp, Artificial sequence  Reverse Primer
  Primer
aagtcaaaactgcaaaatacacct

SEQ ID NO: 9862 - DNA, 19 bp, Artificial sequence  Reverse Primer
  Primer
ttatctgcaggagacacgc

SEQ ID NO: 9863 - DNA, 27 bp, Artificial sequence  Reverse Primer
  Primer
aaawaaacaaacaaaactaccactaca

SEQ ID NO: 9864 - DNA, 27 bp, Artificial sequence  Reverse Primer
  Primer
taaatcgttagactccttttattttcc

SEQ ID NO: 9865 - DNA, 26 bp, Artificial sequence  Reverse Primer
  Primer
atttacttaaaagcctcttcctagtg

SEQ ID NO: 9866 - DNA, 30 bp, Artificial sequence  Reverse Primer
  Primer
atttcatctttttatctcttctaatgacta

SEQ ID NO: 9867 - DNA, 27 bp, Artificial sequence  Reverse Primer
  Primer
accactacaaggaatgtgaaattatat

SEQ ID NO: 9868 - DNA, 28 bp, Artificial sequence  Reverse Primer
  Primer
aatttctcaactataaaggttggtagaa

SEQ ID NO: 9869 - DNA, 26 bp, Artificial sequence  Reverse Primer
  Primer
tacatagagtatgtggtacaccaggt

SEQ ID NO: 9870 - DNA, 26 bp, Artificial sequence  Reverse Primer
  Primer
attagagtcatcttggaaaagaaaca

SEQ ID NO: 9871 - DNA, 24 bp, Artificial sequence  Reverse Primer
  Primer
ttacaacctcagcaattcttattg

SEQ ID NO: 9872 - DNA, 30 bp, Artificial sequence  Reverse Primer
  Primer
tatctatatcacagtttgagtaacattata

SEQ ID NO: 9873 - DNA, 23 bp, Artificial sequence  Reverse Primer
  Primer
accagataccatcagatcagaac

SEQ ID NO: 9874 - DNA, 28 bp, Artificial sequence  Reverse Primer
  Primer
atgatacacacctcaagtaaaataacaa

SEQ ID NO: 9875 - DNA, 23 bp, Artificial sequence  Reverse Primer
  Primer
ttctgttttctcaaaccaatttg

SEQ ID NO: 9876 - DNA, 30 bp, Artificial sequence  Reverse Primer
  Primer
ccagagatatgtgtaaaaatttgattatac

SEQ ID NO: 9877 - DNA, 30 bp, Artificial sequence  Reverse Primer
  Primer
atgttatctccatttattttcttgtagtaa

SEQ ID NO: 9878 - DNA, 27 bp, Artificial sequence  Reverse Primer
  Primer
tcaataaagatatattgcaagttgtgt

SEQ ID NO: 9879 - DNA, 24 bp, Artificial sequence  Reverse Primer
  Primer
tacccagacttgtagcacataaca

SEQ ID NO: 9880 - DNA, 27 bp, Artificial sequence  Reverse Primer
  Primer
tagcactgagttttctttaaatgttct

SEQ ID NO: 9881 - DNA, 26 bp, Artificial sequence  Reverse Primer
  Primer
agtctatagaacgttattatggcaac

SEQ ID NO: 9882 - DNA, 27 bp, Artificial sequence  Reverse Primer
  Primer
atttatgtgcaatgacttacaatttac

SEQ ID NO: 9883 - DNA, 30 bp, Artificial sequence  Reverse Primer
  Primer
taagtatgtactgtgtctctactatgtacc

SEQ ID NO: 9884 - DNA, 20 bp, Artificial sequence  Reverse Primer
  Primer
aaaaccagggttgaggaaat

SEQ ID NO: 9885 - DNA, 22 bp, Artificial sequence  Reverse Primer
  Primer
tctgaactctctctaaccctcc

SEQ ID NO: 9886 - DNA, 18 bp, Artificial sequence  Reverse Primer
  Primer
ataccagcttctcccccc

SEQ ID NO: 9887 - DNA, 19 bp, Artificial sequence  Reverse Primer
  Primer
aacacaaaccagccctacc

SEQ ID NO: 9888 - DNA, 23 bp, Artificial sequence  Reverse Primer
  Primer
ttgtgtgttacagaacagtggaa

SEQ ID NO: 9889 - DNA, 21 bp, Artificial sequence  Reverse Primer
  Primer
ataagaagtaccacgggtccc

SEQ ID NO: 9890 - DNA, 24 bp, Artificial sequence  Reverse Primer
  Primer
aaatgtccttttattctcagcaat

SEQ ID NO: 9891 - DNA, 28 bp, Artificial sequence  Reverse Primer
  Primer
agaagtaaagtcattctgtttaaatcaa

SEQ ID NO: 9892 - DNA, 25 bp, Artificial sequence  Reverse Primer
  Primer
atgcagaactttaaaaacaatgagt

SEQ ID NO: 9893 - DNA, 21 bp, Artificial sequence  Reverse Primer
  Primer
acaaggtctgcgatactctca

SEQ ID NO: 9894 - DNA, 27 bp, Artificial sequence  Reverse Primer
  Primer
atttataaccrtgacatttgttgttac

SEQ ID NO: 9895 - DNA, 24 bp, Artificial sequence  Reverse Primer
  Primer
tttttgcagaaattagctgatagc

SEQ ID NO: 9896 - DNA, 20 bp, Artificial sequence  Reverse Primer
  Primer
atgaaaacccaacacaatgg

SEQ ID NO: 9897 - DNA, 26 bp, Artificial sequence  Reverse Primer
  Primer
aaactgaaaagaaagttattgcatct

SEQ ID NO: 9898 - DNA, 23 bp, Artificial sequence  Reverse Primer
  Primer
aaactctggaaaagtaaaacccc

SEQ ID NO: 9899 - DNA, 21 bp, Artificial sequence  Reverse Primer
  Primer
aatatctgcccaggttcctaa

SEQ ID NO: 9900 - DNA, 19 bp, Artificial sequence  Reverse Primer
  Primer
aatggaattggcttttaag

SEQ ID NO: 9901 - DNA, 21 bp, Artificial sequence  Reverse Primer
  Primer
tttcaacttgaatgttctgcc

SEQ ID NO: 9902 - DNA, 24 bp, Artificial sequence  Reverse Primer
  Primer
taatggtaatttctggacctcact

SEQ ID NO: 9903 - DNA, 18 bp, Artificial sequence  Reverse Primer
  Primer
tgccgattgctttggata

SEQ ID NO: 9904 - DNA, 24 bp, Artificial sequence  Reverse Primer
  Primer
aaattaaactcgaatggatgttca

SEQ ID NO: 9905 - DNA, 28 bp, Artificial sequence  Reverse Primer
  Primer
tgtaaatattttgacagtagcctatgtg

SEQ ID NO: 9906 - DNA, 25 bp, Artificial sequence  Reverse Primer
  Primer
ataattggaaggatgtctttctttt

SEQ ID NO: 9907 - DNA, 27 bp, Artificial sequence  Reverse Primer
  Primer
taaattcaactgtaaggtgttttttct

SEQ ID NO: 9908 - DNA, 24 bp, Artificial sequence  Reverse Primer
  Primer
attgcagctaaggaatttaaagtg

SEQ ID NO: 9909 - DNA, 30 bp, Artificial sequence  Reverse Primer
  Primer
ctgggaaactacattcttaaaataaatatc

SEQ ID NO: 9910 - DNA, 25 bp, Artificial sequence  Reverse Primer
  Primer
ttataaagtatcacaaactgggtgg

SEQ ID NO: 9911 - DNA, 24 bp, Artificial sequence  Reverse Primer
  Primer
gaagaactcagaagctaggaaatg

SEQ ID NO: 9912 - DNA, 20 bp, Artificial sequence  Reverse Primer
  Primer
ttggtaccatgtcaggtttg

SEQ ID NO: 9913 - DNA, 18 bp, Artificial sequence  Reverse Primer
  Primer
ttccgggaaactgcgctg

SEQ ID NO: 9914 - DNA, 19 bp, Artificial sequence  Reverse Primer
  Primer
cagtccagcactgaaccag

SEQ ID NO: 9915 - DNA, 23 bp, Artificial sequence  Reverse Primer
  Primer
aaagttctgggcttcttctaaag

SEQ ID NO: 9916 - DNA, 26 bp, Artificial sequence  Reverse Primer
  Primer
gaattctcagtctttaccttatttgc

SEQ ID NO: 9917 - DNA, 21 bp, Artificial sequence  Reverse Primer
  Primer
aaactgcagcacattgaattt

SEQ ID NO: 9918 - DNA, 24 bp, Artificial sequence  Reverse Primer
  Primer
ataattacaggctgggagaagtag

SEQ ID NO: 9919 - DNA, 18 bp, Artificial sequence  Reverse Primer
  Primer
aaccatgtgccatcccat

SEQ ID NO: 9920 - DNA, 18 bp, Artificial sequence  Reverse Primer
  Primer
actgtagtttcccccgct

SEQ ID NO: 9921 - DNA, 24 bp, Artificial sequence  Reverse Primer
  Primer
aagagatacaggtaagtgacccag

SEQ ID NO: 9922 - DNA, 28 bp, Artificial sequence  Reverse Primer
  Primer
aattcagtcatattaacatttttaggtg

SEQ ID NO: 9923 - DNA, 23 bp, Artificial sequence  Reverse Primer
  Primer
tttcagtcagagaagacaggttg

SEQ ID NO: 9924 - DNA, 28 bp, Artificial sequence  Reverse Primer
  Primer
aaattttaagtgtatgtgaaaataagcc

SEQ ID NO: 9925 - DNA, 22 bp, Artificial sequence  Reverse Primer
  Primer
atttctcaattgaaagtgcagg

SEQ ID NO: 9926 - DNA, 26 bp, Artificial sequence  Reverse Primer
  Primer
atttttctagtttgaatatccctgaa

SEQ ID NO: 9927 - DNA, 20 bp, Artificial sequence  Reverse Primer
  Primer
attggagcaaagacagagca

SEQ ID NO: 9928 - DNA, 26 bp, Artificial sequence  Reverse Primer
  Primer
aactatttatatcctccagaatgcat

SEQ ID NO: 9929 - DNA, 18 bp, Artificial sequence  Reverse Primer
  Primer
accccacattgcaggaaa

SEQ ID NO: 9930 - DNA, 19 bp, Artificial sequence  Reverse Primer
  Primer
tgcatgtaaaacctggcac

SEQ ID NO: 9931 - DNA, 24 bp, Artificial sequence  Reverse Primer
  Primer
ttaaaaagcaaatattcaccattg

SEQ ID NO: 9932 - DNA, 25 bp, Artificial sequence  Reverse Primer
  Primer
tttacagatgtgtggtatgtgtatg

SEQ ID NO: 9933 - DNA, 22 bp, Artificial sequence  Reverse Primer
  Primer
atttcatgggactyaaaccact

SEQ ID NO: 9934 - DNA, 25 bp, Artificial sequence  Reverse Primer
  Primer
tgcagtttccaatttaactacctaa

SEQ ID NO: 9935 - DNA, 18 bp, Artificial sequence  Reverse Primer
  Primer
rttctttcccaycccctt

SEQ ID NO: 9936 - DNA, 28 bp, Artificial sequence  Reverse Primer
  Primer
caaaatatattgactttcattaacttcc

SEQ ID NO: 9937 - DNA, 28 bp, Artificial sequence  Reverse Primer
  Primer
aataaatttatgtgtgcaaagtgttaag

SEQ ID NO: 9938 - DNA, 28 bp, Artificial sequence  Reverse Primer
  Primer
tttgtacattatatatgccacaaagatt

SEQ ID NO: 9939 - DNA, 28 bp, Artificial sequence  Reverse Primer
  Primer
acagtattcaggttatttcctttttaaa

SEQ ID NO: 9940 - DNA, 22 bp, Artificial sequence  Reverse Primer
  Primer
tatatagttttggcttttccgg

SEQ ID NO: 9941 - DNA, 30 bp, Artificial sequence  Reverse Primer
  Primer
cacttactgattttagattaattctttacc

SEQ ID NO: 9942 - DNA, 19 bp, Artificial sequence  Reverse Primer
  Primer
ttatgctgccttagtgcca

SEQ ID NO: 9943 - DNA, 30 bp, Artificial sequence  Reverse Primer
  Primer
ttttaaagtcttttatgtggtagtagagat

SEQ ID NO: 9944 - DNA, 24 bp, Artificial sequence  Reverse Primer
  Primer
taatctgacaaggaatcaaggttc

SEQ ID NO: 9945 - DNA, 21 bp, Artificial sequence  Reverse Primer
  Primer
acacatcatcagtcagcacag

SEQ ID NO: 9946 - DNA, 21 bp, Artificial sequence  Reverse Primer
  Primer
atgaccgatgattcagtcaag

SEQ ID NO: 9947 - DNA, 22 bp, Artificial sequence  Reverse Primer
  Primer
aaaaaggaaactaaccagtgcc

SEQ ID NO: 9948 - DNA, 24 bp, Artificial sequence  Reverse Primer
  Primer
tgccgttattaacgtttttaaact

SEQ ID NO: 9949 - DNA, 20 bp, Artificial sequence  Reverse Primer
  Primer
tgggagaatgtcttttggaa

SEQ ID NO: 9950 - DNA, 25 bp, Artificial sequence  Reverse Primer
  Primer
atgttcattcattcctttctctatc

SEQ ID NO: 9951 - DNA, 22 bp, Artificial sequence  Reverse Primer
  Primer
gtatggctgccagtttaagaat

SEQ ID NO: 9952 - DNA, 27 bp, Artificial sequence  Reverse Primer
  Primer
atcaatgatatttttgttggtcttact

SEQ ID NO: 9953 - DNA, 23 bp, Artificial sequence  Reverse Primer
  Primer
tttggaacagtgagttttatcga

SEQ ID NO: 9954 - DNA, 21 bp, Artificial sequence  Reverse Primer
  Primer
ttcactttgttcacatgcaga

SEQ ID NO: 9955 - DNA, 19 bp, Artificial sequence  Reverse Primer
  Primer
agggtgaagcagggtaaca

SEQ ID NO: 9956 - DNA, 23 bp, Artificial sequence  Reverse Primer
  Primer
tgaaaagaatctacgttttggag

SEQ ID NO: 9957 - DNA, 21 bp, Artificial sequence  Reverse Primer
  Primer
aaaatgccaagtcctaaccac

SEQ ID NO: 9958 - DNA, 24 bp, Artificial sequence  Reverse Primer
  Primer
aattttatttgcagtattttgcca

SEQ ID NO: 9959 - DNA, 24 bp, Artificial sequence  Reverse Primer
  Primer
ttgctgggagaattaaataaaatt

SEQ ID NO: 9960 - DNA, 23 bp, Artificial sequence  Reverse Primer
  Primer
tagtcagaatcacagttgagggt

SEQ ID NO: 9961 - DNA, 30 bp, Artificial sequence  Reverse Primer
  Primer
gattgttttttatcctaatatatacatacc

SEQ ID NO: 9962 - DNA, 22 bp, Artificial sequence  Reverse Primer
  Primer
gtggggaagacagaaaataaac

SEQ ID NO: 9963 - DNA, 24 bp, Artificial sequence  Reverse Primer
  Primer
ttttttcagcttttgtatttcctc

SEQ ID NO: 9964 - DNA, 22 bp, Artificial sequence  Reverse Primer
  Primer
aagcacattattttccaccatc

SEQ ID NO: 9965 - DNA, 22 bp, Artificial sequence  Reverse Primer
  Primer
tgacattttttgtaagccatga

SEQ ID NO: 9966 - DNA, 18 bp, Artificial sequence  Reverse Primer
  Primer
agccctgcgcctyttcct

SEQ ID NO: 9967 - DNA, 19 bp, Artificial sequence  Reverse Primer
  Primer
aggcaccagcagggcagat

SEQ ID NO: 9968 - DNA, 21 bp, Artificial sequence  Reverse Primer
  Primer
gaaaggcaccaagtcataaca

SEQ ID NO: 9969 - DNA, 21 bp, Artificial sequence  Reverse Primer
  Primer
atctgtatgtcaacacgcagg

SEQ ID NO: 9970 - DNA, 21 bp, Artificial sequence  Reverse Primer
  Primer
aagcagaggagagagtccttc

SEQ ID NO: 9971 - DNA, 21 bp, Artificial sequence  Reverse Primer
  Primer
aaaattaaaaaacaaacgccc

SEQ ID NO: 9972 - DNA, 24 bp, Artificial sequence  Reverse Primer
  Primer
gtgttataactatggtggtgacgt

SEQ ID NO: 9973 - DNA, 19 bp, Artificial sequence  Reverse Primer
  Primer
ttagttccctggctccaca

SEQ ID NO: 9974 - DNA, 23 bp, Artificial sequence  Reverse Primer
  Primer
aacactcactgtgrttttgttga

SEQ ID NO: 9975 - DNA, 19 bp, Artificial sequence  Reverse Primer
  Primer
cacccattaccttcagcac

SEQ ID NO: 9976 - DNA, 21 bp, Artificial sequence  Reverse Primer
  Primer
agtacaactaggctggctgct

SEQ ID NO: 9977 - DNA, 25 bp, Artificial sequence  Reverse Primer
  Primer
aagttaggtcgctgtgtaagtagaa

SEQ ID NO: 9978 - DNA, 30 bp, Artificial sequence  Reverse Primer
  Primer
atttatttcacacttacctaatcttcttta

SEQ ID NO: 9979 - DNA, 24 bp, Artificial sequence  Reverse Primer
  Primer
aatagatgtcttttccgactcaaa

SEQ ID NO: 9980 - DNA, 23 bp, Artificial sequence  Reverse Primer
  Primer
tttttgctgctctgtattttctg

SEQ ID NO: 9981 - DNA, 22 bp, Artificial sequence  Reverse Primer
  Primer
tttactggtacacagacccctt

SEQ ID NO: 9982 - DNA, 25 bp, Artificial sequence  Reverse Primer
  Primer
caactacctgacagtttttaaagga

SEQ ID NO: 9983 - DNA, 25 bp, Artificial sequence  Reverse Primer
  Primer
ttttctgaacagtaagccrtaagta

SEQ ID NO: 9984 - DNA, 22 bp, Artificial sequence  Reverse Primer
  Primer
aatgagaatgatgaacgctctg

SEQ ID NO: 9985 - DNA, 20 bp, Artificial sequence  Reverse Primer
  Primer
aaaatctgcatggaacaagg

SEQ ID NO: 9986 - DNA, 30 bp, Artificial sequence  Reverse Primer
  Primer
atgagagacactgttataattaaatggtat

SEQ ID NO: 9987 - DNA, 22 bp, Artificial sequence  Reverse Primer
  Primer
atgtgatgctgattctgtgaag

SEQ ID NO: 9988 - DNA, 19 bp, Artificial sequence  Reverse Primer
  Primer
atgcctggcactycttttc

SEQ ID NO: 9989 - DNA, 28 bp, Artificial sequence  Reverse Primer
  Primer
agtttcatatttttcttctcagtctctg

SEQ ID NO: 9990 - DNA, 27 bp, Artificial sequence  Reverse Primer
  Primer
aatagtctctggagatgatatttcttg

SEQ ID NO: 9991 - DNA, 27 bp, Artificial sequence  Reverse Primer
  Primer
tagcagaataggttcatcaagtaattt

SEQ ID NO: 9992 - DNA, 27 bp, Artificial sequence  Reverse Primer
  Primer
aattaaagaaatgttgagaagagaatg

SEQ ID NO: 9993 - DNA, 27 bp, Artificial sequence  Reverse Primer
  Primer
aacaaaaataatacaacagtcacaaag

SEQ ID NO: 9994 - DNA, 28 bp, Artificial sequence  Reverse Primer
  Primer
atattggttatgttaataaatgtggtga

SEQ ID NO: 9995 - DNA, 23 bp, Artificial sequence  Reverse Primer
  Primer
ttctaaaacagggatgayagtcc

SEQ ID NO: 9996 - DNA, 25 bp, Artificial sequence  Reverse Primer
  Primer
aaaatcttaagagaaaaacccaaag

SEQ ID NO: 9997 - DNA, 24 bp, Artificial sequence  Reverse Primer
  Primer
gatgaagacagtagctatcctggt

SEQ ID NO: 9998 - DNA, 30 bp, Artificial sequence  Reverse Primer
  Primer
tgtaacagtctcttagagatgatttaaaac

SEQ ID NO: 9999 - DNA, 27 bp, Artificial sequence  Reverse Primer
  Primer
aatartttggaatatgaactgtcagtc

SEQ ID NO: 10000 - DNA, 24 bp, Artificial sequence  Reverse Primer
  Primer
aaaaatccattaaagccagaaata

SEQ ID NO: 10001 - DNA, 24 bp, Artificial sequence  Reverse Primer
  Primer
ttcttttgctgtgttaactgaaaa

SEQ ID NO: 10002 - DNA, 27 bp, Artificial sequence  Reverse Primer
  Primer
tgatcaatatgaagtcattgtacttgt

SEQ ID NO: 10003 - DNA, 26 bp, Artificial sequence  Reverse Primer
  Primer
ttgaaagaggttttgtatctttcttt

SEQ ID NO: 10004 - DNA, 26 bp, Artificial sequence  Reverse Primer
  Primer
aaagctccaggttatttattaactca

SEQ ID NO: 10005 - DNA, 25 bp, Artificial sequence  Reverse Primer
  Primer
aaaaacctatttaagttcccaaaga

SEQ ID NO: 10006 - DNA, 21 bp, Artificial sequence  Reverse Primer
  Primer
actttcctgtagacggaaggg

SEQ ID NO: 10007 - DNA, 25 bp, Artificial sequence  Reverse Primer
  Primer
tatttagacatgtcaaagatggatg

SEQ ID NO: 10008 - DNA, 26 bp, Artificial sequence  Reverse Primer
  Primer
aaaaagcaacagtaatccatttaaac

SEQ ID NO: 10009 - DNA, 30 bp, Artificial sequence  Reverse Primer
  Primer
atatattagactgtaatgttcagctttagg

SEQ ID NO: 10010 - DNA, 22 bp, Artificial sequence  Reverse Primer
  Primer
aaatgcgaatggtaaatacctg

SEQ ID NO: 10011 - DNA, 26 bp, Artificial sequence  Reverse Primer
  Primer
aaattttcttacgacacagatctttt

SEQ ID NO: 10012 - DNA, 21 bp, Artificial sequence  Reverse Primer
  Primer
ataaggtcagcaacaaggaca

SEQ ID NO: 10013 - DNA, 27 bp, Artificial sequence  Reverse Primer
  Primer
ccataccatgaatgtttayacaaatat

SEQ ID NO: 10014 - DNA, 22 bp, Artificial sequence  Reverse Primer
  Primer
atcttgtaggacattgggtgag

SEQ ID NO: 10015 - DNA, 22 bp, Artificial sequence  Reverse Primer
  Primer
atagagaacatcaccaccacca

SEQ ID NO: 10016 - DNA, 23 bp, Artificial sequence  Reverse Primer
  Primer
ctatgatggaggatagtgctcat

SEQ ID NO: 10017 - DNA, 18 bp, Artificial sequence  Reverse Primer
  Primer
agctccaactgggaggcc

SEQ ID NO: 10018 - DNA, 24 bp, Artificial sequence  Reverse Primer
  Primer
aaatgtggttggaaaaaagtttat

SEQ ID NO: 10019 - DNA, 24 bp, Artificial sequence  Reverse Primer
  Primer
aaaacttcttaatgttctccagcc

SEQ ID NO: 10020 - DNA, 22 bp, Artificial sequence  Reverse Primer
  Primer
acagagcaattttgacctgagt

SEQ ID NO: 10021 - DNA, 28 bp, Artificial sequence  Reverse Primer
  Primer
ggagacatgattttatttaattatctga

SEQ ID NO: 10022 - DNA, 24 bp, Artificial sequence  Reverse Primer
  Primer
gcaatgtacatttgctctactgat

SEQ ID NO: 10023 - DNA, 28 bp, Artificial sequence  Reverse Primer
  Primer
aatattttgtgtgaagacatttatcact

SEQ ID NO: 10024 - DNA, 24 bp, Artificial sequence  Reverse Primer
  Primer
aaaatttgttttccttcgattagc

SEQ ID NO: 10025 - DNA, 18 bp, Artificial sequence  Reverse Primer
  Primer
tcactgggacaaaggcct

SEQ ID NO: 10026 - DNA, 25 bp, Artificial sequence  Reverse Primer
  Primer
atactgacttgtgtgaggactctct

SEQ ID NO: 10027 - DNA, 23 bp, Artificial sequence  Reverse Primer
  Primer
gtaggatctcaccaagtgtcaga

SEQ ID NO: 10028 - DNA, 21 bp, Artificial sequence  Reverse Primer
  Primer
acttgcctctgagcagactct

SEQ ID NO: 10029 - DNA, 19 bp, Artificial sequence  Reverse Primer
  Primer
aagtcagaatgttcggggc

SEQ ID NO: 10030 - DNA, 18 bp, Artificial sequence  Reverse Primer
  Primer
tttctggcatgatgtgca

SEQ ID NO: 10031 - DNA, 21 bp, Artificial sequence  Reverse Primer
  Primer
aacaaggaaggagtctggagc

SEQ ID NO: 10032 - DNA, 21 bp, Artificial sequence  Reverse Primer
  Primer
taggacatggtgtgatgttgc

SEQ ID NO: 10033 - DNA, 19 bp, Artificial sequence  Reverse Primer
  Primer
ttcctgcwtcagctcacag

SEQ ID NO: 10034 - DNA, 19 bp, Artificial sequence  Reverse Primer
  Primer
tcagacaattggacaccga

SEQ ID NO: 10035 - DNA, 21 bp, Artificial sequence  Reverse Primer
  Primer
tctaggctcttgggtttcagt

SEQ ID NO: 10036 - DNA, 24 bp, Artificial sequence  Reverse Primer
  Primer
atctaacaaaaggcttcacaagtc

SEQ ID NO: 10037 - DNA, 22 bp, Artificial sequence  Reverse Primer
  Primer
ttactcagttgtgctttgctga

SEQ ID NO: 10038 - DNA, 25 bp, Artificial sequence  Reverse Primer
  Primer
ttgttaaagtggaagaggttatgtg

SEQ ID NO: 10039 - DNA, 22 bp, Artificial sequence  Reverse Primer
  Primer
aagtttccagaatcctagcaca

SEQ ID NO: 10040 - DNA, 26 bp, Artificial sequence  Reverse Primer
  Primer
ttattttttcccccatatattagttg

SEQ ID NO: 10041 - DNA, 28 bp, Artificial sequence  Reverse Primer
  Primer
gaaaaaatggttaaaaactataggttga

SEQ ID NO: 10042 - DNA, 23 bp, Artificial sequence  Reverse Primer
  Primer
aaagtatgacaagaaaaacacgc

SEQ ID NO: 10043 - DNA, 24 bp, Artificial sequence  Reverse Primer
  Primer
aatgaattatttcaggaaatggaa

SEQ ID NO: 10044 - DNA, 25 bp, Artificial sequence  Reverse Primer
  Primer
atagtgacaaacccatcatactcat

SEQ ID NO: 10045 - DNA, 27 bp, Artificial sequence  Reverse Primer
  Primer
ttaaatagcatgttttgtaaaaagagg

SEQ ID NO: 10046 - DNA, 24 bp, Artificial sequence  Reverse Primer
  Primer
aagaattggataaacaaaaccaag

SEQ ID NO: 10047 - DNA, 26 bp, Artificial sequence  Reverse Primer
  Primer
ctgaatgaacatcagtatgaaaaatg

SEQ ID NO: 10048 - DNA, 25 bp, Artificial sequence  Reverse Primer
  Primer
aagtctgtgacaaagaattactgtg

SEQ ID NO: 10049 - DNA, 28 bp, Artificial sequence  Reverse Primer
  Primer
acacatatttactttttgttttgttctg

SEQ ID NO: 10050 - DNA, 19 bp, Artificial sequence  Reverse Primer
  Primer
ttttctctggtttcaggcc

SEQ ID NO: 10051 - DNA, 25 bp, Artificial sequence  Reverse Primer
  Primer
ataaagaaccaaagcagaaaagatc

SEQ ID NO: 10052 - DNA, 28 bp, Artificial sequence  Reverse Primer
  Primer
tacctcactttataaaataaatacagcc

SEQ ID NO: 10053 - DNA, 24 bp, Artificial sequence  Reverse Primer
  Primer
caaagaccacatatcctatgattc

SEQ ID NO: 10054 - DNA, 22 bp, Artificial sequence  Reverse Primer
  Primer
aacatgaaaataagcccttgag

SEQ ID NO: 10055 - DNA, 23 bp, Artificial sequence  Reverse Primer
  Primer
ttcacagtgtaccttcactctcc

SEQ ID NO: 10056 - DNA, 26 bp, Artificial sequence  Reverse Primer
  Primer
taaagagcttgctttttaagtttttg

SEQ ID NO: 10057 - DNA, 22 bp, Artificial sequence  Reverse Primer
  Primer
aatgcattatttattcgcacct

SEQ ID NO: 10058 - DNA, 21 bp, Artificial sequence  Reverse Primer
  Primer
tttggaacagtctggaatctg

SEQ ID NO: 10059 - DNA, 27 bp, Artificial sequence  Reverse Primer
  Primer
attcccaacagttaatttatattctga

SEQ ID NO: 10060 - DNA, 23 bp, Artificial sequence  Reverse Primer
  Primer
atatggttaagtgggtttcttgc

SEQ ID NO: 10061 - DNA, 30 bp, Artificial sequence  Reverse Primer
  Primer
gttttatatttatctgtattcagttcagtt

SEQ ID NO: 10062 - DNA, 24 bp, Artificial sequence  Reverse Primer
  Primer
agatataactgaagccaggtacca

SEQ ID NO: 10063 - DNA, 26 bp, Artificial sequence  Reverse Primer
  Primer
aaaacaaagcaacctgtattttaact

SEQ ID NO: 10064 - DNA, 26 bp, Artificial sequence  Reverse Primer
  Primer
tacaagggaatagtgtgtacaagaaa

SEQ ID NO: 10065 - DNA, 29 bp, Artificial sequence  Reverse Primer
  Primer
agtgtagaagatacagattagtaacatcg

SEQ ID NO: 10066 - DNA, 24 bp, Artificial sequence  Reverse Primer
  Primer
atacacaatgcarcacagtaagag

SEQ ID NO: 10067 - DNA, 26 bp, Artificial sequence  Reverse Primer
  Primer
tgctaaaagaaagattaagtcctttt

SEQ ID NO: 10068 - DNA, 26 bp, Artificial sequence  Reverse Primer
  Primer
tctttcagtcactgttttctaatgtt

SEQ ID NO: 10069 - DNA, 19 bp, Artificial sequence  Reverse Primer
  Primer
ctctcagaaggagccaccc

SEQ ID NO: 10070 - DNA, 18 bp, Artificial sequence  Reverse Primer
  Primer
aaggagaggcggatcaga

SEQ ID NO: 10071 - DNA, 22 bp, Artificial sequence  Reverse Primer
  Primer
ttcctgaatggatttactctgc

SEQ ID NO: 10072 - DNA, 22 bp, Artificial sequence  Reverse Primer
  Primer
tctccyggctatagtgagaaaa

SEQ ID NO: 10073 - DNA, 21 bp, Artificial sequence  Reverse Primer
  Primer
aaaagccagtacaaaggtcct

SEQ ID NO: 10074 - DNA, 20 bp, Artificial sequence  Reverse Primer
  Primer
actgtgagcatgtctgtgca

SEQ ID NO: 10075 - DNA, 20 bp, Artificial sequence  Reverse Primer
  Primer
aaacagtggggagagacaga

SEQ ID NO: 10076 - DNA, 21 bp, Artificial sequence  Reverse Primer
  Primer
atggatcccaaggactaagtg

SEQ ID NO: 10077 - DNA, 25 bp, Artificial sequence  Reverse Primer
  Primer
aatagtatgacctgagaaagacgtc

SEQ ID NO: 10078 - DNA, 18 bp, Artificial sequence  Reverse Primer
  Primer
agcccttttgcatggtcc

SEQ ID NO: 10079 - DNA, 18 bp, Artificial sequence  Reverse Primer
  Primer
ggcccaagaacttcagcg

SEQ ID NO: 10080 - DNA, 21 bp, Artificial sequence  Reverse Primer
  Primer
aaatgatgatgcatgatgtcc

SEQ ID NO: 10081 - DNA, 21 bp, Artificial sequence  Reverse Primer
  Primer
aaagacgatgtgtatggtcgg

SEQ ID NO: 10082 - DNA, 25 bp, Artificial sequence  Reverse Primer
  Primer
cactagcactgccttaatatacctc

SEQ ID NO: 10083 - DNA, 28 bp, Artificial sequence  Reverse Primer
  Primer
cagattaattatattttgaaagctgaga

SEQ ID NO: 10084 - DNA, 24 bp, Artificial sequence  Reverse Primer
  Primer
cataaaaataaaatacattccccc

SEQ ID NO: 10085 - DNA, 26 bp, Artificial sequence  Reverse Primer
  Primer
tagaggagtgtgaactttaacaacag

SEQ ID NO: 10086 - DNA, 18 bp, Artificial sequence  Reverse Primer
  Primer
ctcccaaccagtcccgtg

SEQ ID NO: 10087 - DNA, 24 bp, Artificial sequence  Reverse Primer
  Primer
taaaaaattcagaaaattcagtgg

SEQ ID NO: 10088 - DNA, 22 bp, Artificial sequence  Reverse Primer
  Primer
tttaggaccaaaaatagctggg

SEQ ID NO: 10089 - DNA, 20 bp, Artificial sequence  Reverse Primer
  Primer
ccccattgactgtagcactc

SEQ ID NO: 10090 - DNA, 21 bp, Artificial sequence  Reverse Primer
  Primer
aaaaggcttcttgaggaaatc

SEQ ID NO: 10091 - DNA, 21 bp, Artificial sequence  Reverse Primer
  Primer
taggycctgtgttgttgttgt

SEQ ID NO: 10092 - DNA, 24 bp, Artificial sequence  Reverse Primer
  Primer
ttagagatgtgaacaagacaaacg

SEQ ID NO: 10093 - DNA, 21 bp, Artificial sequence  Reverse Primer
  Primer
ttcctttgaaagaagaatgca

SEQ ID NO: 10094 - DNA, 25 bp, Artificial sequence  Reverse Primer
  Primer
tcactgatcctatgagatagaggaa

SEQ ID NO: 10095 - DNA, 30 bp, Artificial sequence  Reverse Primer
  Primer
tattactaacacwctagttttcaattttct

SEQ ID NO: 10096 - DNA, 26 bp, Artificial sequence  Reverse Primer
  Primer
ttgaagtcatctgatttttatcatgt

SEQ ID NO: 10097 - DNA, 20 bp, Artificial sequence  Reverse Primer
  Primer
ctctttccctccctgtcttt

SEQ ID NO: 10098 - DNA, 25 bp, Artificial sequence  Reverse Primer
  Primer
ttaagtgcacagttcaaaartgtta

SEQ ID NO: 10099 - DNA, 25 bp, Artificial sequence  Reverse Primer
  Primer
tatatcatggccagttaaagttcat

SEQ ID NO: 10100 - DNA, 30 bp, Artificial sequence  Reverse Primer
  Primer
tttttacatataaatctgctatctcctcta

SEQ ID NO: 10101 - DNA, 20 bp, Artificial sequence  Reverse Primer
  Primer
agtgtgaaggatatgtgggc

SEQ ID NO: 10102 - DNA, 25 bp, Artificial sequence  Reverse Primer
  Primer
aatgttagctcattttatttgccta

SEQ ID NO: 10103 - DNA, 22 bp, Artificial sequence  Reverse Primer
  Primer
aaggaattttcagtgaagacgc

SEQ ID NO: 10104 - DNA, 22 bp, Artificial sequence  Reverse Primer
  Primer
cactgtgctgtaggcagataac

SEQ ID NO: 10105 - DNA, 26 bp, Artificial sequence  Reverse Primer
  Primer
atactaacgtaggtctttcatcgaat

SEQ ID NO: 10106 - DNA, 30 bp, Artificial sequence  Reverse Primer
  Primer
aagatatcttagaagtttacttacttcatc

SEQ ID NO: 10107 - DNA, 21 bp, Artificial sequence  Reverse Primer
  Primer
agttgtataatcagaaccgcg

SEQ ID NO: 10108 - DNA, 21 bp, Artificial sequence  Reverse Primer
  Primer
tgtgagtctttgaacacttgg

SEQ ID NO: 10109 - DNA, 27 bp, Artificial sequence  Reverse Primer
  Primer
atagagcaggattttcatctctattaa

SEQ ID NO: 10110 - DNA, 30 bp, Artificial sequence  Reverse Primer
  Primer
cttacctaatcttattcactaaaatttcaa

SEQ ID NO: 10111 - DNA, 27 bp, Artificial sequence  Reverse Primer
  Primer
tattgttaacatttaatagaaagcctg

SEQ ID NO: 10112 - DNA, 20 bp, Artificial sequence  Reverse Primer
  Primer
tttcatttccatcaacgagc

SEQ ID NO: 10113 - DNA, 21 bp, Artificial sequence  Reverse Primer
  Primer
aatgggagctttgttgaaatt

SEQ ID NO: 10114 - DNA, 30 bp, Artificial sequence  Reverse Primer
  Primer
attttttactctacttctttccataaagag

SEQ ID NO: 10115 - DNA, 22 bp, Artificial sequence  Reverse Primer
  Primer
tggagccacactttttagattt

SEQ ID NO: 10116 - DNA, 27 bp, Artificial sequence  Reverse Primer
  Primer
tataaaacagaaaatgactaaaatcgg

SEQ ID NO: 10117 - DNA, 28 bp, Artificial sequence  Reverse Primer
  Primer
ttaaaatatttatacactgagttcccct

SEQ ID NO: 10118 - DNA, 29 bp, Artificial sequence  Reverse Primer
  Primer
attactaaatgtgactatttgttcagctt

SEQ ID NO: 10119 - DNA, 23 bp, Artificial sequence  Reverse Primer
  Primer
tttaagagtcaacacacaggtgg

SEQ ID NO: 10120 - DNA, 23 bp, Artificial sequence  Reverse Primer
  Primer
tcaagaaagcttaaacaaatgga

SEQ ID NO: 10121 - DNA, 30 bp, Artificial sequence  Reverse Primer
  Primer
aaactatacccttaaattagcttttattac

SEQ ID NO: 10122 - DNA, 23 bp, Artificial sequence  Reverse Primer
  Primer
ttaagatactgaaggctgctgac

SEQ ID NO: 10123 - DNA, 18 bp, Artificial sequence  Reverse Primer
  Primer
ggcctrcttggtctgagc

SEQ ID NO: 10124 - DNA, 25 bp, Artificial sequence  Reverse Primer
  Primer
tagatctgcaggaagagattcttta

SEQ ID NO: 10125 - DNA, 22 bp, Artificial sequence  Reverse Primer
  Primer
ttaaggaatacccaagcaaaaa

SEQ ID NO: 10126 - DNA, 24 bp, Artificial sequence  Reverse Primer
  Primer
aaaatttttactttagcagcgtga

SEQ ID NO: 10127 - DNA, 18 bp, Artificial sequence  Reverse Primer
  Primer
accagcgtgggggactct

SEQ ID NO: 10128 - DNA, 27 bp, Artificial sequence  Reverse Primer
  Primer
ttcactttatagcactgttaaagtttc

SEQ ID NO: 10129 - DNA, 19 bp, Artificial sequence  Reverse Primer
  Primer
tgccgtctttccccagcat

SEQ ID NO: 10130 - DNA, 18 bp, Artificial sequence  Reverse Primer
  Primer
tgatcaatcccctccccg

SEQ ID NO: 10131 - DNA, 21 bp, Artificial sequence  Reverse Primer
  Primer
gctctccgaataaggtcgtat

SEQ ID NO: 10132 - DNA, 21 bp, Artificial sequence  Reverse Primer
  Primer
tcgtcatcctgatggtgtatg

SEQ ID NO: 10133 - DNA, 21 bp, Artificial sequence  Reverse Primer
  Primer
caacatgagaactgttcgttg

SEQ ID NO: 10134 - DNA, 30 bp, Artificial sequence  Reverse Primer
  Primer
attgtcaagaatagtttcagtagaataatg

SEQ ID NO: 10135 - DNA, 18 bp, Artificial sequence  Reverse Primer
  Primer
agacctgggctcggatcc

SEQ ID NO: 10136 - DNA, 20 bp, Artificial sequence  Reverse Primer
  Primer
ttatctgaacagcaagcagg

SEQ ID NO: 10137 - DNA, 26 bp, Artificial sequence  Reverse Primer
  Primer
aaagatgagtcaaacactcatacatg

SEQ ID NO: 10138 - DNA, 23 bp, Artificial sequence  Reverse Primer
  Primer
caaatccagatgaaggtaaatcc

SEQ ID NO: 10139 - DNA, 28 bp, Artificial sequence  Reverse Primer
  Primer
ttcttgttctttcattttttaactctac

SEQ ID NO: 10140 - DNA, 25 bp, Artificial sequence  Reverse Primer
  Primer
tttttagtacaagcccttttttctc

SEQ ID NO: 10141 - DNA, 22 bp, Artificial sequence  Reverse Primer
  Primer
ataaagatgtttcagtgcatgc

SEQ ID NO: 10142 - DNA, 20 bp, Artificial sequence  Reverse Primer
  Primer
tttgtttgtcttggtccagg

SEQ ID NO: 10143 - DNA, 27 bp, Artificial sequence  Reverse Primer
  Primer
tttataactttttcggttagtcactgt

SEQ ID NO: 10144 - DNA, 29 bp, Artificial sequence  Reverse Primer
  Primer
gctttacatttaataaataagtactgcca

SEQ ID NO: 10145 - DNA, 27 bp, Artificial sequence  Reverse Primer
  Primer
gcttttatctgtttgagtttaaaaatg

SEQ ID NO: 10146 - DNA, 29 bp, Artificial sequence  Reverse Primer
  Primer
ttcttaatctttactggttttaatcagag

SEQ ID NO: 10147 - DNA, 30 bp, Artificial sequence  Reverse Primer
  Primer
aattatagtccataaaatatgacatgatag

SEQ ID NO: 10148 - DNA, 23 bp, Artificial sequence  Reverse Primer
  Primer
aagaatggatacacatgctttct

SEQ ID NO: 10149 - DNA, 18 bp, Artificial sequence  Reverse Primer
  Primer
atgcatgacaagcccagg

SEQ ID NO: 10150 - DNA, 23 bp, Artificial sequence  Reverse Primer
  Primer
aatacggtccatttacagtctcc

SEQ ID NO: 10151 - DNA, 26 bp, Artificial sequence  Reverse Primer
  Primer
ttgatgttcttacatctgaatatttg

SEQ ID NO: 10152 - DNA, 27 bp, Artificial sequence  Reverse Primer
  Primer
aaaagtaaggtccctttattatcctaa

SEQ ID NO: 10153 - DNA, 24 bp, Artificial sequence  Reverse Primer
  Primer
cagtcttggacaccatttatactg

SEQ ID NO: 10154 - DNA, 19 bp, Artificial sequence  Reverse Primer
  Primer
catggcacatattcgtgtg

SEQ ID NO: 10155 - DNA, 26 bp, Artificial sequence  Reverse Primer
  Primer
atgtcttgtattctttcaactttcag

SEQ ID NO: 10156 - DNA, 22 bp, Artificial sequence  Reverse Primer
  Primer
agtccacttggaggtaatgagg

SEQ ID NO: 10157 - DNA, 21 bp, Artificial sequence  Reverse Primer
  Primer
tctggaaacttgagctaagca

SEQ ID NO: 10158 - DNA, 23 bp, Artificial sequence  Reverse Primer
  Primer
ttccctggaatattcttttttca

SEQ ID NO: 10159 - DNA, 26 bp, Artificial sequence  Reverse Primer
  Primer
taattatgaatatgtctggrcatctg

SEQ ID NO: 10160 - DNA, 24 bp, Artificial sequence  Reverse Primer
  Primer
aggcattggagttataagcttaag

SEQ ID NO: 10161 - DNA, 23 bp, Artificial sequence  Reverse Primer
  Primer
attgaatgtaggaagaaacaggg

SEQ ID NO: 10162 - DNA, 26 bp, Artificial sequence  Reverse Primer
  Primer
aaggtttgtcaaatgttttaaacttc

SEQ ID NO: 10163 - DNA, 24 bp, Artificial sequence  Reverse Primer
  Primer
accaaatttgtcctcagatatgtg

SEQ ID NO: 10164 - DNA, 23 bp, Artificial sequence  Reverse Primer
  Primer
ttacttttcttccccctactgtg

SEQ ID NO: 10165 - DNA, 20 bp, Artificial sequence  Reverse Primer
  Primer
aaatttagctgttctggggg

SEQ ID NO: 10166 - DNA, 21 bp, Artificial sequence  Reverse Primer
  Primer
aagagttggtcagaacttgca

SEQ ID NO: 10167 - DNA, 18 bp, Artificial sequence  Reverse Primer
  Primer
cgggccagcaacacccat

SEQ ID NO: 10168 - DNA, 19 bp, Artificial sequence  Reverse Primer
  Primer
agagactgactgaggggga

SEQ ID NO: 10169 - DNA, 25 bp, Artificial sequence  Reverse Primer
  Primer
tttttatttctgacagacaagagga

SEQ ID NO: 10170 - DNA, 19 bp, Artificial sequence  Reverse Primer
  Primer
gcagcattycatgyaaacc

SEQ ID NO: 10171 - DNA, 21 bp, Artificial sequence  Reverse Primer
  Primer
ccattacttccagatcagcaa

SEQ ID NO: 10172 - DNA, 23 bp, Artificial sequence  Reverse Primer
  Primer
aattagaaacgtaggacatggct

SEQ ID NO: 10173 - DNA, 24 bp, Artificial sequence  Reverse Primer
  Primer
ttgccttaactcaagctatttagc

SEQ ID NO: 10174 - DNA, 18 bp, Artificial sequence  Reverse Primer
  Primer
gcccggttcaagtgaagt

SEQ ID NO: 10175 - DNA, 21 bp, Artificial sequence  Reverse Primer
  Primer
atgttttccaagttccctgtt

SEQ ID NO: 10176 - DNA, 26 bp, Artificial sequence  Reverse Primer
  Primer
tttttaattaggatgatattctggtg

SEQ ID NO: 10177 - DNA, 19 bp, Artificial sequence  Reverse Primer
  Primer
ctggacccctgtytgtctg

SEQ ID NO: 10178 - DNA, 18 bp, Artificial sequence  Reverse Primer
  Primer
acccgtttcgtcagctcc

SEQ ID NO: 10179 - DNA, 21 bp, Artificial sequence  Reverse Primer
  Primer
cctacccccaacacataaaac

SEQ ID NO: 10180 - DNA, 22 bp, Artificial sequence  Reverse Primer
  Primer
atttgcacatgagacaatgaaa

SEQ ID NO: 10181 - DNA, 30 bp, Artificial sequence  Reverse Primer
  Primer
aaataatatatctataatcactcttttggt

SEQ ID NO: 10182 - DNA, 18 bp, Artificial sequence  Reverse Primer
  Primer
tttcaggccacttgttgc

SEQ ID NO: 10183 - DNA, 21 bp, Artificial sequence  Reverse Primer
  Primer
atatcacattccgtaaagggc

SEQ ID NO: 10184 - DNA, 25 bp, Artificial sequence  Reverse Primer
  Primer
aaatcttggttagttttgaacatgt

SEQ ID NO: 10185 - DNA, 29 bp, Artificial sequence  Reverse Primer
  Primer
gtaaattatttaaaacacatgctgtagtg

SEQ ID NO: 10186 - DNA, 23 bp, Artificial sequence  Reverse Primer
  Primer
agacacacaactgttcaaatgtg

SEQ ID NO: 10187 - DNA, 25 bp, Artificial sequence  Reverse Primer
  Primer
ttgtactctgaaagtcaagtctgaa

SEQ ID NO: 10188 - DNA, 29 bp, Artificial sequence  Reverse Primer
  Primer
taaacaaataytgttaaatctgaaagtgc

SEQ ID NO: 10189 - DNA, 18 bp, Artificial sequence  Reverse Primer
  Primer
tgttgcctcaatttggtg

SEQ ID NO: 10190 - DNA, 24 bp, Artificial sequence  Reverse Primer
  Primer
attttggtaattcagtgacacagc

SEQ ID NO: 10191 - DNA, 23 bp, Artificial sequence  Reverse Primer
  Primer
cttattttctcttttccaaaggg

SEQ ID NO: 10192 - DNA, 29 bp, Artificial sequence  Reverse Primer
  Primer
aaacatctagaaacttgattatcttgttg

SEQ ID NO: 10193 - DNA, 24 bp, Artificial sequence  Reverse Primer
  Primer
agcctaakgttacatttggagtct

SEQ ID NO: 10194 - DNA, 28 bp, Artificial sequence  Reverse Primer
  Primer
ccatttatataaagttcaaaacaaacac

SEQ ID NO: 10195 - DNA, 21 bp, Artificial sequence  Reverse Primer
  Primer
tcattaggccagacataaagg

SEQ ID NO: 10196 - DNA, 27 bp, Artificial sequence  Reverse Primer
  Primer
taaatagactaaaaagcagagctaagc

SEQ ID NO: 10197 - DNA, 28 bp, Artificial sequence  Reverse Primer
  Primer
aattagctcaaaaacatagacataaatg

SEQ ID NO: 10198 - DNA, 24 bp, Artificial sequence  Reverse Primer
  Primer
aattgtgttaacctgtaaagatgg

SEQ ID NO: 10199 - DNA, 19 bp, Artificial sequence  Reverse Primer
  Primer
aactattgcccacacccac

SEQ ID NO: 10200 - DNA, 26 bp, Artificial sequence  Reverse Primer
  Primer
tgagatagttccttgaaacttgtcta

SEQ ID NO: 10201 - DNA, 23 bp, Artificial sequence  Reverse Primer
  Primer
agttgcttccttatcattttcca

SEQ ID NO: 10202 - DNA, 27 bp, Artificial sequence  Reverse Primer
  Primer
tttagaatttctctgtttctgtgagtt

SEQ ID NO: 10203 - DNA, 26 bp, Artificial sequence  Reverse Primer
  Primer
aaaagaagatacagagagctgatacc

SEQ ID NO: 10204 - DNA, 20 bp, Artificial sequence  Reverse Primer
  Primer
tgtgctccttctctgttcac

SEQ ID NO: 10205 - DNA, 29 bp, Artificial sequence  Reverse Primer
  Primer
atttaggaattaagattgactctgtaaga

SEQ ID NO: 10206 - DNA, 27 bp, Artificial sequence  Reverse Primer
  Primer
taatgatgttttgtgactaaaagtgaa

SEQ ID NO: 10207 - DNA, 26 bp, Artificial sequence  Reverse Primer
  Primer
aagagaggtagggaagataaaaaatg

SEQ ID NO: 10208 - DNA, 24 bp, Artificial sequence  Reverse Primer
  Primer
aattgggattcttctagtttgtgt

SEQ ID NO: 10209 - DNA, 26 bp, Artificial sequence  Reverse Primer
  Primer
cagtttttagaaaatttgctttaagg

SEQ ID NO: 10210 - DNA, 22 bp, Artificial sequence  Reverse Primer
  Primer
aaatacctgcttcccactgtaa

SEQ ID NO: 10211 - DNA, 28 bp, Artificial sequence  Reverse Primer
  Primer
taaatgaattatcacactcatttattcc

SEQ ID NO: 10212 - DNA, 25 bp, Artificial sequence  Reverse Primer
  Primer
aaaattacagtgaaacatctgcttt

SEQ ID NO: 10213 - DNA, 24 bp, Artificial sequence  Reverse Primer
  Primer
atcattggttagatccaagttttt

SEQ ID NO: 10214 - DNA, 23 bp, Artificial sequence  Reverse Primer
  Primer
gggaatcatcttaagttttccac

SEQ ID NO: 10215 - DNA, 22 bp, Artificial sequence  Reverse Primer
  Primer
tttaggagcacttctgtcaagc

SEQ ID NO: 10216 - DNA, 23 bp, Artificial sequence  Reverse Primer
  Primer
attggtaagaggaacaggaaaaa

SEQ ID NO: 10217 - DNA, 24 bp, Artificial sequence  Reverse Primer
  Primer
agagtctcattatgctggacattc

SEQ ID NO: 10218 - DNA, 20 bp, Artificial sequence  Reverse Primer
  Primer
tttctgaggaagcactttgg

SEQ ID NO: 10219 - DNA, 21 bp, Artificial sequence  Reverse Primer
  Primer
ccacttccctccatgtaattt

SEQ ID NO: 10220 - DNA, 26 bp, Artificial sequence  Reverse Primer
  Primer
ttatctgggctatacagtaggatttt

SEQ ID NO: 10221 - DNA, 26 bp, Artificial sequence  Reverse Primer
  Primer
ttagattagaaggatgaagaggagtc

SEQ ID NO: 10222 - DNA, 27 bp, Artificial sequence  Reverse Primer
  Primer
aaaagaagatctaacaatttctgtctg

SEQ ID NO: 10223 - DNA, 24 bp, Artificial sequence  Reverse Primer
  Primer
aaaacttaggaattgcaaaaaatg

SEQ ID NO: 10224 - DNA, 30 bp, Artificial sequence  Reverse Primer
  Primer
aaagaactatattttgcagtatcttattgc

SEQ ID NO: 10225 - DNA, 23 bp, Artificial sequence  Reverse Primer
  Primer
caaatcatctttttcttttggag

SEQ ID NO: 10226 - DNA, 27 bp, Artificial sequence  Reverse Primer
  Primer
ttatctagggtttaggatctgtttttt

SEQ ID NO: 10227 - DNA, 28 bp, Artificial sequence  Reverse Primer
  Primer
aaatgactcagtctttaaacatctttta

SEQ ID NO: 10228 - DNA, 28 bp, Artificial sequence  Reverse Primer
  Primer
gcaattaagaaaaatattagagtcaatg

SEQ ID NO: 10229 - DNA, 28 bp, Artificial sequence  Reverse Primer
  Primer
tataatttttgactgcatagtgagtttt

SEQ ID NO: 10230 - DNA, 23 bp, Artificial sequence  Reverse Primer
  Primer
tgtcccaataaaactgcatttat

SEQ ID NO: 10231 - DNA, 29 bp, Artificial sequence  Reverse Primer
  Primer
gcaataactggtaaagaatagataacatt

SEQ ID NO: 10232 - DNA, 25 bp, Artificial sequence  Reverse Primer
  Primer
tatttgtcttctacaaccacaaagc

SEQ ID NO: 10233 - DNA, 27 bp, Artificial sequence  Reverse Primer
  Primer
aaaaaactaacagaacactgaaaatca

SEQ ID NO: 10234 - DNA, 30 bp, Artificial sequence  Reverse Primer
  Primer
atgttcagtaataagatcaacttagtctct

SEQ ID NO: 10235 - DNA, 22 bp, Artificial sequence  Reverse Primer
  Primer
attagaaacagtggcaccaatg

SEQ ID NO: 10236 - DNA, 19 bp, Artificial sequence  Reverse Primer
  Primer
tgagtcaggggtcactgtt

SEQ ID NO: 10237 - DNA, 20 bp, Artificial sequence  Reverse Primer
  Primer
aagaatcccggatcctaagg

SEQ ID NO: 10238 - DNA, 18 bp, Artificial sequence  Reverse Primer
  Primer
cattggaaacagtgcccc

SEQ ID NO: 10239 - DNA, 25 bp, Artificial sequence  Reverse Primer
  Primer
aaaatgcatcacatactgaaactct

SEQ ID NO: 10240 - DNA, 22 bp, Artificial sequence  Reverse Primer
  Primer
tcacgagagtcaggtcttacct

SEQ ID NO: 10241 - DNA, 18 bp, Artificial sequence  Reverse Primer
  Primer
agccaaggtagccgagtt

SEQ ID NO: 10242 - DNA, 21 bp, Artificial sequence  Reverse Primer
  Primer
atttgtaaaatgggaacccag

SEQ ID NO: 10243 - DNA, 27 bp, Artificial sequence  Reverse Primer
  Primer
aagaactaagtcatttagtgaagctcc

SEQ ID NO: 10244 - DNA, 20 bp, Artificial sequence  Reverse Primer
  Primer
aaggactcaaaggtccagct

SEQ ID NO: 10245 - DNA, 23 bp, Artificial sequence  Reverse Primer
  Primer
ataattacattacagcgtggacc

SEQ ID NO: 10246 - DNA, 19 bp, Artificial sequence  Reverse Primer
  Primer
atgatgcagagcggtcttc

SEQ ID NO: 10247 - DNA, 25 bp, Artificial sequence  Reverse Primer
  Primer
atgtactcagcaagtccctaattta

SEQ ID NO: 10248 - DNA, 28 bp, Artificial sequence  Reverse Primer
  Primer
tttcttaaatactcttagcctctcactc

SEQ ID NO: 10249 - DNA, 21 bp, Artificial sequence  Reverse Primer
  Primer
atgactgcagaaggaaaacag

SEQ ID NO: 10250 - DNA, 21 bp, Artificial sequence  Reverse Primer
  Primer
tggtggtctaggatgagctaa

SEQ ID NO: 10251 - DNA, 19 bp, Artificial sequence  Reverse Primer
  Primer
aaccatactccagcccaga

SEQ ID NO: 10252 - DNA, 18 bp, Artificial sequence  Reverse Primer
  Primer
tttgtatgcatcccaggg

SEQ ID NO: 10253 - DNA, 19 bp, Artificial sequence  Reverse Primer
  Primer
gccccttcccattctctat

SEQ ID NO: 10254 - DNA, 27 bp, Artificial sequence  Reverse Primer
  Primer
tagagtctcygttacatggagattagt

SEQ ID NO: 10255 - DNA, 24 bp, Artificial sequence  Reverse Primer
  Primer
aacatatgtttcagaaggaagctc

SEQ ID NO: 10256 - DNA, 23 bp, Artificial sequence  Reverse Primer
  Primer
taatccttctgggaactgagtct

SEQ ID NO: 10257 - DNA, 30 bp, Artificial sequence  Reverse Primer
  Primer
atgtatatgtagatctgtatgtatatatgg

SEQ ID NO: 10258 - DNA, 23 bp, Artificial sequence  Reverse Primer
  Primer
taaaaggggaaaataaaagcaca

SEQ ID NO: 10259 - DNA, 28 bp, Artificial sequence  Reverse Primer
  Primer
tagagttgcctsttattcttgattatac

SEQ ID NO: 10260 - DNA, 30 bp, Artificial sequence  Reverse Primer
  Primer
tatctaaaacaatctgtgttstagttagaa

SEQ ID NO: 10261 - DNA, 23 bp, Artificial sequence  Reverse Primer
  Primer
ttcataggtcagcagataaaggc

SEQ ID NO: 10262 - DNA, 26 bp, Artificial sequence  Reverse Primer
  Primer
atttaagaggtgatctaaaagtggaa

SEQ ID NO: 10263 - DNA, 28 bp, Artificial sequence  Reverse Primer
  Primer
aattagatgttttctccttcsttctata

SEQ ID NO: 10264 - DNA, 27 bp, Artificial sequence  Reverse Primer
  Primer
ttaaaatgctattgagttacaatgagc

SEQ ID NO: 10265 - DNA, 29 bp, Artificial sequence  Reverse Primer
  Primer
aattattattctgttattggtaaggagag

SEQ ID NO: 10266 - DNA, 22 bp, Artificial sequence  Reverse Primer
  Primer
atggcagacaaccacttatact

SEQ ID NO: 10267 - DNA, 24 bp, Artificial sequence  Reverse Primer
  Primer
acttatttcctcagatgtgattgc

SEQ ID NO: 10268 - DNA, 23 bp, Artificial sequence  Reverse Primer
  Primer
ttctgtgttcaaagatgttcttg

SEQ ID NO: 10269 - DNA, 28 bp, Artificial sequence  Reverse Primer
  Primer
taaatttcattcataatctgtaaacctg

SEQ ID NO: 10270 - DNA, 25 bp, Artificial sequence  Reverse Primer
  Primer
atctaaatgaattctgagtttccaa

SEQ ID NO: 10271 - DNA, 27 bp, Artificial sequence  Reverse Primer
  Primer
attaattttttcagcaaatgtgtagtc

SEQ ID NO: 10272 - DNA, 22 bp, Artificial sequence  Reverse Primer
  Primer
attttcttcatgaggggaactc

SEQ ID NO: 10273 - DNA, 21 bp, Artificial sequence  Reverse Primer
  Primer
atggtctgtatccacctcctg

SEQ ID NO: 10274 - DNA, 28 bp, Artificial sequence  Reverse Primer
  Primer
atgtayttacagcctaaatctrtcaact

SEQ ID NO: 10275 - DNA, 26 bp, Artificial sequence  Reverse Primer
  Primer
aaatgcagactttagtagttcttcca

SEQ ID NO: 10276 - DNA, 30 bp, Artificial sequence  Reverse Primer
  Primer
aaaaatatagattctctaacaacatactcc

SEQ ID NO: 10277 - DNA, 28 bp, Artificial sequence  Reverse Primer
  Primer
ttaataggaattgccattagtaaaatag

SEQ ID NO: 10278 - DNA, 30 bp, Artificial sequence  Reverse Primer
  Primer
gctacagtatggttagtaaagaactatata

SEQ ID NO: 10279 - DNA, 24 bp, Artificial sequence  Reverse Primer
  Primer
tttatcatatagcaatggacaagg

SEQ ID NO: 10280 - DNA, 28 bp, Artificial sequence  Reverse Primer
  Primer
acattacaaaattattaccacaatcaag

SEQ ID NO: 10281 - DNA, 25 bp, Artificial sequence  Reverse Primer
  Primer
cctttatgtttttccaataggtacg

SEQ ID NO: 10282 - DNA, 20 bp, Artificial sequence  Reverse Primer
  Primer
gccgttaagcgtacagtctc

SEQ ID NO: 10283 - DNA, 22 bp, Artificial sequence  Reverse Primer
  Primer
aaatatgtcaaaagtgctgacc

SEQ ID NO: 10284 - DNA, 23 bp, Artificial sequence  Reverse Primer
  Primer
agctaatccattgacttgtctgt

SEQ ID NO: 10285 - DNA, 28 bp, Artificial sequence  Reverse Primer
  Primer
tgtgctgaaagtacatatataaaagtcc

SEQ ID NO: 10286 - DNA, 27 bp, Artificial sequence  Reverse Primer
  Primer
aaaaatttacagtgtcctttgagtaag

SEQ ID NO: 10287 - DNA, 30 bp, Artificial sequence  Reverse Primer
  Primer
gaacatgtttattctactttaatttctctg

SEQ ID NO: 10288 - DNA, 23 bp, Artificial sequence  Reverse Primer
  Primer
aatgtttaaaaatttccagtggg

SEQ ID NO: 10289 - DNA, 23 bp, Artificial sequence  Reverse Primer
  Primer
aagggcactttctgagttagatg

SEQ ID NO: 10290 - DNA, 27 bp, Artificial sequence  Reverse Primer
  Primer
gaatccaattcttacatagagtatgca

SEQ ID NO: 10291 - DNA, 29 bp, Artificial sequence  Reverse Primer
  Primer
aatacaccaactgataaagtttttagaag

SEQ ID NO: 10292 - DNA, 24 bp, Artificial sequence  Reverse Primer
  Primer
tggtaaaactaagttgctaatgca

SEQ ID NO: 10293 - DNA, 26 bp, Artificial sequence  Reverse Primer
  Primer
ttttactaaacgcactaacacagtct

SEQ ID NO: 10294 - DNA, 28 bp, Artificial sequence  Reverse Primer
  Primer
tattgtaagttaaacagaagtccaattc

SEQ ID NO: 10295 - DNA, 23 bp, Artificial sequence  Reverse Primer
  Primer
aggaaattgttagcaaggaaaaa

SEQ ID NO: 10296 - DNA, 24 bp, Artificial sequence  Reverse Primer
  Primer
tgccatcatatatgaaatgaattg

SEQ ID NO: 10297 - DNA, 18 bp, Artificial sequence  Reverse Primer
  Primer
atcagtggtcccaacggg

SEQ ID NO: 10298 - DNA, 20 bp, Artificial sequence  Reverse Primer
  Primer
tgtcgttaaccactgatgcc

SEQ ID NO: 10299 - DNA, 27 bp, Artificial sequence  Reverse Primer
  Primer
aaagttctaactctcacttatcaacca

SEQ ID NO: 10300 - DNA, 25 bp, Artificial sequence  Reverse Primer
  Primer
tctgaacattaggacaaaacctaga

SEQ ID NO: 10301 - DNA, 22 bp, Artificial sequence  Reverse Primer
  Primer
aatggttcaagctgtcttctgt

SEQ ID NO: 10302 - DNA, 19 bp, Artificial sequence  Reverse Primer
  Primer
acaaacaccacccttcctc

SEQ ID NO: 10303 - DNA, 19 bp, Artificial sequence  Reverse Primer
  Primer
atttgcaagaaggagcacc

SEQ ID NO: 10304 - DNA, 19 bp, Artificial sequence  Reverse Primer
  Primer
gttcccacctaggaccctc

SEQ ID NO: 10305 - DNA, 18 bp, Artificial sequence  Reverse Primer
  Primer
cttgcttggctttccctg

SEQ ID NO: 10306 - DNA, 19 bp, Artificial sequence  Reverse Primer
  Primer
ttcacacagatccactgcc

SEQ ID NO: 10307 - DNA, 20 bp, Artificial sequence  Reverse Primer
  Primer
aggtgggtaagaagtcggag

SEQ ID NO: 10308 - DNA, 22 bp, Artificial sequence  Reverse Primer
  Primer
atgatgtatttgcaccaagtca

SEQ ID NO: 10309 - DNA, 18 bp, Artificial sequence  Reverse Primer
  Primer
agggaggagaaggtgagg

SEQ ID NO: 10310 - DNA, 25 bp, Artificial sequence  Reverse Primer
  Primer
ttctaagaagtgtggtagacatcca

SEQ ID NO: 10311 - DNA, 18 bp, Artificial sequence  Reverse Primer
  Primer
ggaggggatcatgcagct

SEQ ID NO: 10312 - DNA, 22 bp, Artificial sequence  Reverse Primer
  Primer
atacttccaccagagtcctgtg

SEQ ID NO: 10313 - DNA, 18 bp, Artificial sequence  Reverse Primer
  Primer
ttgcttttagccccagtg

SEQ ID NO: 10314 - DNA, 20 bp, Artificial sequence  Reverse Primer
  Primer
atttgttttccagggcactt

SEQ ID NO: 10315 - DNA, 24 bp, Artificial sequence  Reverse Primer
  Primer
aagacagataattgaaatgtacgc

SEQ ID NO: 10316 - DNA, 18 bp, Artificial sequence  Reverse Primer
  Primer
gcccttttcgtgactcca

SEQ ID NO: 10317 - DNA, 19 bp, Artificial sequence  Reverse Primer
  Primer
agacgacgagagtctgcac

SEQ ID NO: 10318 - DNA, 30 bp, Artificial sequence  Reverse Primer
  Primer
ctgatgtcagtcattaaatttagtatacaa

SEQ ID NO: 10319 - DNA, 21 bp, Artificial sequence  Reverse Primer
  Primer
agatcccatggctacataggt

SEQ ID NO: 10320 - DNA, 26 bp, Artificial sequence  Reverse Primer
  Primer
tcattaaaccatctcacatattcact

SEQ ID NO: 10321 - DNA, 22 bp, Artificial sequence  Reverse Primer
  Primer
tttctgctgtcatcactcagag

SEQ ID NO: 10322 - DNA, 23 bp, Artificial sequence  Reverse Primer
  Primer
aatggtcatagtcattttgcaat

SEQ ID NO: 10323 - DNA, 23 bp, Artificial sequence  Reverse Primer
  Primer
tgttgatccattcagatgtgtaa

SEQ ID NO: 10324 - DNA, 28 bp, Artificial sequence  Reverse Primer
  Primer
agttttataatgcaaaaatcagtattcc

SEQ ID NO: 10325 - DNA, 28 bp, Artificial sequence  Reverse Primer
  Primer
taattttatattccactttgtaacttgc

SEQ ID NO: 10326 - DNA, 27 bp, Artificial sequence  Reverse Primer
  Primer
aatattgtgtacttaagctgagagttg

SEQ ID NO: 10327 - DNA, 30 bp, Artificial sequence  Reverse Primer
  Primer
aatataggactcagaaaataacagttaata

SEQ ID NO: 10328 - DNA, 30 bp, Artificial sequence  Reverse Primer
  Primer
tagagactgaattgattttaaataagtata

SEQ ID NO: 10329 - DNA, 24 bp, Artificial sequence  Reverse Primer
  Primer
tttactggaagttctggtgaaatt

SEQ ID NO: 10330 - DNA, 28 bp, Artificial sequence  Reverse Primer
  Primer
cagcaaataattctcttatcatctctag

SEQ ID NO: 10331 - DNA, 26 bp, Artificial sequence  Reverse Primer
  Primer
ttaaaagactgtatctcagtccttgc

SEQ ID NO: 10332 - DNA, 30 bp, Artificial sequence  Reverse Primer
  Primer
agtattttaacatttgaatttactcttcta

SEQ ID NO: 10333 - DNA, 21 bp, Artificial sequence  Reverse Primer
  Primer
ttgaatgtttgctaaacgtcc

SEQ ID NO: 10334 - DNA, 30 bp, Artificial sequence  Reverse Primer
  Primer
attgtttttatagacacctaactattaccc

SEQ ID NO: 10335 - DNA, 27 bp, Artificial sequence  Reverse Primer
  Primer
ttttcgtctaaaacattaaattagacc

SEQ ID NO: 10336 - DNA, 23 bp, Artificial sequence  Reverse Primer
  Primer
atgtgaagagagaaaccagtcag

SEQ ID NO: 10337 - DNA, 24 bp, Artificial sequence  Reverse Primer
  Primer
taaatgaactttccagaggattgt

SEQ ID NO: 10338 - DNA, 27 bp, Artificial sequence  Reverse Primer
  Primer
aaaatttccagtaaaacttagtctgag

SEQ ID NO: 10339 - DNA, 20 bp, Artificial sequence  Reverse Primer
  Primer
attccagaatgtgacttgcc

SEQ ID NO: 10340 - DNA, 24 bp, Artificial sequence  Reverse Primer
  Primer
ccacaaactttcaattgytttaaa

SEQ ID NO: 10341 - DNA, 22 bp, Artificial sequence  Reverse Primer
  Primer
tttgacagttgccagatatcag

SEQ ID NO: 10342 - DNA, 25 bp, Artificial sequence  Reverse Primer
  Primer
aaagacttttaaaatggttcacatc

SEQ ID NO: 10343 - DNA, 25 bp, Artificial sequence  Reverse Primer
  Primer
attttacagcaaattatccactcaa

SEQ ID NO: 10344 - DNA, 26 bp, Artificial sequence  Reverse Primer
  Primer
tttcttcaactatctagaaaatggtg

SEQ ID NO: 10345 - DNA, 24 bp, Artificial sequence  Reverse Primer
  Primer
ttttgttttgctactaaaaccctt

SEQ ID NO: 10346 - DNA, 24 bp, Artificial sequence  Reverse Primer
  Primer
taaagggagttttacctttcactt

SEQ ID NO: 10347 - DNA, 23 bp, Artificial sequence  Reverse Primer
  Primer
taaagtcttcagcaaatgaacag

SEQ ID NO: 10348 - DNA, 25 bp, Artificial sequence  Reverse Primer
  Primer
arcatctaagagttgaagatggaga

SEQ ID NO: 10349 - DNA, 30 bp, Artificial sequence  Reverse Primer
  Primer
aaaccctaaataagagtcagtaaaatagat

SEQ ID NO: 10350 - DNA, 26 bp, Artificial sequence  Reverse Primer
  Primer
tcaaaactttaattctgagtttttgc

SEQ ID NO: 10351 - DNA, 28 bp, Artificial sequence  Reverse Primer
  Primer
aattgatacaaattgaagtctctttctt

SEQ ID NO: 10352 - DNA, 22 bp, Artificial sequence  Reverse Primer
  Primer
tgctcacttctcattgtctgtg

SEQ ID NO: 10353 - DNA, 29 bp, Artificial sequence  Reverse Primer
  Primer
ataggattcttgactaaaaatatctgact

SEQ ID NO: 10354 - DNA, 23 bp, Artificial sequence  Reverse Primer
  Primer
gttgtcacagagatgctcttttt

SEQ ID NO: 10355 - DNA, 22 bp, Artificial sequence  Reverse Primer
  Primer
tagtcagagaagaacaggcaac

SEQ ID NO: 10356 - DNA, 22 bp, Artificial sequence  Reverse Primer
  Primer
aaattggacttacaaacacgct

SEQ ID NO: 10357 - DNA, 21 bp, Artificial sequence  Reverse Primer
  Primer
ccaagcagcttgttaaactgt

SEQ ID NO: 10358 - DNA, 28 bp, Artificial sequence  Reverse Primer
  Primer
tttacctgacaagagaactaaacttaag

SEQ ID NO: 10359 - DNA, 20 bp, Artificial sequence  Reverse Primer
  Primer
attgcgagaattcttagggc

SEQ ID NO: 10360 - DNA, 29 bp, Artificial sequence  Reverse Primer
  Primer
ttattttctagttctgcttacagatctct

SEQ ID NO: 10361 - DNA, 28 bp, Artificial sequence  Reverse Primer
  Primer
aatattttctttcactttcttaccctat

SEQ ID NO: 10362 - DNA, 26 bp, Artificial sequence  Reverse Primer
  Primer
gagaggaaggagtctgtagtaaaagc

SEQ ID NO: 10363 - DNA, 27 bp, Artificial sequence  Reverse Primer
  Primer
ttaaaatgaaacactattcaaaggttg

SEQ ID NO: 10364 - DNA, 23 bp, Artificial sequence  Reverse Primer
  Primer
atagaaaaaggcagggatgtaaa

SEQ ID NO: 10365 - DNA, 19 bp, Artificial sequence  Reverse Primer
  Primer
tgaatgggatggagtcttg

SEQ ID NO: 10366 - DNA, 20 bp, Artificial sequence  Reverse Primer
  Primer
aaaacaagagggtccacaac

SEQ ID NO: 10367 - DNA, 24 bp, Artificial sequence  Reverse Primer
  Primer
cattcatgctccaagatatattcc

SEQ ID NO: 10368 - DNA, 23 bp, Artificial sequence  Reverse Primer
  Primer
agaatcacattttggatgaaaga

SEQ ID NO: 10369 - DNA, 20 bp, Artificial sequence  Reverse Primer
  Primer
tcattgctaatggtgatggg

SEQ ID NO: 10370 - DNA, 21 bp, Artificial sequence  Reverse Primer
  Primer
ttccaattgttaaaggcttgc

SEQ ID NO: 10371 - DNA, 19 bp, Artificial sequence  Reverse Primer
  Primer
agacacaggaaatgcaggc

SEQ ID NO: 10372 - DNA, 20 bp, Artificial sequence  Reverse Primer
  Primer
agaggatattcctaggcccc

SEQ ID NO: 10373 - DNA, 24 bp, Artificial sequence  Reverse Primer
  Primer
ttgacaagggagtaaaacttaggt

SEQ ID NO: 10374 - DNA, 20 bp, Artificial sequence  Reverse Primer
  Primer
ttttaaggaggtctgggtcc

SEQ ID NO: 10375 - DNA, 18 bp, Artificial sequence  Reverse Primer
  Primer
ttccaggactgttgccca

SEQ ID NO: 10376 - DNA, 18 bp, Artificial sequence  Reverse Primer
  Primer
agcggcaccaaaagctgg

SEQ ID NO: 10377 - DNA, 19 bp, Artificial sequence  Reverse Primer
  Primer
attttgcaggatgtggtcg

SEQ ID NO: 10378 - DNA, 26 bp, Artificial sequence  Reverse Primer
  Primer
acaagggacacagtacataaaagata

SEQ ID NO: 10379 - DNA, 21 bp, Artificial sequence  Reverse Primer
  Primer
atccctaaagtatgccaaggc

SEQ ID NO: 10380 - DNA, 26 bp, Artificial sequence  Reverse Primer
  Primer
taactttttggattgtgctgtagtat

SEQ ID NO: 10381 - DNA, 18 bp, Artificial sequence  Reverse Primer
  Primer
cgacatccccaccacacc

SEQ ID NO: 10382 - DNA, 21 bp, Artificial sequence  Reverse Primer
  Primer
ataggagcaggcattgtctct

SEQ ID NO: 10383 - DNA, 22 bp, Artificial sequence  Reverse Primer
  Primer
aacagtgacttttggcttagca

SEQ ID NO: 10384 - DNA, 24 bp, Artificial sequence  Reverse Primer
  Primer
aattatcccaagtaatctccatgg

SEQ ID NO: 10385 - DNA, 23 bp, Artificial sequence  Reverse Primer
  Primer
tgggcagttgttttattttttaa

SEQ ID NO: 10386 - DNA, 23 bp, Artificial sequence  Reverse Primer
  Primer
aaccagcatttttcctctctagt

SEQ ID NO: 10387 - DNA, 26 bp, Artificial sequence  Reverse Primer
  Primer
tttttgccatatcacttacagataac

SEQ ID NO: 10388 - DNA, 22 bp, Artificial sequence  Reverse Primer
  Primer
tgtgctcctaacatgagttttg

SEQ ID NO: 10389 - DNA, 20 bp, Artificial sequence  Reverse Primer
  Primer
acagatggacctttcatccc

SEQ ID NO: 10390 - DNA, 26 bp, Artificial sequence  Reverse Primer
  Primer
aaaatttctatgattttcctctgtct

SEQ ID NO: 10391 - DNA, 20 bp, Artificial sequence  Reverse Primer
  Primer
ttggcaatgtttaccctttg

SEQ ID NO: 10392 - DNA, 26 bp, Artificial sequence  Reverse Primer
  Primer
cccaattttgttgctatatttaaact

SEQ ID NO: 10393 - DNA, 29 bp, Artificial sequence  Reverse Primer
  Primer
aaaatcactctataaattcttctttctcc

SEQ ID NO: 10394 - DNA, 24 bp, Artificial sequence  Reverse Primer
  Primer
acaaggtgagttatcaagtgtgtg

SEQ ID NO: 10395 - DNA, 27 bp, Artificial sequence  Reverse Primer
  Primer
ttattttgtttatgggtttaatctgtg

SEQ ID NO: 10396 - DNA, 28 bp, Artificial sequence  Reverse Primer
  Primer
tacgtgttttgttttttatatacaacct

SEQ ID NO: 10397 - DNA, 20 bp, Artificial sequence  Reverse Primer
  Primer
actgcaggttacttgccttc

SEQ ID NO: 10398 - DNA, 24 bp, Artificial sequence  Reverse Primer
  Primer
taaaatccctcaagaattgctatt

SEQ ID NO: 10399 - DNA, 22 bp, Artificial sequence  Reverse Primer
  Primer
aaaccaattatctgctctctgc

SEQ ID NO: 10400 - DNA, 27 bp, Artificial sequence  Reverse Primer
  Primer
camtattgtaaatcaagtatggttcaa

SEQ ID NO: 10401 - DNA, 26 bp, Artificial sequence  Reverse Primer
  Primer
tttatgtagcatttgaatcatctacc

SEQ ID NO: 10402 - DNA, 25 bp, Artificial sequence  Reverse Primer
  Primer
ataaagtccccttagtgacaaaaga

SEQ ID NO: 10403 - DNA, 25 bp, Artificial sequence  Reverse Primer
  Primer
attaagatcaacattttatggtccc

SEQ ID NO: 10404 - DNA, 22 bp, Artificial sequence  Reverse Primer
  Primer
atatcagcatccatcaattggt

SEQ ID NO: 10405 - DNA, 30 bp, Artificial sequence  Reverse Primer
  Primer
tgaactgaggtaattattagttctgtattt

SEQ ID NO: 10406 - DNA, 21 bp, Artificial sequence  Reverse Primer
  Primer
actggctaagtagatgctgca

SEQ ID NO: 10407 - DNA, 23 bp, Artificial sequence  Reverse Primer
  Primer
agatctcttgggagtggtagaac

SEQ ID NO: 10408 - DNA, 29 bp, Artificial sequence  Reverse Primer
  Primer
tgaaaatgaaagagagctaatatgtacta

SEQ ID NO: 10409 - DNA, 30 bp, Artificial sequence  Reverse Primer
  Primer
atttcagtactctactgttatatattgtta

SEQ ID NO: 10410 - DNA, 27 bp, Artificial sequence  Reverse Primer
  Primer
gaagatttgcaactagttaaagtagca

SEQ ID NO: 10411 - DNA, 26 bp, Artificial sequence  Reverse Primer
  Primer
taaatggagtcctagatcttgaaact

SEQ ID NO: 10412 - DNA, 21 bp, Artificial sequence  Reverse Primer
  Primer
aaacttcttccttccacctcc

SEQ ID NO: 10413 - DNA, 24 bp, Artificial sequence  Reverse Primer
  Primer
aagggttaggtgattttaaggttc

SEQ ID NO: 10414 - DNA, 24 bp, Artificial sequence  Reverse Primer
  Primer
tttctcttgtgcttaatcttgtcg

SEQ ID NO: 10415 - DNA, 21 bp, Artificial sequence  Reverse Primer
  Primer
tttcctctgcctttactgtcc

SEQ ID NO: 10416 - DNA, 18 bp, Artificial sequence  Reverse Primer
  Primer
cctgacctgacacgtggg

SEQ ID NO: 10417 - DNA, 18 bp, Artificial sequence  Reverse Primer
  Primer
ttcaacccacctctgggc

SEQ ID NO: 10418 - DNA, 22 bp, Artificial sequence  Reverse Primer
  Primer
taacactcaygtatgtgccacc

SEQ ID NO: 10419 - DNA, 20 bp, Artificial sequence  Reverse Primer
  Primer
ttgccatgatgttctctgag

SEQ ID NO: 10420 - DNA, 21 bp, Artificial sequence  Reverse Primer
  Primer
actagatcccacygtgaggag

SEQ ID NO: 10421 - DNA, 23 bp, Artificial sequence  Reverse Primer
  Primer
atttgcaagtaattaaaggcacg

SEQ ID NO: 10422 - DNA, 22 bp, Artificial sequence  Reverse Primer
  Primer
atgacaaaactgaccctgagag

SEQ ID NO: 10423 - DNA, 22 bp, Artificial sequence  Reverse Primer
  Primer
tgttcagtcagtaactcatgcc

SEQ ID NO: 10424 - DNA, 18 bp, Artificial sequence  Reverse Primer
  Primer
ccartgaaggcgaacagc

SEQ ID NO: 10425 - DNA, 21 bp, Artificial sequence  Reverse Primer
  Primer
tatgtggttgtgtcctcgagt

SEQ ID NO: 10426 - DNA, 21 bp, Artificial sequence  Reverse Primer
  Primer
atgacagaaggaggactggat

SEQ ID NO: 10427 - DNA, 22 bp, Artificial sequence  Reverse Primer
  Primer
agaactctgtcttgccttttga

SEQ ID NO: 10428 - DNA, 25 bp, Artificial sequence  Reverse Primer
  Primer
atctttgggaataactctcacattt

SEQ ID NO: 10429 - DNA, 23 bp, Artificial sequence  Reverse Primer
  Primer
ttgtttttgaaatgagaaagcat

SEQ ID NO: 10430 - DNA, 21 bp, Artificial sequence  Reverse Primer
  Primer
tggttcttgttgcagtcatct

SEQ ID NO: 10431 - DNA, 24 bp, Artificial sequence  Reverse Primer
  Primer
caaaatgtttgactgagttttttg

SEQ ID NO: 10432 - DNA, 26 bp, Artificial sequence  Reverse Primer
  Primer
tttcaatgaatttgctatcttacttg

SEQ ID NO: 10433 - DNA, 25 bp, Artificial sequence  Reverse Primer
  Primer
aataatatgtggatttctttgggtt

SEQ ID NO: 10434 - DNA, 27 bp, Artificial sequence  Reverse Primer
  Primer
tgttagtataattgtggacaaaagatg

SEQ ID NO: 10435 - DNA, 26 bp, Artificial sequence  Reverse Primer
  Primer
agatttcagaacaagggtaaaaatta

SEQ ID NO: 10436 - DNA, 23 bp, Artificial sequence  Reverse Primer
  Primer
taccggtcacatcataagaaaag

SEQ ID NO: 10437 - DNA, 28 bp, Artificial sequence  Reverse Primer
  Primer
tttagatgtctaaactggtagtgcttaa

SEQ ID NO: 10438 - DNA, 23 bp, Artificial sequence  Reverse Primer
  Primer
tctctagaatgaggacggtaaca

SEQ ID NO: 10439 - DNA, 27 bp, Artificial sequence  Reverse Primer
  Primer
ttttaaattgatgtcatgattcagtag

SEQ ID NO: 10440 - DNA, 22 bp, Artificial sequence  Reverse Primer
  Primer
aggcacttgtagacacttaccc

SEQ ID NO: 10441 - DNA, 25 bp, Artificial sequence  Reverse Primer
  Primer
acataaatgccctttacttacaagg

SEQ ID NO: 10442 - DNA, 21 bp, Artificial sequence  Reverse Primer
  Primer
aggggtagtgaggatcaaaga

SEQ ID NO: 10443 - DNA, 24 bp, Artificial sequence  Reverse Primer
  Primer
ttacattcatttctcaaattccac

SEQ ID NO: 10444 - DNA, 20 bp, Artificial sequence  Reverse Primer
  Primer
taattgccccctagttcagg

SEQ ID NO: 10445 - DNA, 25 bp, Artificial sequence  Reverse Primer
  Primer
aaacattaaaaaggacatgaatgag

SEQ ID NO: 10446 - DNA, 20 bp, Artificial sequence  Reverse Primer
  Primer
tgactgccacatccctactt

SEQ ID NO: 10447 - DNA, 23 bp, Artificial sequence  Reverse Primer
  Primer
aaataagaaaaggcaatggaaag

SEQ ID NO: 10448 - DNA, 24 bp, Artificial sequence  Reverse Primer
  Primer
tcaaactctgcattttaacaaaac

SEQ ID NO: 10449 - DNA, 21 bp, Artificial sequence  Reverse Primer
  Primer
aaagggctatgatacagtgcc

SEQ ID NO: 10450 - DNA, 19 bp, Artificial sequence  Reverse Primer
  Primer
tttttcagtagggtgggca

SEQ ID NO: 10451 - DNA, 22 bp, Artificial sequence  Reverse Primer
  Primer
ataggattgtcatgaggattgg

SEQ ID NO: 10452 - DNA, 29 bp, Artificial sequence  Reverse Primer
  Primer
taaaaatagtatcaatactcctttctcca

SEQ ID NO: 10453 - DNA, 24 bp, Artificial sequence  Reverse Primer
  Primer
tttttgtgccattaaacttgtaca

SEQ ID NO: 10454 - DNA, 23 bp, Artificial sequence  Reverse Primer
  Primer
actcagcatccagagtctacaaa

SEQ ID NO: 10455 - DNA, 19 bp, Artificial sequence  Reverse Primer
  Primer
acggtcatttccaggtctt

SEQ ID NO: 10456 - DNA, 24 bp, Artificial sequence  Reverse Primer
  Primer
cagtgaattttggcacttataaaa

SEQ ID NO: 10457 - DNA, 24 bp, Artificial sequence  Reverse Primer
  Primer
tgtttaatgtgtgccatttagttc

SEQ ID NO: 10458 - DNA, 27 bp, Artificial sequence  Reverse Primer
  Primer
taaagtctatgagaattgtttcagctt

SEQ ID NO: 10459 - DNA, 18 bp, Artificial sequence  Reverse Primer
  Primer
aggcaggtggaattttcc

SEQ ID NO: 10460 - DNA, 30 bp, Artificial sequence  Reverse Primer
  Primer
tgtaacatctatatgtataacatcttaagc

SEQ ID NO: 10461 - DNA, 26 bp, Artificial sequence  Reverse Primer
  Primer
tgataataaatcagaatctgaaccac

SEQ ID NO: 10462 - DNA, 25 bp, Artificial sequence  Reverse Primer
  Primer
attttgttgtactatattggttggc

SEQ ID NO: 10463 - DNA, 26 bp, Artificial sequence  Reverse Primer
  Primer
atgttatcagtgtgcaaattaaaatg

SEQ ID NO: 10464 - DNA, 25 bp, Artificial sequence  Reverse Primer
  Primer
tctttagtcctctttagcctgtttc

SEQ ID NO: 10465 - DNA, 20 bp, Artificial sequence  Reverse Primer
  Primer
atgaagagatgggtctgtcc

SEQ ID NO: 10466 - DNA, 28 bp, Artificial sequence  Reverse Primer
  Primer
aggaatgacaaattaagtaaagaattgt

SEQ ID NO: 10467 - DNA, 25 bp, Artificial sequence  Reverse Primer
  Primer
gctaaataagccaggaacataaatt

SEQ ID NO: 10468 - DNA, 21 bp, Artificial sequence  Reverse Primer
  Primer
agaaacaaccccaattttctg

SEQ ID NO: 10469 - DNA, 24 bp, Artificial sequence  Reverse Primer
  Primer
ttacacattctccccttaaagaag

SEQ ID NO: 10470 - DNA, 24 bp, Artificial sequence  Reverse Primer
  Primer
atcaggagagagaagaacagatca

SEQ ID NO: 10471 - DNA, 26 bp, Artificial sequence  Reverse Primer
  Primer
atttatcagctccagatagctagaaa

SEQ ID NO: 10472 - DNA, 24 bp, Artificial sequence  Reverse Primer
  Primer
tcttttagaaccaagttccattct

SEQ ID NO: 10473 - DNA, 28 bp, Artificial sequence  Reverse Primer
  Primer
aaattatctggttaaaatctaaaactgg

SEQ ID NO: 10474 - DNA, 20 bp, Artificial sequence  Reverse Primer
  Primer
ttccgcatttgagaataatg

SEQ ID NO: 10475 - DNA, 18 bp, Artificial sequence  Reverse Primer
  Primer
aggatggcgggaggtgat

SEQ ID NO: 10476 - DNA, 21 bp, Artificial sequence  Reverse Primer
  Primer
agctgtgtacagtctttccca

SEQ ID NO: 10477 - DNA, 22 bp, Artificial sequence  Reverse Primer
  Primer
ttccaaacagtgttgtttctcc

SEQ ID NO: 10478 - DNA, 19 bp, Artificial sequence  Reverse Primer
  Primer
gcagcctgtgcacttagag

SEQ ID NO: 10479 - DNA, 19 bp, Artificial sequence  Reverse Primer
  Primer
tcaggcatctcctcctctg

SEQ ID NO: 10480 - DNA, 18 bp, Artificial sequence  Reverse Primer
  Primer
ccagaaacagggcacatg

SEQ ID NO: 10481 - DNA, 19 bp, Artificial sequence  Reverse Primer
  Primer
aaattggggctttagggag

SEQ ID NO: 10482 - DNA, 21 bp, Artificial sequence  Reverse Primer
  Primer
tagagtagcaggtgcatgagg

SEQ ID NO: 10483 - DNA, 18 bp, Artificial sequence  Reverse Primer
  Primer
aatgtggccggaatttgg

SEQ ID NO: 10484 - DNA, 19 bp, Artificial sequence  Reverse Primer
  Primer
ctgcaacttgcactgagtc

SEQ ID NO: 10485 - DNA, 19 bp, Artificial sequence  Reverse Primer
  Primer
tccttggtagatggcatgc

SEQ ID NO: 10486 - DNA, 26 bp, Artificial sequence  Reverse Primer
  Primer
taaagcttsttaacttggtcctatct

SEQ ID NO: 10487 - DNA, 26 bp, Artificial sequence  Reverse Primer
  Primer
atttcctttattgcttctaatggtag

SEQ ID NO: 10488 - DNA, 25 bp, Artificial sequence  Reverse Primer
  Primer
tctttactaatatcatggatgcctg

SEQ ID NO: 10489 - DNA, 23 bp, Artificial sequence  Reverse Primer
  Primer
aaagattggcagaactgtaagtc

SEQ ID NO: 10490 - DNA, 24 bp, Artificial sequence  Reverse Primer
  Primer
cacatttcaaaatagaacatttgc

SEQ ID NO: 10491 - DNA, 21 bp, Artificial sequence  Reverse Primer
  Primer
agctccaaagcttacttcctg

SEQ ID NO: 10492 - DNA, 24 bp, Artificial sequence  Reverse Primer
  Primer
agcattttgcaaatattacctatg

SEQ ID NO: 10493 - DNA, 26 bp, Artificial sequence  Reverse Primer
  Primer
aaaaaaagctgcataatagataacgt

SEQ ID NO: 10494 - DNA, 28 bp, Artificial sequence  Reverse Primer
  Primer
acaaaaaccaattatcttaacattatcc

SEQ ID NO: 10495 - DNA, 30 bp, Artificial sequence  Reverse Primer
  Primer
ctcattatgagctctaacagattttaatat

SEQ ID NO: 10496 - DNA, 23 bp, Artificial sequence  Reverse Primer
  Primer
tatgggtcttctggttcagtact

SEQ ID NO: 10497 - DNA, 22 bp, Artificial sequence  Reverse Primer
  Primer
gctctctcactagaagggaagc

SEQ ID NO: 10498 - DNA, 30 bp, Artificial sequence  Reverse Primer
  Primer
tttactagacttaagagatgaattcagtac

SEQ ID NO: 10499 - DNA, 26 bp, Artificial sequence  Reverse Primer
  Primer
tgaagagtctagcgagtacttcatat

SEQ ID NO: 10500 - DNA, 23 bp, Artificial sequence  Reverse Primer
  Primer
ttataaaacacacttccctcctc

SEQ ID NO: 10501 - DNA, 27 bp, Artificial sequence  Reverse Primer
  Primer
agagagaaagatagaaataccaacagg

SEQ ID NO: 10502 - DNA, 28 bp, Artificial sequence  Reverse Primer
  Primer
aggttcttggttattagaagttattttg

SEQ ID NO: 10503 - DNA, 19 bp, Artificial sequence  Reverse Primer
  Primer
tgctacgaaacaacacgct

SEQ ID NO: 10504 - DNA, 30 bp, Artificial sequence  Reverse Primer
  Primer
ttaattctctgacttatatgaacattctct

SEQ ID NO: 10505 - DNA, 25 bp, Artificial sequence  Reverse Primer
  Primer
tattaacgaatatcatcctcacgat

SEQ ID NO: 10506 - DNA, 24 bp, Artificial sequence  Reverse Primer
  Primer
actaagccaggagatttcctctat

SEQ ID NO: 10507 - DNA, 27 bp, Artificial sequence  Reverse Primer
  Primer
agtgggaccaaactattatagagtacg

SEQ ID NO: 10508 - DNA, 26 bp, Artificial sequence  Reverse Primer
  Primer
aataacagagtcaactacattgctga

SEQ ID NO: 10509 - DNA, 25 bp, Artificial sequence  Reverse Primer
  Primer
taatataactgttcctcctgcatgt

SEQ ID NO: 10510 - DNA, 21 bp, Artificial sequence  Reverse Primer
  Primer
tctatttgagggcatacaagc

SEQ ID NO: 10511 - DNA, 24 bp, Artificial sequence  Reverse Primer
  Primer
aaaaactcaccctgaaactttaga

SEQ ID NO: 10512 - DNA, 30 bp, Artificial sequence  Reverse Primer
  Primer
ccagatatctttctactatagagttctact

SEQ ID NO: 10513 - DNA, 25 bp, Artificial sequence  Reverse Primer
  Primer
agarctctatttgtcttcaccttga

SEQ ID NO: 10514 - DNA, 20 bp, Artificial sequence  Reverse Primer
  Primer
tggttttcagcaaatgttgg

SEQ ID NO: 10515 - DNA, 26 bp, Artificial sequence  Reverse Primer
  Primer
tcttattaatgtgattcagtgactcc

SEQ ID NO: 10516 - DNA, 23 bp, Artificial sequence  Reverse Primer
  Primer
aaattaaagttmtttgtgtggcc

SEQ ID NO: 10517 - DNA, 27 bp, Artificial sequence  Reverse Primer
  Primer
aatttattaccagcttaagttgaacag

SEQ ID NO: 10518 - DNA, 27 bp, Artificial sequence  Reverse Primer
  Primer
aaaagttttagttttcctaactttgct

SEQ ID NO: 10519 - DNA, 26 bp, Artificial sequence  Reverse Primer
  Primer
ttaatggcagaaatcaatatagctag

SEQ ID NO: 10520 - DNA, 23 bp, Artificial sequence  Reverse Primer
  Primer
ccaatgcatctttttcaataagt

SEQ ID NO: 10521 - DNA, 24 bp, Artificial sequence  Reverse Primer
  Primer
atgaaattaaaagccagtaaatgg

SEQ ID NO: 10522 - DNA, 21 bp, Artificial sequence  Reverse Primer
  Primer
gcctcagtcattcattcatca

SEQ ID NO: 10523 - DNA, 19 bp, Artificial sequence  Reverse Primer
  Primer
ctgtaggagggaccatgtg

SEQ ID NO: 10524 - DNA, 21 bp, Artificial sequence  Reverse Primer
  Primer
agaacacagtaaaagsaacgc

SEQ ID NO: 10525 - DNA, 26 bp, Artificial sequence  Reverse Primer
  Primer
gcttctaatcatgacaattatcactt

SEQ ID NO: 10526 - DNA, 19 bp, Artificial sequence  Reverse Primer
  Primer
atttggtgctgcatggtta

SEQ ID NO: 10527 - DNA, 25 bp, Artificial sequence  Reverse Primer
  Primer
cctacagtcagttgactttaaagga

SEQ ID NO: 10528 - DNA, 18 bp, Artificial sequence  Reverse Primer
  Primer
tgaggccgaacacgctct

SEQ ID NO: 10529 - DNA, 18 bp, Artificial sequence  Reverse Primer
  Primer
actgcagagagaaggggg

SEQ ID NO: 10530 - DNA, 28 bp, Artificial sequence  Reverse Primer
  Primer
agatttgagttcttttatttcctctcta

SEQ ID NO: 10531 - DNA, 21 bp, Artificial sequence  Reverse Primer
  Primer
atgtattcagagatgggcagg

SEQ ID NO: 10532 - DNA, 18 bp, Artificial sequence  Reverse Primer
  Primer
aagagcagtcccacccca

SEQ ID NO: 10533 - DNA, 26 bp, Artificial sequence  Reverse Primer
  Primer
tttccaattatgttaaactcttcagg

SEQ ID NO: 10534 - DNA, 21 bp, Artificial sequence  Reverse Primer
  Primer
agtttccccaaatgtaaagct

SEQ ID NO: 10535 - DNA, 23 bp, Artificial sequence  Reverse Primer
  Primer
aaacaattcactgctattcctgg

SEQ ID NO: 10536 - DNA, 19 bp, Artificial sequence  Reverse Primer
  Primer
aatgataacccaaggccaa

SEQ ID NO: 10537 - DNA, 19 bp, Artificial sequence  Reverse Primer
  Primer
ggtgatggtgctgttgtgt

SEQ ID NO: 10538 - DNA, 21 bp, Artificial sequence  Reverse Primer
  Primer
taaccagggtgggattagaat

SEQ ID NO: 10539 - DNA, 26 bp, Artificial sequence  Reverse Primer
  Primer
agacatttaaataataaaagctgtgc

SEQ ID NO: 10540 - DNA, 18 bp, Artificial sequence  Reverse Primer
  Primer
acagctctttcaccgcag

SEQ ID NO: 10541 - DNA, 28 bp, Artificial sequence  Reverse Primer
  Primer
tataaatgaaccatttagaaattaaggc

SEQ ID NO: 10542 - DNA, 19 bp, Artificial sequence  Reverse Primer
  Primer
tcggcatactttctctgca

SEQ ID NO: 10543 - DNA, 25 bp, Artificial sequence  Reverse Primer
  Primer
ttattccacccaacttatttattga

SEQ ID NO: 10544 - DNA, 22 bp, Artificial sequence  Reverse Primer
  Primer
ttaytgggtcataagccaattc

SEQ ID NO: 10545 - DNA, 19 bp, Artificial sequence  Reverse Primer
  Primer
tttttgtgartgccccttt

SEQ ID NO: 10546 - DNA, 23 bp, Artificial sequence  Reverse Primer
  Primer
tagtgtttggttgtgttagcttg

SEQ ID NO: 10547 - DNA, 27 bp, Artificial sequence  Reverse Primer
  Primer
aacaacagtggtcattgaaatataatt

SEQ ID NO: 10548 - DNA, 22 bp, Artificial sequence  Reverse Primer
  Primer
tttatgctgcaaatagagctca

SEQ ID NO: 10549 - DNA, 26 bp, Artificial sequence  Reverse Primer
  Primer
tgtggagtgaaaataaagatgttaat

SEQ ID NO: 10550 - DNA, 20 bp, Artificial sequence  Reverse Primer
  Primer
tatgaaatctggggcagttc

SEQ ID NO: 10551 - DNA, 25 bp, Artificial sequence  Reverse Primer
  Primer
aatgctcaatttccagttattaatc

SEQ ID NO: 10552 - DNA, 18 bp, Artificial sequence  Reverse Primer
  Primer
taatgggcggtccttgaa

SEQ ID NO: 10553 - DNA, 27 bp, Artificial sequence  Reverse Primer
  Primer
gcaagggtttaaaatattgtataattg

SEQ ID NO: 10554 - DNA, 18 bp, Artificial sequence  Reverse Primer
  Primer
tgctggggcaagatcagt

SEQ ID NO: 10555 - DNA, 19 bp, Artificial sequence  Reverse Primer
  Primer
tgttctgtgctcctttgca

SEQ ID NO: 10556 - DNA, 23 bp, Artificial sequence  Reverse Primer
  Primer
agaaaagtctggagccttagtga

SEQ ID NO: 10557 - DNA, 25 bp, Artificial sequence  Reverse Primer
  Primer
aaacggtaatggctaaataaactct

SEQ ID NO: 10558 - DNA, 26 bp, Artificial sequence  Reverse Primer
  Primer
aaacaattcaacagtatttctcagac

SEQ ID NO: 10559 - DNA, 24 bp, Artificial sequence  Reverse Primer
  Primer
aaatcacagtctggtaggtgactc

SEQ ID NO: 10560 - DNA, 28 bp, Artificial sequence  Reverse Primer
  Primer
agcactttataatgaatcttttatgtcc

SEQ ID NO: 10561 - DNA, 23 bp, Artificial sequence  Reverse Primer
  Primer
agtaggctcttagtttgcagctc

SEQ ID NO: 10562 - DNA, 24 bp, Artificial sequence  Reverse Primer
  Primer
tttcacwtcacctttattggaatt

SEQ ID NO: 10563 - DNA, 23 bp, Artificial sequence  Reverse Primer
  Primer
aaatacctcttttttctcctccc

SEQ ID NO: 10564 - DNA, 26 bp, Artificial sequence  Reverse Primer
  Primer
aaatgagaagtcaactctaatgaacg

SEQ ID NO: 10565 - DNA, 22 bp, Artificial sequence  Reverse Primer
  Primer
gtctccattttgggaaaaaatc

SEQ ID NO: 10566 - DNA, 23 bp, Artificial sequence  Reverse Primer
  Primer
ttgtttcatttaaagaacccaga

SEQ ID NO: 10567 - DNA, 25 bp, Artificial sequence  Reverse Primer
  Primer
taatagccaaaagtttcctaaatgg

SEQ ID NO: 10568 - DNA, 26 bp, Artificial sequence  Reverse Primer
  Primer
tatcaggcataagaatgaattgatag

SEQ ID NO: 10569 - DNA, 30 bp, Artificial sequence  Reverse Primer
  Primer
ttaatgaaactgacataagtgayttactct

SEQ ID NO: 10570 - DNA, 21 bp, Artificial sequence  Reverse Primer
  Primer
aaatgcagaaagaaggtgatg

SEQ ID NO: 10571 - DNA, 24 bp, Artificial sequence  Reverse Primer
  Primer
taatgaattgtgtctttccaaagc

SEQ ID NO: 10572 - DNA, 30 bp, Artificial sequence  Reverse Primer
  Primer
cctgttctaagtacttyacatgtattaaat

SEQ ID NO: 10573 - DNA, 29 bp, Artificial sequence  Reverse Primer
  Primer
aagattatatagacaatctcttttccaac

SEQ ID NO: 10574 - DNA, 23 bp, Artificial sequence  Reverse Primer
  Primer
agtgaacaggtagtaagtcccca

SEQ ID NO: 10575 - DNA, 20 bp, Artificial sequence  Reverse Primer
  Primer
atatgctgtgtgctttgggt

SEQ ID NO: 10576 - DNA, 22 bp, Artificial sequence  Reverse Primer
  Primer
ttgagcagttattctggtctgg

SEQ ID NO: 10577 - DNA, 22 bp, Artificial sequence  Reverse Primer
  Primer
attgatttcagggttcacagtg

SEQ ID NO: 10578 - DNA, 25 bp, Artificial sequence  Reverse Primer
  Primer
ataatcacctttcttttgtttctca

SEQ ID NO: 10579 - DNA, 27 bp, Artificial sequence  Reverse Primer
  Primer
attgtaaggaatacaacaggaagtact

SEQ ID NO: 10580 - DNA, 28 bp, Artificial sequence  Reverse Primer
  Primer
taaatttatattgggattttgtacagtc

SEQ ID NO: 10581 - DNA, 26 bp, Artificial sequence  Reverse Primer
  Primer
aaacagttctttttcaaactttcagt

SEQ ID NO: 10582 - DNA, 18 bp, Artificial sequence  Reverse Primer
  Primer
accactcttcctccgcgt

SEQ ID NO: 10583 - DNA, 18 bp, Artificial sequence  Reverse Primer
  Primer
gacgggcgtggaatccag

SEQ ID NO: 10584 - DNA, 18 bp, Artificial sequence  Reverse Primer
  Primer
tttcacccctttctccgt

SEQ ID NO: 10585 - DNA, 27 bp, Artificial sequence  Reverse Primer
  Primer
aataagtaaaacttaatccttcttgcc

SEQ ID NO: 10586 - DNA, 23 bp, Artificial sequence  Reverse Primer
  Primer
agtgtgcaaataaaaccaagttg

SEQ ID NO: 10587 - DNA, 30 bp, Artificial sequence  Reverse Primer
  Primer
gagtattattcaactcttattaaacaatca

SEQ ID NO: 10588 - DNA, 21 bp, Artificial sequence  Reverse Primer
  Primer
aatttcaccagctcacaggtt

SEQ ID NO: 10589 - DNA, 22 bp, Artificial sequence  Reverse Primer
  Primer
attagaagtgtccagttggcat

SEQ ID NO: 10590 - DNA, 23 bp, Artificial sequence  Reverse Primer
  Primer
tgatccattcttctggtacattc

SEQ ID NO: 10591 - DNA, 28 bp, Artificial sequence  Reverse Primer
  Primer
tcagtatccttaactaataacagatgca

SEQ ID NO: 10592 - DNA, 22 bp, Artificial sequence  Reverse Primer
  Primer
tttctgggaaacataggagaaa

SEQ ID NO: 10593 - DNA, 21 bp, Artificial sequence  Reverse Primer
  Primer
ttgttctagcaaagttgggtg

SEQ ID NO: 10594 - DNA, 18 bp, Artificial sequence  Reverse Primer
  Primer
tgagaggcccacacatct

SEQ ID NO: 10595 - DNA, 24 bp, Artificial sequence  Reverse Primer
  Primer
atgatcatactaagggacgtcaat

SEQ ID NO: 10596 - DNA, 29 bp, Artificial sequence  Reverse Primer
  Primer
atctttttacaacttagtggaattactga

SEQ ID NO: 10597 - DNA, 24 bp, Artificial sequence  Reverse Primer
  Primer
tttatactcttttctactgccgac

SEQ ID NO: 10598 - DNA, 25 bp, Artificial sequence  Reverse Primer
  Primer
caccaaggtgacaaatagtaaattc

SEQ ID NO: 10599 - DNA, 25 bp, Artificial sequence  Reverse Primer
  Primer
ttgaaatcaaytatttggaaaactc

SEQ ID NO: 10600 - DNA, 24 bp, Artificial sequence  Reverse Primer
  Primer
tcttgaaaatagaaactctgcaca

SEQ ID NO: 10601 - DNA, 30 bp, Artificial sequence  Reverse Primer
  Primer
aaattatacctatacaaaccttctaaagag

SEQ ID NO: 10602 - DNA, 27 bp, Artificial sequence  Reverse Primer
  Primer
ttgtctgtatctttctaatttttttcc

SEQ ID NO: 10603 - DNA, 28 bp, Artificial sequence  Reverse Primer
  Primer
ttctttctcatacagatcattacagaat

SEQ ID NO: 10604 - DNA, 18 bp, Artificial sequence  Reverse Primer
  Primer
gaccaggagcacgtgatt

SEQ ID NO: 10605 - DNA, 27 bp, Artificial sequence  Reverse Primer
  Primer
tagaagtgttctggtaatctattgtga

SEQ ID NO: 10606 - DNA, 27 bp, Artificial sequence  Reverse Primer
  Primer
aaatcttgatcataaacttcttggtta

SEQ ID NO: 10607 - DNA, 22 bp, Artificial sequence  Reverse Primer
  Primer
acagaaagacaggatgttcagc

SEQ ID NO: 10608 - DNA, 22 bp, Artificial sequence  Reverse Primer
  Primer
acaggacagtcacattcaattc

SEQ ID NO: 10609 - DNA, 30 bp, Artificial sequence  Reverse Primer
  Primer
agattaatactcagatttaatgagttttgg

SEQ ID NO: 10610 - DNA, 24 bp, Artificial sequence  Reverse Primer
  Primer
tcatgcaaaacccattttataata

SEQ ID NO: 10611 - DNA, 27 bp, Artificial sequence  Reverse Primer
  Primer
ttgactttgcaagattaatagagattt

SEQ ID NO: 10612 - DNA, 19 bp, Artificial sequence  Reverse Primer
  Primer
aagagccacctttcagctt

SEQ ID NO: 10613 - DNA, 23 bp, Artificial sequence  Reverse Primer
  Primer
tcagtggtagctgtcttctgtag

SEQ ID NO: 10614 - DNA, 30 bp, Artificial sequence  Reverse Primer
  Primer
ttaattctaagtagtaacagtaaaactttg

SEQ ID NO: 10615 - DNA, 26 bp, Artificial sequence  Reverse Primer
  Primer
cagagcttcacagagtgttaaaatat

SEQ ID NO: 10616 - DNA, 18 bp, Artificial sequence  Reverse Primer
  Primer
tcacggcctccacaccca

SEQ ID NO: 10617 - DNA, 22 bp, Artificial sequence  Reverse Primer
  Primer
aatgattcagaaggtatcctgg

SEQ ID NO: 10618 - DNA, 21 bp, Artificial sequence  Reverse Primer
  Primer
aaatgatgaattgatgctggg

SEQ ID NO: 10619 - DNA, 18 bp, Artificial sequence  Reverse Primer
  Primer
ttccggctgatgtcaaac

SEQ ID NO: 10620 - DNA, 22 bp, Artificial sequence  Reverse Primer
  Primer
ttatcaagagacactccctgct

SEQ ID NO: 10621 - DNA, 24 bp, Artificial sequence  Reverse Primer
  Primer
atatatgatctagccatggacaca

SEQ ID NO: 10622 - DNA, 18 bp, Artificial sequence  Reverse Primer
  Primer
acaccctctctcsgtcct

SEQ ID NO: 10623 - DNA, 18 bp, Artificial sequence  Reverse Primer
  Primer
tggacttccttggtggtc

SEQ ID NO: 10624 - DNA, 22 bp, Artificial sequence  Reverse Primer
  Primer
acctacagggctgttctgtcta

SEQ ID NO: 10625 - DNA, 28 bp, Artificial sequence  Reverse Primer
  Primer
aaataagtataatagctctctgggttca

SEQ ID NO: 10626 - DNA, 22 bp, Artificial sequence  Reverse Primer
  Primer
cctataaatggagaccacaggt

SEQ ID NO: 10627 - DNA, 28 bp, Artificial sequence  Reverse Primer
  Primer
tatggtagaactagaaatttaaagggtt

SEQ ID NO: 10628 - DNA, 30 bp, Artificial sequence  Reverse Primer
  Primer
taaaagttaagattactgtcctagagtatt

SEQ ID NO: 10629 - DNA, 26 bp, Artificial sequence  Reverse Primer
  Primer
tcccataaaagcataagttaaaaatc

SEQ ID NO: 10630 - DNA, 20 bp, Artificial sequence  Reverse Primer
  Primer
tatgctccttcctgcagtgt

SEQ ID NO: 10631 - DNA, 23 bp, Artificial sequence  Reverse Primer
  Primer
acatcatacacgctcacatagtc

SEQ ID NO: 10632 - DNA, 30 bp, Artificial sequence  Reverse Primer
  Primer
ttattaatacttaagtggttgttcttttct

SEQ ID NO: 10633 - DNA, 25 bp, Artificial sequence  Reverse Primer
  Primer
ataatgtcaacaagcatcactctct

SEQ ID NO: 10634 - DNA, 21 bp, Artificial sequence  Reverse Primer
  Primer
aatctaacaagcgacccagtt

SEQ ID NO: 10635 - DNA, 26 bp, Artificial sequence  Reverse Primer
  Primer
ttctttcctcaatagagctagagaac

SEQ ID NO: 10636 - DNA, 20 bp, Artificial sequence  Reverse Primer
  Primer
tactccacagaggccttttc

SEQ ID NO: 10637 - DNA, 27 bp, Artificial sequence  Reverse Primer
  Primer
gccataatatgaattgataaaataagg

SEQ ID NO: 10638 - DNA, 20 bp, Artificial sequence  Reverse Primer
  Primer
ttccacaagtcacacagctg

SEQ ID NO: 10639 - DNA, 27 bp, Artificial sequence  Reverse Primer
  Primer
tacgttttcttctaggagttttacagt

SEQ ID NO: 10640 - DNA, 26 bp, Artificial sequence  Reverse Primer
  Primer
gatgagtgaaagtaatcattgaaaga

SEQ ID NO: 10641 - DNA, 28 bp, Artificial sequence  Reverse Primer
  Primer
tatttttaaagatagatatggccttgtc

SEQ ID NO: 10642 - DNA, 18 bp, Artificial sequence  Reverse Primer
  Primer
tgaccctattggcaaccc

SEQ ID NO: 10643 - DNA, 28 bp, Artificial sequence  Reverse Primer
  Primer
aaacaaatacataccttatttgaattgg

SEQ ID NO: 10644 - DNA, 28 bp, Artificial sequence  Reverse Primer
  Primer
taaataactctgtgttcaaatttttgtc

SEQ ID NO: 10645 - DNA, 27 bp, Artificial sequence  Reverse Primer
  Primer
aatcctcctaacatgtaaaaagatttt

SEQ ID NO: 10646 - DNA, 24 bp, Artificial sequence  Reverse Primer
  Primer
taaagaacaagtaatgagagcagc

SEQ ID NO: 10647 - DNA, 26 bp, Artificial sequence  Reverse Primer
  Primer
agccatgctaaaatttattgttaact

SEQ ID NO: 10648 - DNA, 22 bp, Artificial sequence  Reverse Primer
  Primer
aatcgtgctttagggaaatagc

SEQ ID NO: 10649 - DNA, 22 bp, Artificial sequence  Reverse Primer
  Primer
tagattttaggatgggtggtga

SEQ ID NO: 10650 - DNA, 28 bp, Artificial sequence  Reverse Primer
  Primer
tatattaatagttgttcatttcaaacgc

SEQ ID NO: 10651 - DNA, 22 bp, Artificial sequence  Reverse Primer
  Primer
tgggttgttcaagaagaaaagt

SEQ ID NO: 10652 - DNA, 28 bp, Artificial sequence  Reverse Primer
  Primer
tttcgatcacatttatttctcttaatac

SEQ ID NO: 10653 - DNA, 28 bp, Artificial sequence  Reverse Primer
  Primer
acttcaacagtaacaaagatttgtaaga

SEQ ID NO: 10654 - DNA, 24 bp, Artificial sequence  Reverse Primer
  Primer
aaagatattcatggtgggttatct

SEQ ID NO: 10655 - DNA, 27 bp, Artificial sequence  Reverse Primer
  Primer
aaacttcttatgaatttctttgagaca

SEQ ID NO: 10656 - DNA, 22 bp, Artificial sequence  Reverse Primer
  Primer
tccagttggcttttatttctct

SEQ ID NO: 10657 - DNA, 22 bp, Artificial sequence  Reverse Primer
  Primer
tcctcagaactcttagggacaa

SEQ ID NO: 10658 - DNA, 27 bp, Artificial sequence  Reverse Primer
  Primer
tcatatcctaagtcctttttcatttag

SEQ ID NO: 10659 - DNA, 21 bp, Artificial sequence  Reverse Primer
  Primer
tgtttgcttcttctcaaagcc

SEQ ID NO: 10660 - DNA, 27 bp, Artificial sequence  Reverse Primer
  Primer
taaggattttctgactacatgtttttt

SEQ ID NO: 10661 - DNA, 21 bp, Artificial sequence  Reverse Primer
  Primer
cctgttttacttgctgcagtc

SEQ ID NO: 10662 - DNA, 23 bp, Artificial sequence  Reverse Primer
  Primer
ttcagatcaacagcatttcctac

SEQ ID NO: 10663 - DNA, 20 bp, Artificial sequence  Reverse Primer
  Primer
tttaaagccactgcaagagg

SEQ ID NO: 10664 - DNA, 18 bp, Artificial sequence  Reverse Primer
  Primer
ttttcctgagcggaagag

SEQ ID NO: 10665 - DNA, 18 bp, Artificial sequence  Reverse Primer
  Primer
aggatcaaggggtgcttc

SEQ ID NO: 10666 - DNA, 23 bp, Artificial sequence  Reverse Primer
  Primer
ttaactcagtgtgaccaatgtga

SEQ ID NO: 10667 - DNA, 24 bp, Artificial sequence  Reverse Primer
  Primer
acctacagttactatgcctcgaat

SEQ ID NO: 10668 - DNA, 20 bp, Artificial sequence  Reverse Primer
  Primer
agggtttcccagcactattg

SEQ ID NO: 10669 - DNA, 18 bp, Artificial sequence  Reverse Primer
  Primer
gacccaggttccacccat

SEQ ID NO: 10670 - DNA, 24 bp, Artificial sequence  Reverse Primer
  Primer
aaaatggactctagtcactggaag

SEQ ID NO: 10671 - DNA, 25 bp, Artificial sequence  Reverse Primer
  Primer
ttctaactttgtattttagggcagt

SEQ ID NO: 10672 - DNA, 22 bp, Artificial sequence  Reverse Primer
  Primer
atacccaagtttgaatcccatt

SEQ ID NO: 10673 - DNA, 23 bp, Artificial sequence  Reverse Primer
  Primer
ttgttcaatgtcacctycaatat

SEQ ID NO: 10674 - DNA, 30 bp, Artificial sequence  Reverse Primer
  Primer
taaartgacaytcttaagagaacataatag

SEQ ID NO: 10675 - DNA, 25 bp, Artificial sequence  Reverse Primer
  Primer
ttttgttggaagaaaacttaaatcc

SEQ ID NO: 10676 - DNA, 21 bp, Artificial sequence  Reverse Primer
  Primer
atgatgcacttttatccaacc

SEQ ID NO: 10677 - DNA, 26 bp, Artificial sequence  Reverse Primer
  Primer
tggtttgttatgttatattcttgagg

SEQ ID NO: 10678 - DNA, 25 bp, Artificial sequence  Reverse Primer
  Primer
tttccttaccttatgtaccttgttg

SEQ ID NO: 10679 - DNA, 26 bp, Artificial sequence  Reverse Primer
  Primer
tttatctccaagttaacaaaagtttg

SEQ ID NO: 10680 - DNA, 28 bp, Artificial sequence  Reverse Primer
  Primer
ttattcatacttttaagatgatccttcc

SEQ ID NO: 10681 - DNA, 19 bp, Artificial sequence  Reverse Primer
  Primer
aaagatgcatttccggagt

SEQ ID NO: 10682 - DNA, 25 bp, Artificial sequence  Reverse Primer
  Primer
rcatgagatactttctcrgaaaatg

SEQ ID NO: 10683 - DNA, 22 bp, Artificial sequence  Reverse Primer
  Primer
atacttaaggaaaccttcacaa

SEQ ID NO: 10684 - DNA, 18 bp, Artificial sequence  Reverse Primer
  Primer
aagaaccgcgcttcggaa

SEQ ID NO: 10685 - DNA, 27 bp, Artificial sequence  Reverse Primer
  Primer
ataaattattgggaatgagaatatgag

SEQ ID NO: 10686 - DNA, 25 bp, Artificial sequence  Reverse Primer
  Primer
tagacatcctcttctctcagatagc

SEQ ID NO: 10687 - DNA, 25 bp, Artificial sequence  Reverse Primer
  Primer
taataggtaccgtggtttttatgaa

SEQ ID NO: 10688 - DNA, 24 bp, Artificial sequence  Reverse Primer
  Primer
tttcttacctatctttgtgtgggt

SEQ ID NO: 10689 - DNA, 26 bp, Artificial sequence  Reverse Primer
  Primer
tattttactctttttctcctgaaagg

SEQ ID NO: 10690 - DNA, 20 bp, Artificial sequence  Reverse Primer
  Primer
tttgaaataccctgcttccc

SEQ ID NO: 10691 - DNA, 19 bp, Artificial sequence  Reverse Primer
  Primer
agaatgccaagctctgagg

SEQ ID NO: 10692 - DNA, 22 bp, Artificial sequence  Reverse Primer
  Primer
ctggaagtcagaggtgagctag

SEQ ID NO: 10693 - DNA, 20 bp, Artificial sequence  Reverse Primer
  Primer
aacaagtgtgggccacttaa

SEQ ID NO: 10694 - DNA, 20 bp, Artificial sequence  Reverse Primer
  Primer
ttcttggcatctgtaccctc

SEQ ID NO: 10695 - DNA, 18 bp, Artificial sequence  Reverse Primer
  Primer
atccacaggccaagggct

SEQ ID NO: 10696 - DNA, 21 bp, Artificial sequence  Reverse Primer
  Primer
attgttagggaatcctcggta

SEQ ID NO: 10697 - DNA, 22 bp, Artificial sequence  Reverse Primer
  Primer
tagacacagtgggtgataccac

SEQ ID NO: 10698 - DNA, 24 bp, Artificial sequence  Reverse Primer
  Primer
aaaatagcagataaatggattgca

SEQ ID NO: 10699 - DNA, 21 bp, Artificial sequence  Reverse Primer
  Primer
aggaggcagctagttcttgaa

SEQ ID NO: 10700 - DNA, 21 bp, Artificial sequence  Reverse Primer
  Primer
agggttcccaaggtagaagtc

SEQ ID NO: 10701 - DNA, 18 bp, Artificial sequence  Reverse Primer
  Primer
caagtctgctgggctccc

SEQ ID NO: 10702 - DNA, 28 bp, Artificial sequence  Reverse Primer
  Primer
atacgtgaatagtttaaagtcatttctg

SEQ ID NO: 10703 - DNA, 21 bp, Artificial sequence  Reverse Primer
  Primer
attgaaactgtggggagaaaa

SEQ ID NO: 10704 - DNA, 27 bp, Artificial sequence  Reverse Primer
  Primer
tccttaactgatttctaaataaagcaa

SEQ ID NO: 10705 - DNA, 21 bp, Artificial sequence  Reverse Primer
  Primer
ccctttatacacaggcacaca

SEQ ID NO: 10706 - DNA, 30 bp, Artificial sequence  Reverse Primer
  Primer
ttacaccaagtataactgtgatttattact

SEQ ID NO: 10707 - DNA, 28 bp, Artificial sequence  Reverse Primer
  Primer
tataacttgttgtggaatgataaaaaac

SEQ ID NO: 10708 - DNA, 25 bp, Artificial sequence  Reverse Primer
  Primer
gctaccttctcgattttattcattt

SEQ ID NO: 10709 - DNA, 25 bp, Artificial sequence  Reverse Primer
  Primer
aagagggaaaggagatagtgttatg

SEQ ID NO: 10710 - DNA, 30 bp, Artificial sequence  Reverse Primer
  Primer
tcaattacatgattagagaatagtgaataa

SEQ ID NO: 10711 - DNA, 25 bp, Artificial sequence  Reverse Primer
  Primer
taagtacaatttcccatatttccaa

SEQ ID NO: 10712 - DNA, 22 bp, Artificial sequence  Reverse Primer
  Primer
aaacccacagttcctgttttaa

SEQ ID NO: 10713 - DNA, 19 bp, Artificial sequence  Reverse Primer
  Primer
aactctccaagattgccca

SEQ ID NO: 10714 - DNA, 18 bp, Artificial sequence  Reverse Primer
  Primer
aagatcccgacgctcaga

SEQ ID NO: 10715 - DNA, 21 bp, Artificial sequence  Reverse Primer
  Primer
ggttagtcccagctctctcag

SEQ ID NO: 10716 - DNA, 28 bp, Artificial sequence  Reverse Primer
  Primer
aagaagaaagaaattgtgagttagtgta

SEQ ID NO: 10717 - DNA, 23 bp, Artificial sequence  Reverse Primer
  Primer
taggtggactgtctctttgaaat

SEQ ID NO: 10718 - DNA, 18 bp, Artificial sequence  Reverse Primer
  Primer
atcaggcacagggaatga

SEQ ID NO: 10719 - DNA, 20 bp, Artificial sequence  Reverse Primer
  Primer
gcagcagcagaaccataagt

SEQ ID NO: 10720 - DNA, 21 bp, Artificial sequence  Reverse Primer
  Primer
tgccttatccgtttagcttct

SEQ ID NO: 10721 - DNA, 20 bp, Artificial sequence  Reverse Primer
  Primer
tatgggatgtagttccctgc

SEQ ID NO: 10722 - DNA, 19 bp, Artificial sequence  Reverse Primer
  Primer
aacaacctggggtaccatc

SEQ ID NO: 10723 - DNA, 25 bp, Artificial sequence  Reverse Primer
  Primer
atctgctatcagctacgtagtcact

SEQ ID NO: 10724 - DNA, 22 bp, Artificial sequence  Reverse Primer
  Primer
aactagatgcaaagcctcaaga

SEQ ID NO: 10725 - DNA, 24 bp, Artificial sequence  Reverse Primer
  Primer
aggcctatggatcttaagttgtaa

SEQ ID NO: 10726 - DNA, 22 bp, Artificial sequence  Reverse Primer
  Primer
acaaggtggtatcagcctttta

SEQ ID NO: 10727 - DNA, 24 bp, Artificial sequence  Reverse Primer
  Primer
attaacattgttctgttccaatgc

SEQ ID NO: 10728 - DNA, 21 bp, Artificial sequence  Reverse Primer
  Primer
acagagcctcagctacctcat

SEQ ID NO: 10729 - DNA, 22 bp, Artificial sequence  Reverse Primer
  Primer
aaatgaaatagttttgctgcct

SEQ ID NO: 10730 - DNA, 19 bp, Artificial sequence  Reverse Primer
  Primer
tggatgtacagagctgggc

SEQ ID NO: 10731 - DNA, 24 bp, Artificial sequence  Reverse Primer
  Primer
taatgcaaatgtgatcttgttagc

SEQ ID NO: 10732 - DNA, 30 bp, Artificial sequence  Reverse Primer
  Primer
taatgatgagatatctgtataaatactcct

SEQ ID NO: 10733 - DNA, 22 bp, Artificial sequence  Reverse Primer
  Primer
tgaatggtacttcaactgcaca

SEQ ID NO: 10734 - DNA, 20 bp, Artificial sequence  Reverse Primer
  Primer
tcaagatgcttcaccatgat

SEQ ID NO: 10735 - DNA, 22 bp, Artificial sequence  Reverse Primer
  Primer
tatttagtgggtaaagccagga

SEQ ID NO: 10736 - DNA, 22 bp, Artificial sequence  Reverse Primer
  Primer
actggtgatgcactgtcatatg

SEQ ID NO: 10737 - DNA, 23 bp, Artificial sequence  Reverse Primer
  Primer
tttatggaagtcatttttgttcc

SEQ ID NO: 10738 - DNA, 21 bp, Artificial sequence  Reverse Primer
  Primer
acagtttgggattgtttcctt

SEQ ID NO: 10739 - DNA, 18 bp, Artificial sequence  Reverse Primer
  Primer
agtgaggcagaattcccc

SEQ ID NO: 10740 - DNA, 21 bp, Artificial sequence  Reverse Primer
  Primer
taagggaccactttgcttctt

SEQ ID NO: 10741 - DNA, 21 bp, Artificial sequence  Reverse Primer
  Primer
actagacaggcttcctggacc

SEQ ID NO: 10742 - DNA, 20 bp, Artificial sequence  Reverse Primer
  Primer
ttaaatcacatcctccacgg

SEQ ID NO: 10743 - DNA, 23 bp, Artificial sequence  Reverse Primer
  Primer
atagatctataggctggtcctgg

SEQ ID NO: 10744 - DNA, 30 bp, Artificial sequence  Reverse Primer
  Primer
tctagaagttctttaatatctctgagtttc

SEQ ID NO: 10745 - DNA, 23 bp, Artificial sequence  Reverse Primer
  Primer
tcagaagaataatgcaagaatcc

SEQ ID NO: 10746 - DNA, 20 bp, Artificial sequence  Reverse Primer
  Primer
cccttgtcactgatcttgct

SEQ ID NO: 10747 - DNA, 21 bp, Artificial sequence  Reverse Primer
  Primer
ttactagtgttgagggctggg

SEQ ID NO: 10748 - DNA, 20 bp, Artificial sequence  Reverse Primer
  Primer
atgtttatgcccatctccag

SEQ ID NO: 10749 - DNA, 21 bp, Artificial sequence  Reverse Primer
  Primer
atttaacaaaccaagggcaaa

SEQ ID NO: 10750 - DNA, 19 bp, Artificial sequence  Reverse Primer
  Primer
ttctgttcctgagggaagc

SEQ ID NO: 10751 - DNA, 18 bp, Artificial sequence  Reverse Primer
  Primer
agcccttctggttggggc

SEQ ID NO: 10752 - DNA, 18 bp, Artificial sequence  Reverse Primer
  Primer
tagtgctcccacgcctgc

SEQ ID NO: 10753 - DNA, 22 bp, Artificial sequence  Reverse Primer
  Primer
gatttaattctggtctgcgaac

SEQ ID NO: 10754 - DNA, 24 bp, Artificial sequence  Reverse Primer
  Primer
atctccctgaaatgtgtaacagtc

SEQ ID NO: 10755 - DNA, 22 bp, Artificial sequence  Reverse Primer
  Primer
aggactttagtccttggtggtc

SEQ ID NO: 10756 - DNA, 21 bp, Artificial sequence  Reverse Primer
  Primer
taaatccaagactggggagac

SEQ ID NO: 10757 - DNA, 24 bp, Artificial sequence  Reverse Primer
  Primer
atcaataatctcatcagtaggctg

SEQ ID NO: 10758 - DNA, 27 bp, Artificial sequence  Reverse Primer
  Primer
tacatgtgtaatgcctgtatctacttg

SEQ ID NO: 10759 - DNA, 18 bp, Artificial sequence  Reverse Primer
  Primer
aagctccctccccaacca

SEQ ID NO: 10760 - DNA, 20 bp, Artificial sequence  Reverse Primer
  Primer
atgggcagaaaagactgtca

SEQ ID NO: 10761 - DNA, 21 bp, Artificial sequence  Reverse Primer
  Primer
aatgtggctaaaacgtgtcac

SEQ ID NO: 10762 - DNA, 22 bp, Artificial sequence  Reverse Primer
  Primer
agtgaattcatgttgatgcaga

SEQ ID NO: 10763 - DNA, 21 bp, Artificial sequence  Reverse Primer
  Primer
aattaaccatctcaaatccgg

SEQ ID NO: 10764 - DNA, 20 bp, Artificial sequence  Reverse Primer
  Primer
ttttctgtgcctgtgtctcg

SEQ ID NO: 10765 - DNA, 20 bp, Artificial sequence  Reverse Primer
  Primer
tatttcctatttcccccgtt

SEQ ID NO: 10766 - DNA, 18 bp, Artificial sequence  Reverse Primer
  Primer
acctccygggctctatgg

SEQ ID NO: 10767 - DNA, 21 bp, Artificial sequence  Reverse Primer
  Primer
agaagcattgcactttgagag

SEQ ID NO: 10768 - DNA, 23 bp, Artificial sequence  Reverse Primer
  Primer
taaaagtacagaytcctgggatg

SEQ ID NO: 10769 - DNA, 19 bp, Artificial sequence  Reverse Primer
  Primer
cgtgaaaattttgtgaggc

SEQ ID NO: 10770 - DNA, 21 bp, Artificial sequence  Reverse Primer
  Primer
tttgagagaggttgagtgctg

SEQ ID NO: 10771 - DNA, 22 bp, Artificial sequence  Reverse Primer
  Primer
tatgcctgagagagagatttgc

SEQ ID NO: 10772 - DNA, 27 bp, Artificial sequence  Reverse Primer
  Primer
cttatgtcgtgtacagtaagtacatcc

SEQ ID NO: 10773 - DNA, 18 bp, Artificial sequence  Reverse Primer
  Primer
atcaccgcctcagtggat

SEQ ID NO: 10774 - DNA, 19 bp, Artificial sequence  Reverse Primer
  Primer
attcgcttgagctggtagc

SEQ ID NO: 10775 - DNA, 21 bp, Artificial sequence  Reverse Primer
  Primer
ctgaaggacacagtcaggaac

SEQ ID NO: 10776 - DNA, 20 bp, Artificial sequence  Reverse Primer
  Primer
cagaagtcagcaaaagcaca

SEQ ID NO: 10777 - DNA, 20 bp, Artificial sequence  Reverse Primer
  Primer
ctcttacccgctgctaacat

SEQ ID NO: 10778 - DNA, 26 bp, Artificial sequence  Reverse Primer
  Primer
aaatcctcagaatttgtttggtatat

SEQ ID NO: 10779 - DNA, 25 bp, Artificial sequence  Reverse Primer
  Primer
ttatgtagaccaaaaaaatcacctg

SEQ ID NO: 10780 - DNA, 21 bp, Artificial sequence  Reverse Primer
  Primer
ttccccaaattcacacaataa

SEQ ID NO: 10781 - DNA, 19 bp, Artificial sequence  Reverse Primer
  Primer
aaccgtgcaatggaaaact

SEQ ID NO: 10782 - DNA, 20 bp, Artificial sequence  Reverse Primer
  Primer
tgtcattgattgtggctgat

SEQ ID NO: 10783 - DNA, 19 bp, Artificial sequence  Reverse Primer
  Primer
aaaaataaccccaccctcc

SEQ ID NO: 10784 - DNA, 27 bp, Artificial sequence  Reverse Primer
  Primer
atagcaagagtaaytgcattttaaaca

SEQ ID NO: 10785 - DNA, 23 bp, Artificial sequence  Reverse Primer
  Primer
attcactagcttgatgtctctgg

SEQ ID NO: 10786 - DNA, 22 bp, Artificial sequence  Reverse Primer
  Primer
aaaatgggacaatgagactgaa

SEQ ID NO: 10787 - DNA, 27 bp, Artificial sequence  Reverse Primer
  Primer
actattctcctttasagtaaaatccct

SEQ ID NO: 10788 - DNA, 25 bp, Artificial sequence  Reverse Primer
  Primer
taatacatctttagcagtgtgtcca

SEQ ID NO: 10789 - DNA, 30 bp, Artificial sequence  Reverse Primer
  Primer
tttatagatctagacctacagataaaaccc

SEQ ID NO: 10790 - DNA, 20 bp, Artificial sequence  Reverse Primer
  Primer
tcataaaactgatggtggcg

SEQ ID NO: 10791 - DNA, 25 bp, Artificial sequence  Reverse Primer
  Primer
ttgattgttgtgttaggatatttcc

SEQ ID NO: 10792 - DNA, 18 bp, Artificial sequence  Reverse Primer
  Primer
ataggcccaatgactggc

SEQ ID NO: 10793 - DNA, 25 bp, Artificial sequence  Reverse Primer
  Primer
ttatcaggtggctaataaatcagtc

SEQ ID NO: 10794 - DNA, 22 bp, Artificial sequence  Reverse Primer
  Primer
aaaatcacaacaatctccaagg

SEQ ID NO: 10795 - DNA, 25 bp, Artificial sequence  Reverse Primer
  Primer
aatgttagctcattttatttgccta

SEQ ID NO: 10796 - DNA, 22 bp, Artificial sequence  Reverse Primer
  Primer
ttttttctgcagactgaatttc

SEQ ID NO: 10797 - DNA, 24 bp, Artificial sequence  Reverse Primer
  Primer
aatagctttcactttctgagcact

SEQ ID NO: 10798 - DNA, 27 bp, Artificial sequence  Reverse Primer
  Primer
ataaaatatttcctagaacctgacaca

SEQ ID NO: 10799 - DNA, 19 bp, Artificial sequence  Reverse Primer
  Primer
tatcttcccaaatgctccc

SEQ ID NO: 10800 - DNA, 24 bp, Artificial sequence  Reverse Primer
  Primer
gtgtccagtgaaatacagttgatt

SEQ ID NO: 10801 - DNA, 22 bp, Artificial sequence  Reverse Primer
  Primer
tgatagctgttctgtgcatgtt

SEQ ID NO: 10802 - DNA, 23 bp, Artificial sequence  Reverse Primer
  Primer
ttactttctctgtgctgggatag

SEQ ID NO: 10803 - DNA, 19 bp, Artificial sequence  Reverse Primer
  Primer
ccaacttctcctgcagctc

SEQ ID NO: 10804 - DNA, 20 bp, Artificial sequence  Reverse Primer
  Primer
taggacctatgggtggaatg

SEQ ID NO: 10805 - DNA, 28 bp, Artificial sequence  Reverse Primer
  Primer
ttgtaatgtttaagcataccattatttc

SEQ ID NO: 10806 - DNA, 21 bp, Artificial sequence  Reverse Primer
  Primer
tcctaggaaataggaccatgg

SEQ ID NO: 10807 - DNA, 25 bp, Artificial sequence  Reverse Primer
  Primer
attatgaaaagcagtcaattcaaga

SEQ ID NO: 10808 - DNA, 23 bp, Artificial sequence  Reverse Primer
  Primer
accagttcttttttaagagccag

SEQ ID NO: 10809 - DNA, 22 bp, Artificial sequence  Reverse Primer
  Primer
atgtcccaacaaacaacagatt

SEQ ID NO: 10810 - DNA, 22 bp, Artificial sequence  Reverse Primer
  Primer
tgtatgtgcttcttctttccac

SEQ ID NO: 10811 - DNA, 26 bp, Artificial sequence  Reverse Primer
  Primer
aaaatattgtttcttttatctgcagg

SEQ ID NO: 10812 - DNA, 24 bp, Artificial sequence  Reverse Primer
  Primer
actttgataccctcaagatatgct

SEQ ID NO: 10813 - DNA, 20 bp, Artificial sequence  Reverse Primer
  Primer
agaaaaccagggttgaggaa

SEQ ID NO: 10814 - DNA, 30 bp, Artificial sequence  Reverse Primer
  Primer
tctatacaaagtgaaatttatgtactgtta

SEQ ID NO: 10815 - DNA, 30 bp, Artificial sequence  Reverse Primer
  Primer
tgtaaagtggaactataacaattaagaaag

SEQ ID NO: 10816 - DNA, 22 bp, Artificial sequence  Reverse Primer
  Primer
cataatgttttccaaagaatgc

SEQ ID NO: 10817 - DNA, 26 bp, Artificial sequence  Reverse Primer
  Primer
ttaaaatctacaagagactccaaagc

SEQ ID NO: 10818 - DNA, 20 bp, Artificial sequence  Reverse Primer
  Primer
atgaaatgacagcgggtacc

SEQ ID NO: 10819 - DNA, 23 bp, Artificial sequence  Reverse Primer
  Primer
aattatggattagacactggcag

SEQ ID NO: 10820 - DNA, 21 bp, Artificial sequence  Reverse Primer
  Primer
tttctttgagtttcagggagc

SEQ ID NO: 10821 - DNA, 23 bp, Artificial sequence  Reverse Primer
  Primer
gccatttcatttatccaatatga

SEQ ID NO: 10822 - DNA, 26 bp, Artificial sequence  Reverse Primer
  Primer
taaacttaagtgtctccagactcctt

SEQ ID NO: 10823 - DNA, 22 bp, Artificial sequence  Reverse Primer
  Primer
tcaagtctccttacagtccaca

SEQ ID NO: 10824 - DNA, 19 bp, Artificial sequence  Reverse Primer
  Primer
aaaaatcagtggctagggc

SEQ ID NO: 10825 - DNA, 24 bp, Artificial sequence  Reverse Primer
  Primer
ctgcagctcctttaaaatctaaaa

SEQ ID NO: 10826 - DNA, 23 bp, Artificial sequence  Reverse Primer
  Primer
ttgaaaaatcgaacaggatttta

SEQ ID NO: 10827 - DNA, 23 bp, Artificial sequence  Reverse Primer
  Primer
ttaaggaacaaaaatggaaaacc

SEQ ID NO: 10828 - DNA, 26 bp, Artificial sequence  Reverse Primer
  Primer
tctctttatatttctcccatgtgatt

SEQ ID NO: 10829 - DNA, 21 bp, Artificial sequence  Reverse Primer
  Primer
agaacaccctggtatgttgtg

SEQ ID NO: 10830 - DNA, 30 bp, Artificial sequence  Reverse Primer
  Primer
gtagtaaatctccatattgttaatgtaaaa

SEQ ID NO: 10831 - DNA, 26 bp, Artificial sequence  Reverse Primer
  Primer
tatcactggtccaaagtaacacttaa

SEQ ID NO: 10832 - DNA, 27 bp, Artificial sequence  Reverse Primer
  Primer
gaagttttcaaagtagtgttgcttatg

SEQ ID NO: 10833 - DNA, 21 bp, Artificial sequence  Reverse Primer
  Primer
ttagcaaggctstctgttcaa

SEQ ID NO: 10834 - DNA, 23 bp, Artificial sequence  Reverse Primer
  Primer
aaactcactgaatcaaaygattg

SEQ ID NO: 10835 - DNA, 23 bp, Artificial sequence  Reverse Primer
  Primer
aaagtcttaaaccctgtcctgaa

SEQ ID NO: 10836 - DNA, 25 bp, Artificial sequence  Reverse Primer
  Primer
tttggaaatatggaagatacaagaa

SEQ ID NO: 10837 - DNA, 24 bp, Artificial sequence  Reverse Primer
  Primer
tttttgctagttatccatgtgacc

SEQ ID NO: 10838 - DNA, 27 bp, Artificial sequence  Reverse Primer
  Primer
araaaatatattaggccctaccttatg

SEQ ID NO: 10839 - DNA, 21 bp, Artificial sequence  Reverse Primer
  Primer
taagtgatccacgtttccaaa

SEQ ID NO: 10840 - DNA, 23 bp, Artificial sequence  Reverse Primer
  Primer
attaaacctcttggtttcaggag

SEQ ID NO: 10841 - DNA, 29 bp, Artificial sequence  Reverse Primer
  Primer
acaataaattactagtaagaacygctttg

SEQ ID NO: 10842 - DNA, 18 bp, Artificial sequence  Reverse Primer
  Primer
gattgcagtgcaggagca

SEQ ID NO: 10843 - DNA, 23 bp, Artificial sequence  Reverse Primer
  Primer
atgttttctttttcattctccct

SEQ ID NO: 10844 - DNA, 27 bp, Artificial sequence  Reverse Primer
  Primer
ttaaagagctaaatggaatctgtttat

SEQ ID NO: 10845 - DNA, 26 bp, Artificial sequence  Reverse Primer
  Primer
attgaatcattgcatcatataatcac

SEQ ID NO: 10846 - DNA, 29 bp, Artificial sequence  Reverse Primer
  Primer
ctgttaatgtaatttcttatgtagaatgg

SEQ ID NO: 10847 - DNA, 30 bp, Artificial sequence  Reverse Primer
  Primer
tatatgtagagacacaagtaaggtactagc

SEQ ID NO: 10848 - DNA, 27 bp, Artificial sequence  Reverse Primer
  Primer
ttacttgaaccttagatcttgagtcat

SEQ ID NO: 10849 - DNA, 24 bp, Artificial sequence  Reverse Primer
  Primer
gattttatagggattactgcagga

SEQ ID NO: 10850 - DNA, 28 bp, Artificial sequence  Reverse Primer
  Primer
gagatatattgaagacattatagcagga

SEQ ID NO: 10851 - DNA, 18 bp, Artificial sequence  Reverse Primer
  Primer
atgcccctaaaamccctc

SEQ ID NO: 10852 - DNA, 20 bp, Artificial sequence  Reverse Primer
  Primer
tggattctactgaagaggcg

SEQ ID NO: 10853 - DNA, 18 bp, Artificial sequence  Reverse Primer
  Primer
gctccgcctrgaaggtac

SEQ ID NO: 10854 - DNA, 20 bp, Artificial sequence  Reverse Primer
  Primer
attccacacagccatcaagt

SEQ ID NO: 10855 - DNA, 28 bp, Artificial sequence  Reverse Primer
  Primer
aaaaatgctatcagagaagaaaaactat

SEQ ID NO: 10856 - DNA, 28 bp, Artificial sequence  Reverse Primer
  Primer
tatcactaaaggagacttaacaactgac

SEQ ID NO: 10857 - DNA, 27 bp, Artificial sequence  Reverse Primer
  Primer
gtacaacttttgatcattttgagtctt

SEQ ID NO: 10858 - DNA, 22 bp, Artificial sequence  Reverse Primer
  Primer
acccctatcagctaatttcacc

SEQ ID NO: 10859 - DNA, 23 bp, Artificial sequence  Reverse Primer
  Primer
catctttttgcagaaattagctg

SEQ ID NO: 10860 - DNA, 22 bp, Artificial sequence  Reverse Primer
  Primer
aaattcaccaggttctaatggg

SEQ ID NO: 10861 - DNA, 30 bp, Artificial sequence  Reverse Primer
  Primer
tactcagactttacattttataactatcct

SEQ ID NO: 10862 - DNA, 20 bp, Artificial sequence  Reverse Primer
  Primer
tatacctgtgactgcccacg

SEQ ID NO: 10863 - DNA, 19 bp, Artificial sequence  Reverse Primer
  Primer
tttctgcccagytcacagt

SEQ ID NO: 10864 - DNA, 23 bp, Artificial sequence  Reverse Primer
  Primer
atactcgaacaaggaaggagtct

SEQ ID NO: 10865 - DNA, 18 bp, Artificial sequence  Reverse Primer
  Primer
aaggcaatgcctgcacct

SEQ ID NO: 10866 - DNA, 24 bp, Artificial sequence  Reverse Primer
  Primer
tccacaagttcartagctgtttaa

SEQ ID NO: 10867 - DNA, 19 bp, Artificial sequence  Reverse Primer
  Primer
agacgtgaccttctgctgc

SEQ ID NO: 10868 - DNA, 18 bp, Artificial sequence  Reverse Primer
  Primer
tctgcctgctgcactgcc

SEQ ID NO: 10869 - DNA, 19 bp, Artificial sequence  Reverse Primer
  Primer
aacctgtgggagttgaggg

SEQ ID NO: 10870 - DNA, 25 bp, Artificial sequence  Reverse Primer
  Primer
ttacaaagtctggatcacataggtc

SEQ ID NO: 10871 - DNA, 21 bp, Artificial sequence  Reverse Primer
  Primer
ggagcacttaagaggaaccag

SEQ ID NO: 10872 - DNA, 18 bp, Artificial sequence  Reverse Primer
  Primer
agatgagtcctccctgcc

SEQ ID NO: 10873 - DNA, 22 bp, Artificial sequence  Reverse Primer
  Primer
tgaaatattagatcattcccgg

SEQ ID NO: 10874 - DNA, 26 bp, Artificial sequence  Reverse Primer
  Primer
atcttctgataaaggtaagctggtaa

SEQ ID NO: 10875 - DNA, 23 bp, Artificial sequence  Reverse Primer
  Primer
atgtatgagctgtcactcttggt

SEQ ID NO: 10876 - DNA, 25 bp, Artificial sequence  Reverse Primer
  Primer
aaatgacaagccattatctgagtag

SEQ ID NO: 10877 - DNA, 26 bp, Artificial sequence  Reverse Primer
  Primer
tctctcaggcattcttaagtaaagtc

SEQ ID NO: 10878 - DNA, 18 bp, Artificial sequence  Reverse Primer
  Primer
aaggaggggtttctcccg

SEQ ID NO: 10879 - DNA, 18 bp, Artificial sequence  Reverse Primer
  Primer
agtcacccacccagctct

SEQ ID NO: 10880 - DNA, 26 bp, Artificial sequence  Reverse Primer
  Primer
aaatactagaggtatcatcagtcccc

SEQ ID NO: 10881 - DNA, 18 bp, Artificial sequence  Reverse Primer
  Primer
agggtcccagtccaggtc

SEQ ID NO: 10882 - DNA, 22 bp, Artificial sequence  Reverse Primer
  Primer
aaacctcttgtgaaaggttgag

SEQ ID NO: 10883 - DNA, 25 bp, Artificial sequence  Reverse Primer
  Primer
rgtctgagaatgagrgatgaaatag

SEQ ID NO: 10884 - DNA, 23 bp, Artificial sequence  Reverse Primer
  Primer
tacttttacagatgccaaggaca

SEQ ID NO: 10885 - DNA, 23 bp, Artificial sequence  Reverse Primer
  Primer
catccaataacaaccagcttaag

SEQ ID NO: 10886 - DNA, 18 bp, Artificial sequence  Reverse Primer
  Primer
aatcaaggtccagcaagg

SEQ ID NO: 10887 - DNA, 28 bp, Artificial sequence  Reverse Primer
  Primer
attaataatgacagsaacagtctcttta

SEQ ID NO: 10888 - DNA, 24 bp, Artificial sequence  Reverse Primer
  Primer
tggtttactggaaatgtttcttct

SEQ ID NO: 10889 - DNA, 20 bp, Artificial sequence  Reverse Primer
  Primer
tagcattttatgccaggtgc

SEQ ID NO: 10890 - DNA, 23 bp, Artificial sequence  Reverse Primer
  Primer
agtcttcaaggagaaaggtaggg

SEQ ID NO: 10891 - DNA, 24 bp, Artificial sequence  Reverse Primer
  Primer
tacaatttcatggtggtatctcag

SEQ ID NO: 10892 - DNA, 20 bp, Artificial sequence  Reverse Primer
  Primer
agtctcagtggagggtctgc

SEQ ID NO: 10893 - DNA, 29 bp, Artificial sequence  Reverse Primer
  Primer
tacttcttattaaaagttatgagaggtgg

SEQ ID NO: 10894 - DNA, 21 bp, Artificial sequence  Reverse Primer
  Primer
aaaatgaatccctgaactgga

SEQ ID NO: 10895 - DNA, 23 bp, Artificial sequence  Reverse Primer
  Primer
cagataatatttgctccaggaga

SEQ ID NO: 10896 - DNA, 22 bp, Artificial sequence  Reverse Primer
  Primer
actatgccctttccctctttat

SEQ ID NO: 10897 - DNA, 22 bp, Artificial sequence  Reverse Primer
  Primer
tgtcactcattaaaaacttggc

SEQ ID NO: 10898 - DNA, 19 bp, Artificial sequence  Reverse Primer
  Primer
cagagtcagagcacctgga

SEQ ID NO: 10899 - DNA, 23 bp, Artificial sequence  Reverse Primer
  Primer
ttttgttgaagggatctctaacc

SEQ ID NO: 10900 - DNA, 22 bp, Artificial sequence  Reverse Primer
  Primer
aaagtgaaacaaacgagtgtgc

SEQ ID NO: 10901 - DNA, 26 bp, Artificial sequence  Reverse Primer
  Primer
ttattgttgtcattgttgttttagtc

SEQ ID NO: 10902 - DNA, 20 bp, Artificial sequence  Reverse Primer
  Primer
gaaggtaaagcacagctgct

SEQ ID NO: 10903 - DNA, 22 bp, Artificial sequence  Reverse Primer
  Primer
tttcttccayctccatttcttg

SEQ ID NO: 10904 - DNA, 20 bp, Artificial sequence  Reverse Primer
  Primer
aattgaggagatggagctgc

SEQ ID NO: 10905 - DNA, 18 bp, Artificial sequence  Reverse Primer
  Primer
tctgatacccgctcagcc

SEQ ID NO: 10906 - DNA, 18 bp, Artificial sequence  Reverse Primer
  Primer
aagtctgcctgggtcttg

SEQ ID NO: 10907 - DNA, 22 bp, Artificial sequence  Reverse Primer
  Primer
tataggtatgactccctgctgc

SEQ ID NO: 10908 - DNA, 20 bp, Artificial sequence  Reverse Primer
  Primer
tactgccctggttctgtgtt

SEQ ID NO: 10909 - DNA, 20 bp, Artificial sequence  Reverse Primer
  Primer
attgttctgggttctagggg

SEQ ID NO: 10910 - DNA, 22 bp, Artificial sequence  Reverse Primer
  Primer
gaatccagatttttgtctctgg

SEQ ID NO: 10911 - DNA, 30 bp, Artificial sequence  Reverse Primer
  Primer
tttactctaacagrttcataacagtaaatc

SEQ ID NO: 10912 - DNA, 26 bp, Artificial sequence  Reverse Primer
  Primer
ctcattaataagggaaaattttgagt

SEQ ID NO: 10913 - DNA, 23 bp, Artificial sequence  Reverse Primer
  Primer
ratttgaggaaagagatgaggtg

SEQ ID NO: 10914 - DNA, 22 bp, Artificial sequence  Reverse Primer
  Primer
aaatcccgacaatgttcatatc

SEQ ID NO: 10915 - DNA, 27 bp, Artificial sequence  Reverse Primer
  Primer
ttcagttctttctgtgaagttctattt

SEQ ID NO: 10916 - DNA, 26 bp, Artificial sequence  Reverse Primer
  Primer
aattactcaggaattctactggtagc

SEQ ID NO: 10917 - DNA, 23 bp, Artificial sequence  Reverse Primer
  Primer
tccagaacatatttcagaggaaa

SEQ ID NO: 10918 - DNA, 30 bp, Artificial sequence  Reverse Primer
  Primer
actacaaactacatatgtgtactgtaccaa

SEQ ID NO: 10919 - DNA, 22 bp, Artificial sequence  Reverse Primer
  Primer
ttgttaggatatggaaatgcct

SEQ ID NO: 10920 - DNA, 26 bp, Artificial sequence  Reverse Primer
  Primer
aatgggattatttattcattgtgtct

SEQ ID NO: 10921 - DNA, 25 bp, Artificial sequence  Reverse Primer
  Primer
aaggttgaaaaggaactttagactc

SEQ ID NO: 10922 - DNA, 29 bp, Artificial sequence  Reverse Primer
  Primer
acttacctaatcttctttagtccttaagc

SEQ ID NO: 10923 - DNA, 19 bp, Artificial sequence  Reverse Primer
  Primer
aattagcccttccatctgg

SEQ ID NO: 10924 - DNA, 30 bp, Artificial sequence  Reverse Primer
  Primer
tagtctgtatatttctaacatttatgtcca

SEQ ID NO: 10925 - DNA, 19 bp, Artificial sequence  Reverse Primer
  Primer
tcacctggagatttgctca

SEQ ID NO: 10926 - DNA, 19 bp, Artificial sequence  Reverse Primer
  Primer
tcytctgtggtcctcctca

SEQ ID NO: 10927 - DNA, 21 bp, Artificial sequence  Reverse Primer
  Primer
tacgacagggacagactttga

SEQ ID NO: 10928 - DNA, 22 bp, Artificial sequence  Reverse Primer
  Primer
tatttttggccactggataatg

SEQ ID NO: 10929 - DNA, 21 bp, Artificial sequence  Reverse Primer
  Primer
tatcagtttggtccaggtgtt

SEQ ID NO: 10930 - DNA, 19 bp, Artificial sequence  Reverse Primer
  Primer
aggggaatttctgacctgg

SEQ ID NO: 10931 - DNA, 18 bp, Artificial sequence  Reverse Primer
  Primer
ccccatccccgcacttac

SEQ ID NO: 10932 - DNA, 30 bp, Artificial sequence  Reverse Primer
  Primer
tgtattaataccctctactagctttgtatc

SEQ ID NO: 10933 - DNA, 21 bp, Artificial sequence  Reverse Primer
  Primer
atacgcaaagaggcttaggag

SEQ ID NO: 10934 - DNA, 18 bp, Artificial sequence  Reverse Primer
  Primer
aaaatgtgccccatttcc

SEQ ID NO: 10935 - DNA, 27 bp, Artificial sequence  Reverse Primer
  Primer
cctaaaggctaataaactttctgtttt

SEQ ID NO: 10936 - DNA, 24 bp, Artificial sequence  Reverse Primer
  Primer
tcttcatctgaaatcacatgtttg

SEQ ID NO: 10937 - DNA, 21 bp, Artificial sequence  Reverse Primer
  Primer
tattttctccaaagggagctg

SEQ ID NO: 10938 - DNA, 27 bp, Artificial sequence  Reverse Primer
  Primer
aaatgattagtaggaaaagaaaagagg

SEQ ID NO: 10939 - DNA, 28 bp, Artificial sequence  Reverse Primer
  Primer
atgtctgacataatacacacatacacac

SEQ ID NO: 10940 - DNA, 18 bp, Artificial sequence  Reverse Primer
  Primer
tgagcccacgctctacag

SEQ ID NO: 10941 - DNA, 30 bp, Artificial sequence  Reverse Primer
  Primer
gtaatatattgacaaaatgtccagtttatg

SEQ ID NO: 10942 - DNA, 21 bp, Artificial sequence  Reverse Primer
  Primer
tgcattcactggaatatttgg

SEQ ID NO: 10943 - DNA, 30 bp, Artificial sequence  Reverse Primer
  Primer
tagtttaccttattttactatgaacaccat

SEQ ID NO: 10944 - DNA, 23 bp, Artificial sequence  Reverse Primer
  Primer
ataaaatgaagctgataatggcc

SEQ ID NO: 10945 - DNA, 23 bp, Artificial sequence  Reverse Primer
  Primer
acatcaaatcatcttttcagtgg

SEQ ID NO: 10946 - DNA, 29 bp, Artificial sequence  Reverse Primer
  Primer
acaaaggtcctatatattagttacaatgc

SEQ ID NO: 10947 - DNA, 26 bp, Artificial sequence  Reverse Primer
  Primer
attttcacactgacttctctgtgtat

SEQ ID NO: 10948 - DNA, 28 bp, Artificial sequence  Reverse Primer
  Primer
ttctattccactctaggttacaagttta

SEQ ID NO: 10949 - DNA, 23 bp, Artificial sequence  Reverse Primer
  Primer
taaacagcagtgacaacaaagta

SEQ ID NO: 10950 - DNA, 23 bp, Artificial sequence  Reverse Primer
  Primer
tgaacagctaatgcacaagtaag

SEQ ID NO: 10951 - DNA, 19 bp, Artificial sequence  Reverse Primer
  Primer
atggctcacaaacagcaaa

SEQ ID NO: 10952 - DNA, 25 bp, Artificial sequence  Reverse Primer
  Primer
tcawctactcaaaccctactcaaat

SEQ ID NO: 10953 - DNA, 29 bp, Artificial sequence  Reverse Primer
  Primer
tatattcaaataagcttaacggagtagag

SEQ ID NO: 10954 - DNA, 19 bp, Artificial sequence  Reverse Primer
  Primer
ttaggactgtgcagagggg

SEQ ID NO: 10955 - DNA, 22 bp, Artificial sequence  Reverse Primer
  Primer
aataacarccaagaaacccaaa

SEQ ID NO: 10956 - DNA, 24 bp, Artificial sequence  Reverse Primer
  Primer
tgaaagtatgcagtatcctgatgt

SEQ ID NO: 10957 - DNA, 18 bp, Artificial sequence  Reverse Primer
  Primer
acggaaggcttcctggag

SEQ ID NO: 10958 - DNA, 21 bp, Artificial sequence  Reverse Primer
  Primer
agagttgctagggaaagctca

SEQ ID NO: 10959 - DNA, 24 bp, Artificial sequence  Reverse Primer
  Primer
ctattaccggctactaaccacact

SEQ ID NO: 10960 - DNA, 19 bp, Artificial sequence  Reverse Primer
  Primer
tggtcgtcttacttcgcag

SEQ ID NO: 10961 - DNA, 21 bp, Artificial sequence  Reverse Primer
  Primer
ctggactactgcaaaaggatg

SEQ ID NO: 10962 - DNA, 22 bp, Artificial sequence  Reverse Primer
  Primer
akaggaagaaagagatgccaaa

SEQ ID NO: 10963 - DNA, 25 bp, Artificial sequence  Reverse Primer
  Primer
atttttgcttactcaaattaccatg

SEQ ID NO: 10964 - DNA, 26 bp, Artificial sequence  Reverse Primer
  Primer
tgatatttcactggagttatttcaat

SEQ ID NO: 10965 - DNA, 25 bp, Artificial sequence  Reverse Primer
  Primer
aaacagtaattgaaatcatgatgct

SEQ ID NO: 10966 - DNA, 24 bp, Artificial sequence  Reverse Primer
  Primer
aatcttgtgttccctttattcact

SEQ ID NO: 10967 - DNA, 26 bp, Artificial sequence  Reverse Primer
  Primer
agaacagacttcataaaaggtgaatt

SEQ ID NO: 10968 - DNA, 20 bp, Artificial sequence  Reverse Primer
  Primer
atcagatggcagaggagacg

SEQ ID NO: 10969 - DNA, 18 bp, Artificial sequence  Reverse Primer
  Primer
aaggtccaatcatggcct

SEQ ID NO: 10970 - DNA, 29 bp, Artificial sequence  Reverse Primer
  Primer
attttaaaacttaytgctgtctagattcc

SEQ ID NO: 10971 - DNA, 26 bp, Artificial sequence  Reverse Primer
  Primer
atatgaaactgtctgcatgactctag

SEQ ID NO: 10972 - DNA, 19 bp, Artificial sequence  Reverse Primer
  Primer
agatggtgcttcttggctg

SEQ ID NO: 10973 - DNA, 20 bp, Artificial sequence  Reverse Primer
  Primer
ttagaggccagaaccaaagc

SEQ ID NO: 10974 - DNA, 21 bp, Artificial sequence  Reverse Primer
  Primer
aaacggtgacacataatggag

SEQ ID NO: 10975 - DNA, 28 bp, Artificial sequence  Reverse Primer
  Primer
tctattaaaactctagggtcatgattac

SEQ ID NO: 10976 - DNA, 29 bp, Artificial sequence  Reverse Primer
  Primer
atgacctatttttactatmatgagcataa

SEQ ID NO: 10977 - DNA, 23 bp, Artificial sequence  Reverse Primer
  Primer
aaaataaagccgagaaatcaaac

SEQ ID NO: 10978 - DNA, 29 bp, Artificial sequence  Reverse Primer
  Primer
ggaataataagtttatttagataatggcc

SEQ ID NO: 10979 - DNA, 30 bp, Artificial sequence  Reverse Primer
  Primer
tgatctcagtaatactaacagaaatagtaa

SEQ ID NO: 10980 - DNA, 30 bp, Artificial sequence  Reverse Primer
  Primer
aatattgattttgtaacactgattacagtc

SEQ ID NO: 10981 - DNA, 29 bp, Artificial sequence  Reverse Primer
  Primer
attaagaatctgaaatacacagttttctg

SEQ ID NO: 10982 - DNA, 25 bp, Artificial sequence  Reverse Primer
  Primer
aacaaacacacagttttataatgca

SEQ ID NO: 10983 - DNA, 27 bp, Artificial sequence  Reverse Primer
  Primer
gttacaagtgctttttgttttattttg

SEQ ID NO: 10984 - DNA, 25 bp, Artificial sequence  Reverse Primer
  Primer
ttgctgaaataacttcctaacattg

SEQ ID NO: 10985 - DNA, 20 bp, Artificial sequence  Reverse Primer
  Primer
agcccacctatgtaatgcag

SEQ ID NO: 10986 - DNA, 24 bp, Artificial sequence  Reverse Primer
  Primer
aatttcacagttacgttaaggagg

SEQ ID NO: 10987 - DNA, 21 bp, Artificial sequence  Reverse Primer
  Primer
ttttatgagactgtggccctt

SEQ ID NO: 10988 - DNA, 26 bp, Artificial sequence  Reverse Primer
  Primer
aataacacaagagctagaagaggaag

SEQ ID NO: 10989 - DNA, 25 bp, Artificial sequence  Reverse Primer
  Primer
agtgaaagtattatgacctcaccaa

SEQ ID NO: 10990 - DNA, 30 bp, Artificial sequence  Reverse Primer
  Primer
aatgtatctactgtgtggatctaaagttac

SEQ ID NO: 10991 - DNA, 18 bp, Artificial sequence  Reverse Primer
  Primer
tgcaaccacaagctccag

SEQ ID NO: 10992 - DNA, 21 bp, Artificial sequence  Reverse Primer
  Primer
ggaagaatgtagcatggacct

SEQ ID NO: 10993 - DNA, 19 bp, Artificial sequence  Reverse Primer
  Primer
agtcgactgaggtgtgtgc

SEQ ID NO: 10994 - DNA, 18 bp, Artificial sequence  Reverse Primer
  Primer
ttgtgcgatgtgatggag

SEQ ID NO: 10995 - DNA, 18 bp, Artificial sequence  Reverse Primer
  Primer
aactcccagccaagctga

SEQ ID NO: 10996 - DNA, 18 bp, Artificial sequence  Reverse Primer
  Primer
tctccttcagccctggga

SEQ ID NO: 10997 - DNA, 23 bp, Artificial sequence  Reverse Primer
  Primer
atactaccaaactcaagcaacca

SEQ ID NO: 10998 - DNA, 18 bp, Artificial sequence  Reverse Primer
  Primer
agctgcggagtgagtgcc

SEQ ID NO: 10999 - DNA, 25 bp, Artificial sequence  Reverse Primer
  Primer
gctaaataagccaggaacataaatt

SEQ ID NO: 11000 - DNA, 25 bp, Artificial sequence  Reverse Primer
  Primer
aagtcacctagtttttcttcctagg

SEQ ID NO: 11001 - DNA, 18 bp, Artificial sequence  Reverse Primer
  Primer
aggagaaggaccaagcca

SEQ ID NO: 11002 - DNA, 18 bp, Artificial sequence  Reverse Primer
  Primer
ctgcagagtccaaccagc

SEQ ID NO: 11003 - DNA, 23 bp, Artificial sequence  Reverse Primer
  Primer
atggtttattggatagcrtaacg

SEQ ID NO: 11004 - DNA, 23 bp, Artificial sequence  Reverse Primer
  Primer
ttagttatacgtggtcccatgac

SEQ ID NO: 11005 - DNA, 22 bp, Artificial sequence  Reverse Primer
  Primer
tttaatcttgctggtagggaag

SEQ ID NO: 11006 - DNA, 21 bp, Artificial sequence  Reverse Primer
  Primer
ttgctaatttccattgaccaa

SEQ ID NO: 11007 - DNA, 21 bp, Artificial sequence  Reverse Primer
  Primer
attctcacctgtggaatagcc

SEQ ID NO: 11008 - DNA, 19 bp, Artificial sequence  Reverse Primer
  Primer
tgagggacacaagaatgga

SEQ ID NO: 11009 - DNA, 20 bp, Artificial sequence  Reverse Primer
  Primer
tagactctttcgaatgggca

SEQ ID NO: 11010 - DNA, 28 bp, Artificial sequence  Reverse Primer
  Primer
atgatttgtaattaaacatttgtctgtg

SEQ ID NO: 11011 - DNA, 24 bp, Artificial sequence  Reverse Primer
  Primer
aaactaaggcctagatgtgttcag

SEQ ID NO: 11012 - DNA, 23 bp, Artificial sequence  Reverse Primer
  Primer
aaaatcctctcacagtgtgtctg

SEQ ID NO: 11013 - DNA, 19 bp, Artificial sequence  Reverse Primer
  Primer
tattttcccccacttgctt

SEQ ID NO: 11014 - DNA, 18 bp, Artificial sequence  Reverse Primer
  Primer
agcctgagcttggcggct

SEQ ID NO: 11015 - DNA, 19 bp, Artificial sequence  Reverse Primer
  Primer
tacagttggtggggtcaca

SEQ ID NO: 11016 - DNA, 18 bp, Artificial sequence  Reverse Primer
  Primer
tcagttgcccccctgggt

SEQ ID NO: 11017 - DNA, 18 bp, Artificial sequence  Reverse Primer
  Primer
aagagatgatgctccggg

SEQ ID NO: 11018 - DNA, 19 bp, Artificial sequence  Reverse Primer
  Primer
tccacccctccaacttaac

SEQ ID NO: 11019 - DNA, 18 bp, Artificial sequence  Reverse Primer
  Primer
attgccatcctttgcagc

SEQ ID NO: 11020 - DNA, 21 bp, Artificial sequence  Reverse Primer
  Primer
ctcaataattatggccagtgg

SEQ ID NO: 11021 - DNA, 21 bp, Artificial sequence  Reverse Primer
  Primer
tgraatgtcaaggtgatgacc

SEQ ID NO: 11022 - DNA, 24 bp, Artificial sequence  Reverse Primer
  Primer
atttttcctgctgagttacaaaga

SEQ ID NO: 11023 - DNA, 24 bp, Artificial sequence  Reverse Primer
  Primer
agagaggaaggaaagactctcttg

SEQ ID NO: 11024 - DNA, 23 bp, Artificial sequence  Reverse Primer
  Primer
atcaaatgcacttgtgtttatcc

SEQ ID NO: 11025 - DNA, 18 bp, Artificial sequence  Reverse Primer
  Primer
cccacgggtcttcaggat

SEQ ID NO: 11026 - DNA, 24 bp, Artificial sequence  Reverse Primer
  Primer
atgtacagtgaatgtagcatcacc

SEQ ID NO: 11027 - DNA, 21 bp, Artificial sequence  Reverse Primer
  Primer
aatctgattggttcgaactgg

SEQ ID NO: 11028 - DNA, 30 bp, Artificial sequence  Reverse Primer
  Primer
atatagtaaaccctacaaaacaatatgata

SEQ ID NO: 11029 - DNA, 23 bp, Artificial sequence  Reverse Primer
  Primer
taaacaaacattgtgttctttgc

SEQ ID NO: 11030 - DNA, 30 bp, Artificial sequence  Reverse Primer
  Primer
ttatttaagagtagataaatctaaacatga

SEQ ID NO: 11031 - DNA, 28 bp, Artificial sequence  Reverse Primer
  Primer
aatttatgagggtatctgtagaaagaat

SEQ ID NO: 11032 - DNA, 18 bp, Artificial sequence  Reverse Primer
  Primer
tggcctggactatgctgc

SEQ ID NO: 11033 - DNA, 18 bp, Artificial sequence  Reverse Primer
  Primer
ttccattgttgtctgccc

SEQ ID NO: 11034 - DNA, 20 bp, Artificial sequence  Reverse Primer
  Primer
caaaagtcttgggcaaatga

SEQ ID NO: 11035 - DNA, 23 bp, Artificial sequence  Reverse Primer
  Primer
ataaagtgagattcagcaacagc

SEQ ID NO: 11036 - DNA, 30 bp, Artificial sequence  Reverse Primer
  Primer
aagtagataaatatttaggcacactgagta

SEQ ID NO: 11037 - DNA, 21 bp, Artificial sequence  Reverse Primer
  Primer
ttggggattatttacrcaagg

SEQ ID NO: 11038 - DNA, 27 bp, Artificial sequence  Reverse Primer
  Primer
ttaaaaataagtacatggaagcaattc

SEQ ID NO: 11039 - DNA, 28 bp, Artificial sequence  Reverse Primer
  Primer
aaaatattagcatctraggaaatattcc

SEQ ID NO: 11040 - DNA, 26 bp, Artificial sequence  Reverse Primer
  Primer
ttttaatcaacaggatatatgcacat

SEQ ID NO: 11041 - DNA, 28 bp, Artificial sequence  Reverse Primer
  Primer
aagtttttctctaatactgacataaggg

SEQ ID NO: 11042 - DNA, 20 bp, Artificial sequence  Reverse Primer
  Primer
tgcatgaataaaagcccaat

SEQ ID NO: 11043 - DNA, 21 bp, Artificial sequence  Reverse Primer
  Primer
acaagcttgcaactttacctg

SEQ ID NO: 11044 - DNA, 26 bp, Artificial sequence  Reverse Primer
  Primer
tataatttcttcttgctatctccaag

SEQ ID NO: 11045 - DNA, 24 bp, Artificial sequence  Reverse Primer
  Primer
ctctagacagtgaaagtgcacagt

SEQ ID NO: 11046 - DNA, 29 bp, Artificial sequence  Reverse Primer
  Primer
ttactttatcttctaaaatgaaagaggag

SEQ ID NO: 11047 - DNA, 23 bp, Artificial sequence  Reverse Primer
  Primer
acaagaatccaaagacactttga

SEQ ID NO: 11048 - DNA, 26 bp, Artificial sequence  Reverse Primer
  Primer
agagatttctgttcagaatctaccta

SEQ ID NO: 11049 - DNA, 28 bp, Artificial sequence  Reverse Primer
  Primer
gacttcatgaaactaaaaattaaagttg

SEQ ID NO: 11050 - DNA, 24 bp, Artificial sequence  Reverse Primer
  Primer
gggtaagtgaaaggagaaaatatc

SEQ ID NO: 11051 - DNA, 22 bp, Artificial sequence  Reverse Primer
  Primer
tggaaaccttctgcttcattat

SEQ ID NO: 11052 - DNA, 22 bp, Artificial sequence  Reverse Primer
  Primer
attttcccacagcaaaattagg

SEQ ID NO: 11053 - DNA, 21 bp, Artificial sequence  Reverse Primer
  Primer
tttgctatttctgagatgccc

SEQ ID NO: 11054 - DNA, 28 bp, Artificial sequence  Reverse Primer
  Primer
attttatgtttttctacctgttacacct

SEQ ID NO: 11055 - DNA, 18 bp, Artificial sequence  Reverse Primer
  Primer
actgtcccagggaaagga

SEQ ID NO: 11056 - DNA, 22 bp, Artificial sequence  Reverse Primer
  Primer
gtcactgatttctgagtcatgc

SEQ ID NO: 11057 - DNA, 20 bp, Artificial sequence  Reverse Primer
  Primer
ctgaagggactaaatctgtg

SEQ ID NO: 11058 - DNA, 28 bp, Artificial sequence  Reverse Primer
  Primer
taaagtgagaaaataaaagaggataagg

SEQ ID NO: 11059 - DNA, 26 bp, Artificial sequence  Reverse Primer
  Primer
ttctctgtaaacttgaaataaacagc

SEQ ID NO: 11060 - DNA, 23 bp, Artificial sequence  Reverse Primer
  Primer
acaggttcttactttgacgtcct

SEQ ID NO: 11061 - DNA, 18 bp, Artificial sequence  Reverse Primer
  Primer
cagcctgaggaccaaggc

SEQ ID NO: 11062 - DNA, 19 bp, Artificial sequence  Reverse Primer
  Primer
acagagatgtggaggagcg

SEQ ID NO: 11063 - DNA, 21 bp, Artificial sequence  Reverse Primer
  Primer
aagacttgggtgagaaggaaa

SEQ ID NO: 11064 - DNA, 28 bp, Artificial sequence  Reverse Primer
  Primer
agttacaatcaggtgatatttatattcg

SEQ ID NO: 11065 - DNA, 18 bp, Artificial sequence  Reverse Primer
  Primer
acatgtgaacagccccac

SEQ ID NO: 11066 - DNA, 22 bp, Artificial sequence  Reverse Primer
  Primer
tatgcatttgacagatgctttc

SEQ ID NO: 11067 - DNA, 19 bp, Artificial sequence  Reverse Primer
  Primer
ttcctcgttctcatccacg

SEQ ID NO: 11068 - DNA, 19 bp, Artificial sequence  Reverse Primer
  Primer
aatgaggggcaaacactgt

SEQ ID NO: 11069 - DNA, 18 bp, Artificial sequence  Reverse Primer
  Primer
agagagggtaaggggcca

SEQ ID NO: 11070 - DNA, 18 bp, Artificial sequence  Reverse Primer
  Primer
aggamatctgtgcaggcg

SEQ ID NO: 11071 - DNA, 24 bp, Artificial sequence  Reverse Primer
  Primer
taagcgaattactttttacttggc

SEQ ID NO: 11072 - DNA, 21 bp, Artificial sequence  Reverse Primer
  Primer
tttggatgtccatgttttctg

SEQ ID NO: 11073 - DNA, 29 bp, Artificial sequence  Reverse Primer
  Primer
actcagctatactccagtacaaaataatt

SEQ ID NO: 11074 - DNA, 21 bp, Artificial sequence  Reverse Primer
  Primer
tttacatcagacggttgtgag

SEQ ID NO: 11075 - DNA, 23 bp, Artificial sequence  Reverse Primer
  Primer
ccatgaaactagaaccagtgaat

SEQ ID NO: 11076 - DNA, 25 bp, Artificial sequence  Reverse Primer
  Primer
ctccattcagtctgtttagatatgc

SEQ ID NO: 11077 - DNA, 26 bp, Artificial sequence  Reverse Primer
  Primer
tataaatgacaaaaagctgaatgttc

SEQ ID NO: 11078 - DNA, 21 bp, Artificial sequence  Reverse Primer
  Primer
gagtcttcttgacccaggaat

SEQ ID NO: 11079 - DNA, 22 bp, Artificial sequence  Reverse Primer
  Primer
cgttagagtctggcagattttg

SEQ ID NO: 11080 - DNA, 26 bp, Artificial sequence  Reverse Primer
  Primer
ttttcttctcagtaacactcaaagtg

SEQ ID NO: 11081 - DNA, 22 bp, Artificial sequence  Reverse Primer
  Primer
aattccttctatttggacagca

SEQ ID NO: 11082 - DNA, 28 bp, Artificial sequence  Reverse Primer
  Primer
gaagattcctaagttatttgtcaaaact

SEQ ID NO: 11083 - DNA, 21 bp, Artificial sequence  Reverse Primer
  Primer
taaagcttagggccttgtttg

SEQ ID NO: 11084 - DNA, 29 bp, Artificial sequence  Reverse Primer
  Primer
aaattagtataatatgttccctgaagaag

SEQ ID NO: 11085 - DNA, 26 bp, Artificial sequence  Reverse Primer
  Primer
ttcttaccaagtaggtgaacatacag

SEQ ID NO: 11086 - DNA, 27 bp, Artificial sequence  Reverse Primer
  Primer
ataaagtacagcttcaaagaaaaacaa

SEQ ID NO: 11087 - DNA, 27 bp, Artificial sequence  Reverse Primer
  Primer
agtggttaaaaaatataggttcaaaca

SEQ ID NO: 11088 - DNA, 23 bp, Artificial sequence  Reverse Primer
  Primer
ttctacacaaggagaacagaagc

SEQ ID NO: 11089 - DNA, 28 bp, Artificial sequence  Reverse Primer
  Primer
atttatccaggtctaaaagaaataaagc

SEQ ID NO: 11090 - DNA, 25 bp, Artificial sequence  Reverse Primer
  Primer
ttgagagtgagcttcttaggaatag

SEQ ID NO: 11091 - DNA, 18 bp, Artificial sequence  Reverse Primer
  Primer
aacacaagccctgagcac

SEQ ID NO: 11092 - DNA, 26 bp, Artificial sequence  Reverse Primer
  Primer
ccttacattaacataaagcaaacaga

SEQ ID NO: 11093 - DNA, 20 bp, Artificial sequence  Reverse Primer
  Primer
tgtgcaaattcctcaacagc

SEQ ID NO: 11094 - DNA, 21 bp, Artificial sequence  Reverse Primer
  Primer
acagactgtctgctgtccatc

SEQ ID NO: 11095 - DNA, 18 bp, Artificial sequence  Reverse Primer
  Primer
gagagttgcagagccagg

SEQ ID NO: 11096 - DNA, 19 bp, Artificial sequence  Reverse Primer
  Primer
atcacacatgggtcaagcc

SEQ ID NO: 11097 - DNA, 21 bp, Artificial sequence  Reverse Primer
  Primer
attgcaatatttggcaatcag

SEQ ID NO: 11098 - DNA, 18 bp, Artificial sequence  Reverse Primer
  Primer
accctccgttcagcgcag

SEQ ID NO: 11099 - DNA, 25 bp, Artificial sequence  Reverse Primer
  Primer
tttagagcctataatgttttcaggc

SEQ ID NO: 11100 - DNA, 19 bp, Artificial sequence  Reverse Primer
  Primer
gacctgagggtggtctgag

SEQ ID NO: 11101 - DNA, 19 bp, Artificial sequence  Reverse Primer
  Primer
agccctgtcctaatgatgc

SEQ ID NO: 11102 - DNA, 21 bp, Artificial sequence  Reverse Primer
  Primer
accagtgaccatggtgctata

SEQ ID NO: 11103 - DNA, 25 bp, Artificial sequence  Reverse Primer
  Primer
tgctttctcttttttgactaatttg

SEQ ID NO: 11104 - DNA, 24 bp, Artificial sequence  Reverse Primer
  Primer
agttccttggtacgtcaaagtact

SEQ ID NO: 11105 - DNA, 25 bp, Artificial sequence  Reverse Primer
  Primer
atcagtaatttgtggctctagatga

SEQ ID NO: 11106 - DNA, 21 bp, Artificial sequence  Reverse Primer
  Primer
aaatatctgggcatcctacga

SEQ ID NO: 11107 - DNA, 30 bp, Artificial sequence  Reverse Primer
  Primer
gatatgactgagtgactaacattttctact

SEQ ID NO: 11108 - DNA, 30 bp, Artificial sequence  Reverse Primer
  Primer
tgtagtacactaaattttacagctttttag

SEQ ID NO: 11109 - DNA, 19 bp, Artificial sequence  Reverse Primer
  Primer
aaaaaccttcccaaatccc

SEQ ID NO: 11110 - DNA, 18 bp, Artificial sequence  Reverse Primer
  Primer
ttttggaggtggggtctg

SEQ ID NO: 11111 - DNA, 18 bp, Artificial sequence  Reverse Primer
  Primer
ttgggggacgctggcttc

SEQ ID NO: 11112 - DNA, 18 bp, Artificial sequence  Reverse Primer
  Primer
gcaggacgaggtcccaca

SEQ ID NO: 11113 - DNA, 23 bp, Artificial sequence  Reverse Primer
  Primer
ataattcatggatctttgaagcg

SEQ ID NO: 11114 - DNA, 20 bp, Artificial sequence  Reverse Primer
  Primer
aggatggagttggtgtcagg

SEQ ID NO: 11115 - DNA, 21 bp, Artificial sequence  Reverse Primer
  Primer
ttcgtgtctctttcctcttca

SEQ ID NO: 11116 - DNA, 28 bp, Artificial sequence  Reverse Primer
  Primer
ttgaataaagaacatacaaacatacaca

SEQ ID NO: 11117 - DNA, 28 bp, Artificial sequence  Reverse Primer
  Primer
attgatttatttttagacttsgtttagc

SEQ ID NO: 11118 - DNA, 26 bp, Artificial sequence  Reverse Primer
  Primer
tcacaaaaactaaatatctttcacgt

SEQ ID NO: 11119 - DNA, 18 bp, Artificial sequence  Reverse Primer
  Primer
tcaggcgggagcaaccag

SEQ ID NO: 11120 - DNA, 21 bp, Artificial sequence  Reverse Primer
  Primer
aacagcttgtccttccatagg

SEQ ID NO: 11121 - DNA, 19 bp, Artificial sequence  Reverse Primer
  Primer
tgccagtgagygtaaatgc

SEQ ID NO: 11122 - DNA, 22 bp, Artificial sequence  Reverse Primer
  Primer
ataatcagcaaactcctcctca

SEQ ID NO: 11123 - DNA, 20 bp, Artificial sequence  Reverse Primer
  Primer
agtgtatggcatctggaggt

SEQ ID NO: 11124 - DNA, 21 bp, Artificial sequence  Reverse Primer
  Primer
atctagcgctctacagcacac

SEQ ID NO: 11125 - DNA, 28 bp, Artificial sequence  Reverse Primer
  Primer
aaaatatcattggtagtttgataggaat

SEQ ID NO: 11126 - DNA, 21 bp, Artificial sequence  Reverse Primer
  Primer
ttgctactggtttttcagtcc

SEQ ID NO: 11127 - DNA, 25 bp, Artificial sequence  Reverse Primer
  Primer
attagatagactttcccaccatctt

SEQ ID NO: 11128 - DNA, 22 bp, Artificial sequence  Reverse Primer
  Primer
actgagcggctaatattgtcac

SEQ ID NO: 11129 - DNA, 22 bp, Artificial sequence  Reverse Primer
  Primer
aaatacgtaatcagcacttggc

SEQ ID NO: 11130 - DNA, 22 bp, Artificial sequence  Reverse Primer
  Primer
agagtgagcatgatccttcatt

SEQ ID NO: 11131 - DNA, 20 bp, Artificial sequence  Reverse Primer
  Primer
tttctcccaggagtgaaacc

SEQ ID NO: 11132 - DNA, 26 bp, Artificial sequence  Reverse Primer
  Primer
tgtgtgtttttagatttaaagcactt

SEQ ID NO: 11133 - DNA, 20 bp, Artificial sequence  Reverse Primer
  Primer
tttcccgagaaagctacaaa

SEQ ID NO: 11134 - DNA, 18 bp, Artificial sequence  Reverse Primer
  Primer
aatagtggtggggtccca

SEQ ID NO: 11135 - DNA, 18 bp, Artificial sequence  Reverse Primer
  Primer
gagtgcgctcgcagtgtg

SEQ ID NO: 11136 - DNA, 20 bp, Artificial sequence  Reverse Primer
  Primer
aagatgcaacacgaggaaga

SEQ ID NO: 11137 - DNA, 18 bp, Artificial sequence  Reverse Primer
  Primer
ttcccttgaaaatgggca

SEQ ID NO: 11138 - DNA, 18 bp, Artificial sequence  Reverse Primer
  Primer
ctcactaggggccgtagg

SEQ ID NO: 11139 - DNA, 18 bp, Artificial sequence  Reverse Primer
  Primer
tccaatgggcctggtaga

SEQ ID NO: 11140 - DNA, 29 bp, Artificial sequence  Reverse Primer
  Primer
tagaaacagattacagaggttagacctag

SEQ ID NO: 11141 - DNA, 20 bp, Artificial sequence  Reverse Primer
  Primer
attcatctttgcatcctcca

SEQ ID NO: 11142 - DNA, 20 bp, Artificial sequence  Reverse Primer
  Primer
cggacactcttcaggagaga

SEQ ID NO: 11143 - DNA, 19 bp, Artificial sequence  Reverse Primer
  Primer
aaagagacaggaggggagc

SEQ ID NO: 11144 - DNA, 19 bp, Artificial sequence  Reverse Primer
  Primer
ccatagtcagggaccgtct

SEQ ID NO: 11145 - DNA, 20 bp, Artificial sequence  Reverse Primer
  Primer
tgagaggcaggtctgtcact

SEQ ID NO: 11146 - DNA, 23 bp, Artificial sequence  Reverse Primer
  Primer
tttttctctaaattgtggaccct

SEQ ID NO: 11147 - DNA, 18 bp, Artificial sequence  Reverse Primer
  Primer
cccagaatctgtctgggg

SEQ ID NO: 11148 - DNA, 18 bp, Artificial sequence  Reverse Primer
  Primer
tctggggagcacatagga

SEQ ID NO: 11149 - DNA, 24 bp, Artificial sequence  Reverse Primer
  Primer
aaaagacaaaacaaacctgagaaa

SEQ ID NO: 11150 - DNA, 18 bp, Artificial sequence  Reverse Primer
  Primer
atcatccaagccaccaag

SEQ ID NO: 11151 - DNA, 21 bp, Artificial sequence  Reverse Primer
  Primer
ttcctaccctcagtctccaga

SEQ ID NO: 11152 - DNA, 22 bp, Artificial sequence  Reverse Primer
  Primer
ataatagcaacakcrgtcacga

SEQ ID NO: 11153 - DNA, 24 bp, Artificial sequence  Reverse Primer
  Primer
attagacggtttctgttctgtttg

SEQ ID NO: 11154 - DNA, 22 bp, Artificial sequence  Reverse Primer
  Primer
aaaagaaaaagtggaggacacc

SEQ ID NO: 11155 - DNA, 26 bp, Artificial sequence  Reverse Primer
  Primer
ggctacagtttaaaatctatcaaagc

SEQ ID NO: 11156 - DNA, 18 bp, Artificial sequence  Reverse Primer
  Primer
tggcgttgggactcatga

SEQ ID NO: 11157 - DNA, 18 bp, Artificial sequence  Reverse Primer
  Primer
tgcaagcctgaccctccc

SEQ ID NO: 11158 - DNA, 18 bp, Artificial sequence  Reverse Primer
  Primer
aacattgcaaatcctcgc

SEQ ID NO: 11159 - DNA, 24 bp, Artificial sequence  Reverse Primer
  Primer
aaacatgaaacatttctaccttcc

SEQ ID NO: 11160 - DNA, 25 bp, Artificial sequence  Reverse Primer
  Primer
agagtcttcctttcagctaagaaaa

SEQ ID NO: 11161 - DNA, 21 bp, Artificial sequence  Reverse Primer
  Primer
tttagagagcctcttctgcag

SEQ ID NO: 11162 - DNA, 21 bp, Artificial sequence  Reverse Primer
  Primer
cctgcagtcagctctactcag

SEQ ID NO: 11163 - DNA, 23 bp, Artificial sequence  Reverse Primer
  Primer
ctgaatgagagagcaytcacttt

SEQ ID NO: 11164 - DNA, 22 bp, Artificial sequence  Reverse Primer
  Primer
atttaagaaaacaggaggtggc

SEQ ID NO: 11165 - DNA, 25 bp, Artificial sequence  Reverse Primer
  Primer
aggctcttcyaatattttctttgtt

SEQ ID NO: 11166 - DNA, 24 bp, Artificial sequence  Reverse Primer
  Primer
tctataaaaagttttcccttccaa

SEQ ID NO: 11167 - DNA, 26 bp, Artificial sequence  Reverse Primer
  Primer
ttgtgcagtcaatttattttagtgtc

SEQ ID NO: 11168 - DNA, 20 bp, Artificial sequence  Reverse Primer
  Primer
cttcagcttctcccttcatc

SEQ ID NO: 11169 - DNA, 18 bp, Artificial sequence  Reverse Primer
  Primer
caggggtctgatttggga

SEQ ID NO: 11170 - DNA, 24 bp, Artificial sequence  Reverse Primer
  Primer
aataggagactgaagccatattcc

SEQ ID NO: 11171 - DNA, 27 bp, Artificial sequence  Reverse Primer
  Primer
atagaacatacttttttcccctaagtg

SEQ ID NO: 11172 - DNA, 27 bp, Artificial sequence  Reverse Primer
  Primer
attagcatttaattgtatgccatatct

SEQ ID NO: 11173 - DNA, 19 bp, Artificial sequence  Reverse Primer
  Primer
ccgacccctaacatcagtg

SEQ ID NO: 11174 - DNA, 21 bp, Artificial sequence  Reverse Primer
  Primer
tggagaaataaacattcctgg

SEQ ID NO: 11175 - DNA, 29 bp, Artificial sequence  Reverse Primer
  Primer
tatttaatatgagatcatcagctttactg

SEQ ID NO: 11176 - DNA, 24 bp, Artificial sequence  Reverse Primer
  Primer
tatggaatgaaaaacacaatcaca

SEQ ID NO: 11177 - DNA, 25 bp, Artificial sequence  Reverse Primer
  Primer
attgaacatatggcacttatttctg

SEQ ID NO: 11178 - DNA, 19 bp, Artificial sequence  Reverse Primer
  Primer
aagagaattcccactgggg

SEQ ID NO: 11179 - DNA, 21 bp, Artificial sequence  Reverse Primer
  Primer
atagatcaggtttgcccaaga

SEQ ID NO: 11180 - DNA, 21 bp, Artificial sequence  Reverse Primer
  Primer
ttggagacatcttgtccagac

SEQ ID NO: 11181 - DNA, 25 bp, Artificial sequence  Reverse Primer
  Primer
caggatatgaattttttttaaaggc

SEQ ID NO: 11182 - DNA, 19 bp, Artificial sequence  Reverse Primer
  Primer
acacttggagatggcacaa

SEQ ID NO: 11183 - DNA, 30 bp, Artificial sequence  Reverse Primer
  Primer
cactctaactatttttaggtatacactgca

SEQ ID NO: 11184 - DNA, 21 bp, Artificial sequence  Reverse Primer
  Primer
atacaggcatggcgtattttt

SEQ ID NO: 11185 - DNA, 24 bp, Artificial sequence  Reverse Primer
  Primer
ttctaaaaatccattcatctgtca

SEQ ID NO: 11186 - DNA, 19 bp, Artificial sequence  Reverse Primer
  Primer
agcatttttatgccgtgtg

SEQ ID NO: 11187 - DNA, 19 bp, Artificial sequence  Reverse Primer
  Primer
tatcrtgcatsgaacctgg

SEQ ID NO: 11188 - DNA, 24 bp, Artificial sequence  Reverse Primer
  Primer
cttgtttactcccagtttttgatc

SEQ ID NO: 11189 - DNA, 26 bp, Artificial sequence  Reverse Primer
  Primer
tttgttattaatcaaaatcttgaccc

SEQ ID NO: 11190 - DNA, 23 bp, Artificial sequence  Reverse Primer
  Primer
ataatcacattctcccaatgttg

SEQ ID NO: 11191 - DNA, 24 bp, Artificial sequence  Reverse Primer
  Primer
agatgaacttaagcagaatggatc

SEQ ID NO: 11192 - DNA, 23 bp, Artificial sequence  Reverse Primer
  Primer
taaaactctgaccgtgtttctcc

SEQ ID NO: 11193 - DNA, 29 bp, Artificial sequence  Reverse Primer
  Primer
tgtaatagtctgagttctgagtaaatcaa

SEQ ID NO: 11194 - DNA, 25 bp, Artificial sequence  Reverse Primer
  Primer
taagattctccttcttggactcttc

SEQ ID NO: 11195 - DNA, 20 bp, Artificial sequence  Reverse Primer
  Primer
catctttgggttcctgtcaa

SEQ ID NO: 11196 - DNA, 18 bp, Artificial sequence  Reverse Primer
  Primer
ttttgtgctcccgaagcc

SEQ ID NO: 11197 - DNA, 20 bp, Artificial sequence  Reverse Primer
  Primer
tatgtttctgggctggaatc

SEQ ID NO: 11198 - DNA, 29 bp, Artificial sequence  Reverse Primer
  Primer
atcgaaaactcagtagttatatctctttg

SEQ ID NO: 11199 - DNA, 30 bp, Artificial sequence  Reverse Primer
  Primer
agagaatattacctgtataacatagctctt

SEQ ID NO: 11200 - DNA, 28 bp, Artificial sequence  Reverse Primer
  Primer
ataaaagagcaacttagattttcatttc

SEQ ID NO: 11201 - DNA, 24 bp, Artificial sequence  Reverse Primer
  Primer
aaacactagctgtgaactgaaaaa

SEQ ID NO: 11202 - DNA, 23 bp, Artificial sequence  Reverse Primer
  Primer
taattgttcaatcctattcccac

SEQ ID NO: 11203 - DNA, 26 bp, Artificial sequence  Reverse Primer
  Primer
aaagttcattactttgttacttctgg

SEQ ID NO: 11204 - DNA, 24 bp, Artificial sequence  Reverse Primer
  Primer
aaagattaagaccaggaagatcaa

SEQ ID NO: 11205 - DNA, 30 bp, Artificial sequence  Reverse Primer; identical to SEQ ID NO: 10061
  Primer

SEQ ID NO: 11206 - DNA, 29 bp, Artificial sequence  Reverse Primer
  Primer
agcttaaagctcacataataatgaaatag

SEQ ID NO: 11207 - DNA, 30 bp, Artificial sequence  Reverse Primer
  Primer
attagtataaatcataaatagaattcctgg

SEQ ID NO: 11208 - DNA, 28 bp, Artificial sequence  Reverse Primer
  Primer
taactttacctaggctattttactttgc

SEQ ID NO: 11209 - DNA, 21 bp, Artificial sequence  Reverse Primer
  Primer
tgctttgtccagatgaaaaga

SEQ ID NO: 11210 - DNA, 26 bp, Artificial sequence  Reverse Primer
  Primer
gtataaaagaatcttcaagttttggg

SEQ ID NO: 11211 - DNA, 22 bp, Artificial sequence  Reverse Primer
  Primer
tcttacctgaaaatatcccttt

SEQ ID NO: 11212 - DNA, 22 bp, Artificial sequence  Reverse Primer
  Primer
tcacagaagtgagatacctgca

SEQ ID NO: 11213 - DNA, 21 bp, Artificial sequence  Reverse Primer
  Primer
ataacccttgccacctcttat

SEQ ID NO: 11214 - DNA, 22 bp, Artificial sequence  Reverse Primer
  Primer
agtttccacatctgtcaaatgg

SEQ ID NO: 11215 - DNA, 23 bp, Artificial sequence  Reverse Primer
  Primer
ttattgatagacacgcactgcta

SEQ ID NO: 11216 - DNA, 26 bp, Artificial sequence  Reverse Primer
  Primer
ttctttgcaagtaacagacaaaatat

SEQ ID NO: 11217 - DNA, 24 bp, Artificial sequence  Reverse Primer
  Primer
tgtttaatgtgtgccatttagttc

SEQ ID NO: 11218 - DNA, 23 bp, Artificial sequence  Reverse Primer
  Primer
ccactcagttgcttaagctagaa

SEQ ID NO: 11219 - DNA, 21 bp, Artificial sequence  Reverse Primer
  Primer
atggatctgcttttgatgtca

SEQ ID NO: 11220 - DNA, 24 bp, Artificial sequence  Reverse Primer
  Primer
tgttaggattattcaccatattgc

SEQ ID NO: 11221 - DNA, 30 bp, Artificial sequence  Reverse Primer
  Primer
tacaagtggataggtatactatgttaagag

SEQ ID NO: 11222 - DNA, 26 bp, Artificial sequence  Reverse Primer
  Primer
agaataaagagctccaaatatggtac

SEQ ID NO: 11223 - DNA, 26 bp, Artificial sequence  Reverse Primer
  Primer
actttgcactgagastttttattttt

SEQ ID NO: 11224 - DNA, 30 bp, Artificial sequence  Reverse Primer
  Primer
ctaaaacatagctcattcttatgtaaaata

SEQ ID NO: 11225 - DNA, 27 bp, Artificial sequence  Reverse Primer
  Primer
ttgtacattagacatcatccttgtaga

SEQ ID NO: 11226 - DNA, 24 bp, Artificial sequence  Reverse Primer
  Primer
ttcaaaactcaacatgatctgact

SEQ ID NO: 11227 - DNA, 20 bp, Artificial sequence  Reverse Primer
  Primer
tgtttgggacttttccatga

SEQ ID NO: 11228 - DNA, 21 bp, Artificial sequence  Reverse Primer
  Primer
attaaaaggcaattaggcagc

SEQ ID NO: 11229 - DNA, 28 bp, Artificial sequence  Reverse Primer
  Primer
aaatgaattgatactagaaatatttggg

SEQ ID NO: 11230 - DNA, 22 bp, Artificial sequence  Reverse Primer
  Primer
actttgttcctggtggtgtatc

SEQ ID NO: 11231 - DNA, 18 bp, Artificial sequence  Reverse Primer
  Primer
tgaaattgctgtggccat

SEQ ID NO: 11232 - DNA, 20 bp, Artificial sequence  Reverse Primer
  Primer
atataggatttgaacggcgg

SEQ ID NO: 11233 - DNA, 23 bp, Artificial sequence  Reverse Primer
  Primer
ttctaagcagtgcagattacagc

SEQ ID NO: 11234 - DNA, 19 bp, Artificial sequence  Reverse Primer
  Primer
aaacttctctgcaccctgc

SEQ ID NO: 11235 - DNA, 18 bp, Artificial sequence  Reverse Primer
  Primer
ttaaccactggaccgcca

SEQ ID NO: 11236 - DNA, 20 bp, Artificial sequence  Reverse Primer
  Primer
agacaggtccacagttcctg

SEQ ID NO: 11237 - DNA, 18 bp, Artificial sequence  Reverse Primer
  Primer
agccgcctccaggacaag

SEQ ID NO: 11238 - DNA, 24 bp, Artificial sequence  Reverse Primer
  Primer
tacaggtgaaaacagaagagttga

SEQ ID NO: 11239 - DNA, 27 bp, Artificial sequence  Reverse Primer
  Primer
atgtgtgcctactattttatatcttgc

SEQ ID NO: 11240 - DNA, 20 bp, Artificial sequence  Reverse Primer
  Primer
tttcatggtaacacagtgcc

SEQ ID NO: 11241 - DNA, 27 bp, Artificial sequence  Reverse Primer
  Primer
aaaatccagattactttagctttgttt

SEQ ID NO: 11242 - DNA, 21 bp, Artificial sequence  Reverse Primer
  Primer
aggagttctgtctccggtaaa

SEQ ID NO: 11243 - DNA, 26 bp, Artificial sequence  Reverse Primer
  Primer
ttcctacttagatcaggaaaacaact

SEQ ID NO: 11244 - DNA, 30 bp, Artificial sequence  Reverse Primer
  Primer
agagattttaatgtctatagtatgtgcata

SEQ ID NO: 11245 - DNA, 25 bp, Artificial sequence  Reverse Primer
  Primer
atttcagaaatatcaccaaagatga

SEQ ID NO: 11246 - DNA, 25 bp, Artificial sequence  Reverse Primer
  Primer
gaagatatgttgacactcaatgagg

SEQ ID NO: 11247 - DNA, 30 bp, Artificial sequence  Reverse Primer
  Primer
atgttatataaggatctaatgtttcaaacc

SEQ ID NO: 11248 - DNA, 30 bp, Artificial sequence  Reverse Primer
  Primer
gtaattatctataactactttcacttcata

SEQ ID NO: 11249 - DNA, 26 bp, Artificial sequence  Reverse Primer
  Primer
tttatgatacttcctcattayccaaa

SEQ ID NO: 11250 - DNA, 26 bp, Artificial sequence  Reverse Primer
  Primer
aaactattgctgaaaatgtatgtgaa

SEQ ID NO: 11251 - DNA, 19 bp, Artificial sequence  Reverse Primer
  Primer
gcagagctggagcttcatc

SEQ ID NO: 11252 - DNA, 25 bp, Artificial sequence  Reverse Primer
  Primer
attaccactttccctttaaacctta

SEQ ID NO: 11253 - DNA, 21 bp, Artificial sequence  Reverse Primer
  Primer
tttcacaagcaacaggaaaag

SEQ ID NO: 11254 - DNA, 28 bp, Artificial sequence  Reverse Primer
  Primer
attttaaaaatagtgaaacttgaactgc

SEQ ID NO: 11255 - DNA, 27 bp, Artificial sequence  Reverse Primer
  Primer
aattgttttttctttaactcagttcac

SEQ ID NO: 11256 - DNA, 24 bp, Artificial sequence  Reverse Primer
  Primer
agagggggaaaaaaawattactct

SEQ ID NO: 11257 - DNA, 20 bp, Artificial sequence  Reverse Primer
  Primer
ggcctttgagttttgagtgg

SEQ ID NO: 11258 - DNA, 25 bp, Artificial sequence  Reverse Primer
  Primer
acctcccaactaaaaccttaattta

SEQ ID NO: 11259 - DNA, 27 bp, Artificial sequence  Reverse Primer
  Primer
aatcaaagatagtttatgaggacaatg

SEQ ID NO: 11260 - DNA, 30 bp, Artificial sequence  Reverse Primer
  Primer
ttagtaccaagtattctctttataatgtca

SEQ ID NO: 11261 - DNA, 27 bp, Artificial sequence  Reverse Primer
  Primer
acacttattctttgtaaagytttcctc

SEQ ID NO: 11262 - DNA, 22 bp, Artificial sequence  Reverse Primer
  Primer
aagtattgcatggcataacttg

SEQ ID NO: 11263 - DNA, 21 bp, Artificial sequence  Reverse Primer
  Primer
aaatgtggctgaaaacctttc

SEQ ID NO: 11264 - DNA, 22 bp, Artificial sequence  Reverse Primer
  Primer
aaactattgtcttctcacccca

SEQ ID NO: 11265 - DNA, 26 bp, Artificial sequence  Reverse Primer
  Primer
agtttgagtacttaagcyagagcagt

SEQ ID NO: 11266 - DNA, 26 bp, Artificial sequence  Reverse Primer
  Primer
aaatgtatccagaaaatatgaattcc

SEQ ID NO: 11267 - DNA, 20 bp, Artificial sequence  Reverse Primer
  Primer
tattgaccttttcctctgcg

SEQ ID NO: 11268 - DNA, 20 bp, Artificial sequence  Reverse Primer
  Primer
tgcttctttgtatgcctggt

SEQ ID NO: 11269 - DNA, 28 bp, Artificial sequence  Reverse Primer
  Primer
aattatatggagaaatttagagtgtttg

SEQ ID NO: 11270 - DNA, 27 bp, Artificial sequence  Reverse Primer
  Primer
acttttccaataagagcttaaaaagtt

SEQ ID NO: 11271 - DNA, 22 bp, Artificial sequence  Reverse Primer
  Primer
tggttcatgagaaagtaagggt

SEQ ID NO: 11272 - DNA, 23 bp, Artificial sequence  Reverse Primer
  Primer
aacatgcctttgaaattctgtag

SEQ ID NO: 11273 - DNA, 30 bp, Artificial sequence  Reverse Primer
  Primer
ttatttcataattatgttccctaaactagg

SEQ ID NO: 11274 - DNA, 20 bp, Artificial sequence  Reverse Primer
  Primer
agctgcctatatttgctgca

SEQ ID NO: 11275 - DNA, 24 bp, Artificial sequence  Reverse Primer
  Primer
tacttaaacatctgcaaacacgtc

SEQ ID NO: 11276 - DNA, 26 bp, Artificial sequence  Reverse Primer
  Primer
tttgaataattactctcatttcctca

SEQ ID NO: 11277 - DNA, 24 bp, Artificial sequence  Reverse Primer
  Primer
tcycaagtcatgaataagtaacca

SEQ ID NO: 11278 - DNA, 27 bp, Artificial sequence  Reverse Primer
  Primer
ttagaaatgtccagttgactagttttt

SEQ ID NO: 11279 - DNA, 26 bp, Artificial sequence  Reverse Primer
  Primer
cagagcattactaagtgtcagatttt

SEQ ID NO: 11280 - DNA, 30 bp, Artificial sequence  Reverse Primer
  Primer
atgtaattaaatcttaggtatgtctttctc

SEQ ID NO: 11281 - DNA, 23 bp, Artificial sequence  Reverse Primer
  Primer
tgtgaggccagatatttgttatt

SEQ ID NO: 11282 - DNA, 22 bp, Artificial sequence  Reverse Primer
  Primer
tccaaagagtcatattcatgca

SEQ ID NO: 11283 - DNA, 22 bp, Artificial sequence  Reverse Primer
  Primer
acaagcttctctttagcaagca

SEQ ID NO: 11284 - DNA, 26 bp, Artificial sequence  Reverse Primer
  Primer
ttatttttagggatacatgtcttgac

SEQ ID NO: 11285 - DNA, 27 bp, Artificial sequence  Reverse Primer
  Primer
acagtcaatatcttgagaggataaaat

SEQ ID NO: 11286 - DNA, 27 bp, Artificial sequence  Reverse Primer
  Primer
accctgttcatattaattgattgtaga

SEQ ID NO: 11287 - DNA, 30 bp, Artificial sequence  Reverse Primer
  Primer
ctaaatacagatcaactatttttgataaca

SEQ ID NO: 11288 - DNA, 27 bp, Artificial sequence  Reverse Primer
  Primer
aaatacatggctactacttgaaaaaca

SEQ ID NO: 11289 - DNA, 23 bp, Artificial sequence  Reverse Primer
  Primer
tagctggtttctatctccacatc

SEQ ID NO: 11290 - DNA, 23 bp, Artificial sequence  Reverse Primer
  Primer
ttrttaaatgcttgcccttagtt

SEQ ID NO: 11291 - DNA, 24 bp, Artificial sequence  Reverse Primer
  Primer
ggaagtcaaactgggtataacaag

SEQ ID NO: 11292 - DNA, 30 bp, Artificial sequence  Reverse Primer
  Primer
atataaatacatatcttatgactttttcct

SEQ ID NO: 11293 - DNA, 22 bp, Artificial sequence  Reverse Primer
  Primer
aaagtgttctccccatcctact

SEQ ID NO: 11294 - DNA, 18 bp, Artificial sequence  Reverse Primer
  Primer
ttagtgaggacgggtgga

SEQ ID NO: 11295 - DNA, 20 bp, Artificial sequence  Reverse Primer
  Primer
accgaaaaaaatggtccagt

SEQ ID NO: 11296 - DNA, 22 bp, Artificial sequence  Reverse Primer
  Primer
actcagaagtccatcatccaaa

SEQ ID NO: 11297 - DNA, 20 bp, Artificial sequence  Reverse Primer
  Primer
ttgtctcccactgctttgtt

SEQ ID NO: 11298 - DNA, 19 bp, Artificial sequence  Reverse Primer
  Primer
aatctctgagccctcagcc

SEQ ID NO: 11299 - DNA, 21 bp, Artificial sequence  Reverse Primer
  Primer
agagctgagccttcaagatca

SEQ ID NO: 11300 - DNA, 19 bp, Artificial sequence  Reverse Primer
  Primer
aacttgcacggaccaaaat

SEQ ID NO: 11301 - DNA, 23 bp, Artificial sequence  Reverse Primer
  Primer
atctttaaaacgatgcaacaaca

SEQ ID NO: 11302 - DNA, 19 bp, Artificial sequence  Reverse Primer
  Primer
cccctcttccagtgtctcc

SEQ ID NO: 11303 - DNA, 20 bp, Artificial sequence  Reverse Primer
  Primer
tgttacctgcacagctagcc

SEQ ID NO: 11304 - DNA, 27 bp, Artificial sequence  Reverse Primer
  Primer
tactgtttttgaggatcaaagtatttt

SEQ ID NO: 11305 - DNA, 26 bp, Artificial sequence  Reverse Primer
  Primer
actctaatcagagtatcatctaggcc

SEQ ID NO: 11306 - DNA, 23 bp, Artificial sequence  Reverse Primer
  Primer
ggtgtcaatatacatgatgcatg

SEQ ID NO: 11307 - DNA, 27 bp, Artificial sequence  Reverse Primer
  Primer
agtattacctttttttaaacaaccaca

SEQ ID NO: 11308 - DNA, 25 bp, Artificial sequence  Reverse Primer
  Primer
tatttctgytgttgattgtaaatgg

SEQ ID NO: 11309 - DNA, 26 bp, Artificial sequence  Reverse Primer
  Primer
gaagtaaaatgtttgtaaatgttgca

SEQ ID NO: 11310 - DNA, 24 bp, Artificial sequence  Reverse Primer
  Primer
tgagaaccactttttttctctttg

SEQ ID NO: 11311 - DNA, 21 bp, Artificial sequence  Reverse Primer
  Primer
atcgaaaaccattcatttgtg

SEQ ID NO: 11312 - DNA, 24 bp, Artificial sequence  Reverse Primer
  Primer
aaactacatgggtgacagaaatct

SEQ ID NO: 11313 - DNA, 18 bp, Artificial sequence  Reverse Primer
  Primer
ataccaaaaccccgtgtg

SEQ ID NO: 11314 - DNA, 24 bp, Artificial sequence  Reverse Primer
  Primer
aatattatcaccaacaaaaagcac

SEQ ID NO: 11315 - DNA, 23 bp, Artificial sequence  Reverse Primer
  Primer
ttctgtgtgttttattgcaaacg

SEQ ID NO: 11316 - DNA, 18 bp, Artificial sequence  Reverse Primer
  Primer
caccccccagaatgaatc

SEQ ID NO: 11317 - DNA, 23 bp, Artificial sequence  Reverse Primer
  Primer
atcccaaatcttttgtagaagga

SEQ ID NO: 11318 - DNA, 21 bp, Artificial sequence  Reverse Primer
  Primer
atatggcctgcttgagagttg

SEQ ID NO: 11319 - DNA, 21 bp, Artificial sequence  Reverse Primer
  Primer
aaaacagtgcagccacttatg

SEQ ID NO: 11320 - DNA, 26 bp, Artificial sequence  Reverse Primer
  Primer
agagcttctctttgttctgatctaga

SEQ ID NO: 11321 - DNA, 23 bp, Artificial sequence  Reverse Primer
  Primer
tactraaaacacttcccttgacc

SEQ ID NO: 11322 - DNA, 22 bp, Artificial sequence  Reverse Primer
  Primer
tagccaatctttgataactggg

SEQ ID NO: 11323 - DNA, 18 bp, Artificial sequence  Reverse Primer
  Primer
cgagccgtgtgckccttt

SEQ ID NO: 11324 - DNA, 25 bp, Artificial sequence  Reverse Primer
  Primer
aatgaggcacatgtagaatagagaa

SEQ ID NO: 11325 - DNA, 18 bp, Artificial sequence  Reverse Primer
  Primer
aatggtattgggggccat

SEQ ID NO: 11326 - DNA, 19 bp, Artificial sequence  Reverse Primer
  Primer
ttactgattgggcaacagg

SEQ ID NO: 11327 - DNA, 24 bp, Artificial sequence  Reverse Primer
  Primer
aacaggatagctttcttggaatac

SEQ ID NO: 11328 - DNA, 18 bp, Artificial sequence  Reverse Primer
  Primer
agscagggaaggtgagtg

SEQ ID NO: 11329 - DNA, 30 bp, Artificial sequence  Reverse Primer
  Primer
tgagatattttaagaacaactaagtcagat

SEQ ID NO: 11330 - DNA, 24 bp, Artificial sequence  Reverse Primer
  Primer
aaagcatataattccagctgtttg

SEQ ID NO: 11331 - DNA, 19 bp, Artificial sequence  Reverse Primer
  Primer
atcaggcccatctgaaaca

SEQ ID NO: 11332 - DNA, 26 bp, Artificial sequence  Reverse Primer
  Primer
ctcatactgttcctattggtatctca

SEQ ID NO: 11333 - DNA, 18 bp, Artificial sequence  Reverse Primer
  Primer
tcttgagtccagccaccc

SEQ ID NO: 11334 - DNA, 22 bp, Artificial sequence  Reverse Primer
  Primer
tcttcagagacatttccatcct

SEQ ID NO: 11335 - DNA, 24 bp, Artificial sequence  Reverse Primer
  Primer
ttaaatccaacagctaaagacctc

SEQ ID NO: 11336 - DNA, 24 bp, Artificial sequence  Reverse Primer
  Primer
aattctagttggartcrtggtttc

SEQ ID NO: 11337 - DNA, 18 bp, Artificial sequence  Reverse Primer
  Primer
aggggatgtccacgagag

SEQ ID NO: 11338 - DNA, 19 bp, Artificial sequence  Reverse Primer
  Primer
tgatgaacctctcaggcag

SEQ ID NO: 11339 - DNA, 23 bp, Artificial sequence  Reverse Primer
  Primer
attagcatgaggcctagatttgt

SEQ ID NO: 11340 - DNA, 29 bp, Artificial sequence  Reverse Primer
  Primer
tgaaamtcatacttgaattttaactaagg

SEQ ID NO: 11341 - DNA, 28 bp, Artificial sequence  Reverse Primer
  Primer
agaaaaaaatcaatacaacatacacatg

SEQ ID NO: 11342 - DNA, 29 bp, Artificial sequence  Reverse Primer
  Primer
agattatatatacaaacctgatgtcacag

SEQ ID NO: 11343 - DNA, 27 bp, Artificial sequence  Reverse Primer
  Primer
accttcctaattagttctataacctgc

SEQ ID NO: 11344 - DNA, 28 bp, Artificial sequence  Reverse Primer
  Primer
tttatgtttatattcctaaacctatgcc

SEQ ID NO: 11345 - DNA, 28 bp, Artificial sequence  Reverse Primer
  Primer
tgagcaaagttaaacagttatttaaaca

SEQ ID NO: 11346 - DNA, 30 bp, Artificial sequence  Reverse Primer
  Primer
aataatctctaaatgtattgttacattcct

SEQ ID NO: 11347 - DNA, 18 bp, Artificial sequence  Reverse Primer
  Primer
cccagaagcatgccaagt

SEQ ID NO: 11348 - DNA, 24 bp, Artificial sequence  Reverse Primer
  Primer
tctattacaacagggaagggatag

SEQ ID NO: 11349 - DNA, 26 bp, Artificial sequence  Reverse Primer
  Primer
aaatcatmactcttttgaaatatgcc

SEQ ID NO: 11350 - DNA, 24 bp, Artificial sequence  Reverse Primer
  Primer
ttagcaattgagcaaattaacctt

SEQ ID NO: 11351 - DNA, 30 bp, Artificial sequence  Reverse Primer
  Primer
taaaatattatctacattcttgtatcagct

SEQ ID NO: 11352 - DNA, 21 bp, Artificial sequence  Reverse Primer
  Primer
tatttcatgacccctaaaggc

SEQ ID NO: 11353 - DNA, 25 bp, Artificial sequence  Reverse Primer
  Primer
tttccatactgtttactctgacctc

SEQ ID NO: 11354 - DNA, 24 bp, Artificial sequence  Reverse Primer
  Primer
tttaaaaagatttttctcaggagg

SEQ ID NO: 11355 - DNA, 22 bp, Artificial sequence  Reverse Primer
  Primer
ttatgctgcaaatagagctcag

SEQ ID NO: 11356 - DNA, 27 bp, Artificial sequence  Reverse Primer
  Primer
ataatattgtctctggaaaaattgcta

SEQ ID NO: 11357 - DNA, 24 bp, Artificial sequence  Reverse Primer
  Primer
aaatggaatttcctaatgtgtagc

SEQ ID NO: 11358 - DNA, 27 bp, Artificial sequence  Reverse Primer
  Primer
tatataggtgacaactgatagcaacaa

SEQ ID NO: 11359 - DNA, 28 bp, Artificial sequence  Reverse Primer
  Primer
tttagkattgactggtttgatgtatagt

SEQ ID NO: 11360 - DNA, 23 bp, Artificial sequence  Reverse Primer
  Primer
ataaagattttcccaaatggaaa

SEQ ID NO: 11361 - DNA, 29 bp, Artificial sequence  Reverse Primer
  Primer
aaactgtctactacaggtttaaaaaattc

SEQ ID NO: 11362 - DNA, 25 bp, Artificial sequence  Reverse Primer
  Primer
aatcaggttacatagaagttttgca

SEQ ID NO: 11363 - DNA, 19 bp, Artificial sequence  Reverse Primer
  Primer
aaagaaatcactgggctgg

SEQ ID NO: 11364 - DNA, 23 bp, Artificial sequence  Reverse Primer
  Primer
aaaactagaagcaacgaatgaga

SEQ ID NO: 11365 - DNA, 28 bp, Artificial sequence  Reverse Primer
  Primer
ttggtccatgaatatttgtttatatatg

SEQ ID NO: 11366 - DNA, 21 bp, Artificial sequence  Reverse Primer
  Primer
ttggtctgaaggcagagacta

SEQ ID NO: 11367 - DNA, 28 bp, Artificial sequence  Reverse Primer
  Primer
atatatgtcaattctagtctcccagttc

SEQ ID NO: 11368 - DNA, 28 bp, Artificial sequence  Reverse Primer
  Primer
ttttaaagaatatatagctattttgggc

SEQ ID NO: 11369 - DNA, 25 bp, Artificial sequence  Reverse Primer
  Primer
tatttcttcaactacagaaacccat

SEQ ID NO: 11370 - DNA, 26 bp, Artificial sequence  Reverse Primer
  Primer
tctcatgaacttaatttttttctgtg

SEQ ID NO: 11371 - DNA, 20 bp, Artificial sequence  Reverse Primer
  Primer
aagggaagagggttttgcta

SEQ ID NO: 11372 - DNA, 23 bp, Artificial sequence  Reverse Primer
  Primer
taaaattccataagctacatggc

SEQ ID NO: 11373 - DNA, 21 bp, Artificial sequence  Reverse Primer
  Primer
atgacccctctctaaaagctc

SEQ ID NO: 11374 - DNA, 20 bp, Artificial sequence  Reverse Primer
  Primer
accaccagaaactcgaacag

SEQ ID NO: 11375 - DNA, 20 bp, Artificial sequence  Reverse Primer
  Primer
ttgtacccactgaacccatg

SEQ ID NO: 11376 - DNA, 21 bp, Artificial sequence  Reverse Primer
  Primer
agcaacaagcacttacttcca

SEQ ID NO: 11377 - DNA, 20 bp, Artificial sequence  Reverse Primer
  Primer
tctgtccctcctaacagctg

SEQ ID NO: 11378 - DNA, 18 bp, Artificial sequence  Reverse Primer
  Primer
tgtgaccccctcgctgag

SEQ ID NO: 11379 - DNA, 23 bp, Artificial sequence  Reverse Primer
  Primer
ttctttcacctttacaaccatcc

SEQ ID NO: 11380 - DNA, 21 bp, Artificial sequence  Reverse Primer
  Primer
tatgagtgactgcctcaggtg

SEQ ID NO: 11381 - DNA, 20 bp, Artificial sequence  Reverse Primer
  Primer
cagactgcaaggtaatccca

SEQ ID NO: 11382 - DNA, 22 bp, Artificial sequence  Reverse Primer
  Primer
aaattcactctgcaggtctttc

SEQ ID NO: 11383 - DNA, 29 bp, Artificial sequence  Reverse Primer
  Primer
ataaacttgggtttataatatacactgct

SEQ ID NO: 11384 - DNA, 18 bp, Artificial sequence  Reverse Primer
  Primer
acctgccacagacaaggc

SEQ ID NO: 11385 - DNA, 22 bp, Artificial sequence  Reverse Primer
  Primer
aaagattattgagcaccaatgg

SEQ ID NO: 11386 - DNA, 25 bp, Artificial sequence  Reverse Primer
  Primer
atttgttcagtatcctttgagagag

SEQ ID NO: 11387 - DNA, 22 bp, Artificial sequence  Reverse Primer
  Primer
accatgaaggtaatggtcagaa

SEQ ID NO: 11388 - DNA, 18 bp, Artificial sequence  Reverse Primer
  Primer
taagactgggtgggggaa

SEQ ID NO: 11389 - DNA, 24 bp, Artificial sequence  Reverse Primer
  Primer
attttagtgttgaatggaatgctt

SEQ ID NO: 11390 - DNA, 18 bp, Artificial sequence  Reverse Primer
  Primer
ttgggaaggacagcgaag

SEQ ID NO: 11391 - DNA, 24 bp, Artificial sequence  Reverse Primer
  Primer
tttcctcacctgtaaaagaaaatg

SEQ ID NO: 11392 - DNA, 21 bp, Artificial sequence  Reverse Primer
  Primer
actagagaaaagcccrcagag

SEQ ID NO: 11393 - DNA, 29 bp, Artificial sequence  Reverse Primer
  Primer
tattgtagttaagacacaaaaccaataca

SEQ ID NO: 11394 - DNA, 28 bp, Artificial sequence  Reverse Primer
  Primer
tgtaattatgtcataaagcaatraactc

SEQ ID NO: 11395 - DNA, 27 bp, Artificial sequence  Reverse Primer
  Primer
taattgaacaacatactatgtagcagg

SEQ ID NO: 11396 - DNA, 23 bp, Artificial sequence  Reverse Primer
  Primer
aaccaataccaggaraagctaga

SEQ ID NO: 11397 - DNA, 29 bp, Artificial sequence  Reverse Primer
  Primer
ttgaggtggtaataaatatctacttatgg

SEQ ID NO: 11398 - DNA, 30 bp, Artificial sequence  Reverse Primer
  Primer
tatataaaatgagacagatgataactgtgt

SEQ ID NO: 11399 - DNA, 27 bp, Artificial sequence  Reverse Primer
  Primer
ttacttagmctttcccaaagttaaatt

SEQ ID NO: 11400 - DNA, 28 bp, Artificial sequence  Reverse Primer
  Primer
ttttcatacccagtaaaactgatattac

SEQ ID NO: 11401 - DNA, 20 bp, Artificial sequence  Reverse Primer
  Primer
tcaggattcaaccctctgag

SEQ ID NO: 11402 - DNA, 20 bp, Artificial sequence  Reverse Primer
  Primer
agatttgggtgcatcatctg

SEQ ID NO: 11403 - DNA, 26 bp, Artificial sequence  Reverse Primer
  Primer
agcctacagattagaaaggaaaaatt

SEQ ID NO: 11404 - DNA, 21 bp, Artificial sequence  Reverse Primer
  Primer
caaacattacttgccctcatt

SEQ ID NO: 11405 - DNA, 29 bp, Artificial sequence  Reverse Primer
  Primer
ttatacatactagaaatatcctgacaggg

SEQ ID NO: 11406 - DNA, 23 bp, Artificial sequence  Reverse Primer
  Primer
aaaatcttggatgactctgtttg

SEQ ID NO: 11407 - DNA, 30 bp, Artificial sequence  Reverse Primer
  Primer
atattaagcagtaatatgacttaagggtag

SEQ ID NO: 11408 - DNA, 26 bp, Artificial sequence  Reverse Primer
  Primer
ataaagtgactgtttaccatgaagac

SEQ ID NO: 11409 - DNA, 25 bp, Artificial sequence  Reverse Primer
  Primer
taaatctaaaaactaatgcagaccc

SEQ ID NO: 11410 - DNA, 29 bp, Artificial sequence  Reverse Primer
  Primer
aagaatctactgagcacatagaatatgta

SEQ ID NO: 11411 - DNA, 20 bp, Artificial sequence  Reverse Primer
  Primer
tttttgctggaggacaaagt

SEQ ID NO: 11412 - DNA, 27 bp, Artificial sequence  Reverse Primer
  Primer
gatattgtcttttgacatcctcttatg

SEQ ID NO: 11413 - DNA, 29 bp, Artificial sequence  Reverse Primer
  Primer
atttctagatctctattctcaaaacttca

SEQ ID NO: 11414 - DNA, 30 bp, Artificial sequence  Reverse Primer
  Primer
gttaaactactgaggtattttataatctta

SEQ ID NO: 11415 - DNA, 23 bp, Artificial sequence  Reverse Primer
  Primer
attgttacttcactttggctgag

SEQ ID NO: 11416 - DNA, 22 bp, Artificial sequence  Reverse Primer
  Primer
gttctgagtctcggagtctgac

SEQ ID NO: 11417 - DNA, 24 bp, Artificial sequence  Reverse Primer
  Primer
ttaactctgaattttcctcagtgg

SEQ ID NO: 11418 - DNA, 23 bp, Artificial sequence  Reverse Primer
  Primer
tcacactaagcagagattccact

SEQ ID NO: 11419 - DNA, 23 bp, Artificial sequence  Reverse Primer
  Primer
aaaaatatcttgaaaataccccc

SEQ ID NO: 11420 - DNA, 22 bp, Artificial sequence  Reverse Primer
  Primer
tgtgtctgttcagaatcattcc

SEQ ID NO: 11421 - DNA, 21 bp, Artificial sequence  Reverse Primer
  Primer
acagttcctagcacacaatgg

SEQ ID NO: 11422 - DNA, 18 bp, Artificial sequence  Reverse Primer
  Primer
tggcctggtaggaagtgg

SEQ ID NO: 11423 - DNA, 18 bp, Artificial sequence  Reverse Primer
  Primer
aagtcccagctccggctc

SEQ ID NO: 11424 - DNA, 18 bp, Artificial sequence  Reverse Primer
  Primer
aagaccaggccaggccac

SEQ ID NO: 11425 - DNA, 20 bp, Artificial sequence  Reverse Primer
  Primer
agcccaaacatgaagtaggc

SEQ ID NO: 11426 - DNA, 20 bp, Artificial sequence  Reverse Primer
  Primer
aggagggtgcctctttacag

SEQ ID NO: 11427 - DNA, 20 bp, Artificial sequence  Reverse Primer
  Primer
aggccaagaacagtcagttg

SEQ ID NO: 11428 - DNA, 27 bp, Artificial sequence  Reverse Primer
  Primer
attaactaacttaagcctcagtttcct

SEQ ID NO: 11429 - DNA, 19 bp, Artificial sequence  Reverse Primer
  Primer
tacctctctgccacacctg

SEQ ID NO: 11430 - DNA, 22 bp, Artificial sequence  Reverse Primer
  Primer
aacagaaagtttcagagtgggg

SEQ ID NO: 11431 - DNA, 23 bp, Artificial sequence  Reverse Primer
  Primer
tcctgtctcttttatctggaagg

SEQ ID NO: 11432 - DNA, 21 bp, Artificial sequence  Reverse Primer
  Primer
tttaccatgaccctctcctct

SEQ ID NO: 11433 - DNA, 25 bp, Artificial sequence  Reverse Primer
  Primer
aactgaactagaaaacaaacaaacg

SEQ ID NO: 11434 - DNA, 24 bp, Artificial sequence  Reverse Primer
  Primer
agactctgtagtcagaagcatcac

SEQ ID NO: 11435 - DNA, 23 bp, Artificial sequence  Reverse Primer
  Primer
aaggctggagtgagaagttagac

SEQ ID NO: 11436 - DNA, 21 bp, Artificial sequence  Reverse Primer
  Primer
ttctagccctggactacctca

SEQ ID NO: 11437 - DNA, 18 bp, Artificial sequence  Reverse Primer
  Primer
acagccaagcaggaggct

SEQ ID NO: 11438 - DNA, 22 bp, Artificial sequence  Reverse Primer
  Primer
tactaaaaagccagaaccctgg

SEQ ID NO: 11439 - DNA, 24 bp, Artificial sequence  Reverse Primer
  Primer
agataccaaaggaggactaaacac

SEQ ID NO: 11440 - DNA, 27 bp, Artificial sequence  Reverse Primer
  Primer
tttcatctcctagctatgactctaaac

SEQ ID NO: 11441 - DNA, 28 bp, Artificial sequence  Reverse Primer
  Primer
ttagcatataataggcacagatcatatt

SEQ ID NO: 11442 - DNA, 26 bp, Artificial sequence  Reverse Primer
  Primer
tgaaaaatgaagaaaacaagttagtg

SEQ ID NO: 11443 - DNA, 24 bp, Artificial sequence  Reverse Primer
  Primer
tttctagaagcaacttatccctca

SEQ ID NO: 11444 - DNA, 21 bp, Artificial sequence  Reverse Primer
  Primer
atttttccttcaatcctgtgg

SEQ ID NO: 11445 - DNA, 20 bp, Artificial sequence  Reverse Primer
  Primer
taccactagtgccatgtggg

SEQ ID NO: 11446 - DNA, 23 bp, Artificial sequence  Reverse Primer
  Primer
aaaagattatctccatattgggg

SEQ ID NO: 11447 - DNA, 26 bp, Artificial sequence  Reverse Primer
  Primer
ctcggtataagattgttaagtacctg

SEQ ID NO: 11448 - DNA, 18 bp, Artificial sequence  Reverse Primer
  Primer
agttgtgtgtgttgcggg

SEQ ID NO: 11449 - DNA, 25 bp, Artificial sequence  Reverse Primer
  Primer
tttgggacttagttcacttagaatg

SEQ ID NO: 11450 - DNA, 20 bp, Artificial sequence  Reverse Primer
  Primer
tagtgcagcaagaactgacg

SEQ ID NO: 11451 - DNA, 29 bp, Artificial sequence  Reverse Primer
  Primer
attgaatgagtctgttaagtagtgtagtg

SEQ ID NO: 11452 - DNA, 20 bp, Artificial sequence  Reverse Primer
  Primer
aggcaactagatcccacatg

SEQ ID NO: 11453 - DNA, 23 bp, Artificial sequence  Reverse Primer
  Primer
ccacaaaataacacattatccca

SEQ ID NO: 11454 - DNA, 20 bp, Artificial sequence  Reverse Primer
  Primer
acaacatctcctatggcctg

SEQ ID NO: 11455 - DNA, 18 bp, Artificial sequence  Reverse Primer
  Primer
ttgttcagaaagcgccag

SEQ ID NO: 11456 - DNA, 23 bp, Artificial sequence  Reverse Primer
  Primer
tctcaaacttgagcttcagaatc

SEQ ID NO: 11457 - DNA, 22 bp, Artificial sequence  Reverse Primer
  Primer
taggctttcactcaatatcccc

SEQ ID NO: 11458 - DNA, 21 bp, Artificial sequence  Reverse Primer
  Primer
gctcttctctcgttttgaacc

SEQ ID NO: 11459 - DNA, 22 bp, Artificial sequence  Reverse Primer
  Primer
tagtgggactgagaaggacaga

SEQ ID NO: 11460 - DNA, 23 bp, Artificial sequence  Reverse Primer
  Primer
ttctttcttgacctcacatctca

SEQ ID NO: 11461 - DNA, 28 bp, Artificial sequence  Reverse Primer
  Primer
taccgaattagacagagttatagacctt

SEQ ID NO: 11462 - DNA, 20 bp, Artificial sequence  Reverse Primer
  Primer
aaatggagacagaagggagc

SEQ ID NO: 11463 - DNA, 29 bp, Artificial sequence  Reverse Primer
  Primer
aataaaaatagactcacagagaacaaatg

SEQ ID NO: 11464 - DNA, 18 bp, Artificial sequence  Reverse Primer
  Primer
tggtccaggtgaagcagg

SEQ ID NO: 11465 - DNA, 26 bp, Artificial sequence  Reverse Primer
  Primer
aaaaagtgactttaagtttgtccatc

SEQ ID NO: 11466 - DNA, 24 bp, Artificial sequence  Reverse Primer
  Primer
ttctctgcatcttaatactcctcc

SEQ ID NO: 11467 - DNA, 23 bp, Artificial sequence  Reverse Primer
  Primer
taataataaacaagcccacgtga

SEQ ID NO: 11468 - DNA, 19 bp, Artificial sequence  Reverse Primer
  Primer
tgggacactgtcttcaggg

SEQ ID NO: 11469 - DNA, 20 bp, Artificial sequence  Reverse Primer
  Primer
tcttaatcccctctcccaca

SEQ ID NO: 11470 - DNA, 25 bp, Artificial sequence  Reverse Primer
  Primer
tttacttaagtaggtggtarcaggc

SEQ ID NO: 11471 - DNA, 19 bp, Artificial sequence  Reverse Primer
  Primer
cgtctaatgcacagcagtg

SEQ ID NO: 11472 - DNA, 20 bp, Artificial sequence  Reverse Primer
  Primer
aacagccaagaccaacaaaa

SEQ ID NO: 11473 - DNA, 20 bp, Artificial sequence  Reverse Primer
  Primer
cacccaagaagtccactcag

SEQ ID NO: 11474 - DNA, 19 bp, Artificial sequence  Reverse Primer
  Primer
tttttcgaagcccagatca

SEQ ID NO: 11475 - DNA, 20 bp, Artificial sequence  Reverse Primer
  Primer
gctgtgacaactcttgagcc

SEQ ID NO: 11476 - DNA, 23 bp, Artificial sequence  Reverse Primer
  Primer
tttaggctcttacattcccctaa

SEQ ID NO: 11477 - DNA, 23 bp, Artificial sequence  Reverse Primer
  Primer
ttttgctgtagtttcctatttgg

SEQ ID NO: 11478 - DNA, 22 bp, Artificial sequence  Reverse Primer
  Primer
ttcttaacacacaatgtgctgg

SEQ ID NO: 11479 - DNA, 24 bp, Artificial sequence  Reverse Primer
  Primer
attgtgtagaatttgggagtagga

SEQ ID NO: 11480 - DNA, 18 bp, Artificial sequence  Reverse Primer
  Primer
cattaacaggggacgggg

SEQ ID NO: 11481 - DNA, 20 bp, Artificial sequence  Reverse Primer
  Primer
aagacgatcacacagcacaa

SEQ ID NO: 11482 - DNA, 27 bp, Artificial sequence  Reverse Primer
  Primer
ttcctctaggaaaagttgaatattagg

SEQ ID NO: 11483 - DNA, 22 bp, Artificial sequence  Reverse Primer
  Primer
atatagcagttttcagggaggg

SEQ ID NO: 11484 - DNA, 22 bp, Artificial sequence  Reverse Primer
  Primer
ttgactgctttaatcttgctgg

SEQ ID NO: 11485 - DNA, 28 bp, Artificial sequence  Reverse Primer
  Primer
attctctcagaatgaacctttagttaat

SEQ ID NO: 11486 - DNA, 25 bp, Artificial sequence  Reverse Primer
  Primer
cttagaccactgattctcaaacttg

SEQ ID NO: 11487 - DNA, 25 bp, Artificial sequence  Reverse Primer
  Primer
cgtattagttctgtggctttattca

SEQ ID NO: 11488 - DNA, 18 bp, Artificial sequence  Reverse Primer
  Primer
acgagaaccagccgggtg

SEQ ID NO: 11489 - DNA, 25 bp, Artificial sequence  Reverse Primer
  Primer
taagaaagatctaggatgagcacag

SEQ ID NO: 11490 - DNA, 19 bp, Artificial sequence  Reverse Primer
  Primer
aaagacacagtgggggagg

SEQ ID NO: 11491 - DNA, 23 bp, Artificial sequence  Reverse Primer
  Primer
agagaataagagcagtagcaggg

SEQ ID NO: 11492 - DNA, 23 bp, Artificial sequence  Reverse Primer
  Primer
aaaagaagaagcagcaacagata

SEQ ID NO: 11493 - DNA, 26 bp, Artificial sequence  Reverse Primer
  Primer
accaacttactcttttctaaagcatc

SEQ ID NO: 11494 - DNA, 28 bp, Artificial sequence  Reverse Primer
  Primer
aagtaggataaagaaaaagtagaatccc

SEQ ID NO: 11495 - DNA, 27 bp, Artificial sequence  Reverse Primer
  Primer
aattaaaatgaaatttctaaccagagg

SEQ ID NO: 11496 - DNA, 26 bp, Artificial sequence  Reverse Primer
  Primer
aataaatagaagagcctcactgatca

SEQ ID NO: 11497 - DNA, 30 bp, Artificial sequence  Reverse Primer
  Primer
attaactaaactaagtactcaagtccaaaa

SEQ ID NO: 11498 - DNA, 18 bp, Artificial sequence  Reverse Primer
  Primer
tatttctggcgcagggtt

SEQ ID NO: 11499 - DNA, 25 bp, Artificial sequence  Reverse Primer
  Primer
gcttcctttactacattaaaatggc

SEQ ID NO: 11500 - DNA, 21 bp, Artificial sequence  Reverse Primer
  Primer
gatttcagtccttgtggacaa

SEQ ID NO: 11501 - DNA, 25 bp, Artificial sequence  Reverse Primer
  Primer
ttacttcttggattctaaaccttga

SEQ ID NO: 11502 - DNA, 22 bp, Artificial sequence  Reverse Primer
  Primer
atcgtctgcctttaaattttgg

SEQ ID NO: 11503 - DNA, 23 bp, Artificial sequence  Reverse Primer
  Primer
aaatgtacaggaggtaaggaggt

SEQ ID NO: 11504 - DNA, 24 bp, Artificial sequence  Reverse Primer
  Primer
ttgacagtctagattacaaaggca

SEQ ID NO: 11505 - DNA, 29 bp, Artificial sequence  Reverse Primer
  Primer
tttgacttttgtatctaatttctagaagg

SEQ ID NO: 11506 - DNA, 22 bp, Artificial sequence  Reverse Primer
  Primer
ttcacttgtctccctgatgtac

SEQ ID NO: 11507 - DNA, 29 bp, Artificial sequence  Reverse Primer
  Primer
gtaactactaccatacaccaaagtgataa

SEQ ID NO: 11508 - DNA, 26 bp, Artificial sequence  Reverse Primer
  Primer
aaactgaatacctagagactcacaag

SEQ ID NO: 11509 - DNA, 21 bp, Artificial sequence  Reverse Primer
  Primer
aaactgattgcaccgtagaaa

SEQ ID NO: 11510 - DNA, 30 bp, Artificial sequence  Reverse Primer
  Primer
cttttgagtaaagtgagttattttatwtct

SEQ ID NO: 11511 - DNA, 26 bp, Artificial sequence  Reverse Primer
  Primer
aaaaaaagacatgctgtactatttca

SEQ ID NO: 11512 - DNA, 26 bp, Artificial sequence  Reverse Primer
  Primer
yttctgataaatgagaaaatgtctgt

SEQ ID NO: 11513 - DNA, 28 bp, Artificial sequence  Reverse Primer
  Primer
tttatcaacataccctaactgtagtcat

SEQ ID NO: 11514 - DNA, 20 bp, Artificial sequence  Reverse Primer
  Primer
aatttgcatcatttgtccct

SEQ ID NO: 11515 - DNA, 20 bp, Artificial sequence  Reverse Primer
  Primer
aatggggagagttgaggaac

SEQ ID NO: 11516 - DNA, 20 bp, Artificial sequence  Reverse Primer
  Primer
caatcragttgtgtgtcgct

SEQ ID NO: 11517 - DNA, 28 bp, Artificial sequence  Reverse Primer
  Primer
aataaaaaataacctggatactctgttt

SEQ ID NO: 11518 - DNA, 19 bp, Artificial sequence  Reverse Primer
  Primer
atgcaaatgaccaaacctg

SEQ ID NO: 11519 - DNA, 24 bp, Artificial sequence  Reverse Primer
  Primer
ttgttctcgacgatagtaatttcc

SEQ ID NO: 11520 - DNA, 24 bp, Artificial sequence  Reverse Primer
  Primer
aaattcccaaaatactcttcaaca

SEQ ID NO: 11521 - DNA, 27 bp, Artificial sequence  Reverse Primer
  Primer
ataaaacccacttgtttagacagtaga

SEQ ID NO: 11522 - DNA, 22 bp, Artificial sequence  Reverse Primer
  Primer
ttttaaatcctaagccaaatcg

SEQ ID NO: 11523 - DNA, 20 bp, Artificial sequence  Reverse Primer
  Primer
tgctttctccatatggttcc

SEQ ID NO: 11524 - DNA, 25 bp, Artificial sequence  Reverse Primer
  Primer
aaaaaacaaaatttaccttctcagc

SEQ ID NO: 11525 - DNA, 21 bp, Artificial sequence  Reverse Primer
  Primer
aaggcaggaagcatagtgttt

SEQ ID NO: 11526 - DNA, 28 bp, Artificial sequence  Reverse Primer
  Primer
tgtattcttagccaaatgaaattaatag

SEQ ID NO: 11527 - DNA, 22 bp, Artificial sequence  Reverse Primer
  Primer
ctgtgggttgttaaagttcatg

SEQ ID NO: 11528 - DNA, 24 bp, Artificial sequence  Reverse Primer
  Primer
gagcttggtgagtttgctattatt

SEQ ID NO: 11529 - DNA, 19 bp, Artificial sequence  Reverse Primer
  Primer
aaaaaggtgatgcccaaga

SEQ ID NO: 11530 - DNA, 22 bp, Artificial sequence  Reverse Primer
  Primer
acaaacgtctgtctatcccact

SEQ ID NO: 11531 - DNA, 24 bp, Artificial sequence  Reverse Primer
  Primer
aaggcaactcatttaaaacttcaa

SEQ ID NO: 11532 - DNA, 18 bp, Artificial sequence  Reverse Primer
  Primer
tggtatgctcacgggcag

SEQ ID NO: 11533 - DNA, 23 bp, Artificial sequence  Reverse Primer
  Primer
ttcctccgtatttcrtctatcac

SEQ ID NO: 11534 - DNA, 30 bp, Artificial sequence  Reverse Primer
  Primer
attatgtaactggtattgtataggtgtctt

SEQ ID NO: 11535 - DNA, 27 bp, Artificial sequence  Reverse Primer
  Primer
ttatatgaacccagatttctatgaaac

SEQ ID NO: 11536 - DNA, 24 bp, Artificial sequence  Reverse Primer
  Primer
tttaagcaaagttgagtaacaccc

SEQ ID NO: 11537 - DNA, 26 bp, Artificial sequence  Reverse Primer
  Primer
tgtaatcagcaatttaattgtaacct

SEQ ID NO: 11538 - DNA, 20 bp, Artificial sequence  Reverse Primer
  Primer
acatttcatcccaagcagag

SEQ ID NO: 11539 - DNA, 20 bp, Artificial sequence  Reverse Primer
  Primer
tgaattcatgagrgggtgtg

SEQ ID NO: 11540 - DNA, 21 bp, Artificial sequence  Reverse Primer
  Primer
atgaagaaggaggctgttttg

SEQ ID NO: 11541 - DNA, 21 bp, Artificial sequence  Reverse Primer
  Primer
aggaccagtcaacaggatagc

SEQ ID NO: 11542 - DNA, 18 bp, Artificial sequence  Reverse Primer
  Primer
tgttcttcaccagctccc

SEQ ID NO: 11543 - DNA, 27 bp, Artificial sequence  Reverse Primer
  Primer
ttagtagcttgacttatagaatgaccc

SEQ ID NO: 11544 - DNA, 26 bp, Artificial sequence  Reverse Primer
  Primer
aagtttcatgtgttatcttgttgaag

SEQ ID NO: 11545 - DNA, 22 bp, Artificial sequence  Reverse Primer
  Primer
ttgcagtctgggaactatctct

SEQ ID NO: 11546 - DNA, 24 bp, Artificial sequence  Reverse Primer
  Primer
aaatttaagggagaaaaaaactgc

SEQ ID NO: 11547 - DNA, 24 bp, Artificial sequence  Reverse Primer
  Primer
acctcctatgaactaagagctgag

SEQ ID NO: 11548 - DNA, 18 bp, Artificial sequence  Reverse Primer
  Primer
aaccgcatgaggaacttg

SEQ ID NO: 11549 - DNA, 18 bp, Artificial sequence  Reverse Primer
  Primer
tggatcccttgagggctg

SEQ ID NO: 11550 - DNA, 19 bp, Artificial sequence  Reverse Primer
  Primer
cactgaccactgatggtgc

SEQ ID NO: 11551 - DNA, 21 bp, Artificial sequence  Reverse Primer
  Primer
ttatgtggtgtcccatcttcc

SEQ ID NO: 11552 - DNA, 21 bp, Artificial sequence  Reverse Primer
  Primer
tttcgacacttttgtgagatg

SEQ ID NO: 11553 - DNA, 24 bp, Artificial sequence  Reverse Primer
  Primer
ataattctcaggtgaattgaggaa

SEQ ID NO: 11554 - DNA, 19 bp, Artificial sequence  Reverse Primer
  Primer
tcgctctcctccacttctg

SEQ ID NO: 11555 - DNA, 28 bp, Artificial sequence  Reverse Primer
  Primer
ataattcacactgtttaacaactggtac

SEQ ID NO: 11556 - DNA, 23 bp, Artificial sequence  Reverse Primer
  Primer
aaagcataatgctaaatacccac

SEQ ID NO: 11557 - DNA, 20 bp, Artificial sequence  Reverse Primer
  Primer
agatggaagcccatattcca

SEQ ID NO: 11558 - DNA, 22 bp, Artificial sequence  Reverse Primer
  Primer
tttgagtagcaggattctcagg

SEQ ID NO: 11559 - DNA, 23 bp, Artificial sequence  Reverse Primer
  Primer
aagagtctgctgtatacaacccc

SEQ ID NO: 11560 - DNA, 20 bp, Artificial sequence  Reverse Primer
  Primer
atgtgtgtgcatttctgctg

SEQ ID NO: 11561 - DNA, 20 bp, Artificial sequence  Reverse Primer
  Primer
actgggcatatgtctgtggt

SEQ ID NO: 11562 - DNA, 18 bp, Artificial sequence  Reverse Primer
  Primer
ttcctgctgcagggctcc

SEQ ID NO: 11563 - DNA, 22 bp, Artificial sequence  Reverse Primer
  Primer
aatgaatgctggaattatcacc

SEQ ID NO: 11564 - DNA, 27 bp, Artificial sequence  Reverse Primer
  Primer
taaaaaagataaatcatggaaataccc

SEQ ID NO: 11565 - DNA, 20 bp, Artificial sequence  Reverse Primer
  Primer
aaaggcagctagtgttgctg

SEQ ID NO: 11566 - DNA, 28 bp, Artificial sequence  Reverse Primer
  Primer
atcactattaacatgtaaggttcagaga

SEQ ID NO: 11567 - DNA, 25 bp, Artificial sequence  Reverse Primer
  Primer
tttttcaggttataaaatagatggg

SEQ ID NO: 11568 - DNA, 18 bp, Artificial sequence  Reverse Primer
  Primer
accaccaccactcgcatg

SEQ ID NO: 11569 - DNA, 25 bp, Artificial sequence  Reverse Primer
  Primer
actgataattctcaggtgaattgag

SEQ ID NO: 11570 - DNA, 23 bp, Artificial sequence  Reverse Primer
  Primer
ttttttctgagaagacaaagtgg

SEQ ID NO: 11571 - DNA, 20 bp, Artificial sequence  Reverse Primer
  Primer
aagtgagcagggaaagtgaa

SEQ ID NO: 11572 - DNA, 20 bp, Artificial sequence  Reverse Primer
  Primer
aattcagaaggacgagtgcg

SEQ ID NO: 11573 - DNA, 28 bp, Artificial sequence  Reverse Primer
  Primer
taaaaggcaataattatcttcaatacac

SEQ ID NO: 11574 - DNA, 18 bp, Artificial sequence  Reverse Primer
  Primer
cctggcacaaactggctg

SEQ ID NO: 11575 - DNA, 19 bp, Artificial sequence  Reverse Primer
  Primer
attgcctctgtgacgatga

SEQ ID NO: 11576 - DNA, 22 bp, Artificial sequence  Reverse Primer
  Primer
aagcctgttaagcagaactttg

SEQ ID NO: 11577 - DNA, 18 bp, Artificial sequence  Reverse Primer
  Primer
cgctcctctcggttcctt

SEQ ID NO: 11578 - DNA, 30 bp, Artificial sequence  Reverse Primer
  Primer
agtttaaactgtattggttattaatgtgta

SEQ ID NO: 11579 - DNA, 23 bp, Artificial sequence  Reverse Primer
  Primer
aaagatgcaaggactaccaactc

SEQ ID NO: 11580 - DNA, 19 bp, Artificial sequence  Reverse Primer
  Primer
gtgctgaggggaaagaaga

SEQ ID NO: 11581 - DNA, 23 bp, Artificial sequence  Reverse Primer
  Primer
actcgcttaaggtcacagagtac

SEQ ID NO: 11582 - DNA, 18 bp, Artificial sequence  Reverse Primer
  Primer
catgggcaggaagccacc

SEQ ID NO: 11583 - DNA, 20 bp, Artificial sequence  Reverse Primer
  Primer
crgatcttgtgcttcacctt

SEQ ID NO: 11584 - DNA, 25 bp, Artificial sequence  Reverse Primer
  Primer
aatcaaagaagtgaaataaccttgc

SEQ ID NO: 11585 - DNA, 28 bp, Artificial sequence  Reverse Primer
  Primer
aataaaccacctcttaggaataaaatta

SEQ ID NO: 11586 - DNA, 18 bp, Artificial sequence  Reverse Primer
  Primer
ccagaaggcaccgtcaat

SEQ ID NO: 11587 - DNA, 24 bp, Artificial sequence  Reverse Primer
  Primer
tgaggtcagagtcagtcatactca

SEQ ID NO: 11588 - DNA, 22 bp, Artificial sequence  Reverse Primer
  Primer
aaggtgcttgttttatcacgtc

SEQ ID NO: 11589 - DNA, 18 bp, Artificial sequence  Reverse Primer
  Primer
tcctaaggcagggatgtg

SEQ ID NO: 11590 - DNA, 24 bp, Artificial sequence  Reverse Primer
  Primer
agtaaaaaggaagatcctgattca

SEQ ID NO: 11591 - DNA, 18 bp, Artificial sequence  Reverse Primer
  Primer
tacaggcaagcccaggac

SEQ ID NO: 11592 - DNA, 23 bp, Artificial sequence  Reverse Primer
  Primer
atggtattattcaatatgcccaa

SEQ ID NO: 11593 - DNA, 25 bp, Artificial sequence  Reverse Primer
  Primer
acataggtatactgatggctgattc

SEQ ID NO: 11594 - DNA, 28 bp, Artificial sequence  Reverse Primer
  Primer
agttctacaagagttttaccaattactg

SEQ ID NO: 11595 - DNA, 22 bp, Artificial sequence  Reverse Primer
  Primer
ttcccctgaagttatgattcac

SEQ ID NO: 11596 - DNA, 28 bp, Artificial sequence  Reverse Primer
  Primer
ttagatatgaaaaacgacagtgataatt

SEQ ID NO: 11597 - DNA, 23 bp, Artificial sequence  Reverse Primer
  Primer
ttatacaaagctgcctgtcaatt

SEQ ID NO: 11598 - DNA, 30 bp, Artificial sequence  Reverse Primer
  Primer
agttagtagtagtaaatctccatattgtta

SEQ ID NO: 11599 - DNA, 25 bp, Artificial sequence  Reverse Primer
  Primer
cagaaaaagattaatggaaacatca

SEQ ID NO: 11600 - DNA, 22 bp, Artificial sequence  Reverse Primer
  Primer
attcatggtattgtgcaacctc

SEQ ID NO: 11601 - DNA, 24 bp, Artificial sequence  Reverse Primer
  Primer
tattgggagtaagtttgttcttcc

SEQ ID NO: 11602 - DNA, 23 bp, Artificial sequence  Reverse Primer
  Primer
tcttttcagctcctagtgacaac

SEQ ID NO: 11603 - DNA, 30 bp, Artificial sequence  Reverse Primer
  Primer
tattaaatgagtctatatctcaggaactta

SEQ ID NO: 11604 - DNA, 23 bp, Artificial sequence  Reverse Primer
  Primer
aaaacgaagacccagtataggaa

SEQ ID NO: 11605 - DNA, 22 bp, Artificial sequence  Reverse Primer
  Primer
ccttttcacttacaactcggtc

SEQ ID NO: 11606 - DNA, 28 bp, Artificial sequence  Reverse Primer
  Primer
caactgtgttttataactctttctgaga

SEQ ID NO: 11607 - DNA, 27 bp, Artificial sequence  Reverse Primer
  Primer
cacaataggattttaatttcaatagga

SEQ ID NO: 11608 - DNA, 22 bp, Artificial sequence  Reverse Primer
  Primer
aatttcagtttgggatgatgaa

SEQ ID NO: 11609 - DNA, 25 bp, Artificial sequence  Reverse Primer
  Primer
actaagcaagttctgaaaccaatta

SEQ ID NO: 11610 - DNA, 30 bp, Artificial sequence  Reverse Primer
  Primer
ataagaagtaatatgtacaactctcagcag

SEQ ID NO: 11611 - DNA, 22 bp, Artificial sequence  Reverse Primer
  Primer
tatgtgtyagggtaggtgctct

SEQ ID NO: 11612 - DNA, 24 bp, Artificial sequence  Reverse Primer
  Primer
ttgacttttcacacctaatgatca

SEQ ID NO: 11613 - DNA, 26 bp, Artificial sequence  Reverse Primer
  Primer
aaacatagaaagaaaagttttccaag

SEQ ID NO: 11614 - DNA, 21 bp, Artificial sequence  Reverse Primer
  Primer
ggtgtgttacatccgaacaaa

SEQ ID NO: 11615 - DNA, 29 bp, Artificial sequence  Reverse Primer
  Primer
catyacatataatctatttttattgtggc

SEQ ID NO: 11616 - DNA, 27 bp, Artificial sequence  Reverse Primer
  Primer
tcacacacttcttcatatacttgagaa

SEQ ID NO: 11617 - DNA, 27 bp, Artificial sequence  Reverse Primer
  Primer
gggattgtatttataaaccattttctt

SEQ ID NO: 11618 - DNA, 23 bp, Artificial sequence  Reverse Primer
  Primer
taagctgtttgtgtgcactatgt

SEQ ID NO: 11619 - DNA, 28 bp, Artificial sequence  Reverse Primer
  Primer
taattttatttccacatttggtatactg

SEQ ID NO: 11620 - DNA, 30 bp, Artificial sequence  Reverse Primer
  Primer
taaataaggtctattcaaatctaataggta

SEQ ID NO: 11621 - DNA, 30 bp, Artificial sequence  Reverse Primer
  Primer
ttcttcatcagaatagagataataattaca

SEQ ID NO: 11622 - DNA, 26 bp, Artificial sequence  Reverse Primer
  Primer
tattcaatacttctgtctgagcaact

SEQ ID NO: 11623 - DNA, 18 bp, Artificial sequence  Reverse Primer
  Primer
tctcagtgattcggcagc

SEQ ID NO: 11624 - DNA, 25 bp, Artificial sequence  Reverse Primer
  Primer
agaaacaccatcaatgatatttttg

SEQ ID NO: 11625 - DNA, 19 bp, Artificial sequence  Reverse Primer
  Primer
actgggagggtaaggacag

SEQ ID NO: 11626 - DNA, 28 bp, Artificial sequence  Reverse Primer
  Primer
ttaggttgtactacaaagwaattcaggt

SEQ ID NO: 11627 - DNA, 25 bp, Artificial sequence  Reverse Primer
  Primer
aaaataaactccatgttgagatgtc

SEQ ID NO: 11628 - DNA, 21 bp, Artificial sequence  Reverse Primer
  Primer
tacacttcctttttgaccctg

SEQ ID NO: 11629 - DNA, 28 bp, Artificial sequence  Reverse Primer
  Primer
aagttcagtttgaggtactattacactg

SEQ ID NO: 11630 - DNA, 27 bp, Artificial sequence  Reverse Primer
  Primer
aactggtatatttaaccaaaatgaaga

SEQ ID NO: 11631 - DNA, 21 bp, Artificial sequence  Reverse Primer
  Primer
gtccctrtctgagtcctgtcc

SEQ ID NO: 11632 - DNA, 25 bp, Artificial sequence  Reverse Primer
  Primer
tagatcactttccctacacatcttt

SEQ ID NO: 11633 - DNA, 18 bp, Artificial sequence  Reverse Primer
  Primer
actggggctcagtggtca

SEQ ID NO: 11634 - DNA, 25 bp, Artificial sequence  Reverse Primer
  Primer
attakagatctgaacagctaatgca

SEQ ID NO: 11635 - DNA, 30 bp, Artificial sequence  Reverse Primer
  Primer
taagtagttagacagtttaagaagtgaaaa

SEQ ID NO: 11636 - DNA, 21 bp, Artificial sequence  Reverse Primer
  Primer
ttaatgaccagaagaaaggca

SEQ ID NO: 11637 - DNA, 22 bp, Artificial sequence  Reverse Primer
  Primer
ggtttcctggtgcatataaaag

SEQ ID NO: 11638 - DNA, 25 bp, Artificial sequence  Reverse Primer
  Primer
atattatctgacatatagccccctt

SEQ ID NO: 11639 - DNA, 30 bp, Artificial sequence  Reverse Primer
  Primer
catattcttttagagtatttttaggtttac

SEQ ID NO: 11640 - DNA, 28 bp, Artificial sequence  Reverse Primer
  Primer
ttaaatatcagacaaaattacattctgc

SEQ ID NO: 11641 - DNA, 26 bp, Artificial sequence  Reverse Primer
  Primer
ccatattacagatgaaaaaagttgag

SEQ ID NO: 11642 - DNA, 22 bp, Artificial sequence  Reverse Primer
  Primer
taagagcttggctgtacagagc

SEQ ID NO: 11643 - DNA, 27 bp, Artificial sequence  Reverse Primer
  Primer
aaagtagaataagatcatccacagttc

SEQ ID NO: 11644 - DNA, 19 bp, Artificial sequence  Reverse Primer
  Primer
gcttctgttgcagagcaca

SEQ ID NO: 11645 - DNA, 20 bp, Artificial sequence  Reverse Primer
  Primer
ttgaatgcatatccactggg

SEQ ID NO: 11646 - DNA, 22 bp, Artificial sequence  Reverse Primer
  Primer
taacccacaaaccctgtaagac

SEQ ID NO: 11647 - DNA, 24 bp, Artificial sequence  Reverse Primer
  Primer
tttaacaactggtacagcattgac

SEQ ID NO: 11648 - DNA, 18 bp, Artificial sequence  Reverse Primer
  Primer
tgccctgttgctctttgg

SEQ ID NO: 11649 - DNA, 23 bp, Artificial sequence  Reverse Primer
  Primer
agactctgaaggatgagtaaggg

SEQ ID NO: 11650 - DNA, 21 bp, Artificial sequence  Reverse Primer
  Primer
ttgttcatcccttgactgatc

SEQ ID NO: 11651 - DNA, 23 bp, Artificial sequence  Reverse Primer
  Primer
tatttctgcacttgggttagtcc

SEQ ID NO: 11652 - DNA, 25 bp, Artificial sequence  Reverse Primer
  Primer
ttttctccctttgttcttttctact

SEQ ID NO: 11653 - DNA, 18 bp, Artificial sequence  Reverse Primer
  Primer
taaacactggggagccga

SEQ ID NO: 11654 - DNA, 21 bp, Artificial sequence  Reverse Primer
  Primer
caatcagaggacactatgccc

SEQ ID NO: 11655 - DNA, 23 bp, Artificial sequence  Reverse Primer
  Primer
agcatcttcttagaagctttgga

SEQ ID NO: 11656 - DNA, 18 bp, Artificial sequence  Reverse Primer
  Primer
tggagmaayccccgctca

SEQ ID NO: 11657 - DNA, 22 bp, Artificial sequence  Reverse Primer
  Primer
agttcatrgggtcacaaagaca

SEQ ID NO: 11658 - DNA, 29 bp, Artificial sequence  Reverse Primer
  Primer
attattaaggttaagactgtaaggatgaa

SEQ ID NO: 11659 - DNA, 20 bp, Artificial sequence  Reverse Primer
  Primer
atcagattcacctgttgctg

SEQ ID NO: 11660 - DNA, 19 bp, Artificial sequence  Reverse Primer
  Primer
acttcagcctggcctaaca

SEQ ID NO: 11661 - DNA, 21 bp, Artificial sequence  Reverse Primer
  Primer
tgttctagcactcagttcgga

SEQ ID NO: 11662 - DNA, 22 bp, Artificial sequence  Reverse Primer
  Primer
taacaccagcatcattagctcc

SEQ ID NO: 11663 - DNA, 23 bp, Artificial sequence  Reverse Primer
  Primer
aaacttgaaatacttagggcagg

SEQ ID NO: 11664 - DNA, 21 bp, Artificial sequence  Reverse Primer
  Primer
gcaggcatatgctctgagtaa

SEQ ID NO: 11665 - DNA, 22 bp, Artificial sequence  Reverse Primer
  Primer
atacatctcatcatctggggat

SEQ ID NO: 11666 - DNA, 20 bp, Artificial sequence  Reverse Primer
  Primer
ttaactccacatcccacaca

SEQ ID NO: 11667 - DNA, 25 bp, Artificial sequence  Reverse Primer
  Primer
tccccatacataaatttaacatgat

SEQ ID NO: 11668 - DNA, 23 bp, Artificial sequence  Reverse Primer
  Primer
ctgatgctatggrctgaattatg

SEQ ID NO: 11669 - DNA, 21 bp, Artificial sequence  Reverse Primer
  Primer
tcagagagggtaaatggcttt

SEQ ID NO: 11670 - DNA, 18 bp, Artificial sequence  Reverse Primer
  Primer
gctgaaacagctggggtt

SEQ ID NO: 11671 - DNA, 21 bp, Artificial sequence  Reverse Primer
  Primer
ttactctgctgctatggcatc

SEQ ID NO: 11672 - DNA, 22 bp, Artificial sequence  Reverse Primer
  Primer
tccactcaggtagaccctaaag

SEQ ID NO: 11673 - DNA, 20 bp, Artificial sequence  Reverse Primer
  Primer
tggtccagctaatttcctcc

SEQ ID NO: 11674 - DNA, 20 bp, Artificial sequence  Reverse Primer
  Primer
attccaggtttggacattgg

SEQ ID NO: 11675 - DNA, 27 bp, Artificial sequence  Reverse Primer
  Primer
aagaatttattaggacaagaatggttc

SEQ ID NO: 11676 - DNA, 22 bp, Artificial sequence  Reverse Primer
  Primer
tttctcttgtcccttttcttcc

SEQ ID NO: 11677 - DNA, 22 bp, Artificial sequence  Reverse Primer
  Primer
taatccattaccaaggcctact

SEQ ID NO: 11678 - DNA, 22 bp, Artificial sequence  Reverse Primer
  Primer
aacttgacagtaaccgttcgtc

SEQ ID NO: 11679 - DNA, 22 bp, Artificial sequence  Reverse Primer
  Primer
atgagctgtgtgaccttatgtg

SEQ ID NO: 11680 - DNA, 23 bp, Artificial sequence  Reverse Primer
  Primer
aaaatcaaaccatgtaactccct

SEQ ID NO: 11681 - DNA, 27 bp, Artificial sequence  Reverse Primer
  Primer
ttattcatttagcaaacacttactgag

SEQ ID NO: 11682 - DNA, 19 bp, Artificial sequence  Reverse Primer
  Primer
tgtgggatgttaagtgccc

SEQ ID NO: 11683 - DNA, 19 bp, Artificial sequence  Reverse Primer
  Primer
tggcatgtggcagatttac

SEQ ID NO: 11684 - DNA, 18 bp, Artificial sequence  Reverse Primer
  Primer
ttcccaggcagccacagg

SEQ ID NO: 11685 - DNA, 18 bp, Artificial sequence  Reverse Primer
  Primer
tagttgcaacgagtgggg

SEQ ID NO: 11686 - DNA, 22 bp, Artificial sequence  Reverse Primer
  Primer
tgtttaagtgaatagcagggct

SEQ ID NO: 11687 - DNA, 24 bp, Artificial sequence  Reverse Primer
  Primer
taagttgtakccaactcttttgca

SEQ ID NO: 11688 - DNA, 21 bp, Artificial sequence  Reverse Primer
  Primer
tgaataataccagcagctcca

SEQ ID NO: 11689 - DNA, 22 bp, Artificial sequence  Reverse Primer
  Primer
cctgtgagacactcacatgttc

SEQ ID NO: 11690 - DNA, 20 bp, Artificial sequence  Reverse Primer
  Primer
aaacaccaaaatgttcaccg

SEQ ID NO: 11691 - DNA, 27 bp, Artificial sequence  Reverse Primer
  Primer
attaaaatggaatttcctaatgtgtag

SEQ ID NO: 11692 - DNA, 21 bp, Artificial sequence  Reverse Primer
  Primer
ttccaaaactacgctgaaaga

SEQ ID NO: 11693 - DNA, 25 bp, Artificial sequence  Reverse Primer
  Primer
ttctttcctttcttctaatgcttct

SEQ ID NO: 11694 - DNA, 24 bp, Artificial sequence  Reverse Primer
  Primer
tttcaaattggatctggaaataat

SEQ ID NO: 11695 - DNA, 24 bp, Artificial sequence  Reverse Primer
  Primer
taatgaaacgaaacaacacaaaac

SEQ ID NO: 11696 - DNA, 27 bp, Artificial sequence  Reverse Primer
  Primer
ttctttaagagaaatgtgaatacctca

SEQ ID NO: 11697 - DNA, 22 bp, Artificial sequence  Reverse Primer
  Primer
tttttctagctctttcaaggca

SEQ ID NO: 11698 - DNA, 29 bp, Artificial sequence  Reverse Primer
  Primer
atatcttaatagaagtttcttgtctgtgc

SEQ ID NO: 11699 - DNA, 18 bp, Artificial sequence  Reverse Primer
  Primer
ccctggctcccatgacag

SEQ ID NO: 11700 - DNA, 30 bp, Artificial sequence  Reverse Primer
  Primer
gtaatacatggctatacattttttaatgag

SEQ ID NO: 11701 - DNA, 26 bp, Artificial sequence  Reverse Primer
  Primer
aaatatcctttggtcttctctttacc

SEQ ID NO: 11702 - DNA, 25 bp, Artificial sequence  Reverse Primer
  Primer
ttaatgtatgcaggttgttaggatt

SEQ ID NO: 11703 - DNA, 22 bp, Artificial sequence  Reverse Primer
  Primer
cagagagagacacatgtaaggg

SEQ ID NO: 11704 - DNA, 28 bp, Artificial sequence  Reverse Primer
  Primer
agtgtcattgacctgaaaagactatata

SEQ ID NO: 11705 - DNA, 27 bp, Artificial sequence  Reverse Primer
  Primer
tacaacactgtattctttcctgttaca

SEQ ID NO: 11706 - DNA, 28 bp, Artificial sequence  Reverse Primer
  Primer
aaaaaaccttagtgattaattctcatgt

SEQ ID NO: 11707 - DNA, 29 bp, Artificial sequence  Reverse Primer
  Primer
agaatgatctttctaaaatgtagatctga

SEQ ID NO: 11708 - DNA, 27 bp, Artificial sequence  Reverse Primer
  Primer
atgtccatgtgaaagtatatcaaaatt

SEQ ID NO: 11709 - DNA, 21 bp, Artificial sequence  Reverse Primer
  Primer
ttttgaaatgggaaattgtgg

SEQ ID NO: 11710 - DNA, 23 bp, Artificial sequence  Reverse Primer
  Primer
tagtcatggttggattttcattc

SEQ ID NO: 11711 - DNA, 24 bp, Artificial sequence  Reverse Primer
  Primer
aaatggtgctattaccttaaccac

SEQ ID NO: 11712 - DNA, 18 bp, Artificial sequence  Reverse Primer
  Primer
tggggagaatyacaggca

SEQ ID NO: 11713 - DNA, 22 bp, Artificial sequence  Reverse Primer
  Primer
acaagatagaagcagaggctga

SEQ ID NO: 11714 - DNA, 25 bp, Artificial sequence  Reverse Primer
  Primer
taatatgtacaactctcagcagcat

SEQ ID NO: 11715 - DNA, 23 bp, Artificial sequence  Reverse Primer
  Primer
ttagactttctctttsctcgtgg

SEQ ID NO: 11716 - DNA, 29 bp, Artificial sequence  Reverse Primer
  Primer
gtatacatgtatcatttacctgttctctc

SEQ ID NO: 11717 - DNA, 26 bp, Artificial sequence  Reverse Primer
  Primer
gcattaattcagtgtttattgaatcc

SEQ ID NO: 11718 - DNA, 26 bp, Artificial sequence  Reverse Primer
  Primer
atatgctctgagtaagggaactagat

SEQ ID NO: 11719 - DNA, 23 bp, Artificial sequence  Reverse Primer
  Primer
gatcagcagataattatggagca

SEQ ID NO: 11720 - DNA, 25 bp, Artificial sequence  Reverse Primer
  Primer
attggtcttagaaatacttggacac

SEQ ID NO: 11721 - DNA, 28 bp, Artificial sequence  Reverse Primer
  Primer
ttctcttacattcttataactcactccc

SEQ ID NO: 11722 - DNA, 25 bp, Artificial sequence  Reverse Primer
  Primer
agcatttctgatctaattcaaaact

SEQ ID NO: 11723 - DNA, 22 bp, Artificial sequence  Reverse Primer
  Primer
actcctcagctcatcaggtaaa

SEQ ID NO: 11724 - DNA, 24 bp, Artificial sequence  Reverse Primer
  Primer
atttgggtagtcttgttctcattt

SEQ ID NO: 11725 - DNA, 24 bp, Artificial sequence  Reverse Primer
  Primer
aaggcaactcatttaaaacttcaa

SEQ ID NO: 11726 - DNA, 26 bp, Artificial sequence  Reverse Primer
  Primer
agtctcattctgtagaagtacaggtg

SEQ ID NO: 11727 - DNA, 27 bp, Artificial sequence  Reverse Primer
  Primer
tatcaaataatgctgacctactatcaa

SEQ ID NO: 11728 - DNA, 21 bp, Artificial sequence  Reverse Primer
  Primer
agtgtgagaggcactgactga

SEQ ID NO: 11729 - DNA, 24 bp, Artificial sequence  Reverse Primer
  Primer
agcratttatgcatatttgattca

SEQ ID NO: 11730 - DNA, 20 bp, Artificial sequence  Reverse Primer
  Primer
tttgttggtctatcctgggc

SEQ ID NO: 11731 - DNA, 28 bp, Artificial sequence  Reverse Primer
  Primer
tttaaaaaactcaaaaatgtagtgctac

SEQ ID NO: 11732 - DNA, 27 bp, Artificial sequence  Reverse Primer
  Primer
ttagaggaaaatattaaagacgtaacg

SEQ ID NO: 11733 - DNA, 24 bp, Artificial sequence  Reverse Primer
  Primer
attactccttaggatgtggtcaaa

SEQ ID NO: 11734 - DNA, 29 bp, Artificial sequence  Reverse Primer
  Primer
agtatttatttagcatttacaggaaagtg

SEQ ID NO: 11735 - DNA, 26 bp, Artificial sequence  Reverse Primer
  Primer
ataaggatccaagcaatcacttatat

SEQ ID NO: 11736 - DNA, 27 bp, Artificial sequence  Reverse Primer
  Primer
tagggaatgttctaatttcatttttac

SEQ ID NO: 11737 - DNA, 28 bp, Artificial sequence  Reverse Primer
  Primer
tgactaatttcttcataatgatttcttc

SEQ ID NO: 11738 - DNA, 21 bp, Artificial sequence  Reverse Primer
  Primer
atggaagcaacctaaataccc

SEQ ID NO: 11739 - DNA, 24 bp, Artificial sequence  Reverse Primer
  Primer
taaaaattrttttccctcaaagga

SEQ ID NO: 11740 - DNA, 20 bp, Artificial sequence  Reverse Primer
  Primer
attattgcttcygaatggca

SEQ ID NO: 11741 - DNA, 18 bp, Artificial sequence  Reverse Primer
  Primer
tgctgccaccctcctgca

SEQ ID NO: 11742 - DNA, 22 bp, Artificial sequence  Reverse Primer
  Primer
agatagaggtgactgcagagct

SEQ ID NO: 11743 - DNA, 19 bp, Artificial sequence  Reverse Primer
  Primer
ttggtgagaccacagatgc

SEQ ID NO: 11744 - DNA, 23 bp, Artificial sequence  Reverse Primer
  Primer
taagaagcttcgtctaatgcaca

SEQ ID NO: 11745 - DNA, 24 bp, Artificial sequence  Reverse Primer
  Primer
aaatatacctgaatcagctggact

SEQ ID NO: 11746 - DNA, 24 bp, Artificial sequence  Reverse Primer
  Primer
acttagcattacagaacccaatca

SEQ ID NO: 11747 - DNA, 19 bp, Artificial sequence  Reverse Primer
  Primer
tgaaggtgtacggatgcag

SEQ ID NO: 11748 - DNA, 20 bp, Artificial sequence  Reverse Primer
  Primer
ttcctactgctgctgctttc

SEQ ID NO: 11749 - DNA, 22 bp, Artificial sequence  Reverse Primer
  Primer
aaaagactgttttgaatggagg

SEQ ID NO: 11750 - DNA, 21 bp, Artificial sequence  Reverse Primer
  Primer
tttatgacaggccacagtttg

SEQ ID NO: 11751 - DNA, 20 bp, Artificial sequence  Reverse Primer
  Primer
ttaaagatcagcccacattg

SEQ ID NO: 11752 - DNA, 20 bp, Artificial sequence  Reverse Primer
  Primer
agtgaccaaaatgtgccttg

SEQ ID NO: 11753 - DNA, 19 bp, Artificial sequence  Reverse Primer
  Primer
aggacttyagcagcgatga

SEQ ID NO: 11754 - DNA, 21 bp, Artificial sequence  Reverse Primer
  Primer
tgacgtacactttgtccctgt

SEQ ID NO: 11755 - DNA, 22 bp, Artificial sequence  Reverse Primer
  Primer
atgtttggtctcaagtatccca

SEQ ID NO: 11756 - DNA, 22 bp, Artificial sequence  Reverse Primer
  Primer
atacaggggaggagataggttc

SEQ ID NO: 11757 - DNA, 20 bp, Artificial sequence  Reverse Primer
  Primer
acgagcattcctttctctca

SEQ ID NO: 11758 - DNA, 22 bp, Artificial sequence  Reverse Primer
  Primer
agttttgttccccctatcttgt

SEQ ID NO: 11759 - DNA, 21 bp, Artificial sequence  Reverse Primer
  Primer
tgccctgtgagttagagatcc

SEQ ID NO: 11760 - DNA, 18 bp, Artificial sequence  Reverse Primer
  Primer
aagaacagccctcgcttc

SEQ ID NO: 11761 - DNA, 18 bp, Artificial sequence  Reverse Primer
  Primer
gatttgaggagctgggct

SEQ ID NO: 11762 - DNA, 24 bp, Artificial sequence  Reverse Primer
  Primer
aggtaacagagtacaagcacacag

SEQ ID NO: 11763 - DNA, 18 bp, Artificial sequence  Reverse Primer
  Primer
tagagagcagccagcctg

SEQ ID NO: 11764 - DNA, 18 bp, Artificial sequence  Reverse Primer
  Primer
tttgcctggcaccaaaac

SEQ ID NO: 11765 - DNA, 21 bp, Artificial sequence  Reverse Primer
  Primer
atttatggcatccacgagtag

SEQ ID NO: 11766 - DNA, 22 bp, Artificial sequence  Reverse Primer
  Primer
ataggaggtcacgtgataccag

SEQ ID NO: 11767 - DNA, 18 bp, Artificial sequence  Reverse Primer
  Primer
ggcgattcccctactttg

SEQ ID NO: 11768 - DNA, 25 bp, Artificial sequence  Reverse Primer
  Primer
taataatgagactctcaggaaaggg

SEQ ID NO: 11769 - DNA, 24 bp, Artificial sequence  Reverse Primer
  Primer
aaaaaaagaagtgatctgagctct

SEQ ID NO: 11770 - DNA, 24 bp, Artificial sequence  Reverse Primer
  Primer
attttagtgttgaatggaatgctt

SEQ ID NO: 11771 - DNA, 21 bp, Artificial sequence  Reverse Primer
  Primer
aaaattctatgaagccagcag

SEQ ID NO: 11772 - DNA, 18 bp, Artificial sequence  Reverse Primer
  Primer
ccaagagcagacgacatg

SEQ ID NO: 11773 - DNA, 22 bp, Artificial sequence  Reverse Primer
  Primer
ttttcagataaggaaagggaag

SEQ ID NO: 11774 - DNA, 22 bp, Artificial sequence  Reverse Primer
  Primer
caaataaagctctcctgactcg

SEQ ID NO: 11775 - DNA, 20 bp, Artificial sequence  Reverse Primer
  Primer
aactgagccaaagggaaaac

SEQ ID NO: 11776 - DNA, 26 bp, Artificial sequence  Reverse Primer
  Primer
atttcattttatttattgactgcctc

SEQ ID NO: 11777 - DNA, 19 bp, Artificial sequence  Reverse Primer
  Primer
ttttctctgggaggtcagc

SEQ ID NO: 11778 - DNA, 20 bp, Artificial sequence  Reverse Primer
  Primer
tatcaaatcccaaagtccca

SEQ ID NO: 11779 - DNA, 18 bp, Artificial sequence  Reverse Primer
  Primer
tctgcccttcctccattc

SEQ ID NO: 11780 - DNA, 19 bp, Artificial sequence  Reverse Primer
  Primer
ccatagcygggaagaaatt

SEQ ID NO: 11781 - DNA, 23 bp, Artificial sequence  Reverse Primer
  Primer
ttagtgggagacatttttgtttc

SEQ ID NO: 11782 - DNA, 27 bp, Artificial sequence  Reverse Primer
  Primer
tgcctcagattacacatctaagtataa

SEQ ID NO: 11783 - DNA, 23 bp, Artificial sequence  Reverse Primer
  Primer
aattccttgaaatttccttttga

SEQ ID NO: 11784 - DNA, 28 bp, Artificial sequence  Reverse Primer
  Primer
agggaactctataaatatttgtgttttt

SEQ ID NO: 11785 - DNA, 25 bp, Artificial sequence  Reverse Primer
  Primer
aactatcttcaattgcttctcaatg

SEQ ID NO: 11786 - DNA, 25 bp, Artificial sequence  Reverse Primer
  Primer
aaataaaagaacaagatgaagcctc

SEQ ID NO: 11787 - DNA, 19 bp, Artificial sequence  Reverse Primer
  Primer
aaaaatcagtggctagggc

SEQ ID NO: 11788 - DNA, 28 bp, Artificial sequence  Reverse Primer
  Primer
agacatcacatagaagaaggattaaatt

SEQ ID NO: 11789 - DNA, 18 bp, Artificial sequence  Reverse Primer
  Primer
aaccacttcccctcctgc

SEQ ID NO: 11790 - DNA, 22 bp, Artificial sequence  Reverse Primer
  Primer
cgaagccataatttctgatttt

SEQ ID NO: 11791 - DNA, 30 bp, Artificial sequence  Reverse Primer
  Primer
gaatctttacatgttaacatactttttaac

SEQ ID NO: 11792 - DNA, 19 bp, Artificial sequence  Reverse Primer
  Primer
tggaagcagggcaaatatt

SEQ ID NO: 11793 - DNA, 24 bp, Artificial sequence  Reverse Primer
  Primer
actgcttctgtggtttttacttct

SEQ ID NO: 11794 - DNA, 24 bp, Artificial sequence  Reverse Primer
  Primer
tttactacattaaaatggccacct

SEQ ID NO: 11795 - DNA, 29 bp, Artificial sequence  Reverse Primer
  Primer
ttaactagttcagtaacatgacagattca

SEQ ID NO: 11796 - DNA, 22 bp, Artificial sequence  Reverse Primer
  Primer
atttgccaaaggagtatgaaga

SEQ ID NO: 11797 - DNA, 29 bp, Artificial sequence  Reverse Primer
  Primer
ttaactagttcagtaacatgacagattca

SEQ ID NO: 11798 - DNA, 30 bp, Artificial sequence  Reverse Primer
  Primer
cctactactatctatgtacaactggtttgt

SEQ ID NO: 11799 - DNA, 25 bp, Artificial sequence  Reverse Primer
  Primer
atttttcaaaaacctaaaacacagg

SEQ ID NO: 11800 - DNA, 26 bp, Artificial sequence  Reverse Primer
  Primer
atccctgatattctatttttttatgg

SEQ ID NO: 11801 - DNA, 25 bp, Artificial sequence  Reverse Primer
  Primer
tgggaataagtttggtgattataaa

SEQ ID NO: 11802 - DNA, 23 bp, Artificial sequence  Reverse Primer
  Primer
tctagaatcagccactgacattt

SEQ ID NO: 11803 - DNA, 25 bp, Artificial sequence  Reverse Primer
  Primer
attcttaaagttatgggccttctag

SEQ ID NO: 11804 - DNA, 20 bp, Artificial sequence  Reverse Primer
  Primer
atttcattaggcccttgagc

SEQ ID NO: 11805 - DNA, 30 bp, Artificial sequence  Reverse Primer
  Primer
tactttgatatttacaacatctacaactga

SEQ ID NO: 11806 - DNA, 19 bp, Artificial sequence  Reverse Primer
  Primer
tatgaacacaggggtgcat

SEQ ID NO: 11807 - DNA, 25 bp, Artificial sequence  Reverse Primer
  Primer
tgtaaagttcttcaawtttttcctc

SEQ ID NO: 11808 - DNA, 25 bp, Artificial sequence  Reverse Primer
  Primer
atataagtgctgttttgccttacaa

SEQ ID NO: 11809 - DNA, 25 bp, Artificial sequence  Reverse Primer
  Primer
taaagtgttgacaaaaactcctctg

SEQ ID NO: 11810 - DNA, 23 bp, Artificial sequence  Reverse Primer
  Primer
tataaaaccccggagattcttag

SEQ ID NO: 11811 - DNA, 25 bp, Artificial sequence  Reverse Primer
  Primer
tttaactaaaaggccaataatgacc

SEQ ID NO: 11812 - DNA, 21 bp, Artificial sequence  Reverse Primer
  Primer
tatgattgaggtggttccaag

SEQ ID NO: 11813 - DNA, 19 bp, Artificial sequence  Reverse Primer
  Primer
ttctgaagccagggagatt

SEQ ID NO: 11814 - DNA, 24 bp, Artificial sequence  Reverse Primer
  Primer
atagagggcaataaagtgactcag

SEQ ID NO: 11815 - DNA, 18 bp, Artificial sequence  Reverse Primer
  Primer
ccgataggaggtccgaca

SEQ ID NO: 11816 - DNA, 24 bp, Artificial sequence  Reverse Primer
  Primer
gatctgtgtgatgaactwagcatg

SEQ ID NO: 11817 - DNA, 19 bp, Artificial sequence  Reverse Primer
  Primer
atctgtccctctcgtccag

SEQ ID NO: 11818 - DNA, 27 bp, Artificial sequence  Reverse Primer
  Primer
ccgatctaaattttacagtataagcaa

SEQ ID NO: 11819 - DNA, 23 bp, Artificial sequence  Reverse Primer
  Primer
tggtgtcaggataagttggttat

SEQ ID NO: 11820 - DNA, 28 bp, Artificial sequence  Reverse Primer
  Primer
ttaaagcaatagttttctatctgtgttt

SEQ ID NO: 11821 - DNA, 24 bp, Artificial sequence  Reverse Primer
  Primer
tccaaatgataaaaagaatgtgtg

SEQ ID NO: 11822 - DNA, 24 bp, Artificial sequence  Reverse Primer
  Primer
acactgtatttgagaaaacatccg

SEQ ID NO: 11823 - DNA, 27 bp, Artificial sequence  Reverse Primer
  Primer
tttttctagattccacatataagcatt

SEQ ID NO: 11824 - DNA, 23 bp, Artificial sequence  Reverse Primer
  Primer
atgatgcactatttactgggtga

SEQ ID NO: 11825 - DNA, 18 bp, Artificial sequence  Reverse Primer
  Primer
ttggacaatccccaatca

SEQ ID NO: 11826 - DNA, 25 bp, Artificial sequence  Reverse Primer
  Primer
ttgttcaatatcttgaaactctggt

SEQ ID NO: 11827 - DNA, 27 bp, Artificial sequence  Reverse Primer
  Primer
aatttcctaagtactgagtgtggtaca

SEQ ID NO: 11828 - DNA, 22 bp, Artificial sequence  Reverse Primer
  Primer
aaaaataaatgcaaagcgattg

SEQ ID NO: 11829 - DNA, 22 bp, Artificial sequence  Reverse Primer
  Primer
aatcattctggttaatgtgcct

SEQ ID NO: 11830 - DNA, 30 bp, Artificial sequence  Reverse Primer; identical to SEQ ID NO: 11791
  Primer

SEQ ID NO: 11831 - DNA, 22 bp, Artificial sequence  Reverse Primer
  Primer
tatttcatggttctgttttggg

SEQ ID NO: 11832 - DNA, 20 bp, Artificial sequence  Reverse Primer
  Primer
tgcgtatttggtgaatcagt

SEQ ID NO: 11833 - DNA, 26 bp, Artificial sequence  Reverse Primer
  Primer
aatccatagatcaatcaaaggagtac

SEQ ID NO: 11834 - DNA, 26 bp, Artificial sequence  Reverse Primer
  Primer
taaagtgaaagtgttttgttgttgtt

SEQ ID NO: 11835 - DNA, 18 bp, Artificial sequence  Reverse Primer
  Primer
ttcctgagtgatgctgcc

SEQ ID NO: 11836 - DNA, 18 bp, Artificial sequence  Reverse Primer
  Primer
atgcgatygccttcccat

SEQ ID NO: 11837 - DNA, 18 bp, Artificial sequence  Reverse Primer
  Primer
attcctgggacgtggtga

SEQ ID NO: 11838 - DNA, 22 bp, Artificial sequence  Reverse Primer
  Primer
aaatcaaagagagatgacgctg

SEQ ID NO: 11839 - DNA, 26 bp, Artificial sequence  Reverse Primer
  Primer
agatagtaactactagccacctgtgg

SEQ ID NO: 11840 - DNA, 20 bp, Artificial sequence  Reverse Primer
  Primer
attctgatgctatggggatg

SEQ ID NO: 11841 - DNA, 30 bp, Artificial sequence  Reverse Primer
  Primer
atatacatattctttttcacattcttctcc

SEQ ID NO: 11842 - DNA, 22 bp, Artificial sequence  Reverse Primer
  Primer
ccttcatcacttttccctattg

SEQ ID NO: 11843 - DNA, 24 bp, Artificial sequence  Reverse Primer
  Primer
aataagcttgaaggaagaaacctt

SEQ ID NO: 11844 - DNA, 29 bp, Artificial sequence  Reverse Primer
  Primer
aaaataatcctctagaaaggatgactagt

SEQ ID NO: 11845 - DNA, 23 bp, Artificial sequence  Reverse Primer
  Primer
taggtatcagattacctggatgg

SEQ ID NO: 11846 - DNA, 18 bp, Artificial sequence  Reverse Primer
  Primer
agattggagagggcacgt

SEQ ID NO: 11847 - DNA, 28 bp, Artificial sequence  Reverse Primer
  Primer
ttctctttgttctgatctagagtacatg

SEQ ID NO: 11848 - DNA, 18 bp, Artificial sequence  Reverse Primer
  Primer
agcaagcctgccrtggtc

SEQ ID NO: 11849 - DNA, 23 bp, Artificial sequence  Reverse Primer
  Primer
atgaataaaaacctcatcttccc

SEQ ID NO: 11850 - DNA, 19 bp, Artificial sequence  Reverse Primer
  Primer
agggccttggaataaacct

SEQ ID NO: 11851 - DNA, 22 bp, Artificial sequence  Reverse Primer
  Primer
atccagtaagactccatgctcc

SEQ ID NO: 11852 - DNA, 20 bp, Artificial sequence  Reverse Primer
  Primer
taaggttttgaggttcacgg

SEQ ID NO: 11853 - DNA, 20 bp, Artificial sequence  Reverse Primer
  Primer
attccaggtttggacattgg

SEQ ID NO: 11854 - DNA, 21 bp, Artificial sequence  Reverse Primer
  Primer
aaatccatgacttctgcaaaa

SEQ ID NO: 11855 - DNA, 24 bp, Artificial sequence  Reverse Primer
  Primer
aaacaggaaacaaattctctaagc

SEQ ID NO: 11856 - DNA, 22 bp, Artificial sequence  Reverse Primer
  Primer
ttagagatcctgggaactaggg

SEQ ID NO: 11857 - DNA, 20 bp, Artificial sequence  Reverse Primer
  Primer
agtggtggctttcttttcag

SEQ ID NO: 11858 - DNA, 19 bp, Artificial sequence  Reverse Primer
  Primer
aacaacctggggtaccatc

SEQ ID NO: 11859 - DNA, 19 bp, Artificial sequence  Reverse Primer
  Primer
ttccagcactccacagaca

SEQ ID NO: 11860 - DNA, 19 bp, Artificial sequence  Reverse Primer
  Primer
atttgccaggctctctgtg

SEQ ID NO: 11861 - DNA, 28 bp, Artificial sequence  Reverse Primer
  Primer
agtatattcagaccttctctgtctgttt

SEQ ID NO: 11862 - DNA, 20 bp, Artificial sequence  Reverse Primer
  Primer
atgaagctctactgccatcc

SEQ ID NO: 11863 - DNA, 21 bp, Artificial sequence  Reverse Primer
  Primer
ttaagatccaacaaccacagg

SEQ ID NO: 11864 - DNA, 22 bp, Artificial sequence  Reverse Primer
  Primer
ttaggctttgaggaatctcttc

SEQ ID NO: 11865 - DNA, 18 bp, Artificial sequence  Reverse Primer
  Primer
ctgagctggcccttcatt

SEQ ID NO: 11866 - DNA, 25 bp, Artificial sequence  Reverse Primer
  Primer
ttctacaaatgtcccaaagattatg

SEQ ID NO: 11867 - DNA, 27 bp, Artificial sequence  Reverse Primer
  Primer
aacacagtaagtggtaaagaatactgc

SEQ ID NO: 11868 - DNA, 21 bp, Artificial sequence  Reverse Primer
  Primer
ttggaaaccattgtcattttg

SEQ ID NO: 11869 - DNA, 21 bp, Artificial sequence  Reverse Primer
  Primer
attcctgacctgaaggatgtc

SEQ ID NO: 11870 - DNA, 20 bp, Artificial sequence  Reverse Primer
  Primer
atcctagtcagcaggaagcc

SEQ ID NO: 11871 - DNA, 24 bp, Artificial sequence  Reverse Primer
  Primer
tagacatttcccagataaagacag

SEQ ID NO: 11872 - DNA, 29 bp, Artificial sequence  Reverse Primer
  Primer
aaataattcatagagaccttgtacttgag

SEQ ID NO: 11873 - DNA, 23 bp, Artificial sequence  Reverse Primer
  Primer
tgtgaactgagttgtttcacact

SEQ ID NO: 11874 - DNA, 19 bp, Artificial sequence  Reverse Primer
  Primer
tgagctgagtgagctgtgg

SEQ ID NO: 11875 - DNA, 23 bp, Artificial sequence  Reverse Primer
  Primer
ttaaatttagtcttttgggcaca

SEQ ID NO: 11876 - DNA, 29 bp, Artificial sequence  Reverse Primer
  Primer
aacattgactawtatarcactgagttctg

SEQ ID NO: 11877 - DNA, 26 bp, Artificial sequence  Reverse Primer
  Primer
tataccacgtcacatgtaatgtaaga

SEQ ID NO: 11878 - DNA, 19 bp, Artificial sequence  Reverse Primer
  Primer
catgtgccaaaacgaagac

SEQ ID NO: 11879 - DNA, 20 bp, Artificial sequence  Reverse Primer
  Primer
tcatctttgggttcctgtca

SEQ ID NO: 11880 - DNA, 25 bp, Artificial sequence  Reverse Primer
  Primer
atattttgcaagttgaatgtctagc

SEQ ID NO: 11881 - DNA, 28 bp, Artificial sequence  Reverse Primer
  Primer
ttagagatcatacccttttgactagatt

SEQ ID NO: 11882 - DNA, 25 bp, Artificial sequence  Reverse Primer
  Primer
agttatcttacctgaacaatggttg

SEQ ID NO: 11883 - DNA, 21 bp, Artificial sequence  Reverse Primer
  Primer
aactgtacacaagccacctga

SEQ ID NO: 11884 - DNA, 26 bp, Artificial sequence  Reverse Primer
  Primer
aagtaatggctgttctctcaaatatt

SEQ ID NO: 11885 - DNA, 22 bp, Artificial sequence  Reverse Primer
  Primer
aaaattttatgtggggacaatc

SEQ ID NO: 11886 - DNA, 27 bp, Artificial sequence  Reverse Primer
  Primer
tactaacagtcatttaaaaccacagtg

SEQ ID NO: 11887 - DNA, 27 bp, Artificial sequence  Reverse Primer
  Primer
acagagcaattacttttcaacttagaa

SEQ ID NO: 11888 - DNA, 18 bp, Artificial sequence  Reverse Primer
  Primer
cagctgagtttcccatgc

SEQ ID NO: 11889 - DNA, 22 bp, Artificial sequence  Reverse Primer
  Primer
ttcaaccacagaacctcttttt

SEQ ID NO: 11890 - DNA, 21 bp, Artificial sequence  Reverse Primer
  Primer
tttgtgatatgaaggcatgag

SEQ ID NO: 11891 - DNA, 23 bp, Artificial sequence  Reverse Primer
  Primer
agtataagggatttcttcaggga

SEQ ID NO: 11892 - DNA, 23 bp, Artificial sequence  Reverse Primer
  Primer
tagatggcaattgagaaatgatg

SEQ ID NO: 11893 - DNA, 22 bp, Artificial sequence  Reverse Primer
  Primer
aaaaatcctgcagtgaataacg

SEQ ID NO: 11894 - DNA, 25 bp, Artificial sequence  Reverse Primer
  Primer
gatccctgattttcaaagaatttat

SEQ ID NO: 11895 - DNA, 22 bp, Artificial sequence  Reverse Primer
  Primer
tcacttaatttgacaggaaggg

SEQ ID NO: 11896 - DNA, 24 bp, Artificial sequence  Reverse Primer
  Primer
aagaagaacagttccaaactcaaa

SEQ ID NO: 11897 - DNA, 22 bp, Artificial sequence  Reverse Primer
  Primer
attgactcctgacctttgatca

SEQ ID NO: 11898 - DNA, 21 bp, Artificial sequence  Reverse Primer
  Primer
agattagcacttgcgatgagc

SEQ ID NO: 11899 - DNA, 23 bp, Artificial sequence  Reverse Primer
  Primer
tcaaatatttcttccttttccca

SEQ ID NO: 11900 - DNA, 26 bp, Artificial sequence  Reverse Primer
  Primer
taaggcttacaaaagaaacagttaca

SEQ ID NO: 11901 - DNA, 20 bp, Artificial sequence  Reverse Primer
  Primer
agggagacactgcaaaagag

SEQ ID NO: 11902 - DNA, 21 bp, Artificial sequence  Reverse Primer
  Primer
ccaagtcttcactcccatgta

SEQ ID NO: 11903 - DNA, 22 bp, Artificial sequence  Reverse Primer
  Primer
tatagacgcagaggacaaaacc

SEQ ID NO: 11904 - DNA, 23 bp, Artificial sequence  Reverse Primer
  Primer
agacaaaggacagtttgtcactc

SEQ ID NO: 11905 - DNA, 20 bp, Artificial sequence  Reverse Primer
  Primer
tagacgtcggcattgtttct

SEQ ID NO: 11906 - DNA, 25 bp, Artificial sequence  Reverse Primer
  Primer
tttattgaccacattcagtttacaa

SEQ ID NO: 11907 - DNA, 24 bp, Artificial sequence  Reverse Primer
  Primer
atyggaaaattttgtttaggaaac

SEQ ID NO: 11908 - DNA, 27 bp, Artificial sequence  Reverse Primer
  Primer
acacttcaggctacaggtatgtataat

SEQ ID NO: 11909 - DNA, 26 bp, Artificial sequence  Reverse Primer
  Primer
gaagcytgaattgataatgaacatat

SEQ ID NO: 11910 - DNA, 22 bp, Artificial sequence  Reverse Primer
  Primer
ttctgtatccttgcaaatttcc

SEQ ID NO: 11911 - DNA, 26 bp, Artificial sequence  Reverse Primer
  Primer
aatttaagttttcatcctttttcacc

SEQ ID NO: 11912 - DNA, 26 bp, Artificial sequence  Reverse Primer
  Primer
tttcttattgggttttttctctaaag

SEQ ID NO: 11913 - DNA, 20 bp, Artificial sequence  Reverse Primer
  Primer
tagcctcaccacagtcacct

SEQ ID NO: 11914 - DNA, 18 bp, Artificial sequence  Reverse Primer
  Primer
tcactggcttattggggg

SEQ ID NO: 11915 - DNA, 30 bp, Artificial sequence  Reverse Primer
  Primer
cttataaactgtatattttatgaatgtggg

SEQ ID NO: 11916 - DNA, 29 bp, Artificial sequence  Reverse Primer
  Primer
aaacattttagtrtgtaataatgagaagc

SEQ ID NO: 11917 - DNA, 23 bp, Artificial sequence  Reverse Primer
  Primer
tcatcttttcctaaagggtgatt

SEQ ID NO: 11918 - DNA, 19 bp, Artificial sequence  Reverse Primer
  Primer
acgggagccctcctggaat

SEQ ID NO: 11919 - DNA, 29 bp, Artificial sequence  Reverse Primer
  Primer
acagtacgataaattatattgctcttgtt

SEQ ID NO: 11920 - DNA, 30 bp, Artificial sequence  Reverse Primer
  Primer
tcatctataaaatggaaataagcatagtac

SEQ ID NO: 11921 - DNA, 28 bp, Artificial sequence  Reverse Primer
  Primer
tttcaatctaaacagaaaagtgatgtat

SEQ ID NO: 11922 - DNA, 18 bp, Artificial sequence  Reverse Primer
  Primer
gagcttcgatgaggtcgg

SEQ ID NO: 11923 - DNA, 22 bp, Artificial sequence  Reverse Primer
  Primer
ttgttggtaattcctttggaac

SEQ ID NO: 11924 - DNA, 23 bp, Artificial sequence  Reverse Primer
  Primer
agtcatttttccaaaacacaacc

SEQ ID NO: 11925 - DNA, 20 bp, Artificial sequence  Reverse Primer
  Primer
cgtaagggttggacaaacaa

SEQ ID NO: 11926 - DNA, 24 bp, Artificial sequence  Reverse Primer
  Primer
atataatatacacctggggaacgg

SEQ ID NO: 11927 - DNA, 20 bp, Artificial sequence  Reverse Primer
  Primer
aacaaggtgactgcccatag

SEQ ID NO: 11928 - DNA, 30 bp, Artificial sequence  Reverse Primer
  Primer
atgtgagactaacacattataaatcaacta

SEQ ID NO: 11929 - DNA, 30 bp, Artificial sequence  Reverse Primer
  Primer
atagtgattttactctactcataaaatggt

SEQ ID NO: 11930 - DNA, 30 bp, Artificial sequence  Reverse Primer
  Primer
tgatagttctaatctgataataacgactaa

SEQ ID NO: 11931 - DNA, 29 bp, Artificial sequence  Reverse Primer
  Primer
tagtaggcctaaatataactacagttgtg

SEQ ID NO: 11932 - DNA, 25 bp, Artificial sequence  Reverse Primer
  Primer
ttcacactcttcatattcttcatca

SEQ ID NO: 11933 - DNA, 26 bp, Artificial sequence  Reverse Primer
  Primer
tcaaatatcatccatatctctaaagg

SEQ ID NO: 11934 - DNA, 22 bp, Artificial sequence  Reverse Primer
  Primer
cttgtcatacccatrtgtgtgc

SEQ ID NO: 11935 - DNA, 21 bp, Artificial sequence  Reverse Primer
  Primer
taaattgatgtgggaatccct

SEQ ID NO: 11936 - DNA, 25 bp, Artificial sequence  Reverse Primer
  Primer
caggatatgaattttttttaaaggc

SEQ ID NO: 11937 - DNA, 27 bp, Artificial sequence  Reverse Primer
  Primer
aactgatataaacaggtttaggaacaa

SEQ ID NO: 11938 - DNA, 19 bp, Artificial sequence  Reverse Primer
  Primer
tccatggaaactgcagacc

SEQ ID NO: 11939 - DNA, 18 bp, Artificial sequence  Reverse Primer
  Primer
aagccgactccaggccca

SEQ ID NO: 11940 - DNA, 30 bp, Artificial sequence  Reverse Primer
  Primer
gttttagaatgtctttctgtttactaaatt

SEQ ID NO: 11941 - DNA, 26 bp, Artificial sequence  Reverse Primer
  Primer
gccctgagtatatttttgaactaatt

SEQ ID NO: 11942 - DNA, 24 bp, Artificial sequence  Reverse Primer
  Primer
gggtttttcatcccatttatattt

SEQ ID NO: 11943 - DNA, 28 bp, Artificial sequence  Reverse Primer
  Primer
taattgtatgctttaaagttttgactgt

SEQ ID NO: 11944 - DNA, 25 bp, Artificial sequence  Reverse Primer
  Primer
aatgcacatttatttacacagcttt

SEQ ID NO: 11945 - DNA, 24 bp, Artificial sequence  Reverse Primer
  Primer
aaagttcttacatgaattccacct

SEQ ID NO: 11946 - DNA, 25 bp, Artificial sequence  Reverse Primer
  Primer
atcatccaatatttatgcctgatta

SEQ ID NO: 11947 - DNA, 28 bp, Artificial sequence  Reverse Primer
  Primer
taaaaaagaaaactatagcatcatatgg

SEQ ID NO: 11948 - DNA, 19 bp, Artificial sequence  Reverse Primer
  Primer
aaatggagacctcaggtgg

SEQ ID NO: 11949 - DNA, 30 bp, Artificial sequence  Reverse Primer
  Primer
atttattgtaatactgtgaagaaactgtgt

SEQ ID NO: 11950 - DNA, 27 bp, Artificial sequence  Reverse Primer
  Primer
tttattctctatgaagatggactgagt

SEQ ID NO: 11951 - DNA, 30 bp, Artificial sequence  Reverse Primer
  Primer
aatataagtatatgcaagaatagggttata

SEQ ID NO: 11952 - DNA, 30 bp, Artificial sequence  Reverse Primer
  Primer
tttatcttaactaaatcatagatacagtag

SEQ ID NO: 11953 - DNA, 20 bp, Artificial sequence  Reverse Primer
  Primer
agattcccttttgggttttc

SEQ ID NO: 11954 - DNA, 26 bp, Artificial sequence  Reverse Primer
  Primer
gataagcaaagtctggaaataaataa

SEQ ID NO: 11955 - DNA, 25 bp, Artificial sequence  Reverse Primer
  Primer
aaaacagaagcattgctattaatga

SEQ ID NO: 11956 - DNA, 23 bp, Artificial sequence  Reverse Primer
  Primer
taccttccactgcctacagttta

SEQ ID NO: 11957 - DNA, 23 bp, Artificial sequence  Reverse Primer
  Primer
aactgttcttcatcagagtcacc

SEQ ID NO: 11958 - DNA, 30 bp, Artificial sequence  Reverse Primer
  Primer
tatattaaagaactgtagaagatgttgttg

SEQ ID NO: 11959 - DNA, 18 bp, Artificial sequence  Reverse Primer
  Primer
agctggggcagaggcttc

SEQ ID NO: 11960 - DNA, 22 bp, Artificial sequence  Reverse Primer
  Primer
atttctgatatgggaacatgct

SEQ ID NO: 11961 - DNA, 29 bp, Artificial sequence  Reverse Primer
  Primer
gtcatattttgatagtttwtccaagtaaa

SEQ ID NO: 11962 - DNA, 22 bp, Artificial sequence  Reverse Primer
  Primer
cattgtgctttgttttctctga

SEQ ID NO: 11963 - DNA, 26 bp, Artificial sequence  Reverse Primer
  Primer
tttgttcccaaaatatataaatgagg

SEQ ID NO: 11964 - DNA, 18 bp, Artificial sequence  Reverse Primer
  Primer
atgctcttgctcccaagg

SEQ ID NO: 11965 - DNA, 20 bp, Artificial sequence  Reverse Primer
  Primer
tccactgcttacctctaggg

SEQ ID NO: 11966 - DNA, 28 bp, Artificial sequence  Reverse Primer
  Primer
aacatttgaatatcttaccttatatgca

SEQ ID NO: 11967 - DNA, 24 bp, Artificial sequence  Reverse Primer
  Primer
aaagagtcagagagcaaaatcaag

SEQ ID NO: 11968 - DNA, 26 bp, Artificial sequence  Reverse Primer
  Primer
taacctrmacttcagatgatatccaa

SEQ ID NO: 11969 - DNA, 19 bp, Artificial sequence  Reverse Primer
  Primer
caggttcccaagcatctct

SEQ ID NO: 11970 - DNA, 23 bp, Artificial sequence  Reverse Primer
  Primer
attctttaccattgagtcacctg

SEQ ID NO: 11971 - DNA, 24 bp, Artificial sequence  Reverse Primer
  Primer
agtgacaaagaacaggaaaagaaa

SEQ ID NO: 11972 - DNA, 26 bp, Artificial sequence  Reverse Primer
  Primer
ttgacataaatcttcatcygtatctc

SEQ ID NO: 11973 - DNA, 27 bp, Artificial sequence  Reverse Primer
  Primer
ttccttggagaattagtatctagctta

SEQ ID NO: 11974 - DNA, 25 bp, Artificial sequence  Reverse Primer
  Primer
ttacattcttataactcactcccca

SEQ ID NO: 11975 - DNA, 18 bp, Artificial sequence  Reverse Primer
  Primer
ggtaacagtgtggcccct

SEQ ID NO: 11976 - DNA, 25 bp, Artificial sequence  Reverse Primer
  Primer
tattcattttcactcttctcagctt

SEQ ID NO: 11977 - DNA, 19 bp, Artificial sequence  Reverse Primer
  Primer
acccayggagagcaatttc

SEQ ID NO: 11978 - DNA, 21 bp, Artificial sequence  Reverse Primer
  Primer
aaaaatgaaaatgcatggtcc

SEQ ID NO: 11979 - DNA, 30 bp, Artificial sequence  Reverse Primer
  Primer
tttaaaacacatgttacactcaagtactat

SEQ ID NO: 11980 - DNA, 24 bp, Artificial sequence  Reverse Primer
  Primer
tactcttttctcttctccacgagt

SEQ ID NO: 11981 - DNA, 20 bp, Artificial sequence  Reverse Primer
  Primer
ttacagtctgccacctgaca

SEQ ID NO: 11982 - DNA, 18 bp, Artificial sequence  Reverse Primer
  Primer
tggggtggcatctttgtc

SEQ ID NO: 11983 - DNA, 25 bp, Artificial sequence  Reverse Primer
  Primer
ataaactcacaccaggatttagaaa

SEQ ID NO: 11984 - DNA, 22 bp, Artificial sequence  Reverse Primer
  Primer
ttcacacaagatcaaccacttc

SEQ ID NO: 11985 - DNA, 23 bp, Artificial sequence  Reverse Primer
  Primer
agaagaaaattgtctcgagatgg

SEQ ID NO: 11986 - DNA, 24 bp, Artificial sequence  Reverse Primer
  Primer
ttctgaatttcggtctaaatttct

SEQ ID NO: 11987 - DNA, 28 bp, Artificial sequence  Reverse Primer
  Primer
atttgtttagaatgtaataaatcaaggg

SEQ ID NO: 11988 - DNA, 25 bp, Artificial sequence  Reverse Primer
  Primer
aagttgtcaagcattatcactacct

SEQ ID NO: 11989 - DNA, 30 bp, Artificial sequence  Reverse Primer
  Primer
gactcagttatacatatagatactttttca

SEQ ID NO: 11990 - DNA, 22 bp, Artificial sequence  Reverse Primer
  Primer
tagggccaccaaaaataaatta

SEQ ID NO: 11991 - DNA, 26 bp, Artificial sequence  Reverse Primer
  Primer
actatttctggtcatgcatttattaa

SEQ ID NO: 11992 - DNA, 23 bp, Artificial sequence  Reverse Primer
  Primer
atttaggatggtcatgatgtgtc

SEQ ID NO: 11993 - DNA, 23 bp, Artificial sequence  Reverse Primer
  Primer
taagactttgaagacaggcaaca

SEQ ID NO: 11994 - DNA, 22 bp, Artificial sequence  Reverse Primer
  Primer
agctgaacagaaacttccattc

SEQ ID NO: 11995 - DNA, 23 bp, Artificial sequence  Reverse Primer
  Primer
tctcacatacaaaatggcttgta

SEQ ID NO: 11996 - DNA, 29 bp, Artificial sequence  Reverse Primer
  Primer
aatctaccctaagactcttaaacatagtg

SEQ ID NO: 11997 - DNA, 27 bp, Artificial sequence  Reverse Primer
  Primer
ttagatcttggattagacacaattctt

SEQ ID NO: 11998 - DNA, 18 bp, Artificial sequence  Reverse Primer
  Primer
tgcctctagctgcttcca

SEQ ID NO: 11999 - DNA, 18 bp, Artificial sequence  Reverse Primer
  Primer
ggctgaggcaatagccaa

SEQ ID NO: 12000 - DNA, 26 bp, Artificial sequence  Reverse Primer
  Primer
tagcaatgtttttctytagttgaatg

SEQ ID NO: 12001 - DNA, 21 bp, Artificial sequence  Reverse Primer
  Primer
tttccttgaggatccagaaac

SEQ ID NO: 12002 - DNA, 21 bp, Artificial sequence  Reverse Primer
  Primer
aacatagtcactgcagcagct

SEQ ID NO: 12003 - DNA, 19 bp, Artificial sequence  Reverse Primer
  Primer
ctttggagcgattctgctt

SEQ ID NO: 12004 - DNA, 30 bp, Artificial sequence  Reverse Primer
  Primer
cagagtaccaaaactataactaaaatgaaa

SEQ ID NO: 12005 - DNA, 30 bp, Artificial sequence  Reverse Primer
  Primer
atgataaaggacagtatttaagaagaaata

SEQ ID NO: 12006 - DNA, 18 bp, Artificial sequence  Reverse Primer
  Primer
gaggggcagaaacggtaa

SEQ ID NO: 12007 - DNA, 23 bp, Artificial sequence  Reverse Primer
  Primer
acctggttaccagtccttcttag

SEQ ID NO: 12008 - DNA, 29 bp, Artificial sequence  Reverse Primer
  Primer
ttagtaaatctatttctagggatctagca

SEQ ID NO: 12009 - DNA, 25 bp, Artificial sequence  Reverse Primer
  Primer
tatatcaaacttgagtggttctcac

SEQ ID NO: 12010 - DNA, 18 bp, Artificial sequence  Reverse Primer
  Primer
tttgcagagtccatccca

SEQ ID NO: 12011 - DNA, 23 bp, Artificial sequence  Reverse Primer
  Primer
acttgcagagtctgattgagttt

SEQ ID NO: 12012 - DNA, 18 bp, Artificial sequence  Reverse Primer
  Primer
tcacatcgcctctccatc

SEQ ID NO: 12013 - DNA, 26 bp, Artificial sequence  Reverse Primer
  Primer
tgatatgtctattgataaycctcctt

SEQ ID NO: 12014 - DNA, 27 bp, Artificial sequence  Reverse Primer
  Primer
actgtgaaagtttatcatcttcagtct

SEQ ID NO: 12015 - DNA, 22 bp, Artificial sequence  Reverse Primer
  Primer
ttagaccttggtgagggtacag

SEQ ID NO: 12016 - DNA, 22 bp, Artificial sequence  Reverse Primer
  Primer
ttctataacctcacagttcggg

SEQ ID NO: 12017 - DNA, 19 bp, Artificial sequence  Reverse Primer
  Primer
tgaaggcatacggttagcc

SEQ ID NO: 12018 - DNA, 20 bp, Artificial sequence  Reverse Primer
  Primer
acaactcaagttcctgtccc

SEQ ID NO: 12019 - DNA, 23 bp, Artificial sequence  Reverse Primer
  Primer
atctcattgactttgtgttttgc

SEQ ID NO: 12020 - DNA, 26 bp, Artificial sequence  Reverse Primer
  Primer
tttaaaacctgtgcctaaataaagat

SEQ ID NO: 12021 - DNA, 29 bp, Artificial sequence  Reverse Primer
  Primer
ctgactttaactctagatgactttttttt

SEQ ID NO: 12022 - DNA, 26 bp, Artificial sequence  Reverse Primer
  Primer
aatatatctgattccacaggagaagt

SEQ ID NO: 12023 - DNA, 24 bp, Artificial sequence  Reverse Primer
  Primer
ttttagctatttttggcattcttt

SEQ ID NO: 12024 - DNA, 25 bp, Artificial sequence  Reverse Primer
  Primer
accctatgattcttcactaaaagga

SEQ ID NO: 12025 - DNA, 24 bp, Artificial sequence  Reverse Primer
  Primer
tggaataaatatcccatagcaact

SEQ ID NO: 12026 - DNA, 20 bp, Artificial sequence  Reverse Primer
  Primer
tacagactgctttggggttg

SEQ ID NO: 12027 - DNA, 25 bp, Artificial sequence  Reverse Primer
  Primer
tagagaaggaaataaaactttggct

SEQ ID NO: 12028 - DNA, 27 bp, Artificial sequence  Reverse Primer
  Primer
gtaaaattttctaaaggtttttgtgag

SEQ ID NO: 12029 - DNA, 24 bp, Artificial sequence  Reverse Primer
  Primer
caactgaaaaacaaagtttgatca

SEQ ID NO: 12030 - DNA, 27 bp, Artificial sequence  Reverse Primer
  Primer
tataattagagattcagactggagagc

SEQ ID NO: 12031 - DNA, 26 bp, Artificial sequence  Reverse Primer
  Primer
agatcccattaagtctaggagaattt

SEQ ID NO: 12032 - DNA, 21 bp, Artificial sequence  Reverse Primer
  Primer
aatatgtgcctttgagcctct

SEQ ID NO: 12033 - DNA, 20 bp, Artificial sequence  Reverse Primer
  Primer
agccttggactatgagacgc

SEQ ID NO: 12034 - DNA, 26 bp, Artificial sequence  Reverse Primer
  Primer
tttggtctctcttttctcttactctt

SEQ ID NO: 12035 - DNA, 18 bp, Artificial sequence  Reverse Primer
  Primer
tggggccattccctgctc

SEQ ID NO: 12036 - DNA, 23 bp, Artificial sequence  Reverse Primer
  Primer
aattctccaggcaagtctactag

SEQ ID NO: 12037 - DNA, 27 bp, Artificial sequence  Reverse Primer
  Primer
ccttatatttctgaaggtgacttctta

SEQ ID NO: 12038 - DNA, 22 bp, Artificial sequence  Reverse Primer
  Primer
tagcttttggaatcctatggaa

SEQ ID NO: 12039 - DNA, 18 bp, Artificial sequence  Reverse Primer
  Primer
accaccctacgaggccgt

SEQ ID NO: 12040 - DNA, 27 bp, Artificial sequence  Reverse Primer
  Primer
aaggatcatgtctactatcttcagttt

SEQ ID NO: 12041 - DNA, 18 bp, Artificial sequence  Reverse Primer
  Primer
atgccagggaggacggtc

SEQ ID NO: 12042 - DNA, 18 bp, Artificial sequence  Reverse Primer
  Primer
tgacatcaaccaggcatg

SEQ ID NO: 12043 - DNA, 28 bp, Artificial sequence  Reverse Primer
  Primer
ttagatgttagattagcatccaataaag

SEQ ID NO: 12044 - DNA, 18 bp, Artificial sequence  Reverse Primer
  Primer
aggactccacttttcccc

SEQ ID NO: 12045 - DNA, 24 bp, Artificial sequence  Reverse Primer
  Primer
tatggaaatctcagtagatgaagg

SEQ ID NO: 12046 - DNA, 22 bp, Artificial sequence  Reverse Primer
  Primer
tcagcaggcttctgtaagtctt

SEQ ID NO: 12047 - DNA, 23 bp, Artificial sequence  Reverse Primer
  Primer
aaaagaggagacagcttcatttt

SEQ ID NO: 12048 - DNA, 22 bp, Artificial sequence  Reverse Primer
  Primer
tcagagttcccatttttcaaat

SEQ ID NO: 12049 - DNA, 26 bp, Artificial sequence  Reverse Primer
  Primer
aggcattaatttatttaaactttccc

SEQ ID NO: 12050 - DNA, 24 bp, Artificial sequence  Reverse Primer
  Primer
ccctggttgtttaaatagaaaaaa

SEQ ID NO: 12051 - DNA, 28 bp, Artificial sequence  Reverse Primer
  Primer
ttactgagtcttatcaattttgttttca

SEQ ID NO: 12052 - DNA, 27 bp, Artificial sequence  Reverse Primer
  Primer
aattttaatgttgagttatttgctgtc

SEQ ID NO: 12053 - DNA, 21 bp, Artificial sequence  Reverse Primer
  Primer
ataaatggaatgagctgaggg

SEQ ID NO: 12054 - DNA, 18 bp, Artificial sequence  Reverse Primer
  Primer
agatagccagagccccgg

SEQ ID NO: 12055 - DNA, 22 bp, Artificial sequence  Reverse Primer
  Primer
tattgtttttcatggctgtctg

SEQ ID NO: 12056 - DNA, 20 bp, Artificial sequence  Reverse Primer
  Primer
tgactcagcagcctgtactc

SEQ ID NO: 12057 - DNA, 27 bp, Artificial sequence  Reverse Primer
  Primer
tatttcttcctctgtattaatatccca

SEQ ID NO: 12058 - DNA, 25 bp, Artificial sequence  Reverse Primer
  Primer
aaataaccaaataccaaacagacaa

SEQ ID NO: 12059 - DNA, 24 bp, Artificial sequence  Reverse Primer
  Primer
ayatttattcacttgtctcctccc

SEQ ID NO: 12060 - DNA, 18 bp, Artificial sequence  Reverse Primer
  Primer
aggggtcccctaacctca

SEQ ID NO: 12061 - DNA, 23 bp, Artificial sequence  Reverse Primer
  Primer
aaattttatggaagaggaagcat

SEQ ID NO: 12062 - DNA, 25 bp, Artificial sequence  Reverse Primer
  Primer
tgataataaaatctcacagcaagtc

SEQ ID NO: 12063 - DNA, 28 bp, Artificial sequence  Reverse Primer
  Primer
tttcagagtacaatagtttccactaaga

SEQ ID NO: 12064 - DNA, 23 bp, Artificial sequence  Reverse Primer
  Primer
taatgtccttgttttctttggtc

SEQ ID NO: 12065 - DNA, 23 bp, Artificial sequence  Reverse Primer
  Primer
taacacattcaacatggactttg

SEQ ID NO: 12066 - DNA, 28 bp, Artificial sequence  Reverse Primer
  Primer
aataagagatgtaatggttgtcactcta

SEQ ID NO: 12067 - DNA, 24 bp, Artificial sequence  Reverse Primer
  Primer
aagaagaggaaagcacttaagaca

SEQ ID NO: 12068 - DNA, 20 bp, Artificial sequence  Reverse Primer
  Primer
aacaaggtctctgtcccctt

SEQ ID NO: 12069 - DNA, 30 bp, Artificial sequence  Reverse Primer
  Primer
attcttaggttacttttttctattcaagtg

SEQ ID NO: 12070 - DNA, 24 bp, Artificial sequence  Reverse Primer
  Primer
atgttacaaagttgtagccagtga

SEQ ID NO: 12071 - DNA, 21 bp, Artificial sequence  Reverse Primer
  Primer
tatagttcacccgtgtggtga

SEQ ID NO: 12072 - DNA, 24 bp, Artificial sequence  Reverse Primer
  Primer
ctacatttttctctgtgttccctt

SEQ ID NO: 12073 - DNA, 18 bp, Artificial sequence  Reverse Primer
  Primer
tgggggtcttcatggtct

SEQ ID NO: 12074 - DNA, 21 bp, Artificial sequence  Reverse Primer
  Primer
aactaccaggaagttgggtgt

SEQ ID NO: 12075 - DNA, 25 bp, Artificial sequence  Reverse Primer
  Primer
atcactggaaaatctgataaattcc

SEQ ID NO: 12076 - DNA, 24 bp, Artificial sequence  Reverse Primer
  Primer
tgcctattgacaagacctatgtag

SEQ ID NO: 12077 - DNA, 21 bp, Artificial sequence  Reverse Primer
  Primer
aaagtcagagaagcagcaagc

SEQ ID NO: 12078 - DNA, 18 bp, Artificial sequence  Reverse Primer
  Primer
tcccggcctttctgcctt

SEQ ID NO: 12079 - DNA, 28 bp, Artificial sequence  Reverse Primer
  Primer
aagaaattaaggcagatctatacttttc

SEQ ID NO: 12080 - DNA, 24 bp, Artificial sequence  Reverse Primer
  Primer
aataattcaaggcctattttctcc

SEQ ID NO: 12081 - DNA, 30 bp, Artificial sequence  Reverse Primer
  Primer
taacatasagcacagtaagtagagatgtta

SEQ ID NO: 12082 - DNA, 24 bp, Artificial sequence  Reverse Primer
  Primer
tttttctgctcttttcttttcttg

SEQ ID NO: 12083 - DNA, 27 bp, Artificial sequence  Reverse Primer
  Primer
ttttcttttattctgtcctatttgaca

SEQ ID NO: 12084 - DNA, 24 bp, Artificial sequence  Reverse Primer
  Primer
acagcaagatgattcagttacaca

SEQ ID NO: 12085 - DNA, 23 bp, Artificial sequence  Reverse Primer
  Primer
tctgcttacatgtcttgttttgg

SEQ ID NO: 12086 - DNA, 24 bp, Artificial sequence  Reverse Primer
  Primer
aataaaaacaatgagatcatttgg

SEQ ID NO: 12087 - DNA, 21 bp, Artificial sequence  Reverse Primer
  Primer
agcttctgaggctgagacagt

SEQ ID NO: 12088 - DNA, 26 bp, Artificial sequence  Reverse Primer
  Primer
attcaagctacatactgaatttttca

SEQ ID NO: 12089 - DNA, 22 bp, Artificial sequence  Reverse Primer
  Primer
ttgctgagtataaccattgcaa

SEQ ID NO: 12090 - DNA, 20 bp, Artificial sequence  Reverse Primer
  Primer
gggattcagacaaagatttt

SEQ ID NO: 12091 - DNA, 27 bp, Artificial sequence  Reverse Primer
  Primer
tagattaattagcattcaaagtcaaca

SEQ ID NO: 12092 - DNA, 28 bp, Artificial sequence  Reverse Primer
  Primer
tctttgaaacagtattttgacaattatc

SEQ ID NO: 12093 - DNA, 28 bp, Artificial sequence  Reverse Primer
  Primer
aatagaaaatccagaaatatatccaagt

SEQ ID NO: 12094 - DNA, 26 bp, Artificial sequence  Reverse Primer
  Primer
aatttattttctatggctgagtaagc

SEQ ID NO: 12095 - DNA, 25 bp, Artificial sequence  Reverse Primer
  Primer
tatatttttatagcccccaatacac

SEQ ID NO: 12096 - DNA, 20 bp, Artificial sequence  Reverse Primer
  Primer
gctaacccataaggaaagcc

SEQ ID NO: 12097 - DNA, 30 bp, Artificial sequence  Reverse Primer
  Primer
atgtactctaagacattgttaattaaacag

SEQ ID NO: 12098 - DNA, 25 bp, Artificial sequence  Reverse Primer
  Primer
ttttctgtcttctgtagtccaattt

SEQ ID NO: 12099 - DNA, 27 bp, Artificial sequence  Reverse Primer
  Primer
aatcaattaagtttcgtagtctctcaa

SEQ ID NO: 12100 - DNA, 20 bp, Artificial sequence  Reverse Primer
  Primer
cctcaaacaacggaaagagc

SEQ ID NO: 12101 - DNA, 27 bp, Artificial sequence  Reverse Primer
  Primer
tagctcattttagagtattttgttctg

SEQ ID NO: 12102 - DNA, 29 bp, Artificial sequence  Reverse Primer
  Primer
acatcagtggtagtaaaataaatgtatgc

SEQ ID NO: 12103 - DNA, 24 bp, Artificial sequence  Reverse Primer
  Primer
taatctattgtgaatgatgctgct

SEQ ID NO: 12104 - DNA, 22 bp, Artificial sequence  Reverse Primer
  Primer
taaaccattagtaatgccccag

SEQ ID NO: 12105 - DNA, 18 bp, Artificial sequence  Reverse Primer
  Primer
tccctttcaggccaaatt

SEQ ID NO: 12106 - DNA, 30 bp, Artificial sequence  Reverse Primer
  Primer
ctatagtatacctaagtgaaaaccaataca

SEQ ID NO: 12107 - DNA, 23 bp, Artificial sequence  Reverse Primer
  Primer
ataatacaagagaaccccgagat

SEQ ID NO: 12108 - DNA, 30 bp, Artificial sequence  Reverse Primer
  Primer
caattactgttataaagatacagtgttaga

SEQ ID NO: 12109 - DNA, 19 bp, Artificial sequence  Reverse Primer
  Primer
tatctggagccatgtgagc

SEQ ID NO: 12110 - DNA, 26 bp, Artificial sequence  Reverse Primer
  Primer
aagagtacagaggtttgagttttctg

SEQ ID NO: 12111 - DNA, 20 bp, Artificial sequence  Reverse Primer
  Primer
taacttgccatggacactcc

SEQ ID NO: 12112 - DNA, 21 bp, Artificial sequence  Reverse Primer
  Primer
aatgttgttaacagtgcggtg

SEQ ID NO: 12113 - DNA, 21 bp, Artificial sequence  Reverse Primer
  Primer
tggaaaaaytgtcttccacaa

SEQ ID NO: 12114 - DNA, 30 bp, Artificial sequence  Reverse Primer
  Primer
atataataattgagggtatagtaattgctg

SEQ ID NO: 12115 - DNA, 25 bp, Artificial sequence  Reverse Primer
  Primer
attttccaaaatktcaaacagtatc

SEQ ID NO: 12116 - DNA, 23 bp, Artificial sequence  Reverse Primer
  Primer
taccaggtagtggagactcttgg

SEQ ID NO: 12117 - DNA, 19 bp, Artificial sequence  Reverse Primer
  Primer
tcaaggaagggaattgcat

SEQ ID NO: 12118 - DNA, 19 bp, Artificial sequence  Reverse Primer
  Primer
cccaaatttttgttcaccc

SEQ ID NO: 12119 - DNA, 18 bp, Artificial sequence  Reverse Primer
  Primer
agttcacatgcctggcaa

SEQ ID NO: 12120 - DNA, 21 bp, Artificial sequence  Reverse Primer
  Primer
aatcaggtgtacaggtgggtt

SEQ ID NO: 12121 - DNA, 18 bp, Artificial sequence  Reverse Primer
  Primer
ttcgtgggctcagccgta

SEQ ID NO: 12122 - DNA, 29 bp, Artificial sequence  Reverse Primer
  Primer
tttacgtgtatatctaaatccctttctac

SEQ ID NO: 12123 - DNA, 19 bp, Artificial sequence  Reverse Primer
  Primer
actcctgagcctccagagg

SEQ ID NO: 12124 - DNA, 23 bp, Artificial sequence  Reverse Primer
  Primer
tcttttctacttgagttgcagca

SEQ ID NO: 12125 - DNA, 24 bp, Artificial sequence  Reverse Primer
  Primer
tttcatctgtatttacagccactg

SEQ ID NO: 12126 - DNA, 22 bp, Artificial sequence  Reverse Primer
  Primer
agttcctatttgtatccccttg

SEQ ID NO: 12127 - DNA, 22 bp, Artificial sequence  Reverse Primer
  Primer
ctctagtctttggttggaaagg

SEQ ID NO: 12128 - DNA, 25 bp, Artificial sequence  Reverse Primer
  Primer
taaagtaaatcagaatttccaaacc

SEQ ID NO: 12129 - DNA, 20 bp, Artificial sequence  Reverse Primer
  Primer
atacaaccaccaaaaccctg

SEQ ID NO: 12130 - DNA, 21 bp, Artificial sequence  Reverse Primer
  Primer
tcataaagaatgcagccaaca

SEQ ID NO: 12131 - DNA, 22 bp, Artificial sequence  Reverse Primer
  Primer
crtttcctagtgtgattggtca

SEQ ID NO: 12132 - DNA, 23 bp, Artificial sequence  Reverse Primer
  Primer
aaaagtgcctcttgtcattacag

SEQ ID NO: 12133 - DNA, 18 bp, Artificial sequence  Reverse Primer
  Primer
accttccacctccctccg

SEQ ID NO: 12134 - DNA, 21 bp, Artificial sequence  Reverse Primer
  Primer
gcttactttccaagtagcccc

SEQ ID NO: 12135 - DNA, 19 bp, Artificial sequence  Reverse Primer
  Primer
tagggagcaatgaagcctc

SEQ ID NO: 12136 - DNA, 26 bp, Artificial sequence  Reverse Primer
  Primer
tcatactgctgaaatattctatggaa

SEQ ID NO: 12137 - DNA, 21 bp, Artificial sequence  Reverse Primer
  Primer
ttttggtggagtgtcaaagaa

SEQ ID NO: 12138 - DNA, 25 bp, Artificial sequence  Reverse Primer
  Primer
tatgtgttctggttgaagtttcata

SEQ ID NO: 12139 - DNA, 19 bp, Artificial sequence  Reverse Primer
  Primer
aaatgtccatttgtgccaa

SEQ ID NO: 12140 - DNA, 21 bp, Artificial sequence  Reverse Primer
  Primer
agatgtgacagaagtgggtga

SEQ ID NO: 12141 - DNA, 22 bp, Artificial sequence  Reverse Primer
  Primer
atgtgaaactaacacaatgccg

SEQ ID NO: 12142 - DNA, 30 bp, Artificial sequence  Reverse Primer
  Primer
ttaatagattaaggcctastataaactgac

SEQ ID NO: 12143 - DNA, 19 bp, Artificial sequence  Reverse Primer
  Primer
agtccttcagccatgcttt

SEQ ID NO: 12144 - DNA, 24 bp, Artificial sequence  Reverse Primer
  Primer
attttattgatcatttacctgccc

SEQ ID NO: 12145 - DNA, 29 bp, Artificial sequence  Reverse Primer
  Primer
cagaattagaggtatggaattaattagag

SEQ ID NO: 12146 - DNA, 21 bp, Artificial sequence  Reverse Primer
  Primer
cattttgctcacagagtctgg

SEQ ID NO: 12147 - DNA, 19 bp, Artificial sequence  Reverse Primer
  Primer
tctgtcttctgcccattga

SEQ ID NO: 12148 - DNA, 23 bp, Artificial sequence  Reverse Primer
  Primer
aagtcaggatagactgaagggat

SEQ ID NO: 12149 - DNA, 19 bp, Artificial sequence  Reverse Primer
  Primer
gccaaagctagagcacagg

SEQ ID NO: 12150 - DNA, 21 bp, Artificial sequence  Reverse Primer
  Primer
atattggttctgcccctactg

SEQ ID NO: 12151 - DNA, 25 bp, Artificial sequence  Reverse Primer
  Primer
attttccaaaatktcaaacagtatc

SEQ ID NO: 12152 - DNA, 24 bp, Artificial sequence  Reverse Primer
  Primer
tgacctttaatgaatgtgcaataa

SEQ ID NO: 12153 - DNA, 24 bp, Artificial sequence  Reverse Primer
  Primer
aattccaaactaatagaggggaaa

SEQ ID NO: 12154 - DNA, 30 bp, Artificial sequence  Reverse Primer
  Primer
ctttaggcatgatataatttagtcatattt

SEQ ID NO: 12155 - DNA, 26 bp, Artificial sequence  Reverse Primer
  Primer
tgtttattatcttcccaattgttatc

SEQ ID NO: 12156 - DNA, 24 bp, Artificial sequence  Reverse Primer
  Primer
gggttccatacattaagaagctaa

SEQ ID NO: 12157 - DNA, 23 bp, Artificial sequence  Reverse Primer
  Primer
ttccaaaagctgctaactttaag

SEQ ID NO: 12158 - DNA, 18 bp, Artificial sequence  Reverse Primer
  Primer
agtcacaggcggttttcc

SEQ ID NO: 12159 - DNA, 20 bp, Artificial sequence  Reverse Primer
  Primer
tgctctgctcctcttctgat

SEQ ID NO: 12160 - DNA, 19 bp, Artificial sequence  Reverse Primer
  Primer
aggtaaagcrctggcttca

SEQ ID NO: 12161 - DNA, 23 bp, Artificial sequence  Reverse Primer
  Primer
tgatttttacatttctttcccaa

SEQ ID NO: 12162 - DNA, 27 bp, Artificial sequence  Reverse Primer
  Primer
tattaaaatcagaatcacttcacactg

SEQ ID NO: 12163 - DNA, 18 bp, Artificial sequence  Reverse Primer
  Primer
tggacctgtgccactgcc

SEQ ID NO: 12164 - DNA, 28 bp, Artificial sequence  Reverse Primer
  Primer
aaattacatttgatttgatctgtaaagg

SEQ ID NO: 12165 - DNA, 27 bp, Artificial sequence  Reverse Primer
  Primer
aggactatatgtacagatgtggaaaga

SEQ ID NO: 12166 - DNA, 23 bp, Artificial sequence  Reverse Primer
  Primer
ttgaatcatctmraaaccatcca

SEQ ID NO: 12167 - DNA, 24 bp, Artificial sequence  Reverse Primer
  Primer
ttattctgtccacatcagatgaga

SEQ ID NO: 12168 - DNA, 25 bp, Artificial sequence  Reverse Primer
  Primer
tttcagtaactccttattctgtcca

SEQ ID NO: 12169 - DNA, 20 bp, Artificial sequence  Reverse Primer
  Primer
gaatgagctgagggagtttg

SEQ ID NO: 12170 - DNA, 22 bp, Artificial sequence  Reverse Primer
  Primer
gacaaagattcttgcctgatgt

SEQ ID NO: 12171 - DNA, 22 bp, Artificial sequence  Reverse Primer
  Primer
ttcagttgtcttcggaataagg

SEQ ID NO: 12172 - DNA, 23 bp, Artificial sequence  Reverse Primer
  Primer
tgttggacggaaataatcataag

SEQ ID NO: 12173 - DNA, 28 bp, Artificial sequence  Reverse Primer
  Primer
atagatttcacaattatactgcaaagaa

SEQ ID NO: 12174 - DNA, 25 bp, Artificial sequence  Reverse Primer
  Primer
aatctagcagtctcatttgctaatc

SEQ ID NO: 12175 - DNA, 19 bp, Artificial sequence  Reverse Primer
  Primer
agaatgacttgggttgcca

SEQ ID NO: 12176 - DNA, 19 bp, Artificial sequence  Reverse Primer
  Primer
ttaagaacgcgggctctac

SEQ ID NO: 12177 - DNA, 18 bp, Artificial sequence  Reverse Primer
  Primer
tggaaatcttgagaggcg

SEQ ID NO: 12178 - DNA, 18 bp, Artificial sequence  Reverse Primer
  Primer
gccgtctgacacgcaacc

SEQ ID NO: 12179 - DNA, 18 bp, Artificial sequence  Reverse Primer
  Primer
tgggcctgtgaatgagtc

SEQ ID NO: 12180 - DNA, 20 bp, Artificial sequence  Reverse Primer
  Primer
tttttaccagctgtgcaacc

SEQ ID NO: 12181 - DNA, 19 bp, Artificial sequence  Reverse Primer
  Primer
aactgtggcatttgggaag

SEQ ID NO: 12182 - DNA, 26 bp, Artificial sequence  Reverse Primer
  Primer
atttccttgtcagattttacttctca

SEQ ID NO: 12183 - DNA, 21 bp, Artificial sequence  Reverse Primer
  Primer
actccagttagagcttgtggg

SEQ ID NO: 12184 - DNA, 21 bp, Artificial sequence  Reverse Primer
  Primer
tcctgtrtattatgtcccttc

SEQ ID NO: 12185 - DNA, 22 bp, Artificial sequence  Reverse Primer
  Primer
atgttgtcttccctctgattcc

SEQ ID NO: 12186 - DNA, 24 bp, Artificial sequence  Reverse Primer
  Primer
tcctgttaaatatagccatcaagg

SEQ ID NO: 12187 - DNA, 30 bp, Artificial sequence  Reverse Primer
  Primer
tctaggacttttcctctttaactataactc

SEQ ID NO: 12188 - DNA, 25 bp, Artificial sequence  Reverse Primer
  Primer
ctttgctttgagatacaagtacaac

SEQ ID NO: 12189 - DNA, 29 bp, Artificial sequence  Reverse Primer
  Primer
gaatacatgtaaaataaagatcagctttc

SEQ ID NO: 12190 - DNA, 28 bp, Artificial sequence  Reverse Primer
  Primer
cagagaactgtataaaatcttaggacct

SEQ ID NO: 12191 - DNA, 26 bp, Artificial sequence  Reverse Primer
  Primer
atcaaatgaccagagttgacatatat

SEQ ID NO: 12192 - DNA, 22 bp, Artificial sequence  Reverse Primer
  Primer
atgaattcaagcacaaaaggtc

SEQ ID NO: 12193 - DNA, 21 bp, Artificial sequence  Reverse Primer
  Primer
agttcagaaaatggaaatggg

SEQ ID NO: 12194 - DNA, 21 bp, Artificial sequence  Reverse Primer
  Primer
tataaggcatatttgctgcca

SEQ ID NO: 12195 - DNA, 21 bp, Artificial sequence  Reverse Primer
  Primer
aaccaaggttatccaggaaca

SEQ ID NO: 12196 - DNA, 21 bp, Artificial sequence  Reverse Primer
  Primer
tcgagtttgggaagaagagat

SEQ ID NO: 12197 - DNA, 23 bp, Artificial sequence  Reverse Primer
  Primer
acgctagggtacatgatattcaa

SEQ ID NO: 12198 - DNA, 24 bp, Artificial sequence  Reverse Primer
  Primer
tatagcatgctttaactgctagga

SEQ ID NO: 12199 - DNA, 26 bp, Artificial sequence  Reverse Primer
  Primer
aagttctcaaactgcctaatagtttt

SEQ ID NO: 12200 - DNA, 30 bp, Artificial sequence  Reverse Primer
  Primer
atttattgagtactagttttcctaaccatc

SEQ ID NO: 12201 - DNA, 27 bp, Artificial sequence  Reverse Primer
  Primer
ttaaacagtcttacaggtacgttactc

SEQ ID NO: 12202 - DNA, 22 bp, Artificial sequence  Reverse Primer
  Primer
atctgttgaaatcattgtttgc

SEQ ID NO: 12203 - DNA, 23 bp, Artificial sequence  Reverse Primer
  Primer
aggtttatggatttcagaatttt

SEQ ID NO: 12204 - DNA, 24 bp, Artificial sequence  Reverse Primer
  Primer
aatagttggttgacaacattgtgt

SEQ ID NO: 12205 - DNA, 24 bp, Artificial sequence  Reverse Primer
  Primer
taaaacttggattgaattttctcc

SEQ ID NO: 12206 - DNA, 22 bp, Artificial sequence  Reverse Primer
  Primer
aaagaaggtctagagggcaaat

SEQ ID NO: 12207 - DNA, 28 bp, Artificial sequence  Reverse Primer
  Primer
attgtcttcatcattatgctacattact

SEQ ID NO: 12208 - DNA, 21 bp, Artificial sequence  Reverse Primer
  Primer
tttgctgctgtagtctcacct

SEQ ID NO: 12209 - DNA, 23 bp, Artificial sequence  Reverse Primer
  Primer
tggtgtctataagagcctgattc

SEQ ID NO: 12210 - DNA, 21 bp, Artificial sequence  Reverse Primer
  Primer
ttagataaagaggtggccagc

SEQ ID NO: 12211 - DNA, 24 bp, Artificial sequence  Reverse Primer
  Primer
ttgaatgtagaaaagcagaagagc

SEQ ID NO: 12212 - DNA, 28 bp, Artificial sequence  Reverse Primer
  Primer
ttaaaggattgaatcactgtctaaatag

SEQ ID NO: 12213 - DNA, 29 bp, Artificial sequence  Reverse Primer
  Primer
atataaagattctcactccaggttatcta

SEQ ID NO: 12214 - DNA, 22 bp, Artificial sequence  Reverse Primer
  Primer
atcctgccttgttattcagttg

SEQ ID NO: 12215 - DNA, 21 bp, Artificial sequence  Reverse Primer
  Primer
tttttttccaggctttcactc

SEQ ID NO: 12216 - DNA, 24 bp, Artificial sequence  Reverse Primer
  Primer
argaagatattsactgccctttat

SEQ ID NO: 12217 - DNA, 22 bp, Artificial sequence  Reverse Primer
  Primer
aagcatccacagaacctaaagc

SEQ ID NO: 12218 - DNA, 27 bp, Artificial sequence  Reverse Primer
  Primer
tcataaacttgttgttgtacagtcact

SEQ ID NO: 12219 - DNA, 21 bp, Artificial sequence  Reverse Primer
  Primer
tgaaggataggagaattggga

SEQ ID NO: 12220 - DNA, 19 bp, Artificial sequence  Reverse Primer
  Primer
acacggcaagcattctaca

SEQ ID NO: 12221 - DNA, 22 bp, Artificial sequence  Reverse Primer
  Primer
ttttactgtcatgtgatggacc

SEQ ID NO: 12222 - DNA, 21 bp, Artificial sequence  Reverse Primer
  Primer
ttttcttggaatcagaccctt

SEQ ID NO: 12223 - DNA, 20 bp, Artificial sequence  Reverse Primer
  Primer
atttactctggcatgggaca

SEQ ID NO: 12224 - DNA, 26 bp, Artificial sequence  Reverse Primer
  Primer
acagtgatttaagttcaattaagctg

SEQ ID NO: 12225 - DNA, 29 bp, Artificial sequence  Reverse Primer
  Primer
ataatgaatactagtgatatgggagaaac

SEQ ID NO: 12226 - DNA, 29 bp, Artificial sequence  Reverse Primer
  Primer
tacaaggtacaaagattaaactgrtaact

SEQ ID NO: 12227 - DNA, 25 bp, Artificial sequence  Reverse Primer
  Primer
caggaagctttatttatttactggg

SEQ ID NO: 12228 - DNA, 18 bp, Artificial sequence  Reverse Primer
  Primer
ccaggagctgggatgaac

SEQ ID NO: 12229 - DNA, 20 bp, Artificial sequence  Reverse Primer
  Primer
tgcaaggagggtgactttaa

SEQ ID NO: 12230 - DNA, 28 bp, Artificial sequence  Reverse Primer
  Primer
aatcaacaatcaaatatgaattaactcc

SEQ ID NO: 12231 - DNA, 27 bp, Artificial sequence  Reverse Primer
  Primer
ataataaaacccctttcattgagtatt

SEQ ID NO: 12232 - DNA, 23 bp, Artificial sequence  Reverse Primer
  Primer
ctggacacctctttttttcttct

SEQ ID NO: 12233 - DNA, 20 bp, Artificial sequence  Reverse Primer
  Primer
tagatgacaggagggtcagg

SEQ ID NO: 12234 - DNA, 26 bp, Artificial sequence  Reverse Primer
  Primer
gcactctatatggaatacttcattga

SEQ ID NO: 12235 - DNA, 29 bp, Artificial sequence  Reverse Primer
  Primer
catacactaattaaattataagtgccctc

SEQ ID NO: 12236 - DNA, 27 bp, Artificial sequence  Reverse Primer
  Primer
agatcttgtaacttaaagcagtagctc

SEQ ID NO: 12237 - DNA, 30 bp, Artificial sequence  Reverse Primer
  Primer
attcttactaatctcagaaagtaaagacta

SEQ ID NO: 12238 - DNA, 28 bp, Artificial sequence  Reverse Primer
  Primer
aaacagtaaaatgatattaaacacaggg

SEQ ID NO: 12239 - DNA, 20 bp, Artificial sequence  Reverse Primer
  Primer
tcatgcttttggtgtcattt

SEQ ID NO: 12240 - DNA, 23 bp, Artificial sequence  Reverse Primer
  Primer
aagatggagagtaccagaggact

SEQ ID NO: 12241 - DNA, 23 bp, Artificial sequence  Reverse Primer
  Primer
tggtagatctttaatgtccctcc

SEQ ID NO: 12242 - DNA, 18 bp, Artificial sequence  Reverse Primer
  Primer
ttgtgagttcgtgccatc

SEQ ID NO: 12243 - DNA, 24 bp, Artificial sequence  Reverse Primer
  Primer
taatacaattgtttctgcttgtgg

SEQ ID NO: 12244 - DNA, 22 bp, Artificial sequence  Reverse Primer
  Primer
aggctgtatgagtccaaatgac

SEQ ID NO: 12245 - DNA, 25 bp, Artificial sequence  Reverse Primer
  Primer
tttagccttctttcagatatcactt

SEQ ID NO: 12246 - DNA, 18 bp, Artificial sequence  Reverse Primer
  Primer
tagacggctcagactccg

SEQ ID NO: 12247 - DNA, 27 bp, Artificial sequence  Reverse Primer
  Primer
tgatgagagactattttgtcatgttaa

SEQ ID NO: 12248 - DNA, 21 bp, Artificial sequence  Reverse Primer
  Primer
atgtgcttaaaattggagggt

SEQ ID NO: 12249 - DNA, 27 bp, Artificial sequence  Reverse Primer
  Primer
aaaataaaactgaacctcaagatacaa

SEQ ID NO: 12250 - DNA, 21 bp, Artificial sequence  Reverse Primer
  Primer
aagtacaaacaggacctgcct

SEQ ID NO: 12251 - DNA, 26 bp, Artificial sequence  Reverse Primer
  Primer
gttctctgctgtaatattagatggtc

SEQ ID NO: 12252 - DNA, 24 bp, Artificial sequence  Reverse Primer
  Primer
gtcaagtaaagtcttcagggtgtt

SEQ ID NO: 12253 - DNA, 28 bp, Artificial sequence  Reverse Primer
  Primer
atctagcttatttttttctcataatgct

SEQ ID NO: 12254 - DNA, 30 bp, Artificial sequence  Reverse Primer
  Primer
aagaaaggtaagataggtattcataaaatc

SEQ ID NO: 12255 - DNA, 27 bp, Artificial sequence  Reverse Primer
  Primer
agtcaatattgtacagagagagaagct

SEQ ID NO: 12256 - DNA, 18 bp, Artificial sequence  Reverse Primer
  Primer
gcagcaggatgcaaacac

SEQ ID NO: 12257 - DNA, 19 bp, Artificial sequence  Reverse Primer
  Primer
tgactggcagcaggtttaa

SEQ ID NO: 12258 - DNA, 29 bp, Artificial sequence  Reverse Primer
  Primer
aaattatargtcccagtaaaattatgagt

SEQ ID NO: 12259 - DNA, 23 bp, Artificial sequence  Reverse Primer
  Primer
attgagtgcccattataataaat

SEQ ID NO: 12260 - DNA, 27 bp, Artificial sequence  Reverse Primer
  Primer
actttacatttggcatgactttatagt

SEQ ID NO: 12261 - DNA, 18 bp, Artificial sequence  Reverse Primer
  Primer
cccttggagctaccatcg

SEQ ID NO: 12262 - DNA, 30 bp, Artificial sequence  Reverse Primer
  Primer
tactctatgagcactctagttctagattca

SEQ ID NO: 12263 - DNA, 28 bp, Artificial sequence  Reverse Primer
  Primer
aaaccacagtattttttataacctaacc

SEQ ID NO: 12264 - DNA, 26 bp, Artificial sequence  Reverse Primer
  Primer
caaaaaaatgtatattaacagctgct

SEQ ID NO: 12265 - DNA, 23 bp, Artificial sequence  Reverse Primer
  Primer
ttcagattgagatctgtcacctt

SEQ ID NO: 12266 - DNA, 22 bp, Artificial sequence  Reverse Primer
  Primer
attcttgatctgcacaaggtct

SEQ ID NO: 12267 - DNA, 27 bp, Artificial sequence  Reverse Primer
  Primer
attggtaatatttagaaggtcagtgtc

SEQ ID NO: 12268 - DNA, 18 bp, Artificial sequence  Reverse Primer
  Primer
gacagctctgctcggtgg

SEQ ID NO: 12269 - DNA, 27 bp, Artificial sequence  Reverse Primer
  Primer
aaacttctgcaaattacaaaaatagtc

SEQ ID NO: 12270 - DNA, 24 bp, Artificial sequence  Reverse Primer
  Primer
attaaaaactgctgagtgtgtcac

SEQ ID NO: 12271 - DNA, 23 bp, Artificial sequence  Reverse Primer
  Primer
atggtgatgatcaaatgtcttca

SEQ ID NO: 12272 - DNA, 24 bp, Artificial sequence  Reverse Primer
  Primer
ttaaaatgctttgatttcagagag

SEQ ID NO: 12273 - DNA, 28 bp, Artificial sequence  Reverse Primer
  Primer
ttaaatttcttaccaaaaaaagtctctg

SEQ ID NO: 12274 - DNA, 18 bp, Artificial sequence  Reverse Primer
  Primer
caaacgtgcacacgggag

SEQ ID NO: 12275 - DNA, 30 bp, Artificial sequence  Reverse Primer
  Primer
tgagtaatattctatcgtrtatttgtacca

SEQ ID NO: 12276 - DNA, 22 bp, Artificial sequence  Reverse Primer
  Primer
ctgcgtatgtttcatgatgtct

SEQ ID NO: 12277 - DNA, 24 bp, Artificial sequence  Reverse Primer
  Primer
tttctataggacttgacaatgtgc

SEQ ID NO: 12278 - DNA, 21 bp, Artificial sequence  Reverse Primer
  Primer
tcctctctctagcacagtgcc

SEQ ID NO: 12279 - DNA, 22 bp, Artificial sequence  Reverse Primer
  Primer
tgttttctgagaccatctctcc

SEQ ID NO: 12280 - DNA, 27 bp, Artificial sequence  Reverse Primer
  Primer
tattcattttatcaactcttcaattcc

SEQ ID NO: 12281 - DNA, 26 bp, Artificial sequence  Reverse Primer
  Primer
atacacacacataaaagagagagaga

SEQ ID NO: 12282 - DNA, 24 bp, Artificial sequence  Reverse Primer
  Primer
aaatgatgaaatcagtgctcttct

SEQ ID NO: 12283 - DNA, 26 bp, Artificial sequence  Reverse Primer
  Primer
agcatagtgtgaagtaaygtaagtcc

SEQ ID NO: 12284 - DNA, 26 bp, Artificial sequence  Reverse Primer
  Primer
saaattgttaatttttaaagtccagc

SEQ ID NO: 12285 - DNA, 25 bp, Artificial sequence  Reverse Primer
  Primer
tttgcatctctactttcaattcttt

SEQ ID NO: 12286 - DNA, 27 bp, Artificial sequence  Reverse Primer
  Primer
ttttattactccttgagaacctaagaa

SEQ ID NO: 12287 - DNA, 23 bp, Artificial sequence  Reverse Primer
  Primer
attgctgattattttctccatgg

SEQ ID NO: 12288 - DNA, 30 bp, Artificial sequence  Reverse Primer
  Primer
atatactaacaaaagactaggttaaactct

SEQ ID NO: 12289 - DNA, 22 bp, Artificial sequence  Reverse Primer
  Primer
aggctcctctgttcataggatt

SEQ ID NO: 12290 - DNA, 19 bp, Artificial sequence  Reverse Primer
  Primer
gccaacatacatgaggcct

SEQ ID NO: 12291 - DNA, 24 bp, Artificial sequence  Reverse Primer
  Primer
tttactgcatctttgaaagaaagg

SEQ ID NO: 12292 - DNA, 19 bp, Artificial sequence  Reverse Primer
  Primer
acaaggccctttcaacctt

SEQ ID NO: 12293 - DNA, 26 bp, Artificial sequence  Reverse Primer
  Primer
tggaagttagctactgttatgtgaat

SEQ ID NO: 12294 - DNA, 29 bp, Artificial sequence  Reverse Primer
  Primer
taattacataaaacattaagcatagtccc

SEQ ID NO: 12295 - DNA, 25 bp, Artificial sequence  Reverse Primer
  Primer
aatgtctgagacagtaataaccacc

SEQ ID NO: 12296 - DNA, 18 bp, Artificial sequence  Reverse Primer
  Primer
tcctccctcaggcagaat

SEQ ID NO: 12297 - DNA, 21 bp, Artificial sequence  Reverse Primer
  Primer
tatgcagatcaaatggtggat

SEQ ID NO: 12298 - DNA, 30 bp, Artificial sequence  Reverse Primer
  Primer
ataaagtgaaactgttatcagctatctaaa

SEQ ID NO: 12299 - DNA, 27 bp, Artificial sequence  Reverse Primer
  Primer
atacaactcaaacacacacattcttac

SEQ ID NO: 12300 - DNA, 19 bp, Artificial sequence  Reverse Primer
  Primer
aattagcacaatgcatggc

SEQ ID NO: 12301 - DNA, 23 bp, Artificial sequence  Reverse Primer
  Primer
cttaatgttagagaaggatgcca

SEQ ID NO: 12302 - DNA, 23 bp, Artificial sequence  Reverse Primer
  Primer
aaaggtttaaacggcctttacta

SEQ ID NO: 12303 - DNA, 19 bp, Artificial sequence  Reverse Primer
  Primer
tggttcaacatgttccctg

SEQ ID NO: 12304 - DNA, 29 bp, Artificial sequence  Reverse Primer
  Primer
attggagtcatstctctagatatgataag

SEQ ID NO: 12305 - DNA, 23 bp, Artificial sequence  Reverse Primer
  Primer
catacaactcaggaagctcaaac

SEQ ID NO: 12306 - DNA, 22 bp, Artificial sequence  Reverse Primer
  Primer
acatacatctaacacccccact

SEQ ID NO: 12307 - DNA, 22 bp, Artificial sequence  Reverse Primer
  Primer
cctttagaacacgatcgaagat

SEQ ID NO: 12308 - DNA, 19 bp, Artificial sequence  Reverse Primer
  Primer
agggccttsattctcaacc

SEQ ID NO: 12309 - DNA, 22 bp, Artificial sequence  Reverse Primer
  Primer
tgctstagccggttagtcttat

SEQ ID NO: 12310 - DNA, 25 bp, Artificial sequence  Reverse Primer
  Primer
tgtttrtaagtaagttcacttgccc

SEQ ID NO: 12311 - DNA, 21 bp, Artificial sequence  Reverse Primer
  Primer
tttctccaggtatctcctgct

SEQ ID NO: 12312 - DNA, 18 bp, Artificial sequence  Reverse Primer
  Primer
gggaggggaaaagggcag

SEQ ID NO: 12313 - DNA, 25 bp, Artificial sequence  Reverse Primer
  Primer
ttgtttaatgttgaaaggaaagaac

SEQ ID NO: 12314 - DNA, 24 bp, Artificial sequence  Reverse Primer
  Primer
aaagttcttaacctttgcactgtg

SEQ ID NO: 12315 - DNA, 19 bp, Artificial sequence  Reverse Primer
  Primer
ctcttttgcccccttactg

SEQ ID NO: 12316 - DNA, 27 bp, Artificial sequence  Reverse Primer
  Primer
aaatctttcagtctaatcaragaactg

SEQ ID NO: 12317 - DNA, 23 bp, Artificial sequence  Reverse Primer
  Primer
ccaggaattgttcataytttcaa

SEQ ID NO: 12318 - DNA, 23 bp, Artificial sequence  Reverse Primer
  Primer
ttcattctgtacaattttgctcc

SEQ ID NO: 12319 - DNA, 18 bp, Artificial sequence  Reverse Primer
  Primer
attgcatgggggagacat

SEQ ID NO: 12320 - DNA, 28 bp, Artificial sequence  Reverse Primer
  Primer
aaatacaacgtattatatctccatgaaa

SEQ ID NO: 12321 - DNA, 20 bp, Artificial sequence  Reverse Primer
  Primer
aagaatcgaaagcctctgag

SEQ ID NO: 12322 - DNA, 19 bp, Artificial sequence  Reverse Primer
  Primer
tactttccaagtagccccg

SEQ ID NO: 12323 - DNA, 18 bp, Artificial sequence  Reverse Primer
  Primer
gggacaactgggtggatg

SEQ ID NO: 12324 - DNA, 22 bp, Artificial sequence  Reverse Primer
  Primer
ttcgtatttgcaaaaaatcctc

SEQ ID NO: 12325 - DNA, 28 bp, Artificial sequence  Reverse Primer
  Primer
aactagtgatcagaaatgaagaagttag

SEQ ID NO: 12326 - DNA, 21 bp, Artificial sequence  Reverse Primer
  Primer
ttgtctcttggcagtgtttct

SEQ ID NO: 12327 - DNA, 28 bp, Artificial sequence  Reverse Primer
  Primer
aatagtttttaaaatccagtgatgaatc

SEQ ID NO: 12328 - DNA, 27 bp, Artificial sequence  Reverse Primer
  Primer
aaacataaaaggtcaaactaractcat

SEQ ID NO: 12329 - DNA, 21 bp, Artificial sequence  Reverse Primer
  Primer
tagcacacaccaggacttttt

SEQ ID NO: 12330 - DNA, 26 bp, Artificial sequence  Reverse Primer
  Primer
aaaagtctttgaatttagatagccat

SEQ ID NO: 12331 - DNA, 23 bp, Artificial sequence  Reverse Primer
  Primer
tttttgagtttcatttggaaaac

SEQ ID NO: 12332 - DNA, 20 bp, Artificial sequence  Reverse Primer
  Primer
cacaaagcatttgactggag

SEQ ID NO: 12333 - DNA, 24 bp, Artificial sequence  Reverse Primer
  Primer
aagcaatttaaggatcaaaagaaa

SEQ ID NO: 12334 - DNA, 21 bp, Artificial sequence  Reverse Primer
  Primer
ggtccaaaataaggccaataa

SEQ ID NO: 12335 - DNA, 23 bp, Artificial sequence  Reverse Primer
  Primer
attttctcatcagctgaaacatg

SEQ ID NO: 12336 - DNA, 27 bp, Artificial sequence  Reverse Primer
  Primer
aacaataatgaaaaccagaatactgat

SEQ ID NO: 12337 - DNA, 26 bp, Artificial sequence  Reverse Primer
  Primer
cttttgttcataaaacagaactcaaa

SEQ ID NO: 12338 - DNA, 19 bp, Artificial sequence  Reverse Primer
  Primer
agctgcttcatgcttagcc

SEQ ID NO: 12339 - DNA, 27 bp, Artificial sequence  Reverse Primer
  Primer
ttgacttaygtttctttctactattgg

SEQ ID NO: 12340 - DNA, 26 bp, Artificial sequence  Reverse Primer
  Primer
gtggttatttttatgtgtcaggtaag

SEQ ID NO: 12341 - DNA, 25 bp, Artificial sequence  Reverse Primer
  Primer
atttcttatgggacaactttcattt

SEQ ID NO: 12342 - DNA, 25 bp, Artificial sequence  Reverse Primer
  Primer
aggtctaatctttttggaaatttga

SEQ ID NO: 12343 - DNA, 18 bp, Artificial sequence  Reverse Primer
  Primer
tgttggtttggggtgtct

SEQ ID NO: 12344 - DNA, 26 bp, Artificial sequence  Reverse Primer
  Primer
atttttagaaccacttagcattttca

SEQ ID NO: 12345 - DNA, 26 bp, Artificial sequence  Reverse Primer
  Primer
ttatatttaagcaaagacttgaaggc

SEQ ID NO: 12346 - DNA, 18 bp, Artificial sequence  Reverse Primer
  Primer
ctgmgagccrgagattca

SEQ ID NO: 12347 - DNA, 23 bp, Artificial sequence  Reverse Primer
  Primer
tttttctgttttacttctgccaa

SEQ ID NO: 12348 - DNA, 20 bp, Artificial sequence  Reverse Primer
  Primer
accctttaaaaggtcatgtc

SEQ ID NO: 12349 - DNA, 26 bp, Artificial sequence  Reverse Primer
  Primer
atgtagttatttttggtaatagcccc

SEQ ID NO: 12350 - DNA, 18 bp, Artificial sequence  Reverse Primer
  Primer
agcgttggaactggacgt

SEQ ID NO: 12351 - DNA, 23 bp, Artificial sequence  Reverse Primer
  Primer
agtaagaccaagaaggagcaagt

SEQ ID NO: 12352 - DNA, 27 bp, Artificial sequence  Reverse Primer
  Primer
tgaaaaagacctytgttactaaaactc

SEQ ID NO: 12353 - DNA, 24 bp, Artificial sequence  Reverse Primer
  Primer
caggtggcagagatttaaaattat

SEQ ID NO: 12354 - DNA, 23 bp, Artificial sequence  Reverse Primer
  Primer
tattgtttatctcagaccgtgct

SEQ ID NO: 12355 - DNA, 18 bp, Artificial sequence  Reverse Primer
  Primer
ttgaggctgtgctgcact

SEQ ID NO: 12356 - DNA, 29 bp, Artificial sequence  Reverse Primer
  Primer
aacttgaacttagctactatttttaaccc

SEQ ID NO: 12357 - DNA, 30 bp, Artificial sequence  Reverse Primer
  Primer
ttactagtggaaatggttaagataattagt

SEQ ID NO: 12358 - DNA, 30 bp, Artificial sequence  Reverse Primer
  Primer
ctcagaagaaattagttgtttattatatag

SEQ ID NO: 12359 - DNA, 28 bp, Artificial sequence  Reverse Primer
  Primer
tatataatgtttgaagtggaagtaatgg

SEQ ID NO: 12360 - DNA, 29 bp, Artificial sequence  Reverse Primer
  Primer
ctcttagaagatattttyactcctacaca

SEQ ID NO: 12361 - DNA, 23 bp, Artificial sequence  Reverse Primer
  Primer
ttttcagagaacaaaactgagga

SEQ ID NO: 12362 - DNA, 20 bp, Artificial sequence  Reverse Primer
  Primer
agtcagtcttcccactgtgc

SEQ ID NO: 12363 - DNA, 18 bp, Artificial sequence  Reverse Primer
  Primer
agcaggctaggacaggca

SEQ ID NO: 12364 - DNA, 27 bp, Artificial sequence  Reverse Primer
  Primer
aacttatggattctctgctgtacttac

SEQ ID NO: 12365 - DNA, 30 bp, Artificial sequence  Reverse Primer
  Primer
cagaaagtataatacaacctttttttaagt

SEQ ID NO: 12366 - DNA, 26 bp, Artificial sequence  Reverse Primer
  Primer
trtctgaggaactggtacttaatctg

SEQ ID NO: 12367 - DNA, 21 bp, Artificial sequence  Reverse Primer
  Primer
aattccattcccagaaatcaa

SEQ ID NO: 12368 - DNA, 25 bp, Artificial sequence  Reverse Primer
  Primer
taatrcactcccatatctctgaatg

SEQ ID NO: 12369 - DNA, 22 bp, Artificial sequence  Reverse Primer
  Primer
accttttgtggtgatcatttca

SEQ ID NO: 12370 - DNA, 22 bp, Artificial sequence  Reverse Primer
  Primer
tttgtgaggcatttttcttctc

SEQ ID NO: 12371 - DNA, 30 bp, Artificial sequence  Reverse Primer
  Primer
gctcatcagatagtaggtctaatagtaaga

SEQ ID NO: 12372 - DNA, 25 bp, Artificial sequence  Reverse Primer
  Primer
taccaatggtacaccttataaatgg

SEQ ID NO: 12373 - DNA, 18 bp, Artificial sequence  Reverse Primer
  Primer
atggagaggctctggggg

SEQ ID NO: 12374 - DNA, 27 bp, Artificial sequence  Reverse Primer
  Primer
tttctctgctgttttctatcttaatgt

SEQ ID NO: 12375 - DNA, 27 bp, Artificial sequence  Reverse Primer
  Primer
taaagctctaccatcattatcttctca

SEQ ID NO: 12376 - DNA, 28 bp, Artificial sequence  Reverse Primer
  Primer
attgacagatatttgtttacatttcttg

SEQ ID NO: 12377 - DNA, 30 bp, Artificial sequence  Reverse Primer
  Primer
aatgaatgaatacaagttatgttacactct

SEQ ID NO: 12378 - DNA, 22 bp, Artificial sequence  Reverse Primer
  Primer
aatgggagtcattgaagacatc

SEQ ID NO: 12379 - DNA, 30 bp, Artificial sequence  Reverse Primer
  Primer
ggtagctctatgttttcatatgtaataatt

SEQ ID NO: 12380 - DNA, 21 bp, Artificial sequence  Reverse Primer
  Primer
accttcaagggaaaaatgagg

SEQ ID NO: 12381 - DNA, 26 bp, Artificial sequence  Reverse Primer
  Primer
agaaagagttcatgtttaaggatgtt

SEQ ID NO: 12382 - DNA, 27 bp, Artificial sequence  Reverse Primer
  Primer
tactttccctttacttaaaatcatctg

SEQ ID NO: 12383 - DNA, 24 bp, Artificial sequence  Reverse Primer
  Primer
tagtagcttttaatgcacactttc

SEQ ID NO: 12384 - DNA, 24 bp, Artificial sequence  Reverse Primer
  Primer
ttttgtcccaaataaagattgact

SEQ ID NO: 12385 - DNA, 25 bp, Artificial sequence  Reverse Primer
  Primer
cagaaactttaagaagcaactcatt

SEQ ID NO: 12386 - DNA, 30 bp, Artificial sequence  Reverse Primer
  Primer
aacttacatgagagttttgtacattaagtc

SEQ ID NO: 12387 - DNA, 28 bp, Artificial sequence  Reverse Primer
  Primer
tatttacattatctaacagcatttggtc

SEQ ID NO: 12388 - DNA, 26 bp, Artificial sequence  Reverse Primer
  Primer
cacagaacatacctggataattaaca

SEQ ID NO: 12389 - DNA, 18 bp, Artificial sequence  Reverse Primer
  Primer
aaatggcccaggaaatgg

SEQ ID NO: 12390 - DNA, 28 bp, Artificial sequence  Reverse Primer
  Primer
atgtttccatgttcagaaatatattaga

SEQ ID NO: 12391 - DNA, 25 bp, Artificial sequence  Reverse Primer
  Primer
agaccaatgaaatgtgtatcctaca

SEQ ID NO: 12392 - DNA, 20 bp, Artificial sequence  Reverse Primer
  Primer
taaatcccatgatttgcctc

SEQ ID NO: 12393 - DNA, 23 bp, Artificial sequence  Reverse Primer
  Primer
acctcgtgactagagtctgttcc

SEQ ID NO: 12394 - DNA, 22 bp, Artificial sequence  Reverse Primer
  Primer
aaaactgtgaaggaatcctgtg

SEQ ID NO: 12395 - DNA, 28 bp, Artificial sequence  Reverse Primer
  Primer
agctactactagacttgattttmggatg

SEQ ID NO: 12396 - DNA, 18 bp, Artificial sequence  Reverse Primer
  Primer
tggacttcttggtggcag

SEQ ID NO: 12397 - DNA, 18 bp, Artificial sequence  Reverse Primer
  Primer
agccccttggtcagcact

SEQ ID NO: 12398 - DNA, 21 bp, Artificial sequence  Reverse Primer
  Primer
acagcctgcctatcctacatt

SEQ ID NO: 12399 - DNA, 19 bp, Artificial sequence  Reverse Primer
  Primer
agacctccgcaagacatgt

SEQ ID NO: 12400 - DNA, 19 bp, Artificial sequence  Reverse Primer
  Primer
taaaagcaaacgcaaagca

SEQ ID NO: 12401 - DNA, 26 bp, Artificial sequence  Reverse Primer
  Primer
gaccagtagaagaaccactgaatatc

SEQ ID NO: 12402 - DNA, 26 bp, Artificial sequence  Reverse Primer
  Primer
aaaattattttaataaggggwaacgg

SEQ ID NO: 12403 - DNA, 24 bp, Artificial sequence  Reverse Primer
  Primer
acagtgsagtcgatttaaatatgc

SEQ ID NO: 12404 - DNA, 22 bp, Artificial sequence  Reverse Primer
  Primer
ttcaaaaacccagcgtatattt

SEQ ID NO: 12405 - DNA, 20 bp, Artificial sequence  Reverse Primer
  Primer
aaaagtctggggtgggatac

SEQ ID NO: 12406 - DNA, 24 bp, Artificial sequence  Reverse Primer
  Primer
agtttatgttaggattcgcacttt

SEQ ID NO: 12407 - DNA, 26 bp, Artificial sequence  Reverse Primer
  Primer
aaagtatgacgtgacttagagactga

SEQ ID NO: 12408 - DNA, 20 bp, Artificial sequence  Reverse Primer
  Primer
aaaaccaagtccagaaagca

SEQ ID NO: 12409 - DNA, 21 bp, Artificial sequence  Reverse Primer
  Primer
aatttctggtcattctgctgc

SEQ ID NO: 12410 - DNA, 18 bp, Artificial sequence  Reverse Primer
  Primer
cgccactacctcatccac

SEQ ID NO: 12411 - DNA, 26 bp, Artificial sequence  Reverse Primer
  Primer
gactctcagtktgggtaactactagc

SEQ ID NO: 12412 - DNA, 18 bp, Artificial sequence  Reverse Primer
  Primer
accccagatcccgtcgct

SEQ ID NO: 12413 - DNA, 19 bp, Artificial sequence  Reverse Primer
  Primer
aacagcrgactgagaggga

SEQ ID NO: 12414 - DNA, 25 bp, Artificial sequence  Reverse Primer
  Primer
ttckgtaaaatccatttcataagag

SEQ ID NO: 12415 - DNA, 21 bp, Artificial sequence  Reverse Primer
  Primer
tatatcagtttcctggggttg

SEQ ID NO: 12416 - DNA, 23 bp, Artificial sequence  Reverse Primer
  Primer
tcaaggcacagttatctgttttg

SEQ ID NO: 12417 - DNA, 25 bp, Artificial sequence  Reverse Primer
  Primer
aaacaaaagggactttgtaaggtat

SEQ ID NO: 12418 - DNA, 25 bp, Artificial sequence  Reverse Primer
  Primer
cccttttcatactcttttgaatctc

SEQ ID NO: 12419 - DNA, 27 bp, Artificial sequence  Reverse Primer
  Primer
ttgccagtctaaaaatttaatacattc

SEQ ID NO: 12420 - DNA, 23 bp, Artificial sequence  Reverse Primer
  Primer
ttttccatttcatcatggttatg

SEQ ID NO: 12421 - DNA, 28 bp, Artificial sequence  Reverse Primer
  Primer
aaaacagactcacagacatagagaatag

SEQ ID NO: 12422 - DNA, 27 bp, Artificial sequence  Reverse Primer
  Primer
atcagtaagcaagtttagaaatgaaga

SEQ ID NO: 12423 - DNA, 26 bp, Artificial sequence  Reverse Primer
  Primer
aatattacacttctgcctactccttg

SEQ ID NO: 12424 - DNA, 25 bp, Artificial sequence  Reverse Primer
  Primer
aacacagcaatacctaggtcactaa

SEQ ID NO: 12425 - DNA, 25 bp, Artificial sequence  Reverse Primer
  Primer
ttaaagccttccttagaataaacca

SEQ ID NO: 12426 - DNA, 23 bp, Artificial sequence  Reverse Primer
  Primer
agaaggcatcctaaatcaagttt

SEQ ID NO: 12427 - DNA, 26 bp, Artificial sequence  Reverse Primer
  Primer
gcagaataatgaatgaatgaaatcta

SEQ ID NO: 12428 - DNA, 28 bp, Artificial sequence  Reverse Primer
  Primer
taagatgttatggaataatttctctcaa

SEQ ID NO: 12429 - DNA, 20 bp, Artificial sequence  Reverse Primer
  Primer
tgtctctaccccacaacctt

SEQ ID NO: 12430 - DNA, 30 bp, Artificial sequence  Reverse Primer
  Primer
attgaatagtaaactccatatttctttctc

SEQ ID NO: 12431 - DNA, 25 bp, Artificial sequence  Reverse Primer
  Primer
attttaattgacaactacattgcag

SEQ ID NO: 12432 - DNA, 24 bp, Artificial sequence  Reverse Primer
  Primer
tccccttctatttacctgttattc

SEQ ID NO: 12433 - DNA, 26 bp, Artificial sequence  Reverse Primer
  Primer
gactctcagtktgggtaactactagc

SEQ ID NO: 12434 - DNA, 23 bp, Artificial sequence  Reverse Primer
  Primer
ttactgaatgagaagtgggaaga

SEQ ID NO: 12435 - DNA, 28 bp, Artificial sequence  Reverse Primer
  Primer
cagtatctgaagagacaggtaaactagg

SEQ ID NO: 12436 - DNA, 29 bp, Artificial sequence  Reverse Primer
  Primer
aagaartaggaacaacctagtaaaagtct

SEQ ID NO: 12437 - DNA, 26 bp, Artificial sequence  Reverse Primer
  Primer
aatagaaatgcagacatagagaatgg

SEQ ID NO: 12438 - DNA, 24 bp, Artificial sequence  Reverse Primer
  Primer
atgcttctgtctcagaggaataac

SEQ ID NO: 12439 - DNA, 25 bp, Artificial sequence  Reverse Primer
  Primer
agaacaaatctttagccatgaaata

SEQ ID NO: 12440 - DNA, 27 bp, Artificial sequence  Reverse Primer
  Primer
tattttctccattttcaacttaacagt

SEQ ID NO: 12441 - DNA, 28 bp, Artificial sequence  Reverse Primer
  Primer
ttttatttctaagaattttctaaacccc

SEQ ID NO: 12442 - DNA, 21 bp, Artificial sequence  Reverse Primer
  Primer
aaaagaaaacgcagacctcat

SEQ ID NO: 12443 - DNA, 27 bp, Artificial sequence  Reverse Primer
  Primer
tatactgacattatttgtccttacgtg

SEQ ID NO: 12444 - DNA, 30 bp, Artificial sequence  Reverse Primer
  Primer
tttaaagtaggagtttccttagtcattatt

SEQ ID NO: 12445 - DNA, 26 bp, Artificial sequence  Reverse Primer
  Primer
taatactgcaaaacctatatgcactg

SEQ ID NO: 12446 - DNA, 27 bp, Artificial sequence  Reverse Primer
  Primer
atagagagaaagaaaaatgtaaggctt

SEQ ID NO: 12447 - DNA, 24 bp, Artificial sequence  Reverse Primer
  Primer
ttgtttttcctaaacacagacacc

SEQ ID NO: 12448 - DNA, 24 bp, Artificial sequence  Reverse Primer
  Primer
tggcaattagtctaaattctaccc

SEQ ID NO: 12449 - DNA, 24 bp, Artificial sequence  Reverse Primer
  Primer
attaattacacaagcaccagtcat

SEQ ID NO: 12450 - DNA, 21 bp, Artificial sequence  Reverse Primer
  Primer
tcatagtttacccaccctggt

SEQ ID NO: 12451 - DNA, 22 bp, Artificial sequence  Reverse Primer
  Primer
ctaaaaaaggaagactgccatg

SEQ ID NO: 12452 - DNA, 23 bp, Artificial sequence  Reverse Primer
  Primer
ttattgttccaagacaacgactg

SEQ ID NO: 12453 - DNA, 18 bp, Artificial sequence  Reverse Primer
  Primer
tttcaagcgtggtgaacg

SEQ ID NO: 12454 - DNA, 23 bp, Artificial sequence  Reverse Primer
  Primer
tctactcttttcctctcagcttg

SEQ ID NO: 12455 - DNA, 30 bp, Artificial sequence  Reverse Primer
  Primer
cccaaactactatacactatgaaattaaag

SEQ ID NO: 12456 - DNA, 27 bp, Artificial sequence  Reverse Primer
  Primer
gcttctgaaattagtcttcaaatacat

SEQ ID NO: 12457 - DNA, 28 bp, Artificial sequence  Reverse Primer
  Primer
aaaccatgagaatgtactatttacaaaa

SEQ ID NO: 12458 - DNA, 28 bp, Artificial sequence  Reverse Primer
  Primer
agaaagatatccatgtctttttaaagtc

SEQ ID NO: 12459 - DNA, 29 bp, Artificial sequence  Reverse Primer
  Primer
tacttaactactgaatcttttcaaagaca

SEQ ID NO: 12460 - DNA, 28 bp, Artificial sequence  Reverse Primer
  Primer
tgataagaagacctcatttgatatttaa

SEQ ID NO: 12461 - DNA, 26 bp, Artificial sequence  Reverse Primer
  Primer
attgttatgtattggacagtaatgca

SEQ ID NO: 12462 - DNA, 26 bp, Artificial sequence  Reverse Primer
  Primer
tttaaatgatgcataaatgagtcttg

SEQ ID NO: 12463 - DNA, 23 bp, Artificial sequence  Reverse Primer
  Primer
attaacgtgacactccaaaccta

SEQ ID NO: 12464 - DNA, 27 bp, Artificial sequence  Reverse Primer
  Primer
tatttctatgacagagacaaactgaaa

SEQ ID NO: 12465 - DNA, 26 bp, Artificial sequence  Reverse Primer
  Primer
tttttgaaataatctgtatttccagc

SEQ ID NO: 12466 - DNA, 26 bp, Artificial sequence  Reverse Primer
  Primer
cctccaaaaattatctatgaagttct

SEQ ID NO: 12467 - DNA, 25 bp, Artificial sequence  Reverse Primer
  Primer
tgttctgccttmttcataataaaaa

SEQ ID NO: 12468 - DNA, 22 bp, Artificial sequence  Reverse Primer
  Primer
ctgaaaatacctgctgtcttcc

SEQ ID NO: 12469 - DNA, 21 bp, Artificial sequence  Reverse Primer
  Primer
agctctactgtaagcaggctg

SEQ ID NO: 12470 - DNA, 26 bp, Artificial sequence  Reverse Primer
  Primer
tatttcttcaagtcttttctgatgat

SEQ ID NO: 12471 - DNA, 23 bp, Artificial sequence  Reverse Primer
  Primer
ttttggtgtattattgttggtgc

SEQ ID NO: 12472 - DNA, 24 bp, Artificial sequence  Reverse Primer
  Primer
ttgatgagtgtagcaaattctgtg

SEQ ID NO: 12473 - DNA, 30 bp, Artificial sequence  Reverse Primer
  Primer
agtaactataaaagtctctgaaccaaattt

SEQ ID NO: 12474 - DNA, 28 bp, Artificial sequence  Reverse Primer
  Primer
tacgttatctctttagttaaaccaacaa

SEQ ID NO: 12475 - DNA, 20 bp, Artificial sequence  Reverse Primer
  Primer
atcccccttttttcagagaa

SEQ ID NO: 12476 - DNA, 23 bp, Artificial sequence  Reverse Primer
  Primer
tattgtttatctcagaccgtgct

SEQ ID NO: 12477 - DNA, 21 bp, Artificial sequence  Reverse Primer
  Primer
agagggagaaccaaagatgtc

SEQ ID NO: 12478 - DNA, 18 bp, Artificial sequence  Reverse Primer
  Primer
agcccatgccaggacaga

SEQ ID NO: 12479 - DNA, 24 bp, Artificial sequence  Reverse Primer
  Primer
agataaagataaaaccagctgcaa

SEQ ID NO: 12480 - DNA, 24 bp, Artificial sequence  Reverse Primer
  Primer
aaatgtcaaataaaaaaggtttgg

SEQ ID NO: 12481 - DNA, 21 bp, Artificial sequence  Reverse Primer
  Primer
attaaggctgaatgggtatcg

SEQ ID NO: 12482 - DNA, 23 bp, Artificial sequence  Reverse Primer
  Primer
tttgcaaaatactgtctctaccc

SEQ ID NO: 12483 - DNA, 21 bp, Artificial sequence  Reverse Primer
  Primer
tttccagtttttgcctttacg

SEQ ID NO: 12484 - DNA, 19 bp, Artificial sequence  Reverse Primer
  Primer
tggtgtgcatggtacagtg

SEQ ID NO: 12485 - DNA, 22 bp, Artificial sequence  Reverse Primer
  Primer
acatgcacagcctcttctagtc

SEQ ID NO: 12486 - DNA, 19 bp, Artificial sequence  Reverse Primer
  Primer
tacctgtcttggcaatgga

SEQ ID NO: 12487 - DNA, 19 bp, Artificial sequence  Reverse Primer
  Primer
acgacagtcgcagctacag

SEQ ID NO: 12488 - DNA, 21 bp, Artificial sequence  Reverse Primer
  Primer
ttaattcttcacgtggctcac

SEQ ID NO: 12489 - DNA, 24 bp, Artificial sequence  Reverse Primer
  Primer
attcatttatttttgtagccttgc

SEQ ID NO: 12490 - DNA, 23 bp, Artificial sequence  Reverse Primer
  Primer
acaaatgtttattaaccaccagc

SEQ ID NO: 12491 - DNA, 29 bp, Artificial sequence  Reverse Primer
  Primer
agctccattcttatctgtcttagatatta

SEQ ID NO: 12492 - DNA, 24 bp, Artificial sequence  Reverse Primer
  Primer
attttcctgcagctaatctaattg

SEQ ID NO: 12493 - DNA, 24 bp, Artificial sequence  Reverse Primer
  Primer
attgagaagatctctttgagaagg

SEQ ID NO: 12494 - DNA, 21 bp, Artificial sequence  Reverse Primer
  Primer
attctttctcatyccacaccc

SEQ ID NO: 12495 - DNA, 18 bp, Artificial sequence  Reverse Primer
  Primer
tactgcgaaaggccagga

SEQ ID NO: 12496 - DNA, 28 bp, Artificial sequence  Reverse Primer
  Primer
ttattttaagtagaaatcttgacaagca

SEQ ID NO: 12497 - DNA, 20 bp, Artificial sequence  Reverse Primer
  Primer
attctttcagacaggctcca

SEQ ID NO: 12498 - DNA, 23 bp, Artificial sequence  Reverse Primer
  Primer
aaataagactgcaactgaatcca

SEQ ID NO: 12499 - DNA, 22 bp, Artificial sequence  Reverse Primer
  Primer
gaagttcatcatgactgcttcc

SEQ ID NO: 12500 - DNA, 25 bp, Artificial sequence  Reverse Primer
  Primer
cctatattamggcaaatatggagaa

SEQ ID NO: 12501 - DNA, 24 bp, Artificial sequence  Reverse Primer
  Primer
aaaagaagtaagatgcttttttcc

SEQ ID NO: 12502 - DNA, 24 bp, Artificial sequence  Reverse Primer
  Primer
taaatggaagaaaaaagagaaggc

SEQ ID NO: 12503 - DNA, 27 bp, Artificial sequence  Reverse Primer
  Primer
atatttcataacayaattctgcaagtg

SEQ ID NO: 12504 - DNA, 24 bp, Artificial sequence  Reverse Primer
  Primer
aaatttttcatttcctcaagttcc

SEQ ID NO: 12505 - DNA, 28 bp, Artificial sequence  Reverse Primer
  Primer
aatttactgagaaaaattaggtatggaa

SEQ ID NO: 12506 - DNA, 21 bp, Artificial sequence  Reverse Primer
  Primer
ctctccttggaaagacaaacc

SEQ ID NO: 12507 - DNA, 26 bp, Artificial sequence  Reverse Primer
  Primer
gttagaggaaagatttcaaaaattga

SEQ ID NO: 12508 - DNA, 20 bp, Artificial sequence  Reverse Primer
  Primer
tacaatgaaccctgcactcc

SEQ ID NO: 12509 - DNA, 21 bp, Artificial sequence  Reverse Primer
  Primer
aaggtggatctccaggaataa

SEQ ID NO: 12510 - DNA, 19 bp, Artificial sequence  Reverse Primer
  Primer
tccagtccaagtgaaggac

SEQ ID NO: 12511 - DNA, 24 bp, Artificial sequence  Reverse Primer
  Primer
yttggcttctcttctcagttttag

SEQ ID NO: 12512 - DNA, 24 bp, Artificial sequence  Reverse Primer
  Primer
tttgcaacataccaaatcactatg

SEQ ID NO: 12513 - DNA, 25 bp, Artificial sequence  Reverse Primer
  Primer
actttacagttgaatgaaatgagga

SEQ ID NO: 12514 - DNA, 29 bp, Artificial sequence  Reverse Primer
  Primer
tcagagttttgttctacttaaaaagtgta

SEQ ID NO: 12515 - DNA, 30 bp, Artificial sequence  Reverse Primer
  Primer
ataatgataacattrgtagtgagagatttg

SEQ ID NO: 12516 - DNA, 30 bp, Artificial sequence  Reverse Primer
  Primer
taacctctcttaagrttacattactctctt

SEQ ID NO: 12517 - DNA, 20 bp, Artificial sequence  Reverse Primer
  Primer
tttaaaacaacccagccaca

SEQ ID NO: 12518 - DNA, 18 bp, Artificial sequence  Reverse Primer
  Primer
tgacgcttggttatgcgg

SEQ ID NO: 12519 - DNA, 19 bp, Artificial sequence  Reverse Primer
  Primer
tgcactcacacagctgtca

SEQ ID NO: 12520 - DNA, 23 bp, Artificial sequence  Reverse Primer
  Primer
tacraagtgatgttttcactgct

SEQ ID NO: 12521 - DNA, 30 bp, Artificial sequence  Reverse Primer
  Primer
cattattattcaattagaaacttcctatta

SEQ ID NO: 12522 - DNA, 28 bp, Artificial sequence  Reverse Primer
  Primer
aatctgaaaaaagtgttataattgaggt

SEQ ID NO: 12523 - DNA, 18 bp, Artificial sequence  Reverse Primer
  Primer
gcactgcgagctaagctg

SEQ ID NO: 12524 - DNA, 21 bp, Artificial sequence  Reverse Primer
  Primer
gggtcagttgttgtcttcagc

SEQ ID NO: 12525 - DNA, 18 bp, Artificial sequence  Reverse Primer
  Primer
tacatgttggggggtgtt

SEQ ID NO: 12526 - DNA, 24 bp, Artificial sequence  Reverse Primer
  Primer
catttttacatttttygtcaaggt

SEQ ID NO: 12527 - DNA, 30 bp, Artificial sequence  Reverse Primer
  Primer
ttcatgttatatactgcatactatttcttt

SEQ ID NO: 12528 - DNA, 18 bp, Artificial sequence  Reverse Primer
  Primer
agcctcttcccagcagtg

SEQ ID NO: 12529 - DNA, 20 bp, Artificial sequence  Reverse Primer
  Primer
tattctccrtgccttcacct

SEQ ID NO: 12530 - DNA, 26 bp, Artificial sequence  Reverse Primer
  Primer
aagatagaagtagtctggatcacagg

SEQ ID NO: 12531 - DNA, 27 bp, Artificial sequence  Reverse Primer
  Primer
agttcttgcataaatcatatttcaact

SEQ ID NO: 12532 - DNA, 18 bp, Artificial sequence  Reverse Primer
  Primer
ttgggcactggggttatc

SEQ ID NO: 12533 - DNA, 23 bp, Artificial sequence  Reverse Primer
  Primer
atattctttcctctctcaggcag

SEQ ID NO: 12534 - DNA, 20 bp, Artificial sequence  Reverse Primer
  Primer
tgagatttaaggccaggttg

SEQ ID NO: 12535 - DNA, 24 bp, Artificial sequence  Reverse Primer
  Primer
atattattcgctttagtgcaggat

SEQ ID NO: 12536 - DNA, 23 bp, Artificial sequence  Reverse Primer
  Primer
tccttcaagagacaagaaatagc

SEQ ID NO: 12537 - DNA, 24 bp, Artificial sequence  Reverse Primer
  Primer
cactctttgattcttcaactgcta

SEQ ID NO: 12538 - DNA, 21 bp, Artificial sequence  Reverse Primer
  Primer
aattctgaaagcttgcgatct

SEQ ID NO: 12539 - DNA, 30 bp, Artificial sequence  Reverse Primer
  Primer
cattagtctatactgattaaaattttgctg

SEQ ID NO: 12540 - DNA, 20 bp, Artificial sequence  Reverse Primer
  Primer
aagggaatcccaagtggtag

SEQ ID NO: 12541 - DNA, 25 bp, Artificial sequence  Reverse Primer
  Primer
aaaactacatcagtggttctaagct

SEQ ID NO: 12542 - DNA, 21 bp, Artificial sequence  Reverse Primer
  Primer
aataggaaatcagccatggac

SEQ ID NO: 12543 - DNA, 27 bp, Artificial sequence  Reverse Primer
  Primer
ctacagttaaacagtgagaagctgtaa

SEQ ID NO: 12544 - DNA, 22 bp, Artificial sequence  Reverse Primer
  Primer
ctccaatgttgggtagatgttt

SEQ ID NO: 12545 - DNA, 18 bp, Artificial sequence  Reverse Primer
  Primer
aaccttgctcctacgcag

SEQ ID NO: 12546 - DNA, 25 bp, Artificial sequence  Reverse Primer
  Primer
ttttcttatgtaaaagaaggaagca

SEQ ID NO: 12547 - DNA, 18 bp, Artificial sequence  Reverse Primer
  Primer
ccagcatccccaactgta

SEQ ID NO: 12548 - DNA, 23 bp, Artificial sequence  Reverse Primer
  Primer
aatayagcccagaagtcagtttc

SEQ ID NO: 12549 - DNA, 19 bp, Artificial sequence  Reverse Primer
  Primer
aacgtgaatgtgctccaca

SEQ ID NO: 12550 - DNA, 20 bp, Artificial sequence  Reverse Primer
  Primer
acagcgcaaataccagctac

SEQ ID NO: 12551 - DNA, 26 bp, Artificial sequence  Reverse Primer
  Primer
aaaattctatgtgattcaccctaatg

SEQ ID NO: 12552 - DNA, 26 bp, Artificial sequence  Reverse Primer
  Primer
acctacaactacagctcagtttaacc

SEQ ID NO: 12553 - DNA, 19 bp, Artificial sequence  Reverse Primer
  Primer
tctcctacattgctgacgg

SEQ ID NO: 12554 - DNA, 23 bp, Artificial sequence  Reverse Primer
  Primer
ttcattgcttttcataatccaag

SEQ ID NO: 12555 - DNA, 23 bp, Artificial sequence  Reverse Primer
  Primer
aaccgtcttctgaaaggttctag

SEQ ID NO: 12556 - DNA, 26 bp, Artificial sequence  Reverse Primer
  Primer
aatttctatctttgtggtaggatagc

SEQ ID NO: 12557 - DNA, 26 bp, Artificial sequence  Reverse Primer
  Primer
ataatcagatgaagtattgaccagtg

SEQ ID NO: 12558 - DNA, 23 bp, Artificial sequence  Reverse Primer
  Primer
aatttattctttgccctgatttc

SEQ ID NO: 12559 - DNA, 18 bp, Artificial sequence  Reverse Primer
  Primer
cgctttgctgcactgagt

SEQ ID NO: 12560 - DNA, 21 bp, Artificial sequence  Reverse Primer
  Primer
tttcaaaggaagtgtcactgg

SEQ ID NO: 12561 - DNA, 26 bp, Artificial sequence  Reverse Primer
  Primer
attttagctccttgaatataagatcc

SEQ ID NO: 12562 - DNA, 27 bp, Artificial sequence  Reverse Primer
  Primer
aaaagtgatctctgtctgaatagagtc

SEQ ID NO: 12563 - DNA, 30 bp, Artificial sequence  Reverse Primer
  Primer
acattaaatagaaaatagacttgaagtgac

SEQ ID NO: 12564 - DNA, 25 bp, Artificial sequence  Reverse Primer
  Primer
ctgtagctatcagttaccatggttt

SEQ ID NO: 12565 - DNA, 28 bp, Artificial sequence  Reverse Primer
  Primer
tgtgtaatttatttgatgctaagttctt

SEQ ID NO: 12566 - DNA, 21 bp, Artificial sequence  Reverse Primer
  Primer
tagggagactcagggacattt

SEQ ID NO: 12567 - DNA, 26 bp, Artificial sequence  Reverse Primer
  Primer
aaattatttcattgctctctgacttc

SEQ ID NO: 12568 - DNA, 27 bp, Artificial sequence  Reverse Primer
  Primer
tttcataaacctgaagrtactaactga

SEQ ID NO: 12569 - DNA, 21 bp, Artificial sequence  Reverse Primer
  Primer
aactaccagggaagtccatca

SEQ ID NO: 12570 - DNA, 26 bp, Artificial sequence  Reverse Primer
  Primer
aaacaaaaagtctcagttaatccttt

SEQ ID NO: 12571 - DNA, 24 bp, Artificial sequence  Reverse Primer
  Primer
catttagggttttgtaggaaaaaa

SEQ ID NO: 12572 - DNA, 26 bp, Artificial sequence  Reverse Primer
  Primer
aacaattccacaatttcctagattaa

SEQ ID NO: 12573 - DNA, 18 bp, Artificial sequence  Reverse Primer
  Primer
tgggcaytggctccttca

SEQ ID NO: 12574 - DNA, 28 bp, Artificial sequence  Reverse Primer
  Primer
ttaataaatacttaaaggctagcaatga

SEQ ID NO: 12575 - DNA, 23 bp, Artificial sequence  Reverse Primer
  Primer
aaacctggctcacataataggtt

SEQ ID NO: 12576 - DNA, 20 bp, Artificial sequence  Reverse Primer
  Primer
aaattgcttcagggaacagg

SEQ ID NO: 12577 - DNA, 30 bp, Artificial sequence  Reverse Primer
  Primer
cttatttattctaaatagtagattataagt

SEQ ID NO: 12578 - DNA, 23 bp, Artificial sequence  Reverse Primer
  Primer
ttggggcatattatgtttacaca

SEQ ID NO: 12579 - DNA, 19 bp, Artificial sequence  Reverse Primer
  Primer
ttaaatccttccgcgtctg

SEQ ID NO: 12580 - DNA, 21 bp, Artificial sequence  Reverse Primer
  Primer
atttaacttggtccaagaggg

SEQ ID NO: 12581 - DNA, 20 bp, Artificial sequence  Reverse Primer
  Primer
ttagaactggccttttctgg

SEQ ID NO: 12582 - DNA, 30 bp, Artificial sequence  Reverse Primer
  Primer
cactttattaattgagaagattatatacct

SEQ ID NO: 12583 - DNA, 20 bp, Artificial sequence  Reverse Primer
  Primer
atttcagcaggtgtggtctg

SEQ ID NO: 12584 - DNA, 24 bp, Artificial sequence  Reverse Primer
  Primer
caaatttttaaatgttggcaacta

SEQ ID NO: 12585 - DNA, 23 bp, Artificial sequence  Reverse Primer
  Primer
atcacaggatcttccatacctct

SEQ ID NO: 12586 - DNA, 25 bp, Artificial sequence  Reverse Primer
  Primer
actctgttttggrttattctctttg

SEQ ID NO: 12587 - DNA, 24 bp, Artificial sequence  Reverse Primer
  Primer
aatgtttttagaaaagacccactc

SEQ ID NO: 12588 - DNA, 18 bp, Artificial sequence  Reverse Primer
  Primer
atagggcgatccagtgag

SEQ ID NO: 12589 - DNA, 24 bp, Artificial sequence  Reverse Primer
  Primer
tgagattgtggaatcaacatattg

SEQ ID NO: 12590 - DNA, 20 bp, Artificial sequence  Reverse Primer
  Primer
tctgaagtctgattgccacc

SEQ ID NO: 12591 - DNA, 26 bp, Artificial sequence  Reverse Primer
  Primer
tgattagaactgactaactttctcga

SEQ ID NO: 12592 - DNA, 25 bp, Artificial sequence  Reverse Primer
  Primer
gctgaaaaggaaatatgtaggtttt

SEQ ID NO: 12593 - DNA, 24 bp, Artificial sequence  Reverse Primer
  Primer
tcttaaccatgttcaagatcagaa

SEQ ID NO: 12594 - DNA, 22 bp, Artificial sequence  Reverse Primer
  Primer
ttttccactgtagctcatcaca

SEQ ID NO: 12595 - DNA, 23 bp, Artificial sequence  Reverse Primer
  Primer
atttcctactccaactctcctgt

SEQ ID NO: 12596 - DNA, 22 bp, Artificial sequence  Reverse Primer
  Primer
aaacagtccttttagttcccag

SEQ ID NO: 12597 - DNA, 28 bp, Artificial sequence  Reverse Primer
  Primer
taaaaacttttcttttactttatctggc

SEQ ID NO: 12598 - DNA, 26 bp, Artificial sequence  Reverse Primer
  Primer
ttgagctgtgtcttaaaattgttatt

SEQ ID NO: 12599 - DNA, 27 bp, Artificial sequence  Reverse Primer
  Primer
tgtatggctttatgataccatttaatt

SEQ ID NO: 12600 - DNA, 18 bp, Artificial sequence  Reverse Primer
  Primer
cccaaggcacttgcaaac

SEQ ID NO: 12601 - DNA, 30 bp, Artificial sequence  Reverse Primer
  Primer
gtataagggaactttcattaacttacatat

SEQ ID NO: 12602 - DNA, 18 bp, Artificial sequence  Reverse Primer
  Primer
atcaaccaccccaatccc

SEQ ID NO: 12603 - DNA, 30 bp, Artificial sequence  Reverse Primer
  Primer
aatatcaagtcagtactgtttaaaggatac

SEQ ID NO: 12604 - DNA, 29 bp, Artificial sequence  Reverse Primer
  Primer
actatttgtaaagttaataacatgggaca

SEQ ID NO: 12605 - DNA, 30 bp, Artificial sequence  Reverse Primer
  Primer
tattttcctccatatataactatcactttc

SEQ ID NO: 12606 - DNA, 22 bp, Artificial sequence  Reverse Primer
  Primer
ctctgtctaaagaagtgtgggg

SEQ ID NO: 12607 - DNA, 27 bp, Artificial sequence  Reverse Primer
  Primer
aaaagcttacttttagaagaatttcag

SEQ ID NO: 12608 - DNA, 22 bp, Artificial sequence  Reverse Primer
  Primer
aaggatgctgtataaggcagac

SEQ ID NO: 12609 - DNA, 18 bp, Artificial sequence  Reverse Primer
  Primer
aacacacacggggtggaa

SEQ ID NO: 12610 - DNA, 19 bp, Artificial sequence  Reverse Primer
  Primer
aacaggaggtttcaggtgc

SEQ ID NO: 12611 - DNA, 24 bp, Artificial sequence  Reverse Primer
  Primer
tactractgcggatataggatttg

SEQ ID NO: 12612 - DNA, 21 bp, Artificial sequence  Reverse Primer
  Primer
taaattcagtatgctgtggcc

SEQ ID NO: 12613 - DNA, 21 bp, Artificial sequence  Reverse Primer
  Primer
acggccaaaaataaaaatcaa

SEQ ID NO: 12614 - DNA, 19 bp, Artificial sequence  Reverse Primer
  Primer
tcatgacctgaaaaacgca

SEQ ID NO: 12615 - DNA, 23 bp, Artificial sequence  Reverse Primer
  Primer
ttccctaagtgcctatrgttctc

SEQ ID NO: 12616 - DNA, 19 bp, Artificial sequence  Reverse Primer
  Primer
ttacattccactccctccc

SEQ ID NO: 12617 - DNA, 18 bp, Artificial sequence  Reverse Primer
  Primer
tgggggttggagagggat

SEQ ID NO: 12618 - DNA, 22 bp, Artificial sequence  Reverse Primer
  Primer
taaaaccatccaggtaggttga

SEQ ID NO: 12619 - DNA, 18 bp, Artificial sequence  Reverse Primer
  Primer
tgaagagatggacggggt

SEQ ID NO: 12620 - DNA, 24 bp, Artificial sequence  Reverse Primer
  Primer
tttaaaatcctgcctactaaagga

SEQ ID NO: 12621 - DNA, 27 bp, Artificial sequence  Reverse Primer
  Primer
catacttactctgttcttcagatgaaa

SEQ ID NO: 12622 - DNA, 26 bp, Artificial sequence  Reverse Primer
  Primer
taactttaaaggacaattctgagaag

SEQ ID NO: 12623 - DNA, 26 bp, Artificial sequence  Reverse Primer
  Primer
taatagagttaatgccacaaatatgg

SEQ ID NO: 12624 - DNA, 24 bp, Artificial sequence  Reverse Primer
  Primer
tagagattgttacacccaaattga

SEQ ID NO: 12625 - DNA, 21 bp, Artificial sequence  Reverse Primer
  Primer
aagcacaaaactctgaggtgg

SEQ ID NO: 12626 - DNA, 25 bp, Artificial sequence  Reverse Primer
  Primer
tgtattyactgacattgtgttttga

SEQ ID NO: 12627 - DNA, 18 bp, Artificial sequence  Reverse Primer
  Primer
tgaaggcgaaaagaacgg

SEQ ID NO: 12628 - DNA, 28 bp, Artificial sequence  Reverse Primer
  Primer
aagatgtggagattaagtggtatatttt

SEQ ID NO: 12629 - DNA, 24 bp, Artificial sequence  Reverse Primer
  Primer
taaagggcttattcttgttcactc

SEQ ID NO: 12630 - DNA, 24 bp, Artificial sequence  Reverse Primer
  Primer
attatttggattctcataaccagc

SEQ ID NO: 12631 - DNA, 26 bp, Artificial sequence  Reverse Primer
  Primer
agaaataagcctaagcttaaacacac

SEQ ID NO: 12632 - DNA, 30 bp, Artificial sequence  Reverse Primer
  Primer
tgttgtcaatataaatagtaccattagaag

SEQ ID NO: 12633 - DNA, 24 bp, Artificial sequence  Reverse Primer
  Primer
ttaaatagccctttcactcaactt

SEQ ID NO: 12634 - DNA, 29 bp, Artificial sequence  Reverse Primer
  Primer
atttaaacttyactcccttagaaatattg

SEQ ID NO: 12635 - DNA, 27 bp, Artificial sequence  Reverse Primer
  Primer
tattaacctttattccttgagtctgaa

SEQ ID NO: 12636 - DNA, 23 bp, Artificial sequence  Reverse Primer
  Primer
ttggaacaaaatgaaaatgtgtt

SEQ ID NO: 12637 - DNA, 19 bp, Artificial sequence  Reverse Primer
  Primer
tgattatcttcatcggggc

SEQ ID NO: 12638 - DNA, 25 bp, Artificial sequence  Reverse Primer
  Primer
agttagcaacatttgaacatctagg

SEQ ID NO: 12639 - DNA, 25 bp, Artificial sequence  Reverse Primer
  Primer
atttgaaaaacaaaaaggagatctg

SEQ ID NO: 12640 - DNA, 25 bp, Artificial sequence  Reverse Primer
  Primer
tgcttggtttttgttttactagatt

SEQ ID NO: 12641 - DNA, 19 bp, Artificial sequence  Reverse Primer
  Primer
gagagcaggtgtgttgacc

SEQ ID NO: 12642 - DNA, 24 bp, Artificial sequence  Reverse Primer
  Primer
tttcaaaaacaaaacactttcttg

SEQ ID NO: 12643 - DNA, 22 bp, Artificial sequence  Reverse Primer
  Primer
tgacacctgtgactggtcttat

SEQ ID NO: 12644 - DNA, 24 bp, Artificial sequence  Reverse Primer
  Primer
aatagctgactaatacagtgtggg

SEQ ID NO: 12645 - DNA, 27 bp, Artificial sequence  Reverse Primer
  Primer
tgaaatagtgaataatgacttgaaagg

SEQ ID NO: 12646 - DNA, 28 bp, Artificial sequence  Reverse Primer
  Primer
tctagctaactcagttctaagagagaag

SEQ ID NO: 12647 - DNA, 23 bp, Artificial sequence  Reverse Primer
  Primer
tttattcagaaagaatagggcct

SEQ ID NO: 12648 - DNA, 19 bp, Artificial sequence  Reverse Primer
  Primer
ttcaaatccagttctgcca

SEQ ID NO: 12649 - DNA, 28 bp, Artificial sequence  Reverse Primer
  Primer
tcaacttaaagcatactctcttattctc

SEQ ID NO: 12650 - DNA, 24 bp, Artificial sequence  Reverse Primer
  Primer
attagaatgagcacagtgaaggtt

SEQ ID NO: 12651 - DNA, 23 bp, Artificial sequence  Reverse Primer
  Primer
tccatcttctttgaatttgatca

SEQ ID NO: 12652 - DNA, 23 bp, Artificial sequence  Reverse Primer
  Primer
attaaagtatcaggctgtggtgc

SEQ ID NO: 12653 - DNA, 24 bp, Artificial sequence  Reverse Primer
  Primer
taaaacactggtatccaaacatga

SEQ ID NO: 12654 - DNA, 30 bp, Artificial sequence  Reverse Primer
  Primer
taatagtgttaactattctaaaaaggaaaa

SEQ ID NO: 12655 - DNA, 18 bp, Artificial sequence  Reverse Primer
  Primer
tgcaagctctccatccac

SEQ ID NO: 12656 - DNA, 27 bp, Artificial sequence  Reverse Primer
  Primer
tattatgtcaggaactattccaggtac

SEQ ID NO: 12657 - DNA, 24 bp, Artificial sequence  Reverse Primer
  Primer
aaagcctgaaaaagtgataactct

SEQ ID NO: 12658 - DNA, 21 bp, Artificial sequence  Reverse Primer
  Primer
attcctccacgctctcataga

SEQ ID NO: 12659 - DNA, 26 bp, Artificial sequence  Reverse Primer
  Primer
tttttaatttctagccaaaacactct

SEQ ID NO: 12660 - DNA, 21 bp, Artificial sequence  Reverse Primer
  Primer
tttgttttgctagccaatctg

SEQ ID NO: 12661 - DNA, 21 bp, Artificial sequence  Reverse Primer
  Primer
cctaggttcaaaacccatgtc

SEQ ID NO: 12662 - DNA, 24 bp, Artificial sequence  Reverse Primer
  Primer
gtcagatgatggaatactgttcat

SEQ ID NO: 12663 - DNA, 20 bp, Artificial sequence  Reverse Primer
  Primer
cacacacacacctagcaacc

SEQ ID NO: 12664 - DNA, 19 bp, Artificial sequence  Reverse Primer
  Primer
atcctgaaggaagacgctg

SEQ ID NO: 12665 - DNA, 22 bp, Artificial sequence  Reverse Primer
  Primer
ttttaaaaaaacgattgatggc

SEQ ID NO: 12666 - DNA, 24 bp, Artificial sequence  Reverse Primer
  Primer
atatgtgtgtccttttgaatcatg

SEQ ID NO: 12667 - DNA, 25 bp, Artificial sequence  Reverse Primer
  Primer
taaatggaattactggamaagtacc

SEQ ID NO: 12668 - DNA, 30 bp, Artificial sequence  Reverse Primer
  Primer
ataaaccacctataataagaatagaaaata

SEQ ID NO: 12669 - DNA, 24 bp, Artificial sequence  Reverse Primer
  Primer
tatgaycattttggctcttgtatt

SEQ ID NO: 12670 - DNA, 28 bp, Artificial sequence  Reverse Primer
  Primer
tacataatatgttagctgataattgcaa

SEQ ID NO: 12671 - DNA, 23 bp, Artificial sequence  Reverse Primer
  Primer
tgcatgacattcatatttcagtc

SEQ ID NO: 12672 - DNA, 18 bp, Artificial sequence  Reverse Primer
  Primer
tttttgctgccacaggaa

SEQ ID NO: 12673 - DNA, 18 bp, Artificial sequence  Reverse Primer
  Primer
tcagaaggcacccctttt

SEQ ID NO: 12674 - DNA, 30 bp, Artificial sequence  Reverse Primer
  Primer
tagctcttaaaatttagtatatttctgttt

SEQ ID NO: 12675 - DNA, 26 bp, Artificial sequence  Reverse Primer
  Primer
aaaagaacatagaggccatattgtat

SEQ ID NO: 12676 - DNA, 19 bp, Artificial sequence  Reverse Primer
  Primer
ccaacagccacracatatc

SEQ ID NO: 12677 - DNA, 23 bp, Artificial sequence  Reverse Primer
  Primer
ctggaaagcaatttatgagacaa

SEQ ID NO: 12678 - DNA, 20 bp, Artificial sequence  Reverse Primer
  Primer
tgatcaggattttgctgaca

SEQ ID NO: 12679 - DNA, 27 bp, Artificial sequence  Reverse Primer
  Primer
aagtatgtatgtagcattgatcagacc

SEQ ID NO: 12680 - DNA, 22 bp, Artificial sequence  Reverse Primer
  Primer
attctgatttcagaacagtccc

SEQ ID NO: 12681 - DNA, 20 bp, Artificial sequence  Reverse Primer
  Primer
agatccttgtcatgccaact

SEQ ID NO: 12682 - DNA, 30 bp, Artificial sequence  Reverse Primer
  Primer
attgaatcaacaggtagtaataaagtacag

SEQ ID NO: 12683 - DNA, 23 bp, Artificial sequence  Reverse Primer
  Primer
tatttcatctgctttccctgtag

SEQ ID NO: 12684 - DNA, 27 bp, Artificial sequence  Reverse Primer
  Primer
tgaggattttacattttctttgatagt

SEQ ID NO: 12685 - DNA, 29 bp, Artificial sequence  Reverse Primer
  Primer
gatggaaaacctaaatacttttagatatg

SEQ ID NO: 12686 - DNA, 28 bp, Artificial sequence  Reverse Primer
  Primer
tttatccttcaatctcatctacaaatat

SEQ ID NO: 12687 - DNA, 23 bp, Artificial sequence  Reverse Primer
  Primer
atatccagcattccayaaaagag

SEQ ID NO: 12688 - DNA, 27 bp, Artificial sequence  Reverse Primer
  Primer
attatctcaggtcttgtaaaaattctc

SEQ ID NO: 12689 - DNA, 21 bp, Artificial sequence  Reverse Primer
  Primer
catgacaaggaattatccagc

SEQ ID NO: 12690 - DNA, 24 bp, Artificial sequence  Reverse Primer
  Primer
aattagggcgattacaaactagtg

SEQ ID NO: 12691 - DNA, 19 bp, Artificial sequence  Reverse Primer
  Primer
tatgcatggggctttaaca

SEQ ID NO: 12692 - DNA, 30 bp, Artificial sequence  Reverse Primer
  Primer
gatcctcattgatattctatttcatatata

SEQ ID NO: 12693 - DNA, 28 bp, Artificial sequence  Reverse Primer
  Primer
tagcagattataattgaagatgttttca

SEQ ID NO: 12694 - DNA, 30 bp, Artificial sequence  Reverse Primer
  Primer
ttttcaagatataatagaagtgtggttagt

SEQ ID NO: 12695 - DNA, 30 bp, Artificial sequence  Reverse Primer
  Primer
ttactccaggtaataaatgcttaattatac

SEQ ID NO: 12696 - DNA, 27 bp, Artificial sequence  Reverse Primer
  Primer
gattctaatttaggttgcattaaatca

SEQ ID NO: 12697 - DNA, 24 bp, Artificial sequence  Reverse Primer
  Primer
ttaaagtgtgcaagttcaaacact

SEQ ID NO: 12698 - DNA, 24 bp, Artificial sequence  Reverse Primer
  Primer
agcatccaattcgtgtactataag

SEQ ID NO: 12699 - DNA, 28 bp, Artificial sequence  Reverse Primer
  Primer
atttcaaaatacattaatcctagattgg

SEQ ID NO: 12700 - DNA, 21 bp, Artificial sequence  Reverse Primer
  Primer
acaccagagacatcctgaaag

SEQ ID NO: 12701 - DNA, 19 bp, Artificial sequence  Reverse Primer
  Primer
ttgcatacgtgggtttagg

SEQ ID NO: 12702 - DNA, 25 bp, Artificial sequence  Reverse Primer
  Primer
ataactctgttgccatttgattaga

SEQ ID NO: 12703 - DNA, 23 bp, Artificial sequence  Reverse Primer
  Primer
aaaagctaccgactctctttgag

SEQ ID NO: 12704 - DNA, 26 bp, Artificial sequence  Reverse Primer
  Primer
agtatgtttcagtttcacctaatcag

SEQ ID NO: 12705 - DNA, 24 bp, Artificial sequence  Reverse Primer
  Primer
aaatttaggttcatggtttcaaag

SEQ ID NO: 12706 - DNA, 25 bp, Artificial sequence  Reverse Primer
  Primer
tacaactctcgtagtaatgtcagcc

SEQ ID NO: 12707 - DNA, 27 bp, Artificial sequence  Reverse Primer
  Primer
aaagtaaagggtggtaagagtttttaa

SEQ ID NO: 12708 - DNA, 26 bp, Artificial sequence  Reverse Primer
  Primer
aggtttatttttgtctacatgaaggt

SEQ ID NO: 12709 - DNA, 26 bp, Artificial sequence  Reverse Primer
  Primer
tgatgacagtataaagcaagatttct

SEQ ID NO: 12710 - DNA, 20 bp, Artificial sequence  Reverse Primer
  Primer
gaagatggaagaggggaaga

SEQ ID NO: 12711 - DNA, 24 bp, Artificial sequence  Reverse Primer
  Primer
tcaccacaaaaaacagaataaaac

SEQ ID NO: 12712 - DNA, 18 bp, Artificial sequence  Reverse Primer
  Primer
cgcctgaaaccgtctcat

SEQ ID NO: 12713 - DNA, 24 bp, Artificial sequence  Reverse Primer
  Primer
ctaaccattagatgacactgctca

SEQ ID NO: 12714 - DNA, 24 bp, Artificial sequence  Reverse Primer
  Primer
tgcacatttgttttaaagatttct

SEQ ID NO: 12715 - DNA, 27 bp, Artificial sequence  Reverse Primer
  Primer
ttttattctttagcttcttagaatggg

SEQ ID NO: 12716 - DNA, 28 bp, Artificial sequence  Reverse Primer
  Primer
atttttctgtaagttagaactatttgca

SEQ ID NO: 12717 - DNA, 19 bp, Artificial sequence  Reverse Primer
  Primer
attctttgggcgtttacca

SEQ ID NO: 12718 - DNA, 24 bp, Artificial sequence  Reverse Primer
  Primer
tttgtgtgaaaattattgctgaag

SEQ ID NO: 12719 - DNA, 24 bp, Artificial sequence  Reverse Primer
  Primer
actctcactatgcacacttcactg

SEQ ID NO: 12720 - DNA, 21 bp, Artificial sequence  Reverse Primer
  Primer
tagacaagcaaagaaacgctc

SEQ ID NO: 12721 - DNA, 26 bp, Artificial sequence  Reverse Primer
  Primer
aagaaaaccagacatctgaagttagt

SEQ ID NO: 12722 - DNA, 20 bp, Artificial sequence  Reverse Primer
  Primer
actttcgacctttaaacgcg

SEQ ID NO: 12723 - DNA, 19 bp, Artificial sequence  Reverse Primer
  Primer
ttttggctttgctgatttg

SEQ ID NO: 12724 - DNA, 24 bp, Artificial sequence  Reverse Primer
  Primer
atattagagtcagaccggcagtaa

SEQ ID NO: 12725 - DNA, 27 bp, Artificial sequence  Reverse Primer
  Primer
taagggagtggttctaagattttaatt

SEQ ID NO: 12726 - DNA, 28 bp, Artificial sequence  Reverse Primer
  Primer
tataatagaagatgttccctacactcac

SEQ ID NO: 12727 - DNA, 26 bp, Artificial sequence  Reverse Primer
  Primer
tttctaaatgtttgaaggtagattgg

SEQ ID NO: 12728 - DNA, 24 bp, Artificial sequence  Reverse Primer
  Primer
aaagaaatgttaggcatgaaaaaa

SEQ ID NO: 12729 - DNA, 24 bp, Artificial sequence  Reverse Primer
  Primer
actattcaacttttttgcaggatt

SEQ ID NO: 12730 - DNA, 18 bp, Artificial sequence  Reverse Primer
  Primer
tggcgagaaccctatcca

SEQ ID NO: 12731 - DNA, 28 bp, Artificial sequence  Reverse Primer
  Primer
cattgtgtttagataactttcaatcact

SEQ ID NO: 12732 - DNA, 23 bp, Artificial sequence  Reverse Primer
  Primer
aagtgagccttttattgcatttt

SEQ ID NO: 12733 - DNA, 21 bp, Artificial sequence  Reverse Primer
  Primer
ttatttgtcatgagagccctg

SEQ ID NO: 12734 - DNA, 28 bp, Artificial sequence  Reverse Primer
  Primer
atcctagtacaataggaaactggactaa

SEQ ID NO: 12735 - DNA, 30 bp, Artificial sequence  Reverse Primer
  Primer
aaatatccagtaattatcaactattgctac

SEQ ID NO: 12736 - DNA, 27 bp, Artificial sequence  Reverse Primer
  Primer
aataagaaagaaaccaaacttctacag

SEQ ID NO: 12737 - DNA, 22 bp, Artificial sequence  Reverse Primer
  Primer
aaatttggaaaccatgaacatc

SEQ ID NO: 12738 - DNA, 28 bp, Artificial sequence  Reverse Primer
  Primer
tatctaagtttycacatttaagtcatca

SEQ ID NO: 12739 - DNA, 28 bp, Artificial sequence  Reverse Primer
  Primer
atttcttttactttcctttctattcctt

SEQ ID NO: 12740 - DNA, 25 bp, Artificial sequence  Reverse Primer
  Primer
atctagctctgctgtctcttagagg

SEQ ID NO: 12741 - DNA, 20 bp, Artificial sequence  Reverse Primer
  Primer
atcgtgaagttcccatgtca

SEQ ID NO: 12742 - DNA, 28 bp, Artificial sequence  Reverse Primer
  Primer
atttaattttctcaaygctgtaagatag

SEQ ID NO: 12743 - DNA, 21 bp, Artificial sequence  Reverse Primer
  Primer
accttctaccagctcactcct

SEQ ID NO: 12744 - DNA, 18 bp, Artificial sequence  Reverse Primer
  Primer
agctgtggcctcagcaca

SEQ ID NO: 12745 - DNA, 27 bp, Artificial sequence  Reverse Primer
  Primer
attcgtacttcctatattttatgtcca

SEQ ID NO: 12746 - DNA, 19 bp, Artificial sequence  Reverse Primer
  Primer
aattcatgttgggcactgg

SEQ ID NO: 12747 - DNA, 22 bp, Artificial sequence  Reverse Primer
  Primer
tcaaaggaattgctcttgagtc

SEQ ID NO: 12748 - DNA, 21 bp, Artificial sequence  Reverse Primer
  Primer
ttgaaatgtacacaggacggt

SEQ ID NO: 12749 - DNA, 27 bp, Artificial sequence  Reverse Primer
  Primer
agatgaaactgaatacctagagactca

SEQ ID NO: 12750 - DNA, 23 bp, Artificial sequence  Reverse Primer
  Primer
cttgatagcayttctgtgaggag

SEQ ID NO: 12751 - DNA, 22 bp, Artificial sequence  Reverse Primer
  Primer
ttgttctctttaaagtttggcc

SEQ ID NO: 12752 - DNA, 26 bp, Artificial sequence  Reverse Primer
  Primer
gaaccagaaaagagaatgtaattgtt

SEQ ID NO: 12753 - DNA, 18 bp, Artificial sequence  Reverse Primer
  Primer
ctccctccccaccaatcc

SEQ ID NO: 12754 - DNA, 22 bp, Artificial sequence  Reverse Primer
  Primer
tttgttagcatctctgtgtccc

SEQ ID NO: 12755 - DNA, 23 bp, Artificial sequence  Reverse Primer
  Primer
aagaaacaatagtgcctcaaaca

SEQ ID NO: 12756 - DNA, 25 bp, Artificial sequence  Reverse Primer
  Primer
aataaattctccttggagttcagtg

SEQ ID NO: 12757 - DNA, 28 bp, Artificial sequence  Reverse Primer
  Primer
gacttgttaattaaccttcattttaagg

SEQ ID NO: 12758 - DNA, 24 bp, Artificial sequence  Reverse Primer
  Primer
aatcagtgtgaagttgcaatactg

SEQ ID NO: 12759 - DNA, 22 bp, Artificial sequence  Reverse Primer
  Primer
ggtaataagctggtcaagagca

SEQ ID NO: 12760 - DNA, 23 bp, Artificial sequence  Reverse Primer
  Primer
aatatttgctgagcacctactgt

SEQ ID NO: 12761 - DNA, 20 bp, Artificial sequence  Reverse Primer
  Primer
taccagctaattttcctggg

SEQ ID NO: 12762 - DNA, 20 bp, Artificial sequence  Reverse Primer
  Primer
atgtatgggatccaygtcca

SEQ ID NO: 12763 - DNA, 30 bp, Artificial sequence  Reverse Primer
  Primer
tatacatttagatttatgagggaattagaa

SEQ ID NO: 12764 - DNA, 24 bp, Artificial sequence  Reverse Primer
  Primer
attcagtaaaagtgagaatgaggg

SEQ ID NO: 12765 - DNA, 27 bp, Artificial sequence  Reverse Primer
  Primer
aaaagattcattttagaaacacacagt

SEQ ID NO: 12766 - DNA, 22 bp, Artificial sequence  Reverse Primer
  Primer
ttgtttcaggtcagtgagaaaa

SEQ ID NO: 12767 - DNA, 27 bp, Artificial sequence  Reverse Primer
  Primer
atagagagggagaaagaaaaatatgaa

SEQ ID NO: 12768 - DNA, 22 bp, Artificial sequence  Reverse Primer
  Primer
attctgctcctaacttcagcac

SEQ ID NO: 12769 - DNA, 29 bp, Artificial sequence  Reverse Primer
  Primer
caacattatctacatgtcaagttacctaa

SEQ ID NO: 12770 - DNA, 19 bp, Artificial sequence  Reverse Primer
  Primer
aaactgagctatgctggcc

SEQ ID NO: 12771 - DNA, 18 bp, Artificial sequence  Reverse Primer
  Primer
gcttcagggtggaggaac

SEQ ID NO: 12772 - DNA, 26 bp, Artificial sequence  Reverse Primer
  Primer
cttcagttatagattaacttggggaa

SEQ ID NO: 12773 - DNA, 20 bp, Artificial sequence  Reverse Primer
  Primer
gagaacccggaatcaagact

SEQ ID NO: 12774 - DNA, 22 bp, Artificial sequence  Reverse Primer
  Primer
aggagggacaatgaagactttt

SEQ ID NO: 12775 - DNA, 28 bp, Artificial sequence  Reverse Primer
  Primer
taaatgggtcagtattaacagaaattaa

SEQ ID NO: 12776 - DNA, 28 bp, Artificial sequence  Reverse Primer
  Primer
ggaaaatacatcttctcaatctcatata

SEQ ID NO: 12777 - DNA, 18 bp, Artificial sequence  Reverse Primer
  Primer
gagacggaggagagccca

SEQ ID NO: 12778 - DNA, 30 bp, Artificial sequence  Reverse Primer
  Primer
acatgtatataattttctattcctgttctc

SEQ ID NO: 12779 - DNA, 25 bp, Artificial sequence  Reverse Primer
  Primer
ttaaatctatttaaaggggcagttc

SEQ ID NO: 12780 - DNA, 18 bp, Artificial sequence  Reverse Primer
  Primer
tgcgagcctgggaatccg

SEQ ID NO: 12781 - DNA, 20 bp, Artificial sequence  Reverse Primer
  Primer
atgctcagttcctcccactt

SEQ ID NO: 12782 - DNA, 22 bp, Artificial sequence  Reverse Primer
  Primer
aagaaacctcagaatgggattc

SEQ ID NO: 12783 - DNA, 29 bp, Artificial sequence  Reverse Primer
  Primer
aaaactcttaatttctttctgtctctatg

SEQ ID NO: 12784 - DNA, 27 bp, Artificial sequence  Reverse Primer
  Primer
tattctttcactggttaatcttctgtc

SEQ ID NO: 12785 - DNA, 25 bp, Artificial sequence  Reverse Primer
  Primer
ataagaaatttggaaagaaaacagg

SEQ ID NO: 12786 - DNA, 18 bp, Artificial sequence  Reverse Primer
  Primer
tgcccattggtttcctaa

SEQ ID NO: 12787 - DNA, 20 bp, Artificial sequence  Reverse Primer
  Primer
ttcagcaagtcttcagtccc

SEQ ID NO: 12788 - DNA, 18 bp, Artificial sequence  Reverse Primer
  Primer
aaaacctgcccaaaagga

SEQ ID NO: 12789 - DNA, 23 bp, Artificial sequence  Reverse Primer
  Primer
tcattctcatcaygacagtaggt

SEQ ID NO: 12790 - DNA, 25 bp, Artificial sequence  Reverse Primer
  Primer
aataatggttgcctaattagtacgg

SEQ ID NO: 12791 - DNA, 26 bp, Artificial sequence  Reverse Primer
  Primer
caatgaaactagaatgagttcagtca

SEQ ID NO: 12792 - DNA, 18 bp, Artificial sequence  Reverse Primer
  Primer
ccttgctgcgaggagatg

SEQ ID NO: 12793 - DNA, 27 bp, Artificial sequence  Reverse Primer
  Primer
aaattttaatgagttttaagtatggcc

SEQ ID NO: 12794 - DNA, 20 bp, Artificial sequence  Reverse Primer
  Primer
tcagtaaaacttcaccggca

SEQ ID NO: 12795 - DNA, 21 bp, Artificial sequence  Reverse Primer
  Primer
ttgaagtatgcctccactgat

SEQ ID NO: 12796 - DNA, 20 bp, Artificial sequence  Reverse Primer
  Primer
ccttctcagcagagaccaaa

SEQ ID NO: 12797 - DNA, 25 bp, Artificial sequence  Reverse Primer
  Primer
ttggtcatttcaagattatttcact

SEQ ID NO: 12798 - DNA, 22 bp, Artificial sequence  Reverse Primer
  Primer
attcaagctgaagttctgttgc

SEQ ID NO: 12799 - DNA, 24 bp, Artificial sequence  Reverse Primer
  Primer
atatcaaaacctgtaaratgccat

SEQ ID NO: 12800 - DNA, 18 bp, Artificial sequence  Reverse Primer
  Primer
tcaagaggctgcccccta

SEQ ID NO: 12801 - DNA, 19 bp, Artificial sequence  Reverse Primer
  Primer
aaactttggtcaggctccc

SEQ ID NO: 12802 - DNA, 30 bp, Artificial sequence  Reverse Primer
  Primer
aataacttgcttcatttaactatatgtctg

SEQ ID NO: 12803 - DNA, 30 bp, Artificial sequence  Reverse Primer
  Primer
atagtttagagacttacatgttttgaattc

SEQ ID NO: 12804 - DNA, 30 bp, Artificial sequence  Reverse Primer
  Primer
aatattccacttattactagtcctattcta

SEQ ID NO: 12805 - DNA, 19 bp, Artificial sequence  Reverse Primer
  Primer
aaatctgcatccccaagtc

SEQ ID NO: 12806 - DNA, 23 bp, Artificial sequence  Reverse Primer
  Primer
attcccaagtcacaagtaaatgg

SEQ ID NO: 12807 - DNA, 21 bp, Artificial sequence  Reverse Primer
  Primer
tgctagactctttgaagctcg

SEQ ID NO: 12808 - DNA, 21 bp, Artificial sequence  Reverse Primer
  Primer
ttttccccaaccatctctatt

SEQ ID NO: 12809 - DNA, 27 bp, Artificial sequence  Reverse Primer
  Primer
cctcaaattaacataccattgtttatc

SEQ ID NO: 12810 - DNA, 27 bp, Artificial sequence  Reverse Primer
  Primer
aatcattctatgaagtaggttctaccg

SEQ ID NO: 12811 - DNA, 18 bp, Artificial sequence  Reverse Primer
  Primer
aaggtaaagggggcacag

SEQ ID NO: 12812 - DNA, 21 bp, Artificial sequence  Reverse Primer
  Primer
tggtggtccctataccagagt

SEQ ID NO: 12813 - DNA, 30 bp, Artificial sequence  Reverse Primer
  Primer
tctcagaagaaattagttgtttattatata

SEQ ID NO: 12814 - DNA, 25 bp, Artificial sequence  Reverse Primer
  Primer
ttatttatcaaagactggaatgctg

SEQ ID NO: 12815 - DNA, 30 bp, Artificial sequence  Reverse Primer
  Primer
ttgttatatattttcaggtacgtataccat

SEQ ID NO: 12816 - DNA, 21 bp, Artificial sequence  Reverse Primer
  Primer
atttgttgcraaatgtttgct

SEQ ID NO: 12817 - DNA, 25 bp, Artificial sequence  Reverse Primer
  Primer
cttcaaagactgcagtagaagactc

SEQ ID NO: 12818 - DNA, 19 bp, Artificial sequence  Reverse Primer
  Primer
atccctggggctagaaatc

SEQ ID NO: 12819 - DNA, 20 bp, Artificial sequence  Reverse Primer
  Primer
ttccacacaactgcaagatt

SEQ ID NO: 12820 - DNA, 24 bp, Artificial sequence  Reverse Primer
  Primer
aagaaactgaggcataagacttca

SEQ ID NO: 12821 - DNA, 30 bp, Artificial sequence  Reverse Primer
  Primer
ataattacatcttcattgtaggattttata

SEQ ID NO: 12822 - DNA, 22 bp, Artificial sequence  Reverse Primer
  Primer
tgttcaaagttctcactcctgg

SEQ ID NO: 12823 - DNA, 26 bp, Artificial sequence  Reverse Primer
  Primer
gaatatgataaagaacaaaatggaca

SEQ ID NO: 12824 - DNA, 24 bp, Artificial sequence  Reverse Primer
  Primer
ctccaactattctcagattcctct

SEQ ID NO: 12825 - DNA, 23 bp, Artificial sequence  Reverse Primer
  Primer
aacctcttttttcattaccactg

SEQ ID NO: 12826 - DNA, 20 bp, Artificial sequence  Reverse Primer
  Primer
tytgctgcctgtaaactgtg

SEQ ID NO: 12827 - DNA, 22 bp, Artificial sequence  Reverse Primer
  Primer
taatctaattgcacctcctccc

SEQ ID NO: 12828 - DNA, 18 bp, Artificial sequence  Reverse Primer
  Primer
accttccagtccccggct

SEQ ID NO: 12829 - DNA, 21 bp, Artificial sequence  Reverse Primer
  Primer
tatcaagaaggagtgtggcaa

SEQ ID NO: 12830 - DNA, 24 bp, Artificial sequence  Reverse Primer
  Primer
carcattcagaggttcagaaatat

SEQ ID NO: 12831 - DNA, 21 bp, Artificial sequence  Reverse Primer
  Primer
aaagaggggctgtttatgcta

SEQ ID NO: 12832 - DNA, 18 bp, Artificial sequence  Reverse Primer
  Primer
ggccattcaatgtccctg

SEQ ID NO: 12833 - DNA, 24 bp, Artificial sequence  Reverse Primer
  Primer
agttagaaatgctttggtttgaga

SEQ ID NO: 12834 - DNA, 18 bp, Artificial sequence  Reverse Primer
  Primer
ttctttaccgccagcgcc

SEQ ID NO: 12835 - DNA, 28 bp, Artificial sequence  Reverse Primer
  Primer
tttactgtgaaataatgtactccacttg

SEQ ID NO: 12836 - DNA, 19 bp, Artificial sequence  Reverse Primer
  Primer
aaaagtccctgccctaatg

SEQ ID NO: 12837 - DNA, 25 bp, Artificial sequence  Reverse Primer
  Primer
aaagggaactaagtcacaataaacc

SEQ ID NO: 12838 - DNA, 19 bp, Artificial sequence  Reverse Primer
  Primer
cacttgatcacttggcatt

SEQ ID NO: 12839 - DNA, 26 bp, Artificial sequence  Reverse Primer
  Primer
tamaagtccatgagattttaaggttt

SEQ ID NO: 12840 - DNA, 23 bp, Artificial sequence  Reverse Primer
  Primer
tataaataagctttgaggccaca

SEQ ID NO: 12841 - DNA, 29 bp, Artificial sequence  Reverse Primer
  Primer
ttaatctactatgataggaaacaaatggt

SEQ ID NO: 12842 - DNA, 21 bp, Artificial sequence  Reverse Primer
  Primer
tttgctttgatgttccaactg

SEQ ID NO: 12843 - DNA, 24 bp, Artificial sequence  Reverse Primer
  Primer
acctagcaactaaagaaggacaag

SEQ ID NO: 12844 - DNA, 21 bp, Artificial sequence  Reverse Primer
  Primer
tatgcatcgaggatccattaa

SEQ ID NO: 12845 - DNA, 27 bp, Artificial sequence  Reverse Primer
  Primer
ttaaaagtaaaggaaawtttgaagagg

SEQ ID NO: 12846 - DNA, 25 bp, Artificial sequence  Reverse Primer
  Primer
aagactttctagttcagagaccctc

SEQ ID NO: 12847 - DNA, 25 bp, Artificial sequence  Reverse Primer
  Primer
tgcagtcagtagagtaattaaaggc

SEQ ID NO: 12848 - DNA, 18 bp, Artificial sequence  Reverse Primer
  Primer
gccgaacacgctctccct

SEQ ID NO: 12849 - DNA, 24 bp, Artificial sequence  Reverse Primer
  Primer
acccatttatctgagaggtctaca

SEQ ID NO: 12850 - DNA, 22 bp, Artificial sequence  Reverse Primer
  Primer
aagcttcctttcttccaaatct

SEQ ID NO: 12851 - DNA, 23 bp, Artificial sequence  Reverse Primer
  Primer
tattctgatgatgagagattgcg

SEQ ID NO: 12852 - DNA, 22 bp, Artificial sequence  Reverse Primer
  Primer
ttaggatgcttccaaatcagtc

SEQ ID NO: 12853 - DNA, 24 bp, Artificial sequence  Reverse Primer
  Primer
ccaataaaacaggcctaactttag

SEQ ID NO: 12854 - DNA, 19 bp, Artificial sequence  Reverse Primer
  Primer
tcgtccatcctgtgtcagt

SEQ ID NO: 12855 - DNA, 25 bp, Artificial sequence  Reverse Primer
  Primer
aaaggaagacatacaaatctgagaa

SEQ ID NO: 12856 - DNA, 26 bp, Artificial sequence  Reverse Primer
  Primer
aggaagtacacttttattgctttttt

SEQ ID NO: 12857 - DNA, 29 bp, Artificial sequence  Reverse Primer
  Primer
ttaagagtctacttgtaatgttttactcg

SEQ ID NO: 12858 - DNA, 18 bp, Artificial sequence  Reverse Primer
  Primer
tcacactggaaggctgca

SEQ ID NO: 12859 - DNA, 22 bp, Artificial sequence  Reverse Primer
  Primer
gtgacgaatctcttattgtccg

SEQ ID NO: 12860 - DNA, 18 bp, Artificial sequence  Reverse Primer
  Primer
acctsatgacctggggcc

SEQ ID NO: 12861 - DNA, 26 bp, Artificial sequence  Reverse Primer
  Primer
atgcctggtttactttattaactttg

SEQ ID NO: 12862 - DNA, 30 bp, Artificial sequence  Reverse Primer
  Primer
ctggagtttaaaaatataaacatcatacac

SEQ ID NO: 12863 - DNA, 22 bp, Artificial sequence  Reverse Primer
  Primer
tggtcccttaaaggaaaaagtc

SEQ ID NO: 12864 - DNA, 18 bp, Artificial sequence  Reverse Primer
  Primer
ccctctctgtgcttcggt

SEQ ID NO: 12865 - DNA, 23 bp, Artificial sequence  Reverse Primer
  Primer
tgcctgtcttggttgtacatatt

SEQ ID NO: 12866 - DNA, 28 bp, Artificial sequence  Reverse Primer
  Primer
caaaactaaaactagaggagatgaaagt

SEQ ID NO: 12867 - DNA, 18 bp, Artificial sequence  Reverse Primer
  Primer
accagaatgctccgcgca

SEQ ID NO: 12868 - DNA, 23 bp, Artificial sequence  Reverse Primer
  Primer
tgctgaaatcaactacagtcatg

SEQ ID NO: 12869 - DNA, 24 bp, Artificial sequence  Reverse Primer
  Primer
ataaatatttgagggcctgtaatg

SEQ ID NO: 12870 - DNA, 22 bp, Artificial sequence  Reverse Primer
  Primer
tcctatcggtgagacatttgtt

SEQ ID NO: 12871 - DNA, 21 bp, Artificial sequence  Reverse Primer
  Primer
aaacacaggaccaaatccatc

SEQ ID NO: 12872 - DNA, 30 bp, Artificial sequence  Reverse Primer
  Primer
gtgcttaaaatgaatactctatatttatca

SEQ ID NO: 12873 - DNA, 19 bp, Artificial sequence  Reverse Primer
  Primer
ccacttagggcacttccag

SEQ ID NO: 12874 - DNA, 26 bp, Artificial sequence  Reverse Primer
  Primer
aactgtagtcctttacatgttttcac

SEQ ID NO: 12875 - DNA, 26 bp, Artificial sequence  Reverse Primer
  Primer
aagtttgaaatagtgacagattgtcc

SEQ ID NO: 12876 - DNA, 21 bp, Artificial sequence  Reverse Primer
  Primer
ttcaagttcaggttttgctgt

SEQ ID NO: 12877 - DNA, 19 bp, Artificial sequence  Reverse Primer
  Primer
attctcccaactgggaagc

SEQ ID NO: 12878 - DNA, 24 bp, Artificial sequence  Reverse Primer
  Primer
aatatccaaatggattattccaaa

SEQ ID NO: 12879 - DNA, 18 bp, Artificial sequence  Reverse Primer
  Primer
atggagtcccagccttca

SEQ ID NO: 12880 - DNA, 28 bp, Artificial sequence  Reverse Primer
  Primer
ctgtttaaagtgttatggttaattcaaa

SEQ ID NO: 12881 - DNA, 18 bp, Artificial sequence  Reverse Primer
  Primer
tggagcactcccgtgatc

SEQ ID NO: 12882 - DNA, 19 bp, Artificial sequence  Reverse Primer
  Primer
tgaaccacggtcattctcc

SEQ ID NO: 12883 - DNA, 21 bp, Artificial sequence  Reverse Primer
  Primer
agactagagacaggagcccag

SEQ ID NO: 12884 - DNA, 18 bp, Artificial sequence  Reverse Primer
  Primer
agccctaagcagtccctg

SEQ ID NO: 12885 - DNA, 30 bp, Artificial sequence  Reverse Primer
  Primer
aacactagagtgtaaattttctagtaactt

SEQ ID NO: 12886 - DNA, 18 bp, Artificial sequence  Reverse Primer
  Primer
atgccgtttcctggctct

SEQ ID NO: 12887 - DNA, 25 bp, Artificial sequence  Reverse Primer
  Primer
tgtgcttcatcctttagatagaaaa

SEQ ID NO: 12888 - DNA, 27 bp, Artificial sequence  Reverse Primer
  Primer
tatttcaagcttgcagtcattagtata

SEQ ID NO: 12889 - DNA, 20 bp, Artificial sequence  Reverse Primer
  Primer
tttctgaacgtcaccaagac

SEQ ID NO: 12890 - DNA, 30 bp, Artificial sequence  Reverse Primer
  Primer
aatataaatctgtacatttaagcagtagtt

SEQ ID NO: 12891 - DNA, 30 bp, Artificial sequence  Reverse Primer
  Primer
agtagtattcactacatcacatattttcat

SEQ ID NO: 12892 - DNA, 25 bp, Artificial sequence  Reverse Primer
  Primer
ataaacactaaaagtcattggctga

SEQ ID NO: 12893 - DNA, 24 bp, Artificial sequence  Reverse Primer
  Primer
atgctgatatcttgttcaacgtag

SEQ ID NO: 12894 - DNA, 28 bp, Artificial sequence  Reverse Primer
  Primer
aaaaagagaacttagagatagtcctgtt

SEQ ID NO: 12895 - DNA, 20 bp, Artificial sequence  Reverse Primer
  Primer
acyttgatcccacacttcca

SEQ ID NO: 12896 - DNA, 21 bp, Artificial sequence  Reverse Primer
  Primer
tgcattgactaaaacccagac

SEQ ID NO: 12897 - DNA, 27 bp, Artificial sequence  Reverse Primer
  Primer
tgattatgaaactgaaacaaagtaaga

SEQ ID NO: 12898 - DNA, 23 bp, Artificial sequence  Reverse Primer
  Primer
agaccagaaaggcatctagtgtt

SEQ ID NO: 12899 - DNA, 20 bp, Artificial sequence  Reverse Primer
  Primer
ttttttggtgccgtaaaaag

SEQ ID NO: 12900 - DNA, 27 bp, Artificial sequence  Reverse Primer
  Primer
ttattaaaacctgattttctcaacatg

SEQ ID NO: 12901 - DNA, 25 bp, Artificial sequence  Reverse Primer
  Primer
aaagtctaattagaaatgagagggg

SEQ ID NO: 12902 - DNA, 22 bp, Artificial sequence  Reverse Primer
  Primer
taagtgcagctcagtctgctag

SEQ ID NO: 12903 - DNA, 26 bp, Artificial sequence  Reverse Primer
  Primer
tttgaacttgactttgacatttactt

SEQ ID NO: 12904 - DNA, 25 bp, Artificial sequence  Reverse Primer
  Primer
attttcaacagttttcactttcttc

SEQ ID NO: 12905 - DNA, 29 bp, Artificial sequence  Reverse Primer
  Primer
aaaagatagtatctgattacattggtgtc

SEQ ID NO: 12906 - DNA, 22 bp, Artificial sequence  Reverse Primer
  Primer
atgaattatcacacagcaagcc

SEQ ID NO: 12907 - DNA, 22 bp, Artificial sequence  Reverse Primer
  Primer
ggggagataattctgacaactg

SEQ ID NO: 12908 - DNA, 24 bp, Artificial sequence  Reverse Primer
  Primer
attctggaaaaattatttgcaatg

SEQ ID NO: 12909 - DNA, 24 bp, Artificial sequence  Reverse Primer
  Primer
gaaaacatttccaaaaaggaaata

SEQ ID NO: 12910 - DNA, 22 bp, Artificial sequence  Reverse Primer
  Primer
agttgaatctcctagggctttt

SEQ ID NO: 12911 - DNA, 28 bp, Artificial sequence  Reverse Primer
  Primer
aaactcagaaaaagtaaaataagaaggc

SEQ ID NO: 12912 - DNA, 20 bp, Artificial sequence  Reverse Primer
  Primer
catgacacagcacatgtgag

SEQ ID NO: 12913 - DNA, 22 bp, Artificial sequence  Reverse Primer
  Primer
aaactctgcttcggtgaattaa

SEQ ID NO: 12914 - DNA, 28 bp, Artificial sequence  Reverse Primer
  Primer
atgttgtcattttaagttctttcactaa

SEQ ID NO: 12915 - DNA, 21 bp, Artificial sequence  Reverse Primer
  Primer
aatgctgctcactgacagaaa

SEQ ID NO: 12916 - DNA, 21 bp, Artificial sequence  Reverse Primer
  Primer
aatttcacaatgaccgtgtcc

SEQ ID NO: 12917 - DNA, 27 bp, Artificial sequence  Reverse Primer
  Primer
ttaatatartaagttgctgaatttggc

SEQ ID NO: 12918 - DNA, 30 bp, Artificial sequence  Reverse Primer
  Primer
tcttctagaaaatagaactaataatatacc

SEQ ID NO: 12919 - DNA, 23 bp, Artificial sequence  Reverse Primer
  Primer
atggtagatagaagaaaccccag

SEQ ID NO: 12920 - DNA, 22 bp, Artificial sequence  Reverse Primer
  Primer
agcagtgaacagaacagacaac

SEQ ID NO: 12921 - DNA, 25 bp, Artificial sequence  Reverse Primer
  Primer
agttttggctataatctcaatgaca

SEQ ID NO: 12922 - DNA, 25 bp, Artificial sequence  Reverse Primer
  Primer
tttgattcaaattcacctctaaatg

SEQ ID NO: 12923 - DNA, 21 bp, Artificial sequence  Reverse Primer
  Primer
agacagacaataagcaggcaa

SEQ ID NO: 12924 - DNA, 24 bp, Artificial sequence  Reverse Primer
  Primer
attgttaagaaagctgtctggagt

SEQ ID NO: 12925 - DNA, 26 bp, Artificial sequence  Reverse Primer
  Primer
tttgtaaaagcacttagaacagtcag

SEQ ID NO: 12926 - DNA, 25 bp, Artificial sequence  Reverse Primer
  Primer
aatatgtaaacgaagaagcataagc

SEQ ID NO: 12927 - DNA, 20 bp, Artificial sequence  Reverse Primer
  Primer
aaaaatcacttggcttccct

SEQ ID NO: 12928 - DNA, 30 bp, Artificial sequence  Reverse Primer
  Primer
atattctttcaactacgttacatattttag

SEQ ID NO: 12929 - DNA, 22 bp, Artificial sequence  Reverse Primer
  Primer
attttattgacaaaagcaggca

SEQ ID NO: 12930 - DNA, 19 bp, Artificial sequence  Reverse Primer
  Primer
ttcacgagagctccaacct

SEQ ID NO: 12931 - DNA, 27 bp, Artificial sequence  Reverse Primer
  Primer
attaccacttgagtaatgatttcactt

SEQ ID NO: 12932 - DNA, 24 bp, Artificial sequence  Reverse Primer
  Primer
gcctatgtgtctattcaggagaat

SEQ ID NO: 12933 - DNA, 18 bp, Artificial sequence  Reverse Primer
  Primer
ctctaagcgctgggcagg

SEQ ID NO: 12934 - DNA, 21 bp, Artificial sequence  Reverse Primer
  Primer
tttaggaaggacaagcgactt

SEQ ID NO: 12935 - DNA, 24 bp, Artificial sequence  Reverse Primer
  Primer
atttgaatccaaaactgaatatgg

SEQ ID NO: 12936 - DNA, 25 bp, Artificial sequence  Reverse Primer
  Primer
taatttcctttgtaaaccatagcac

SEQ ID NO: 12937 - DNA, 22 bp, Artificial sequence  Reverse Primer
  Primer
agggagaatgatctagtgcctt

SEQ ID NO: 12938 - DNA, 22 bp, Artificial sequence  Reverse Primer
  Primer
aggacttacccacaaagtcttc

SEQ ID NO: 12939 - DNA, 28 bp, Artificial sequence  Reverse Primer
  Primer
aattaagctaatttaactcaacctgatc

SEQ ID NO: 12940 - DNA, 18 bp, Artificial sequence  Reverse Primer
  Primer
cctgcctgcactgctgca

SEQ ID NO: 12941 - DNA, 18 bp, Artificial sequence  Reverse Primer
  Primer
aagttggcacagaccggt

SEQ ID NO: 12942 - DNA, 18 bp, Artificial sequence  Reverse Primer
  Primer
gcctcctccctgtgtttt

SEQ ID NO: 12943 - DNA, 18 bp, Artificial sequence  Reverse Primer
  Primer
ccatgagcaggggtgaaa

SEQ ID NO: 12944 - DNA, 30 bp, Artificial sequence  Reverse Primer
  Primer
tgtacaatataaagacatctgattagtaga

SEQ ID NO: 12945 - DNA, 22 bp, Artificial sequence  Reverse Primer
  Primer
tgaactttaatggtggctgttt

SEQ ID NO: 12946 - DNA, 25 bp, Artificial sequence  Reverse Primer
  Primer
attttattacttagaggctgcaggt

SEQ ID NO: 12947 - DNA, 26 bp, Artificial sequence  Reverse Primer
  Primer
tattttttctattacattgcaagtgg

SEQ ID NO: 12948 - DNA, 23 bp, Artificial sequence  Reverse Primer
  Primer
aaggcatgtgtttatgatttgat

SEQ ID NO: 12949 - DNA, 25 bp, Artificial sequence  Reverse Primer
  Primer
ttagaagcatctgtataacctcagg

SEQ ID NO: 12950 - DNA, 24 bp, Artificial sequence  Reverse Primer
  Primer
ttttgtacttgaaacctcttcatc

SEQ ID NO: 12951 - DNA, 23 bp, Artificial sequence  Reverse Primer
  Primer
aatgaagcatttctgttgacttg

SEQ ID NO: 12952 - DNA, 18 bp, Artificial sequence  Reverse Primer
  Primer
aaaattcctgggacgtgg

SEQ ID NO: 12953 - DNA, 23 bp, Artificial sequence  Reverse Primer
  Primer
aatcacttcaaaaatatcagccc

SEQ ID NO: 12954 - DNA, 21 bp, Artificial sequence  Reverse Primer
  Primer
attctggagcccaaattactt

SEQ ID NO: 12955 - DNA, 20 bp, Artificial sequence  Reverse Primer
  Primer
aaatccaagaagatgcaacg

SEQ ID NO: 12956 - DNA, 21 bp, Artificial sequence  Reverse Primer
  Primer
tcttctgttagcttgagctgg

SEQ ID NO: 12957 - DNA, 22 bp, Artificial sequence  Reverse Primer
  Primer
aattcacttccagaatctgctg

SEQ ID NO: 12958 - DNA, 22 bp, Artificial sequence  Reverse Primer
  Primer
atggaaaatcttccacttctcc

SEQ ID NO: 12959 - DNA, 28 bp, Artificial sequence  Reverse Primer
  Primer
ggaaaataagagtttctctataactgga

SEQ ID NO: 12960 - DNA, 18 bp, Artificial sequence  Reverse Primer
  Primer
tgctgcacagccatgggt

SEQ ID NO: 12961 - DNA, 18 bp, Artificial sequence  Reverse Primer
  Primer
tctcacccaggctaaccc

SEQ ID NO: 12962 - DNA, 18 bp, Artificial sequence  Reverse Primer
  Primer
aagggaagggggagagag

SEQ ID NO: 12963 - DNA, 21 bp, Artificial sequence  Reverse Primer
  Primer
aggatctcatcttgttcctgg

SEQ ID NO: 12964 - DNA, 25 bp, Artificial sequence  Reverse Primer
  Primer
cagtaggatcaataaatagcaagca

SEQ ID NO: 12965 - DNA, 21 bp, Artificial sequence  Reverse Primer
  Primer
aatttcacaatgaccgtgtcc

SEQ ID NO: 12966 - DNA, 27 bp, Artificial sequence  Reverse Primer
  Primer
tatttttacagcagtatgtgttctgtg

SEQ ID NO: 12967 - DNA, 29 bp, Artificial sequence  Reverse Primer
  Primer
ttaagtgatgataagtttatgacaatgag

SEQ ID NO: 12968 - DNA, 21 bp, Artificial sequence  Reverse Primer
  Primer
gaagaccaaatatgcttgctg

SEQ ID NO: 12969 - DNA, 25 bp, Artificial sequence  Reverse Primer
  Primer
agttttattgcttacagattttgca

SEQ ID NO: 12970 - DNA, 21 bp, Artificial sequence  Reverse Primer
  Primer
aatgcaaattcaagttcagca

SEQ ID NO: 12971 - DNA, 28 bp, Artificial sequence  Reverse Primer
  Primer
acacygtcatgtaacatctatatgaatc

SEQ ID NO: 12972 - DNA, 19 bp, Artificial sequence  Reverse Primer
  Primer
ctcttcatcctgtccccat

SEQ ID NO: 12973 - DNA, 30 bp, Artificial sequence  Reverse Primer
  Primer
ataaatatgtgtgtatatgtgtttgtgtat

SEQ ID NO: 12974 - DNA, 30 bp, Artificial sequence  Reverse Primer
  Primer
ggattaatattgttatctacataaaagaaa

SEQ ID NO: 12975 - DNA, 20 bp, Artificial sequence  Reverse Primer
  Primer
aacaaccccgctattctttc

SEQ ID NO: 12976 - DNA, 22 bp, Artificial sequence  Reverse Primer
  Primer
accaacttgagtctggaatcag

SEQ ID NO: 12977 - DNA, 25 bp, Artificial sequence  Reverse Primer
  Primer
aaagatgaacatcagatcaagaaaa

SEQ ID NO: 12978 - DNA, 28 bp, Artificial sequence  Reverse Primer
  Primer
gtctttctaattaaatccacttctcatc

SEQ ID NO: 12979 - DNA, 25 bp, Artificial sequence  Reverse Primer
  Primer
aattgactagaactgagttgcaaag

SEQ ID NO: 12980 - DNA, 24 bp, Artificial sequence  Reverse Primer
  Primer
taggaaatctgtcagaaacttggt

SEQ ID NO: 12981 - DNA, 26 bp, Artificial sequence  Reverse Primer
  Primer
agagagagaggagatgtaaattctca

SEQ ID NO: 12982 - DNA, 19 bp, Artificial sequence  Reverse Primer
  Primer
tctttaaaggyggggatgg

SEQ ID NO: 12983 - DNA, 20 bp, Artificial sequence  Reverse Primer
  Primer
acgttgtcagccatgagttc

SEQ ID NO: 12984 - DNA, 23 bp, Artificial sequence  Reverse Primer
  Primer
aaagtggaaatgatgttcagttg

SEQ ID NO: 12985 - DNA, 25 bp, Artificial sequence  Reverse Primer
  Primer
tgttacttacatttcaaaacaggct

SEQ ID NO: 12986 - DNA, 28 bp, Artificial sequence  Reverse Primer
  Primer
taacatgaaattattaccttcagttcag

SEQ ID NO: 12987 - DNA, 26 bp, Artificial sequence  Reverse Primer
  Primer
agagaaacaatatcgataggaagatt

SEQ ID NO: 12988 - DNA, 21 bp, Artificial sequence  Reverse Primer
  Primer
attagttccaggrctcctctg

SEQ ID NO: 12989 - DNA, 25 bp, Artificial sequence  Reverse Primer
  Primer
taatgctggttaaacattttcattc

SEQ ID NO: 12990 - DNA, 21 bp, Artificial sequence  Reverse Primer
  Primer
ctcaggtgcatgagagctact

SEQ ID NO: 12991 - DNA, 19 bp, Artificial sequence  Reverse Primer
  Primer
cagtttttggagtgggtgc

SEQ ID NO: 12992 - DNA, 28 bp, Artificial sequence  Reverse Primer
  Primer
aaagctattaaattgtsaagctaagatt

SEQ ID NO: 12993 - DNA, 25 bp, Artificial sequence  Reverse Primer
  Primer
tgagcagacttaggttgttacagtt

SEQ ID NO: 12994 - DNA, 29 bp, Artificial sequence  Reverse Primer
  Primer
atatataagtgtaattcctgaccatgagt

SEQ ID NO: 12995 - DNA, 22 bp, Artificial sequence  Reverse Primer
  Primer
aatgccttcaactcatcttagc

SEQ ID NO: 12996 - DNA, 24 bp, Artificial sequence  Reverse Primer
  Primer
ttttaaaaacacttgcagtcacat

SEQ ID NO: 12997 - DNA, 28 bp, Artificial sequence  Reverse Primer
  Primer
aagatctttcctaattgaaaactactgt

SEQ ID NO: 12998 - DNA, 24 bp, Artificial sequence  Reverse Primer
  Primer
ggaagtagatgctggtagagaaac

SEQ ID NO: 12999 - DNA, 20 bp, Artificial sequence  Reverse Primer
  Primer
agggagctgatatcctcagg

SEQ ID NO: 13000 - DNA, 25 bp, Artificial sequence  Reverse Primer
  Primer
taaaccatagtgagtggtttagctc

SEQ ID NO: 13001 - DNA, 22 bp, Artificial sequence  Reverse Primer
  Primer
atacctgycaaaaccacttcaa

SEQ ID NO: 13002 - DNA, 19 bp, Artificial sequence  Reverse Primer
  Primer
atgtctgcacagcctctga

SEQ ID NO: 13003 - DNA, 23 bp, Artificial sequence  Reverse Primer
  Primer
aagctcatgagaaagacatgttc

SEQ ID NO: 13004 - DNA, 25 bp, Artificial sequence  Reverse Primer
  Primer
tcgtgaaaattcttctcattttaag

SEQ ID NO: 13005 - DNA, 20 bp, Artificial sequence  Reverse Primer
  Primer
atagacgccccttttgtttt

SEQ ID NO: 13006 - DNA, 24 bp, Artificial sequence  Reverse Primer
  Primer
tacagatatcaaaggaaggcagtc

SEQ ID NO: 13007 - DNA, 27 bp, Artificial sequence  Reverse Primer
  Primer
tcagatgataaaattctttaactggat

SEQ ID NO: 13008 - DNA, 26 bp, Artificial sequence  Reverse Primer
  Primer
aatatacattccaattactgcagttg

SEQ ID NO: 13009 - DNA, 28 bp, Artificial sequence  Reverse Primer
  Primer
gttactttttagtgtctgatggagatag

SEQ ID NO: 13010 - DNA, 27 bp, Artificial sequence  Reverse Primer
  Primer
ttggctagaattmtgagtaaatgatta

SEQ ID NO: 13011 - DNA, 30 bp, Artificial sequence  Reverse Primer
  Primer
ttatatgtgctgtcttctattttctttata

SEQ ID NO: 13012 - DNA, 22 bp, Artificial sequence  Reverse Primer
  Primer
tttcataaaatggcctagtgct

SEQ ID NO: 13013 - DNA, 30 bp, Artificial sequence  Reverse Primer
  Primer
tttatcttaattattcttctgtagaaggtg

SEQ ID NO: 13014 - DNA, 27 bp, Artificial sequence  Reverse Primer
  Primer
aagatttatcatctgtaggctatcaca

SEQ ID NO: 13015 - DNA, 27 bp, Artificial sequence  Reverse Primer
  Primer
aaaagtatttgggtagatttttaacct

SEQ ID NO: 13016 - DNA, 18 bp, Artificial sequence  Reverse Primer
  Primer
tccccaggtcgagtgcca

SEQ ID NO: 13017 - DNA, 22 bp, Artificial sequence  Reverse Primer
  Primer
aaatgtgtcatccattgattgg

SEQ ID NO: 13018 - DNA, 30 bp, Artificial sequence  Reverse Primer
  Primer
ctacatactatatatgatttcaactgtatg

SEQ ID NO: 13019 - DNA, 21 bp, Artificial sequence  Reverse Primer
  Primer
caagagacttctccaggacca

SEQ ID NO: 13020 - DNA, 18 bp, Artificial sequence  Reverse Primer
  Primer
tgacccagacccgcagct

SEQ ID NO: 13021 - DNA, 23 bp, Artificial sequence  Reverse Primer
  Primer
tacaaagaaaggcagtgtatcag

SEQ ID NO: 13022 - DNA, 26 bp, Artificial sequence  Reverse Primer
  Primer
taattgatgtatgaaaagtggactct

SEQ ID NO: 13023 - DNA, 23 bp, Artificial sequence  Reverse Primer
  Primer
gaacggtatttaaagcaaaatga

SEQ ID NO: 13024 - DNA, 24 bp, Artificial sequence  Reverse Primer
  Primer
tagtaagcgtgtaacttctggtca

SEQ ID NO: 13025 - DNA, 23 bp, Artificial sequence  Reverse Primer
  Primer
tctgaggcactttctgaagtatt

SEQ ID NO: 13026 - DNA, 18 bp, Artificial sequence  Reverse Primer
  Primer
tccggggtcctctccaag

SEQ ID NO: 13027 - DNA, 23 bp, Artificial sequence  Reverse Primer
  Primer
actttgacccatgaaatgttaga

SEQ ID NO: 13028 - DNA, 30 bp, Artificial sequence  Reverse Primer
  Primer
aattctttcaactaatatagtaataaccat

SEQ ID NO: 13029 - DNA, 26 bp, Artificial sequence  Reverse Primer
  Primer
attatttttaatgtacagttcagtgg

SEQ ID NO: 13030 - DNA, 23 bp, Artificial sequence  Reverse Primer
  Primer
ttttctaagtgaggctttgaaca

SEQ ID NO: 13031 - DNA, 23 bp, Artificial sequence  Reverse Primer
  Primer
ttacttcctctgcacagagattc

SEQ ID NO: 13032 - DNA, 24 bp, Artificial sequence  Reverse Primer
  Primer
aagcatttctgttgacttgaatac

SEQ ID NO: 13033 - DNA, 26 bp, Artificial sequence  Reverse Primer
  Primer
tatatgtttttcaactgcaacaaatc

SEQ ID NO: 13034 - DNA, 20 bp, Artificial sequence  Reverse Primer
  Primer
attaaaggaagaggtgggga

SEQ ID NO: 13035 - DNA, 28 bp, Artificial sequence  Reverse Primer
  Primer
tataattatgaagtttttcctcttcaag

SEQ ID NO: 13036 - DNA, 20 bp, Artificial sequence  Reverse Primer
  Primer
agcgcatctgtttcttcaaa

SEQ ID NO: 13037 - DNA, 18 bp, Artificial sequence  Reverse Primer
  Primer
tccctccatccggaaagt

SEQ ID NO: 13038 - DNA, 26 bp, Artificial sequence  Reverse Primer
  Primer
ttaagtatcatcattgtcgtttttct

SEQ ID NO: 13039 - DNA, 23 bp, Artificial sequence  Reverse Primer
  Primer
aaaagacctgactgcataccttc

SEQ ID NO: 13040 - DNA, 24 bp, Artificial sequence  Reverse Primer
  Primer
aagaaaagttagcaaactcagtgg

SEQ ID NO: 13041 - DNA, 18 bp, Artificial sequence  Reverse Primer
  Primer
tatgagcaggggagcaga

SEQ ID NO: 13042 - DNA, 24 bp, Artificial sequence  Reverse Primer
  Primer
aattttcccactgtaagtcaagtt

SEQ ID NO: 13043 - DNA, 27 bp, Artificial sequence  Reverse Primer
  Primer
tttataagatgcacagtcagatctaca

SEQ ID NO: 13044 - DNA, 26 bp, Artificial sequence  Reverse Primer
  Primer
tatcmaagtgtttgaaggattctatc

SEQ ID NO: 13045 - DNA, 19 bp, Artificial sequence  Reverse Primer
  Primer
accacaagggcttgttttc

SEQ ID NO: 13046 - DNA, 28 bp, Artificial sequence  Reverse Primer
  Primer
atttagatttatgagggaattagaactg

SEQ ID NO: 13047 - DNA, 30 bp, Artificial sequence  Reverse Primer
  Primer
ttcactgattctatgaygtaattatctata

SEQ ID NO: 13048 - DNA, 28 bp, Artificial sequence  Reverse Primer
  Primer
gaaaaaaattaacatataaactgcaagg

SEQ ID NO: 13049 - DNA, 22 bp, Artificial sequence  Reverse Primer
  Primer
tgactgcttttctaacaaccac

SEQ ID NO: 13050 - DNA, 22 bp, Artificial sequence  Reverse Primer
  Primer
ctcctgaggagacaagaaacag

SEQ ID NO: 13051 - DNA, 20 bp, Artificial sequence  Reverse Primer
  Primer
agacaaatgaattgcctgca

SEQ ID NO: 13052 - DNA, 21 bp, Artificial sequence  Reverse Primer
  Primer
taagactatggcgagcacatc

SEQ ID NO: 13053 - DNA, 27 bp, Artificial sequence  Reverse Primer
  Primer
aaataaaccttttaattgcaacttacg

SEQ ID NO: 13054 - DNA, 22 bp, Artificial sequence  Reverse Primer
  Primer
aacaggcagatgagaagagaga

SEQ ID NO: 13055 - DNA, 23 bp, Artificial sequence  Reverse Primer
  Primer
aatgatgagtagcctcatgtgtt

SEQ ID NO: 13056 - DNA, 27 bp, Artificial sequence  Reverse Primer
  Primer
aagtatgttggacatttaatctctgtt

SEQ ID NO: 13057 - DNA, 18 bp, Artificial sequence  Reverse Primer
  Primer
agccacacatgggagaac

SEQ ID NO: 13058 - DNA, 18 bp, Artificial sequence  Reverse Primer
  Primer
cacaggaggcaaaggtga

SEQ ID NO: 13059 - DNA, 30 bp, Artificial sequence  Reverse Primer
  Primer
ataactaatagatgtgaaacaaagagaagc

SEQ ID NO: 13060 - DNA, 18 bp, Artificial sequence  Reverse Primer
  Primer
tcccagttgttcctttgg

SEQ ID NO: 13061 - DNA, 28 bp, Artificial sequence  Reverse Primer
  Primer
tagactgagagacttcttcagttaaatg

SEQ ID NO: 13062 - DNA, 25 bp, Artificial sequence  Reverse Primer
  Primer
attgatttttgttcttacatgctgt

SEQ ID NO: 13063 - DNA, 27 bp, Artificial sequence  Reverse Primer
  Primer
atgtcagctgaagagaatattttagaa

SEQ ID NO: 13064 - DNA, 28 bp, Artificial sequence  Reverse Primer
  Primer
tttgtaacagataatatcaaattggaga

SEQ ID NO: 13065 - DNA, 18 bp, Artificial sequence  Reverse Primer
  Primer
gcctggggaaatgtccta

SEQ ID NO: 13066 - DNA, 18 bp, Artificial sequence  Reverse Primer
  Primer
tgtgggtgcagaggagca

SEQ ID NO: 13067 - DNA, 19 bp, Artificial sequence  Reverse Primer
  Primer
agagctgatctgccaggaa

SEQ ID NO: 13068 - DNA, 23 bp, Artificial sequence  Reverse Primer
  Primer
aagatgaaaaggctggaaataat

SEQ ID NO: 13069 - DNA, 20 bp, Artificial sequence  Reverse Primer
  Primer
attttggggttcttttgctg

SEQ ID NO: 13070 - DNA, 27 bp, Artificial sequence  Reverse Primer
  Primer
cattattctacaattagttcccacatt

SEQ ID NO: 13071 - DNA, 20 bp, Artificial sequence  Reverse Primer
  Primer
attagatccaagttccgcag

SEQ ID NO: 13072 - DNA, 18 bp, Artificial sequence  Reverse Primer
  Primer
aagagctggtgggaggtc

SEQ ID NO: 13073 - DNA, 22 bp, Artificial sequence  Reverse Primer
  Primer
atctcatgtgttccttagagcg

SEQ ID NO: 13074 - DNA, 25 bp, Artificial sequence  Reverse Primer
  Primer
aggtcttttatttttctctctgctt

SEQ ID NO: 13075 - DNA, 21 bp, Artificial sequence  Reverse Primer
  Primer
ttatttccggggttaagtgat

SEQ ID NO: 13076 - DNA, 20 bp, Artificial sequence  Reverse Primer
  Primer
tgaggcttctggttagatcc

SEQ ID NO: 13077 - DNA, 27 bp, Artificial sequence  Reverse Primer
  Primer
tttactttatacagccaaggataaaga

SEQ ID NO: 13078 - DNA, 26 bp, Artificial sequence  Reverse Primer
  Primer
taggtggttgtaaataaactttgttc

SEQ ID NO: 13079 - DNA, 25 bp, Artificial sequence  Reverse Primer
  Primer
caaatgatttcagtaacrcaaattt

SEQ ID NO: 13080 - DNA, 23 bp, Artificial sequence  Reverse Primer
  Primer
tttttgaagagacaggatgagat

SEQ ID NO: 13081 - DNA, 23 bp, Artificial sequence  Reverse Primer
  Primer
ttacctcctccttttcatgtctt

SEQ ID NO: 13082 - DNA, 22 bp, Artificial sequence  Reverse Primer
  Primer
ggtgctggaataagaagctatg

SEQ ID NO: 13083 - DNA, 26 bp, Artificial sequence  Reverse Primer
  Primer
tgtgtactgaacatgatagattgaca

SEQ ID NO: 13084 - DNA, 21 bp, Artificial sequence  Reverse Primer
  Primer
cgggcttagttacctctaggc

SEQ ID NO: 13085 - DNA, 19 bp, Artificial sequence  Reverse Primer
  Primer
aggccaattccacagtgtc

SEQ ID NO: 13086 - DNA, 24 bp, Artificial sequence  Reverse Primer
  Primer
tttctacttctgtttcccatgtct

SEQ ID NO: 13087 - DNA, 30 bp, Artificial sequence  Reverse Primer
  Primer
tatactcttaattcactttatacaatttct

SEQ ID NO: 13088 - DNA, 26 bp, Artificial sequence  Reverse Primer
  Primer
gtcatctaatcatagcaagatgaaga

SEQ ID NO: 13089 - DNA, 18 bp, Artificial sequence  Reverse Primer
  Primer
tgtcagcgcctggctctc

SEQ ID NO: 13090 - DNA, 19 bp, Artificial sequence  Reverse Primer
  Primer
cctgctgatgattccagtg

SEQ ID NO: 13091 - DNA, 25 bp, Artificial sequence  Reverse Primer
  Primer
tttactcccctaaagagtttttacc

SEQ ID NO: 13092 - DNA, 21 bp, Artificial sequence  Reverse Primer
  Primer
aatgcaaagaggagaagacgt

SEQ ID NO: 13093 - DNA, 19 bp, Artificial sequence  Reverse Primer
  Primer
aagtgagcctcttgccaga

SEQ ID NO: 13094 - DNA, 30 bp, Artificial sequence  Reverse Primer
  Primer
taatagtcaaaaacacttaccaagtaatct

SEQ ID NO: 13095 - DNA, 27 bp, Artificial sequence  Reverse Primer
  Primer
cagaagaatgacataaacactagagtg

SEQ ID NO: 13096 - DNA, 21 bp, Artificial sequence  Reverse Primer
  Primer
tttccaagacacacaaatcca

SEQ ID NO: 13097 - DNA, 28 bp, Artificial sequence  Reverse Primer
  Primer
taataaaaagtcccaaagtatctctttc

SEQ ID NO: 13098 - DNA, 25 bp, Artificial sequence  Reverse Primer
  Primer
aaaataaaatcacacctcctttagg

SEQ ID NO: 13099 - DNA, 28 bp, Artificial sequence  Reverse Primer
  Primer
taaaatctttacatcagatgttttcatg

SEQ ID NO: 13100 - DNA, 18 bp, Artificial sequence  Reverse Primer
  Primer
ccttgcatccactctggc

SEQ ID NO: 13101 - DNA, 30 bp, Artificial sequence  Reverse Primer
  Primer
aaagtatgttaacagaaatagaatatacat

SEQ ID NO: 13102 - DNA, 20 bp, Artificial sequence  Reverse Primer
  Primer
taggcaatgggaagaactga

SEQ ID NO: 13103 - DNA, 18 bp, Artificial sequence  Reverse Primer
  Primer
ttcctgcccccatcctgg

SEQ ID NO: 13104 - DNA, 23 bp, Artificial sequence  Reverse Primer
  Primer
aagtcctttttccaytgtgtacc

SEQ ID NO: 13105 - DNA, 20 bp, Artificial sequence  Reverse Primer
  Primer
taaaaatgcccggagtagtg

SEQ ID NO: 13106 - DNA, 21 bp, Artificial sequence  Reverse Primer
  Primer
gagcaaaacatacttcctgcc

SEQ ID NO: 13107 - DNA, 23 bp, Artificial sequence  Reverse Primer
  Primer
tacaatgataaggtctcttgcca

SEQ ID NO: 13108 - DNA, 20 bp, Artificial sequence  Reverse Primer
  Primer
aattgcatgaagacctgtcc

SEQ ID NO: 13109 - DNA, 26 bp, Artificial sequence  Reverse Primer
  Primer
atgcctttaaaatgtttaattctctg

SEQ ID NO: 13110 - DNA, 28 bp, Artificial sequence  Reverse Primer
  Primer
tttctaactcacctttgtatcatctaca

SEQ ID NO: 13111 - DNA, 20 bp, Artificial sequence  Reverse Primer
  Primer
tcatgctggatctttccttg

SEQ ID NO: 13112 - DNA, 18 bp, Artificial sequence  Reverse Primer
  Primer
actgcctggctccacctt

SEQ ID NO: 13113 - DNA, 28 bp, Artificial sequence  Reverse Primer
  Primer
ctgttttttgttcttctttaattctctt

SEQ ID NO: 13114 - DNA, 18 bp, Artificial sequence  Reverse Primer
  Primer
acttggaagcctcaccct

SEQ ID NO: 13115 - DNA, 23 bp, Artificial sequence  Reverse Primer
  Primer
tataaamtagaggcagagcagga

SEQ ID NO: 13116 - DNA, 30 bp, Artificial sequence  Reverse Primer
  Primer
aggtagagagtatatacatacatcgacaaa

SEQ ID NO: 13117 - DNA, 25 bp, Artificial sequence  Reverse Primer
  Primer
aaatatgacaaggagtrctcacaga

SEQ ID NO: 13118 - DNA, 18 bp, Artificial sequence  Reverse Primer
  Primer
aggaaatgcgtgggaagt

SEQ ID NO: 13119 - DNA, 27 bp, Artificial sequence  Reverse Primer
  Primer
aaaattctctggtttctctctaagagt

SEQ ID NO: 13120 - DNA, 22 bp, Artificial sequence  Reverse Primer
  Primer
tgcagtaaaaaggaagctaacc

SEQ ID NO: 13121 - DNA, 21 bp, Artificial sequence  Reverse Primer
  Primer
tttaggaaggacaagcgactt

SEQ ID NO: 13122 - DNA, 26 bp, Artificial sequence  Reverse Primer
  Primer
aaaaagtgataaacctaagaccacag

SEQ ID NO: 13123 - DNA, 24 bp, Artificial sequence  Reverse Primer
  Primer
taatagctcataaataaccagccc

SEQ ID NO: 13124 - DNA, 19 bp, Artificial sequence  Reverse Primer
  Primer
caacacactgacccactcc

SEQ ID NO: 13125 - DNA, 21 bp, Artificial sequence  Reverse Primer
  Primer
atgtttgggctcataaacagg

SEQ ID NO: 13126 - DNA, 23 bp, Artificial sequence  Reverse Primer
  Primer
taattttccctttagtgtcctgg

SEQ ID NO: 13127 - DNA, 29 bp, Artificial sequence  Reverse Primer
  Primer
taaaattctgtgaggaattgtatatatgc

SEQ ID NO: 13128 - DNA, 24 bp, Artificial sequence  Reverse Primer
  Primer
tcagttttagcagattattttgcc

SEQ ID NO: 13129 - DNA, 28 bp, Artificial sequence  Reverse Primer
  Primer
ttagtacatggtaatgtatctccttcat

SEQ ID NO: 13130 - DNA, 24 bp, Artificial sequence  Reverse Primer
  Primer
attcttagaatgccacaatgactt

SEQ ID NO: 13131 - DNA, 22 bp, Artificial sequence  Reverse Primer
  Primer
aaagtgtgatgctgaaggtacc

SEQ ID NO: 13132 - DNA, 27 bp, Artificial sequence  Reverse Primer
  Primer
atttaatctgcatcaacactaagattt

SEQ ID NO: 13133 - DNA, 23 bp, Artificial sequence  Reverse Primer
  Primer
aaagctttctagtttcctgatgg

SEQ ID NO: 13134 - DNA, 30 bp, Artificial sequence  Reverse Primer
  Primer
ataattcagcatagtcctacttattsatat

SEQ ID NO: 13135 - DNA, 18 bp, Artificial sequence  Reverse Primer
  Primer
tacaagcacacagagccg

SEQ ID NO: 13136 - DNA, 21 bp, Artificial sequence  Reverse Primer
  Primer
gcaacagactctctggtgatg

SEQ ID NO: 13137 - DNA, 20 bp, Artificial sequence  Reverse Primer
  Primer
ttctctctccctgcatgttt

SEQ ID NO: 13138 - DNA, 21 bp, Artificial sequence  Reverse Primer
  Primer
ttgcctttggaatamgtttcc

SEQ ID NO: 13139 - DNA, 27 bp, Artificial sequence  Reverse Primer
  Primer
ttttctacacatagctattgattgatg

SEQ ID NO: 13140 - DNA, 20 bp, Artificial sequence  Reverse Primer
  Primer
aagtggcttagcttgtgctg

SEQ ID NO: 13141 - DNA, 30 bp, Artificial sequence  Reverse Primer
  Primer
aaaacatctaaatattgtagaactagagaa

SEQ ID NO: 13142 - DNA, 25 bp, Artificial sequence  Reverse Primer
  Primer
agctgcaaaatcatgtcattatact

SEQ ID NO: 13143 - DNA, 23 bp, Artificial sequence  Reverse Primer
  Primer
tagctgtgtaagtgataggctgg

SEQ ID NO: 13144 - DNA, 21 bp, Artificial sequence  Reverse Primer
  Primer
taagtgccttctatgaccgtc

SEQ ID NO: 13145 - DNA, 26 bp, Artificial sequence  Reverse Primer
  Primer
ttaggaataggtagaggaattgagag

SEQ ID NO: 13146 - DNA, 19 bp, Artificial sequence  Reverse Primer
  Primer
ttggattgagttggcatca

SEQ ID NO: 13147 - DNA, 18 bp, Artificial sequence  Reverse Primer
  Primer
caagctccatgctgtcct

SEQ ID NO: 13148 - DNA, 25 bp, Artificial sequence  Reverse Primer
  Primer
attgtgagggtaacgtgtctactaa

SEQ ID NO: 13149 - DNA, 30 bp, Artificial sequence  Reverse Primer
  Primer
atagttatagttgaacctaacagaaacttc

SEQ ID NO: 13150 - DNA, 30 bp, Artificial sequence  Reverse Primer
  Primer
cttttaaagagtaaactcagtctcatgtaa

SEQ ID NO: 13151 - DNA, 28 bp, Artificial sequence  Reverse Primer
  Primer
tattcggatataaatgcagagttattta

SEQ ID NO: 13152 - DNA, 28 bp, Artificial sequence  Reverse Primer
  Primer
tatatttctttgtttgaagttgtattcg

SEQ ID NO: 13153 - DNA, 21 bp, Artificial sequence  Reverse Primer
  Primer
tacccttccttgttcatatgg

SEQ ID NO: 13154 - DNA, 18 bp, Artificial sequence  Reverse Primer
  Primer
atgtttgtcgggtgcagt

SEQ ID NO: 13155 - DNA, 20 bp, Artificial sequence  Reverse Primer
  Primer
atgactcggctagaaaaagg

SEQ ID NO: 13156 - DNA, 22 bp, Artificial sequence  Reverse Primer
  Primer
aaaaggagaaccctgagaatca

SEQ ID NO: 13157 - DNA, 22 bp, Artificial sequence  Reverse Primer
  Primer
cctcccagagaatttttctttc

SEQ ID NO: 13158 - DNA, 21 bp, Artificial sequence  Reverse Primer
  Primer
tttctcgtggtcattcagact

SEQ ID NO: 13159 - DNA, 24 bp, Artificial sequence  Reverse Primer
  Primer
gctactaatttgcaaggtagcttt

SEQ ID NO: 13160 - DNA, 22 bp, Artificial sequence  Reverse Primer
  Primer
ctcagagaataagcgagcactt

SEQ ID NO: 13161 - DNA, 24 bp, Artificial sequence  Reverse Primer
  Primer
ttacattgaatgaaaaaaggcttc

SEQ ID NO: 13162 - DNA, 19 bp, Artificial sequence  Reverse Primer
  Primer
caacgttctctggctttgc

SEQ ID NO: 13163 - DNA, 24 bp, Artificial sequence  Reverse Primer
  Primer
atcttcttgccctgatactacaag

SEQ ID NO: 13164 - DNA, 22 bp, Artificial sequence  Reverse Primer
  Primer
aatacacaatccatcccagaga

SEQ ID NO: 13165 - DNA, 28 bp, Artificial sequence  Reverse Primer
  Primer
aaaccttacacatacattcattttaatg

SEQ ID NO: 13166 - DNA, 30 bp, Artificial sequence  Reverse Primer
  Primer
agtcatacataaatcagtgagataaaattc

SEQ ID NO: 13167 - DNA, 23 bp, Artificial sequence  Reverse Primer
  Primer
aagatgaaaacycatgtcgtatg

SEQ ID NO: 13168 - DNA, 21 bp, Artificial sequence  Reverse Primer
  Primer
cagcatctggatctctgtttt

SEQ ID NO: 13169 - DNA, 24 bp, Artificial sequence  Reverse Primer
  Primer
aaatgatatgcctagaatgaatcc

SEQ ID NO: 13170 - DNA, 26 bp, Artificial sequence  Reverse Primer
  Primer
ttttccttttacaatacccttgtaac

SEQ ID NO: 13171 - DNA, 19 bp, Artificial sequence  Reverse Primer
  Primer
tttgaaagacaacccgagg

SEQ ID NO: 13172 - DNA, 30 bp, Artificial sequence  Reverse Primer
  Primer
ctagtagagtagctcatacagatcttcttc

SEQ ID NO: 13173 - DNA, 21 bp, Artificial sequence  Reverse Primer
  Primer
ctcttctcccaccttttcatc

SEQ ID NO: 13174 - DNA, 26 bp, Artificial sequence  Reverse Primer
  Primer
agacaccaggttataaagatacacaa

SEQ ID NO: 13175 - DNA, 19 bp, Artificial sequence  Reverse Primer
  Primer
tgtgagatttcagcctgca

SEQ ID NO: 13176 - DNA, 22 bp, Artificial sequence  Reverse Primer
  Primer
ataagaacgaggagatagggga

SEQ ID NO: 13177 - DNA, 18 bp, Artificial sequence  Reverse Primer
  Primer
aaggaggcagcagagagg

SEQ ID NO: 13178 - DNA, 21 bp, Artificial sequence  Reverse Primer
  Primer
ttaagggggaaaaagaaaatg

SEQ ID NO: 13179 - DNA, 18 bp, Artificial sequence  Reverse Primer
  Primer
tgatgggggcctgcagtg

SEQ ID NO: 13180 - DNA, 21 bp, Artificial sequence  Reverse Primer
  Primer
tgcctagtatcccttttccag

SEQ ID NO: 13181 - DNA, 22 bp, Artificial sequence  Reverse Primer
  Primer
tctgccagagtagacgttttct

SEQ ID NO: 13182 - DNA, 20 bp, Artificial sequence  Reverse Primer
  Primer
aaacctctgaagggctccta

SEQ ID NO: 13183 - DNA, 24 bp, Artificial sequence  Reverse Primer
  Primer
ttattttagagtgcaagatcagca

SEQ ID NO: 13184 - DNA, 22 bp, Artificial sequence  Reverse Primer
  Primer
tgacacttcacaatgatgtcct

SEQ ID NO: 13185 - DNA, 26 bp, Artificial sequence  Reverse Primer
  Primer
tcatttatgtaaagatgcacgtactc

SEQ ID NO: 13186 - DNA, 18 bp, Artificial sequence  Reverse Primer
  Primer
ccctcccaagttcctgga

SEQ ID NO: 13187 - DNA, 18 bp, Artificial sequence  Reverse Primer
  Primer
ctcccagagtttcccctc

SEQ ID NO: 13188 - DNA, 25 bp, Artificial sequence  Reverse Primer
  Primer
aagtgacttcacttaaccatttgat

SEQ ID NO: 13189 - DNA, 25 bp, Artificial sequence  Reverse Primer
  Primer
aaatctactttgtgccttagagatg

SEQ ID NO: 13190 - DNA, 23 bp, Artificial sequence  Reverse Primer
  Primer
tctcctgtttactgctcagaaca

SEQ ID NO: 13191 - DNA, 23 bp, Artificial sequence  Reverse Primer
  Primer
ttatargttatggaacgaggagg

SEQ ID NO: 13192 - DNA, 23 bp, Artificial sequence  Reverse Primer
  Primer
aataggaaaaagaaagtccctgg

SEQ ID NO: 13193 - DNA, 30 bp, Artificial sequence  Reverse Primer
  Primer
cataagtcattaaatactgatccytctaat

SEQ ID NO: 13194 - DNA, 24 bp, Artificial sequence  Reverse Primer
  Primer
ggggaggaaaaatatttgtttatg

SEQ ID NO: 13195 - DNA, 18 bp, Artificial sequence  Reverse Primer
  Primer
atggggtgagcatcctgg

SEQ ID NO: 13196 - DNA, 20 bp, Artificial sequence  Reverse Primer
  Primer
ttctattgggatttaggggc

SEQ ID NO: 13197 - DNA, 23 bp, Artificial sequence  Reverse Primer
  Primer
aaattttctaaacrttccttggc

SEQ ID NO: 13198 - DNA, 18 bp, Artificial sequence  Reverse Primer
  Primer
aaaaacaggcatttgggg

SEQ ID NO: 13199 - DNA, 29 bp, Artificial sequence  Reverse Primer
  Primer
tatrgttctcataccatattactttctgg

SEQ ID NO: 13200 - DNA, 30 bp, Artificial sequence  Reverse Primer
  Primer
acstgtaagtatgaaagaatgtataaccta

SEQ ID NO: 13201 - DNA, 20 bp, Artificial sequence  Reverse Primer
  Primer
aaacagggaaggatttgctc

SEQ ID NO: 13202 - DNA, 18 bp, Artificial sequence  Reverse Primer
  Primer
tacctgtccccacccttc

SEQ ID NO: 13203 - DNA, 28 bp, Artificial sequence  Reverse Primer
  Primer
taaagagtttttaccactagaattgttg

SEQ ID NO: 13204 - DNA, 24 bp, Artificial sequence  Reverse Primer
  Primer
ttaacatatggttgctgttgattg

SEQ ID NO: 13205 - DNA, 21 bp, Artificial sequence  Reverse Primer
  Primer
tgttcattttctgtcctccac

SEQ ID NO: 13206 - DNA, 22 bp, Artificial sequence  Reverse Primer
  Primer
aagagactgtagtcrggacagg

SEQ ID NO: 13207 - DNA, 28 bp, Artificial sequence  Reverse Primer
  Primer
tacaaacttaacttctcttgaaaatcac

SEQ ID NO: 13208 - DNA, 27 bp, Artificial sequence  Reverse Primer
  Primer
tatacaatacatttcagacacctttca

SEQ ID NO: 13209 - DNA, 19 bp, Artificial sequence  Reverse Primer
  Primer
aactcttagccacccgatg

SEQ ID NO: 13210 - DNA, 23 bp, Artificial sequence  Reverse Primer
  Primer
cataaggagtcagcaagtggtaa

SEQ ID NO: 13211 - DNA, 24 bp, Artificial sequence  Reverse Primer
  Primer
tgactataaagrggtgacagaaca

SEQ ID NO: 13212 - DNA, 24 bp, Artificial sequence  Reverse Primer
  Primer
tttacatctgttttctggatgact

SEQ ID NO: 13213 - DNA, 30 bp, Artificial sequence  Reverse Primer
  Primer
tatttactgaaaaaaatctacacataggtg

SEQ ID NO: 13214 - DNA, 29 bp, Artificial sequence  Reverse Primer
  Primer
aaacattaaataactctgttgatatctgc

SEQ ID NO: 13215 - DNA, 27 bp, Artificial sequence  Reverse Primer
  Primer
tacaaaataaaatcacacctcctttag

SEQ ID NO: 13216 - DNA, 30 bp, Artificial sequence  Reverse Primer
  Primer
aatgagttgaaaatctatacagtaatatcg

SEQ ID NO: 13217 - DNA, 25 bp, Artificial sequence  Reverse Primer
  Primer
tatgattatatcgcaaaagcctatc

SEQ ID NO: 13218 - DNA, 28 bp, Artificial sequence  Reverse Primer
  Primer
atttagtacagaatctgatggacagtag

SEQ ID NO: 13219 - DNA, 25 bp, Artificial sequence  Reverse Primer
  Primer
agttctaccaattgaatcagctatt

SEQ ID NO: 13220 - DNA, 27 bp, Artificial sequence  Reverse Primer
  Primer
aaaagtgttggacaactaaggattata

SEQ ID NO: 13221 - DNA, 22 bp, Artificial sequence  Reverse Primer
  Primer
atgtcaacagcatgttctttcc

SEQ ID NO: 13222 - DNA, 29 bp, Artificial sequence  Reverse Primer
  Primer
taagtattattaggattgtctgtgtgacc

SEQ ID NO: 13223 - DNA, 20 bp, Artificial sequence  Reverse Primer
  Primer
cacttcaacaggactccagg

SEQ ID NO: 13224 - DNA, 21 bp, Artificial sequence  Reverse Primer
  Primer
ctcagtgagggaaaaccattt

SEQ ID NO: 13225 - DNA, 22 bp, Artificial sequence  Reverse Primer
  Primer
acatttactgggttcattcagc

SEQ ID NO: 13226 - DNA, 29 bp, Artificial sequence  Reverse Primer
  Primer
tcagtgttatagattggttttatatatgc

SEQ ID NO: 13227 - DNA, 27 bp, Artificial sequence  Reverse Primer
  Primer
attggaattcacacatatacactattg

SEQ ID NO: 13228 - DNA, 23 bp, Artificial sequence  Reverse Primer
  Primer
aaaactcattcagtgatgcaaac

SEQ ID NO: 13229 - DNA, 22 bp, Artificial sequence  Reverse Primer
  Primer
aaacaaaacagctgacaagagc

SEQ ID NO: 13230 - DNA, 30 bp, Artificial sequence  Reverse Primer
  Primer
atgcattagggatactatactataaaaaaa

SEQ ID NO: 13231 - DNA, 24 bp, Artificial sequence  Reverse Primer
  Primer
taatgatggtgtgtttatctcgat

SEQ ID NO: 13232 - DNA, 24 bp, Artificial sequence  Reverse Primer
  Primer
aacttttcttttttggttgtgaat

SEQ ID NO: 13233 - DNA, 27 bp, Artificial sequence  Reverse Primer
  Primer
ttttaggctatacacaacagactatgc

SEQ ID NO: 13234 - DNA, 30 bp, Artificial sequence  Reverse Primer
  Primer
taactgaggataactagagtcaatatatgg

SEQ ID NO: 13235 - DNA, 25 bp, Artificial sequence  Reverse Primer
  Primer
atgagaagagttgaaatctgtaagg

SEQ ID NO: 13236 - DNA, 18 bp, Artificial sequence  Reverse Primer
  Primer
ttttgcagggcctgaagg

SEQ ID NO: 13237 - DNA, 27 bp, Artificial sequence  Reverse Primer
  Primer
ctgtcatcaaatttatcttttaattgg

SEQ ID NO: 13238 - DNA, 28 bp, Artificial sequence  Reverse Primer
  Primer
tattaaatttattaaaaggaggtggtgt

SEQ ID NO: 13239 - DNA, 25 bp, Artificial sequence  Reverse Primer
  Primer
attaaaatggtactttacctgagca

SEQ ID NO: 13240 - DNA, 23 bp, Artificial sequence  Reverse Primer
  Primer
agcaaaaatctgtaacaaccagt

SEQ ID NO: 13241 - DNA, 21 bp, Artificial sequence  Reverse Primer
  Primer
tttagagagcctcttctgcag

SEQ ID NO: 13242 - DNA, 22 bp, Artificial sequence  Reverse Primer
  Primer
tttttgtttctcttccttagcc

SEQ ID NO: 13243 - DNA, 22 bp, Artificial sequence  Reverse Primer
  Primer
rgtttaraacaaagtgtgctgc

SEQ ID NO: 13244 - DNA, 18 bp, Artificial sequence  Reverse Primer
  Primer
aaattgcccctggttgag

SEQ ID NO: 13245 - DNA, 29 bp, Artificial sequence  Reverse Primer
  Primer
taagatcatcagtaccacctttctatatt

SEQ ID NO: 13246 - DNA, 21 bp, Artificial sequence  Reverse Primer
  Primer
aggtctcccagctacagatgt

SEQ ID NO: 13247 - DNA, 18 bp, Artificial sequence  Reverse Primer
  Primer
tgtggagcttcctggtca

SEQ ID NO: 13248 - DNA, 23 bp, Artificial sequence  Reverse Primer
  Primer
aataaaagttgatgcagtcagga

SEQ ID NO: 13249 - DNA, 28 bp, Artificial sequence  Reverse Primer
  Primer
gaatttaacttttttaagctgaagttgt

SEQ ID NO: 13250 - DNA, 22 bp, Artificial sequence  Reverse Primer
  Primer
atgggcacactgaaaagataat

SEQ ID NO: 13251 - DNA, 20 bp, Artificial sequence  Reverse Primer
  Primer
atgtcatagcccagagaccc

SEQ ID NO: 13252 - DNA, 24 bp, Artificial sequence  Reverse Primer
  Primer
tatttaatggaggcttttatcctg

SEQ ID NO: 13253 - DNA, 25 bp, Artificial sequence  Reverse Primer
  Primer
tcctttttatctcatttctttatgc

SEQ ID NO: 13254 - DNA, 22 bp, Artificial sequence  Reverse Primer
  Primer
atgagtttttctcttgtttggg

SEQ ID NO: 13255 - DNA, 24 bp, Artificial sequence  Reverse Primer
  Primer
taatcccttactgtgaaattgatg

SEQ ID NO: 13256 - DNA, 23 bp, Artificial sequence  Reverse Primer
  Primer
ggaaaaagaaaatgactgaggtg

SEQ ID NO: 13257 - DNA, 27 bp, Artificial sequence  Reverse Primer
  Primer
ataactgtgatttttagtgactgtttc

SEQ ID NO: 13258 - DNA, 26 bp, Artificial sequence  Reverse Primer
  Primer
tttagggtctttgagctactttaaaa

SEQ ID NO: 13259 - DNA, 23 bp, Artificial sequence  Reverse Primer
  Primer
ctgcaatatgtctcatgtcacag

SEQ ID NO: 13260 - DNA, 18 bp, Artificial sequence  Reverse Primer
  Primer
ttccagtctcacagccct

SEQ ID NO: 13261 - DNA, 19 bp, Artificial sequence  Reverse Primer
  Primer
ataactgcctttgcaagcc

SEQ ID NO: 13262 - DNA, 23 bp, Artificial sequence  Reverse Primer
  Primer
ttgaagctgcagagttttttaaa

SEQ ID NO: 13263 - DNA, 25 bp, Artificial sequence  Reverse Primer
  Primer
aaacctagatcaaaatctgaagatg

SEQ ID NO: 13264 - DNA, 25 bp, Artificial sequence  Reverse Primer
  Primer
aaacatagtacatggctccagtaaa

SEQ ID NO: 13265 - DNA, 22 bp, Artificial sequence  Reverse Primer
  Primer
aaggatgtggacataacgttct

SEQ ID NO: 13266 - DNA, 23 bp, Artificial sequence  Reverse Primer
  Primer
agctgtcaaactttagctcatgt

SEQ ID NO: 13267 - DNA, 27 bp, Artificial sequence  Reverse Primer
  Primer
agttagtagtaaaagctgacttccaac

SEQ ID NO: 13268 - DNA, 22 bp, Artificial sequence  Reverse Primer
  Primer
agtttacatgtgttaccactgg

SEQ ID NO: 13269 - DNA, 21 bp, Artificial sequence  Reverse Primer
  Primer
gatgcgtgaaaaatgaaaagt

SEQ ID NO: 13270 - DNA, 27 bp, Artificial sequence  Reverse Primer
  Primer
aaccaagtgattctacttagagatgag

SEQ ID NO: 13271 - DNA, 18 bp, Artificial sequence  Reverse Primer
  Primer
gcaggggaatgagctggg

SEQ ID NO: 13272 - DNA, 23 bp, Artificial sequence  Reverse Primer
  Primer
aaacactcctttgggtctaatgt

SEQ ID NO: 13273 - DNA, 29 bp, Artificial sequence  Reverse Primer
  Primer
atctctgagctagtgtatcttgtattgta

SEQ ID NO: 13274 - DNA, 26 bp, Artificial sequence  Reverse Primer
  Primer
atagaattgaccaaagaagagtgagt

SEQ ID NO: 13275 - DNA, 25 bp, Artificial sequence  Reverse Primer
  Primer
tattccagaacctaggaagatctag

SEQ ID NO: 13276 - DNA, 30 bp, Artificial sequence  Reverse Primer
  Primer
ttatagaaaacttctcccaactaatttatc

SEQ ID NO: 13277 - DNA, 21 bp, Artificial sequence  Reverse Primer
  Primer
taccaagagatcactgctccc

SEQ ID NO: 13278 - DNA, 23 bp, Artificial sequence  Reverse Primer
  Primer
tgattgtgagaagagtccatagc

SEQ ID NO: 13279 - DNA, 26 bp, Artificial sequence  Reverse Primer
  Primer
tatgaggacgatgaaactatatgact

SEQ ID NO: 13280 - DNA, 27 bp, Artificial sequence  Reverse Primer
  Primer
atggcacttaagtttactgatgtttat

SEQ ID NO: 13281 - DNA, 21 bp, Artificial sequence  Reverse Primer
  Primer
aaatgcagtaggcttttaccg

SEQ ID NO: 13282 - DNA, 26 bp, Artificial sequence  Reverse Primer
  Primer
aaagacttggagctatttattcattt

SEQ ID NO: 13283 - DNA, 27 bp, Artificial sequence  Reverse Primer
  Primer
aacttgtacacataaagggtactctga

SEQ ID NO: 13284 - DNA, 20 bp, Artificial sequence  Reverse Primer
  Primer
gctaagaaaaggaggatggg

SEQ ID NO: 13285 - DNA, 21 bp, Artificial sequence  Reverse Primer
  Primer
tagaactgggtgctaacaggg

SEQ ID NO: 13286 - DNA, 22 bp, Artificial sequence  Reverse Primer
  Primer
tagatgagtgagtggcagagtg

SEQ ID NO: 13287 - DNA, 23 bp, Artificial sequence  Reverse Primer
  Primer
ttagcattctttgactgtttgct

SEQ ID NO: 13288 - DNA, 22 bp, Artificial sequence  Reverse Primer
  Primer
aaactgggttacacactggaaa

SEQ ID NO: 13289 - DNA, 27 bp, Artificial sequence  Reverse Primer
  Primer
gttcttttagagtgatgtgggtagtaa

SEQ ID NO: 13290 - DNA, 21 bp, Artificial sequence  Reverse Primer
  Primer
ttaataaggcagaaggggacc

SEQ ID NO: 13291 - DNA, 23 bp, Artificial sequence  Reverse Primer
  Primer
tgaggatataggctcatcaagag

SEQ ID NO: 13292 - DNA, 22 bp, Artificial sequence  Reverse Primer
  Primer
tatggagcaatctgcaacataa

SEQ ID NO: 13293 - DNA, 22 bp, Artificial sequence  Reverse Primer
  Primer
tgttaagagctgtagaggggag

SEQ ID NO: 13294 - DNA, 20 bp, Artificial sequence  Reverse Primer
  Primer
agcattcactgtggagctgt

SEQ ID NO: 13295 - DNA, 27 bp, Artificial sequence  Reverse Primer
  Primer
atgaagataataatagctgaaatcagg

SEQ ID NO: 13296 - DNA, 20 bp, Artificial sequence  Reverse Primer
  Primer
acctcaaggaacacatcctg

SEQ ID NO: 13297 - DNA, 27 bp, Artificial sequence  Reverse Primer
  Primer
tttcattttgaaaaacactttagtacc

SEQ ID NO: 13298 - DNA, 20 bp, Artificial sequence  Reverse Primer
  Primer
gtgcaggtacctctccactc

SEQ ID NO: 13299 - DNA, 28 bp, Artificial sequence  Reverse Primer
  Primer
cttgtcctttataatataatttgccttt

SEQ ID NO: 13300 - DNA, 20 bp, Artificial sequence  Reverse Primer
  Primer
ttgcctttctttcctgatcc

SEQ ID NO: 13301 - DNA, 26 bp, Artificial sequence  Reverse Primer
  Primer
taaaaaagtattagttccacctccag

SEQ ID NO: 13302 - DNA, 22 bp, Artificial sequence  Reverse Primer
  Primer
tagagactgtgtccactgtgtg

SEQ ID NO: 13303 - DNA, 24 bp, Artificial sequence  Reverse Primer
  Primer
tatttgcgactaccaaactgtaga

SEQ ID NO: 13304 - DNA, 23 bp, Artificial sequence  Reverse Primer
  Primer
atggactctgaacattaggacaa

SEQ ID NO: 13305 - DNA, 20 bp, Artificial sequence  Reverse Primer
  Primer
ctgagggagtccatgaaaaa

SEQ ID NO: 13306 - DNA, 23 bp, Artificial sequence  Reverse Primer
  Primer
aataccaaaagctcttcccttaa

SEQ ID NO: 13307 - DNA, 18 bp, Artificial sequence  Reverse Primer
  Primer
gaatcctggagggcctct

SEQ ID NO: 13308 - DNA, 23 bp, Artificial sequence  Reverse Primer
  Primer
tattttgttacagcagctggagt

SEQ ID NO: 13309 - DNA, 18 bp, Artificial sequence  Reverse Primer
  Primer
acacatgcccggatgact

SEQ ID NO: 13310 - DNA, 22 bp, Artificial sequence  Reverse Primer
  Primer
caaaatcctttccacaactctg

SEQ ID NO: 13311 - DNA, 26 bp, Artificial sequence  Reverse Primer
  Primer
ttagtaagggcagaggagagatatag

SEQ ID NO: 13312 - DNA, 21 bp, Artificial sequence  Reverse Primer
  Primer
atggtctttgtttgaaggctt

SEQ ID NO: 13313 - DNA, 24 bp, Artificial sequence  Reverse Primer
  Primer
aargagattctgattcaaygtctg

SEQ ID NO: 13314 - DNA, 25 bp, Artificial sequence  Reverse Primer
  Primer
cactttaggtgtgtgtagttcacat

SEQ ID NO: 13315 - DNA, 19 bp, Artificial sequence  Reverse Primer
  Primer
tttctgttgctgcttgcat

SEQ ID NO: 13316 - DNA, 18 bp, Artificial sequence  Reverse Primer
  Primer
aagttcaactgcgggcct

SEQ ID NO: 13317 - DNA, 20 bp, Artificial sequence  Reverse Primer
  Primer
aaaacaagcttcatttgggg

SEQ ID NO: 13318 - DNA, 23 bp, Artificial sequence  Reverse Primer
  Primer
tcttgtttcagtttctctccaca

SEQ ID NO: 13319 - DNA, 25 bp, Artificial sequence  Reverse Primer
  Primer
agaggcatcagagaaagattataca

SEQ ID NO: 13320 - DNA, 21 bp, Artificial sequence  Reverse Primer
  Primer
gtgaaataagagacagcccac

SEQ ID NO: 13321 - DNA, 29 bp, Artificial sequence  Reverse Primer
  Primer
taaactagaacttgaaggataatcagact

SEQ ID NO: 13322 - DNA, 21 bp, Artificial sequence  Reverse Primer
  Primer
tccaacatagcagattatggc

SEQ ID NO: 13323 - DNA, 21 bp, Artificial sequence  Reverse Primer
  Primer
ttctagaacacctgccaagtt

SEQ ID NO: 13324 - DNA, 19 bp, Artificial sequence  Reverse Primer
  Primer
cagaggtttcatcactggg

SEQ ID NO: 13325 - DNA, 18 bp, Artificial sequence  Reverse Primer
  Primer
tcagaggcagcatcacct

SEQ ID NO: 13326 - DNA, 27 bp, Artificial sequence  Reverse Primer
  Primer
ttgcaattattatttctgtaaggtttg

SEQ ID NO: 13327 - DNA, 27 bp, Artificial sequence  Reverse Primer
  Primer
aaaattaaaaatggtagtgagatgtga

SEQ ID NO: 13328 - DNA, 20 bp, Artificial sequence  Reverse Primer
  Primer
gyttctggtacccaaagagc

SEQ ID NO: 13329 - DNA, 23 bp, Artificial sequence  Reverse Primer
  Primer
tggctatggatagggtatgtacc

SEQ ID NO: 13330 - DNA, 22 bp, Artificial sequence  Reverse Primer
  Primer
ctagtttcagacccagcttctg

SEQ ID NO: 13331 - DNA, 29 bp, Artificial sequence  Reverse Primer
  Primer
gctattctttcatttaaggagacttacta

SEQ ID NO: 13332 - DNA, 24 bp, Artificial sequence  Reverse Primer
  Primer
ttattctatagcacagcacctgaa

SEQ ID NO: 13333 - DNA, 23 bp, Artificial sequence  Reverse Primer
  Primer
ttgcatgtctccaaaattcttac

SEQ ID NO: 13334 - DNA, 20 bp, Artificial sequence  Reverse Primer
  Primer
aaaagcctttgagctgcttt

SEQ ID NO: 13335 - DNA, 20 bp, Artificial sequence  Reverse Primer
  Primer
ttcactgggaagagtgacct

SEQ ID NO: 13336 - DNA, 25 bp, Artificial sequence  Reverse Primer
  Primer
ttgttygtttatagttgttgatgct

SEQ ID NO: 13337 - DNA, 22 bp, Artificial sequence  Reverse Primer
  Primer
agcttaaggaggyttctgtcaa

SEQ ID NO: 13338 - DNA, 27 bp, Artificial sequence  Reverse Primer
  Primer
acttagtactttgccctacttaaattg

SEQ ID NO: 13339 - DNA, 23 bp, Artificial sequence  Reverse Primer
  Primer
aatacatttctggtctttgcaag

SEQ ID NO: 13340 - DNA, 21 bp, Artificial sequence  Reverse Primer
  Primer
attttttgcatgttgaggaca

SEQ ID NO: 13341 - DNA, 20 bp, Artificial sequence  Reverse Primer
  Primer
ccttggcagttaaaaccaaa

SEQ ID NO: 13342 - DNA, 28 bp, Artificial sequence  Reverse Primer
  Primer
ataagactcctcagagaattaacttcag

SEQ ID NO: 13343 - DNA, 21 bp, Artificial sequence  Reverse Primer
  Primer
aaaatttcactgttgggttcc

SEQ ID NO: 13344 - DNA, 21 bp, Artificial sequence  Reverse Primer
  Primer
aaaaaagcccaaatgaaaaga

SEQ ID NO: 13345 - DNA, 18 bp, Artificial sequence  Reverse Primer
  Primer
gctctgtggaaygggcct

SEQ ID NO: 13346 - DNA, 22 bp, Artificial sequence  Reverse Primer
  Primer
tgttcagaagacttttgcagaa

SEQ ID NO: 13347 - DNA, 22 bp, Artificial sequence  Reverse Primer
  Primer
actagctcgatgtccaattctg

SEQ ID NO: 13348 - DNA, 22 bp, Artificial sequence  Reverse Primer
  Primer
actagctcgatgtccaattctg

SEQ ID NO: 13349 - DNA, 23 bp, Artificial sequence  Reverse Primer
  Primer
gaacaaatcacttaatyttggca

SEQ ID NO: 13350 - DNA, 26 bp, Artificial sequence  Reverse Primer
  Primer
cctgagataatgcatgaaatttatta

SEQ ID NO: 13351 - DNA, 18 bp, Artificial sequence  Reverse Primer
  Primer
aagcctgaagagggaggg

SEQ ID NO: 13352 - DNA, 18 bp, Artificial sequence  Reverse Primer
  Primer
tttgtagcccgcaccaaa

SEQ ID NO: 13353 - DNA, 21 bp, Artificial sequence  Reverse Primer
  Primer
aagcattgcttaagtgaagta

SEQ ID NO: 13354 - DNA, 21 bp, Artificial sequence  Reverse Primer
  Primer
atgaggggttggagaatgtaa

SEQ ID NO: 13355 - DNA, 20 bp, Artificial sequence  Reverse Primer
  Primer
aaaatttggagcaagggatt

SEQ ID NO: 13356 - DNA, 30 bp, Artificial sequence  Reverse Primer
  Primer
aatatatatttaagtctacagtggtgtttc

SEQ ID NO: 13357 - DNA, 19 bp, Artificial sequence  Reverse Primer
  Primer
atcaccacctctgggccta

SEQ ID NO: 13358 - DNA, 22 bp, Artificial sequence  Reverse Primer
  Primer
aatctctaccagaaccagggtt

SEQ ID NO: 13359 - DNA, 26 bp, Artificial sequence  Reverse Primer
  Primer
tacacagataacatcaagtgtcatca

SEQ ID NO: 13360 - DNA, 26 bp, Artificial sequence  Reverse Primer
  Primer
tacacagataacatcaagtgtcatca

SEQ ID NO: 13361 - DNA, 27 bp, Artificial sequence  Reverse Primer
  Primer
tggttacataatgatgaataacagtct

SEQ ID NO: 13362 - DNA, 28 bp, Artificial sequence  Reverse Primer
  Primer
attgtacttttaaactcaggtgattctt

SEQ ID NO: 13363 - DNA, 23 bp, Artificial sequence  Reverse Primer
  Primer
accaagactttccttcataacct

SEQ ID NO: 13364 - DNA, 21 bp, Artificial sequence  Reverse Primer
  Primer
ttaagggggaaaaagaaaatg

SEQ ID NO: 13365 - DNA, 21 bp, Artificial sequence  Reverse Primer
  Primer
gtcagcgctttatttgtagca

SEQ ID NO: 13366 - DNA, 20 bp, Artificial sequence  Reverse Primer
  Primer
ttgttctgtatgggtggagc

SEQ ID NO: 13367 - DNA, 26 bp, Artificial sequence  Reverse Primer
  Primer
gatgttttatgaaaaaaacaggaact

SEQ ID NO: 13368 - DNA, 18 bp, Artificial sequence  Reverse Primer
  Primer
agcaggatggagtcccag

SEQ ID NO: 13369 - DNA, 30 bp, Artificial sequence  Reverse Primer
  Primer
ttactatcattatttctttatttgagagag

SEQ ID NO: 13370 - DNA, 23 bp, Artificial sequence  Reverse Primer
  Primer
tggccttttattattttcacaaa

SEQ ID NO: 13371 - DNA, 23 bp, Artificial sequence  Reverse Primer
  Primer
actggactgttattatccccatt

SEQ ID NO: 13372 - DNA, 22 bp, Artificial sequence  Reverse Primer
  Primer
atgggtatcctgttgttttctg

SEQ ID NO: 13373 - DNA, 25 bp, Artificial sequence  Reverse Primer
  Primer
ttaataaagttcagtttagcaggcc

SEQ ID NO: 13374 - DNA, 19 bp, Artificial sequence  Reverse Primer
  Primer
accttccggttcctgatct

SEQ ID NO: 13375 - DNA, 19 bp, Artificial sequence  Reverse Primer
  Primer
tgtttgacctctcccaggt

SEQ ID NO: 13376 - DNA, 23 bp, Artificial sequence  Reverse Primer
  Primer
accaccagtgtaagaatccctat

SEQ ID NO: 13377 - DNA, 23 bp, Artificial sequence  Reverse Primer
  Primer
atttttacttgtgtcaacaggcc

SEQ ID NO: 13378 - DNA, 23 bp, Artificial sequence  Reverse Primer
  Primer
tcacaatgcatgaaacagtatct

SEQ ID NO: 13379 - DNA, 22 bp, Artificial sequence  Reverse Primer
  Primer
tttcaggaagcaatgacattta

SEQ ID NO: 13380 - DNA, 22 bp, Artificial sequence  Reverse Primer
  Primer
tttttggtggtttgtaatgatg

SEQ ID NO: 13381 - DNA, 27 bp, Artificial sequence  Reverse Primer
  Primer
ataaaactcaacagatgaagacattct

SEQ ID NO: 13382 - DNA, 23 bp, Artificial sequence  Reverse Primer
  Primer
aacaggacctgtactttcagacc

SEQ ID NO: 13383 - DNA, 23 bp, Artificial sequence  Reverse Primer
  Primer
aacgtctttatgtagcgatgtca

SEQ ID NO: 13384 - DNA, 20 bp, Artificial sequence  Reverse Primer
  Primer
tgttgtcctgaggactttgg

SEQ ID NO: 13385 - DNA, 21 bp, Artificial sequence  Reverse Primer
  Primer
aattgcagcatctatacggag

SEQ ID NO: 13386 - DNA, 24 bp, Artificial sequence  Reverse Primer
  Primer
aatggaagcagaagttgtaattct

SEQ ID NO: 13387 - DNA, 24 bp, Artificial sequence  Reverse Primer
  Primer
taaatgagttaatatgctcccagg

SEQ ID NO: 13388 - DNA, 20 bp, Artificial sequence  Reverse Primer
  Primer
ttccagattcttgggaaaac

SEQ ID NO: 13389 - DNA, 26 bp, Artificial sequence  Reverse Primer
  Primer
ttcctgacctatggaatttactttat

SEQ ID NO: 13390 - DNA, 22 bp, Artificial sequence  Reverse Primer
  Primer
tacactggggtcttgarcatat

SEQ ID NO: 13391 - DNA, 18 bp, Artificial sequence  Reverse Primer
  Primer
tgccttccctctgacctc

SEQ ID NO: 13392 - DNA, 18 bp, Artificial sequence  Reverse Primer
  Primer
aggctctggggggtttta

SEQ ID NO: 13393 - DNA, 23 bp, Artificial sequence  Reverse Primer
  Primer
ttagaatgaaaaggttggagagc

SEQ ID NO: 13394 - DNA, 27 bp, Artificial sequence  Reverse Primer
  Primer
aagtaatttgatcaataaggacaacag

SEQ ID NO: 13395 - DNA, 25 bp, Artificial sequence  Reverse Primer
  Primer
agagagtttgaaagttagggaattc

SEQ ID NO: 13396 - DNA, 19 bp, Artificial sequence  Reverse Primer
  Primer
gtgtggtgtgagtagggca

SEQ ID NO: 13397 - DNA, 24 bp, Artificial sequence  Reverse Primer
  Primer
atacatacggggaagataagatgc

SEQ ID NO: 13398 - DNA, 20 bp, Artificial sequence  Reverse Primer
  Primer
aaacaaagacaagcctagcg

SEQ ID NO: 13399 - DNA, 18 bp, Artificial sequence  Reverse Primer
  Primer
tgactgcagcatcagcca

SEQ ID NO: 13400 - DNA, 25 bp, Artificial sequence  Reverse Primer
  Primer
aacatccacttagtaaccaatgaag

SEQ ID NO: 13401 - DNA, 30 bp, Artificial sequence  Reverse Primer
  Primer
tacagaccctaacaaataataataattagc

SEQ ID NO: 13402 - DNA, 27 bp, Artificial sequence  Reverse Primer
  Primer
aagtttaccatatgtttcaaagtcact

SEQ ID NO: 13403 - DNA, 24 bp, Artificial sequence  Reverse Primer
  Primer
tctagccttgaactttaaaggtgt

SEQ ID NO: 13404 - DNA, 23 bp, Artificial sequence  Reverse Primer
  Primer
attctatgcttattttgctcacg

SEQ ID NO: 13405 - DNA, 30 bp, Artificial sequence  Reverse Primer
  Primer
tttctattaggtacaacagaaatataaggt

SEQ ID NO: 13406 - DNA, 22 bp, Artificial sequence  Reverse Primer
  Primer
agcaacgaaaagagtaggttga

SEQ ID NO: 13407 - DNA, 26 bp, Artificial sequence  Reverse Primer
  Primer
taacttaacaaactttgcttaggagc

SEQ ID NO: 13408 - DNA, 29 bp, Artificial sequence  Reverse Primer
  Primer
tttgtttcttctgattaggaaagatatac

SEQ ID NO: 13409 - DNA, 19 bp, Artificial sequence  Reverse Primer
  Primer
tattttgcctggcattttg

SEQ ID NO: 13410 - DNA, 18 bp, Artificial sequence  Reverse Primer
  Primer
tctgggaccacacacctg

SEQ ID NO: 13411 - DNA, 18 bp, Artificial sequence  Reverse Primer
  Primer
ttgctgagtcagcgtttc

SEQ ID NO: 13412 - DNA, 26 bp, Artificial sequence  Reverse Primer
  Primer
actgagtgactgaattgaactgatat

SEQ ID NO: 13413 - DNA, 18 bp, Artificial sequence  Reverse Primer
  Primer
ccagtgtctgggaccaca

SEQ ID NO: 13414 - DNA, 30 bp, Artificial sequence  Reverse Primer
  Primer
attaactgtagtacattatctaaaccaaga

SEQ ID NO: 13415 - DNA, 25 bp, Artificial sequence  Reverse Primer
  Primer
aaagtaaaataattctatgtggccc

SEQ ID NO: 13416 - DNA, 21 bp, Artificial sequence  Reverse Primer
  Primer
agatggcataagcagttctgc

SEQ ID NO: 13417 - DNA, 20 bp, Artificial sequence  Reverse Primer
  Primer
aacaaggacagcagttggag

SEQ ID NO: 13418 - DNA, 27 bp, Artificial sequence  Reverse Primer
  Primer
aattctttctgcttttatataggcttg

SEQ ID NO: 13419 - DNA, 18 bp, Artificial sequence  Reverse Primer
  Primer
ttgtgtctgttccatgcg

SEQ ID NO: 13420 - DNA, 18 bp, Artificial sequence  Reverse Primer
  Primer
gtgtgcatacatgcctgc

SEQ ID NO: 13421 - DNA, 29 bp, Artificial sequence  Reverse Primer
  Primer
atatatccatattctctactagctggtga

SEQ ID NO: 13422 - DNA, 25 bp, Artificial sequence  Reverse Primer
  Primer
acgtcgccaatatataataactgac

SEQ ID NO: 13423 - DNA, 19 bp, Artificial sequence  Reverse Primer
  Primer
cttgctctgcaacctcctt

SEQ ID NO: 13424 - DNA, 18 bp, Artificial sequence  Reverse Primer
  Primer
accccggctttaaaaggt

SEQ ID NO: 13425 - DNA, 23 bp, Artificial sequence  Reverse Primer
  Primer
attcattctcattcaaatgctga

SEQ ID NO: 13426 - DNA, 24 bp, Artificial sequence  Reverse Primer
  Primer
tgtatcacgagacaaggtaaaaaa

SEQ ID NO: 13427 - DNA, 20 bp, Artificial sequence  Reverse Primer
  Primer
tcacttagcaggtcacttgg

SEQ ID NO: 13428 - DNA, 19 bp, Artificial sequence  Reverse Primer
  Primer
tcccatcagtctctcctgc

SEQ ID NO: 13429 - DNA, 19 bp, Artificial sequence  Reverse Primer
  Primer
ccgttcacttatctgccac

SEQ ID NO: 13430 - DNA, 18 bp, Artificial sequence  Reverse Primer
  Primer
ccccagcactttcagatg

SEQ ID NO: 13431 - DNA, 25 bp, Artificial sequence  Reverse Primer
  Primer
aataatctgcatagaaaattccaga

SEQ ID NO: 13432 - DNA, 18 bp, Artificial sequence  Reverse Primer
  Primer
gcatgcatgtgaagctcc

SEQ ID NO: 13433 - DNA, 21 bp, Artificial sequence  Reverse Primer
  Primer
ttgtacagccagccttaaagc

SEQ ID NO: 13434 - DNA, 21 bp, Artificial sequence  Reverse Primer
  Primer
tcacctgccactttgtagaaa

SEQ ID NO: 13435 - DNA, 18 bp, Artificial sequence  Reverse Primer
  Primer
gccaccctaggagtcctc

SEQ ID NO: 13436 - DNA, 21 bp, Artificial sequence  Reverse Primer
  Primer
atctggaagatgacgagcttg

SEQ ID NO: 13437 - DNA, 23 bp, Artificial sequence  Reverse Primer
  Primer
acaaccaaccttcacattatctc

SEQ ID NO: 13438 - DNA, 24 bp, Artificial sequence  Reverse Primer
  Primer
taattcctctctgtcttccttcag

SEQ ID NO: 13439 - DNA, 24 bp, Artificial sequence  Reverse Primer
  Primer
ttaatagcattctatgggtccatt

SEQ ID NO: 13440 - DNA, 18 bp, Artificial sequence  Reverse Primer
  Primer
tccccctcattgcagcta

SEQ ID NO: 13441 - DNA, 22 bp, Artificial sequence  Reverse Primer
  Primer
tactttctcttcctcaacagcc

SEQ ID NO: 13442 - DNA, 21 bp, Artificial sequence  Reverse Primer
  Primer
agcttcattggcttacacaag

SEQ ID NO: 13443 - DNA, 22 bp, Artificial sequence  Reverse Primer
  Primer
ttcatctcctgacgtaacaaac

SEQ ID NO: 13444 - DNA, 25 bp, Artificial sequence  Reverse Primer
  Primer
tgaaggctgttacctgtatagatct

SEQ ID NO: 13445 - DNA, 18 bp, Artificial sequence  Reverse Primer
  Primer
atctggctttggagggac

SEQ ID NO: 13446 - DNA, 28 bp, Artificial sequence  Reverse Primer
  Primer
ataattcattaacactaagttcactgcc

SEQ ID NO: 13447 - DNA, 23 bp, Artificial sequence  Reverse Primer
  Primer
aaaatacagcagatccatttagc

SEQ ID NO: 13448 - DNA, 21 bp, Artificial sequence  Reverse Primer
  Primer
ttctttaagaccagggactgc

SEQ ID NO: 13449 - DNA, 25 bp, Artificial sequence  Reverse Primer
  Primer
agaacatgtaaaacaagaagacctg

SEQ ID NO: 13450 - DNA, 23 bp, Artificial sequence  Reverse Primer
  Primer
aagtttccagtaatagasacccc

SEQ ID NO: 13451 - DNA, 20 bp, Artificial sequence  Reverse Primer
  Primer
aatctagggtcacaccaccc

SEQ ID NO: 13452 - DNA, 19 bp, Artificial sequence  Reverse Primer
  Primer
attatccccggctctcttc

SEQ ID NO: 13453 - DNA, 25 bp, Artificial sequence  Reverse Primer
  Primer
atttgtcagaagtatgtttgtggtc

SEQ ID NO: 13454 - DNA, 18 bp, Artificial sequence  Reverse Primer
  Primer
tgggtcatgaggggacct

SEQ ID NO: 13455 - DNA, 30 bp, Artificial sequence  Reverse Primer
  Primer
aatatgttacattacatgattactatctgt

SEQ ID NO: 13456 - DNA, 28 bp, Artificial sequence  Reverse Primer
  Primer
acatattgataaattctccttggtaatc

SEQ ID NO: 13457 - DNA, 29 bp, Artificial sequence  Reverse Primer
  Primer
ttatagtagagaaacttagcagacacctt

SEQ ID NO: 13458 - DNA, 24 bp, Artificial sequence  Reverse Primer
  Primer
taaaaggaacaagagraagtctcc

SEQ ID NO: 13459 - DNA, 19 bp, Artificial sequence  Reverse Primer
  Primer
tgctacagccaaccatgtt

SEQ ID NO: 13460 - DNA, 24 bp, Artificial sequence  Reverse Primer
  Primer
ggattattttgctttcctttgtaa

SEQ ID NO: 13461 - DNA, 19 bp, Artificial sequence  Reverse Primer
  Primer
tactccctcggtgacattg

SEQ ID NO: 13462 - DNA, 22 bp, Artificial sequence  Reverse Primer
  Primer
agctttttctctctgctgtgtg

SEQ ID NO: 13463 - DNA, 24 bp, Artificial sequence  Reverse Primer
  Primer
aacttccaatacagaaagcaaaac

SEQ ID NO: 13464 - DNA, 24 bp, Artificial sequence  Reverse Primer
  Primer
taccaaaaactggttttcaaactt

SEQ ID NO: 13465 - DNA, 18 bp, Artificial sequence  Reverse Primer
  Primer
tgtgatcgtgggtccctt

SEQ ID NO: 13466 - DNA, 20 bp, Artificial sequence  Reverse Primer
  Primer
agccttatgtcttggctgag

SEQ ID NO: 13467 - DNA, 21 bp, Artificial sequence  Reverse Primer
  Primer
agatcagaagctggtgaaggt

SEQ ID NO: 13468 - DNA, 28 bp, Artificial sequence  Reverse Primer
  Primer
aatactaggcattcttattttgaaagtg

SEQ ID NO: 13469 - DNA, 27 bp, Artificial sequence  Reverse Primer
  Primer
atattgagtcatacaaatgttttggtt

SEQ ID NO: 13470 - DNA, 18 bp, Artificial sequence  Reverse Primer
  Primer
tatcatcgcttcccgtgc

SEQ ID NO: 13471 - DNA, 25 bp, Artificial sequence  Reverse Primer
  Primer
aagagaagatgtgatctttttcaga

SEQ ID NO: 13472 - DNA, 23 bp, Artificial sequence  Reverse Primer
  Primer
agggccaactgtaagttatatgc

SEQ ID NO: 13473 - DNA, 24 bp, Artificial sequence  Reverse Primer
  Primer
acaaagcctaaaatrtttgtctgg

SEQ ID NO: 13474 - DNA, 20 bp, Artificial sequence  Reverse Primer
  Primer
atgctccagaatgtgttacg

SEQ ID NO: 13475 - DNA, 22 bp, Artificial sequence  Reverse Primer
  Primer
tctatggcagatctctcagatg

SEQ ID NO: 13476 - DNA, 28 bp, Artificial sequence  Reverse Primer
  Primer
cagctgagaaattatacagataaaaatt

SEQ ID NO: 13477 - DNA, 20 bp, Artificial sequence  Reverse Primer
  Primer
agacaaagagcctcagcaaa

SEQ ID NO: 13478 - DNA, 24 bp, Artificial sequence  Reverse Primer
  Primer
taaatatccagaagtggaattggt

SEQ ID NO: 13479 - DNA, 26 bp, Artificial sequence  Reverse Primer
  Primer
aactgtaagttctgggtacaaagatt

SEQ ID NO: 13480 - DNA, 18 bp, Artificial sequence  Reverse Primer
  Primer
cggatgatggggtggaga

SEQ ID NO: 13481 - DNA, 21 bp, Artificial sequence  Reverse Primer
  Primer
tctaattattttgctgcccag

SEQ ID NO: 13482 - DNA, 22 bp, Artificial sequence  Reverse Primer
  Primer
artagcgtttaattttgcaggg

SEQ ID NO: 13483 - DNA, 20 bp, Artificial sequence  Reverse Primer
  Primer
tttcaaatccttgctgatgg

SEQ ID NO: 13484 - DNA, 21 bp, Artificial sequence  Reverse Primer
  Primer
tctctgtgctggttgctttat

SEQ ID NO: 13485 - DNA, 24 bp, Artificial sequence  Reverse Primer
  Primer
agagcagggtgactgtagaagtat

SEQ ID NO: 13486 - DNA, 26 bp, Artificial sequence  Reverse Primer
  Primer
ataaagattcacaaatggacctagag

SEQ ID NO: 13487 - DNA, 18 bp, Artificial sequence  Reverse Primer
  Primer
tttggttgctgagtgtgg

SEQ ID NO: 13488 - DNA, 19 bp, Artificial sequence  Reverse Primer
  Primer
tttctcccctgagtttgtg

SEQ ID NO: 13489 - DNA, 28 bp, Artificial sequence  Reverse Primer
  Primer
ccatttgtgacaatcagtataataaatt

SEQ ID NO: 13490 - DNA, 18 bp, Artificial sequence  Reverse Primer
  Primer
atcccctcccgtccgtct

SEQ ID NO: 13491 - DNA, 18 bp, Artificial sequence  Reverse Primer
  Primer
gggttctatcgctgctcg

SEQ ID NO: 13492 - DNA, 21 bp, Artificial sequence  Reverse Primer
  Primer
aatktccttccagcaatttgt

SEQ ID NO: 13493 - DNA, 21 bp, Artificial sequence  Reverse Primer
  Primer
tttgtgggttctgctctacag

SEQ ID NO: 13494 - DNA, 20 bp, Artificial sequence  Reverse Primer
  Primer
atacgtgtgcctgtcaacac

SEQ ID NO: 13495 - DNA, 21 bp, Artificial sequence  Reverse Primer
  Primer
ttctgtcagctgctcagaaac

SEQ ID NO: 13496 - DNA, 24 bp, Artificial sequence  Reverse Primer
  Primer
tagtcatccagtcaggactagagc

SEQ ID NO: 13497 - DNA, 26 bp, Artificial sequence  Reverse Primer
  Primer
taggagagtactagtacacagtgggc

SEQ ID NO: 13498 - DNA, 24 bp, Artificial sequence  Reverse Primer
  Primer
tttagttctcctgatttttgacct

SEQ ID NO: 13499 - DNA, 22 bp, Artificial sequence  Reverse Primer
  Primer
aagccaaaataacatcaggaca

SEQ ID NO: 13500 - DNA, 30 bp, Artificial sequence  Reverse Primer
  Primer
aaatggtactatagttatatgtgacgtaac

SEQ ID NO: 13501 - DNA, 30 bp, Artificial sequence  Reverse Primer
  Primer
taagtaaatagatagaaatggttgagaaca

SEQ ID NO: 13502 - DNA, 20 bp, Artificial sequence  Reverse Primer
  Primer
aaacctgcatctcctgttcg

SEQ ID NO: 13503 - DNA, 18 bp, Artificial sequence  Reverse Primer
  Primer
accctcacygctctctcc

SEQ ID NO: 13504 - DNA, 22 bp, Artificial sequence  Reverse Primer
  Primer
tcaaagaaaggaagagctgatg

SEQ ID NO: 13505 - DNA, 22 bp, Artificial sequence  Reverse Primer
  Primer
gttggtgaaattgacctaagct

SEQ ID NO: 13506 - DNA, 27 bp, Artificial sequence  Reverse Primer
  Primer
aaaaagcctcttgaattagtaaacatt

SEQ ID NO: 13507 - DNA, 28 bp, Artificial sequence  Reverse Primer
  Primer
atctagaagactggacaatgtatttttt

SEQ ID NO: 13508 - DNA, 28 bp, Artificial sequence  Reverse Primer
  Primer
gctatagtcatcataaagggttaattct

SEQ ID NO: 13509 - DNA, 20 bp, Artificial sequence  Reverse Primer
  Primer
aaaattcatcacggctatgc

SEQ ID NO: 13510 - DNA, 26 bp, Artificial sequence  Reverse Primer
  Primer
tcttgaatcttattttgcctagattt

SEQ ID NO: 13511 - DNA, 18 bp, Artificial sequence  Reverse Primer
  Primer
agtggggctgcctgcagt

SEQ ID NO: 13512 - DNA, 23 bp, Artificial sequence  Reverse Primer
  Primer
aagaacaacccataagactgtgg

SEQ ID NO: 13513 - DNA, 27 bp, Artificial sequence  Reverse Primer
  Primer
tctagtgtagttaatctctcctagggg

SEQ ID NO: 13514 - DNA, 26 bp, Artificial sequence  Reverse Primer
  Primer
ttttaaaactgagaaaactgacaatg

SEQ ID NO: 13515 - DNA, 27 bp, Artificial sequence  Reverse Primer
  Primer
tttctatcttgttagattcagtccatt

SEQ ID NO: 13516 - DNA, 21 bp, Artificial sequence  Reverse Primer
  Primer
tttagaaggagggtctctcca

SEQ ID NO: 13517 - DNA, 23 bp, Artificial sequence  Reverse Primer
  Primer
gaatcagaacaaaattttctggg

SEQ ID NO: 13518 - DNA, 26 bp, Artificial sequence  Reverse Primer
  Primer
taatgttaactttatgagcttcagga

SEQ ID NO: 13519 - DNA, 20 bp, Artificial sequence  Reverse Primer
  Primer
aggttctccaagcattcacc

SEQ ID NO: 13520 - DNA, 23 bp, Artificial sequence  Reverse Primer
  Primer
tttcctttgctatttctgagatg

SEQ ID NO: 13521 - DNA, 21 bp, Artificial sequence  Reverse Primer
  Primer
atgtcgtctctctaccatggg

SEQ ID NO: 13522 - DNA, 26 bp, Artificial sequence  Reverse Primer
  Primer
tatgatttcytcaatcctagtgaaag

SEQ ID NO: 13523 - DNA, 23 bp, Artificial sequence  Reverse Primer
  Primer
agaagtcagtgttggagactcac

SEQ ID NO: 13524 - DNA, 18 bp, Artificial sequence  Reverse Primer
  Primer
tctgctccaagtgcaacg

SEQ ID NO: 13525 - DNA, 24 bp, Artificial sequence  Reverse Primer
  Primer
attaatgatgcctaacttggagtg

SEQ ID NO: 13526 - DNA, 20 bp, Artificial sequence  Reverse Primer
  Primer
tgactgggataagaagcgtg

SEQ ID NO: 13527 - DNA, 29 bp, Artificial sequence  Reverse Primer
  Primer
aacttacatttagacaattaaacagcttg

SEQ ID NO: 13528 - DNA, 20 bp, Artificial sequence  Reverse Primer
  Primer
cactgcttatttgccaacaa

SEQ ID NO: 13529 - DNA, 21 bp, Artificial sequence  Reverse Primer
  Primer
tatggcatctagcaaaggact

SEQ ID NO: 13530 - DNA, 28 bp, Artificial sequence  Reverse Primer
  Primer
tattgtacagacctttttaaagkattca

SEQ ID NO: 13531 - DNA, 18 bp, Artificial sequence  Reverse Primer
  Primer
gggaccaggctgctatca

SEQ ID NO: 13532 - DNA, 26 bp, Artificial sequence  Reverse Primer
  Primer
aagataaagacaatgctaaagaaatg

SEQ ID NO: 13533 - DNA, 26 bp, Artificial sequence  Reverse Primer
  Primer
aaatgctccagtttttatttaaagtc

SEQ ID NO: 13534 - DNA, 26 bp, Artificial sequence  Reverse Primer
  Primer
acactgatgtatctaacagctcagac

SEQ ID NO: 13535 - DNA, 19 bp, Artificial sequence  Reverse Primer
  Primer
ttgtaatgggcaaacatgg

SEQ ID NO: 13536 - DNA, 28 bp, Artificial sequence  Reverse Primer
  Primer
aatgaaattaaaatagagcattgtacac

SEQ ID NO: 13537 - DNA, 22 bp, Artificial sequence  Reverse Primer
  Primer
tattatctttccctctggcatc

SEQ ID NO: 13538 - DNA, 30 bp, Artificial sequence  Reverse Primer
  Primer
gtttatacttgaagaaattttactgaactt

SEQ ID NO: 13539 - DNA, 19 bp, Artificial sequence  Reverse Primer
  Primer
ttacccacctacccttcct

SEQ ID NO: 13540 - DNA, 22 bp, Artificial sequence  Reverse Primer
  Primer
ttattcattgattccctgacca

SEQ ID NO: 13541 - DNA, 19 bp, Artificial sequence  Reverse Primer
  Primer
acctgtgcctgagtaggct

SEQ ID NO: 13542 - DNA, 25 bp, Artificial sequence  Reverse Primer
  Primer
taatttacgactcaaacacgctatt

SEQ ID NO: 13543 - DNA, 28 bp, Artificial sequence  Reverse Primer
  Primer
acaaaaaaactgattatatacaaaacgg

SEQ ID NO: 13544 - DNA, 22 bp, Artificial sequence  Reverse Primer
  Primer
ttaaaaagtggcttgttgacct

SEQ ID NO: 13545 - DNA, 19 bp, Artificial sequence  Reverse Primer
  Primer
aatccaayccatttcacca

SEQ ID NO: 13546 - DNA, 27 bp, Artificial sequence  Reverse Primer
  Primer
ctaaaggagaattaaaaaagaatggtt

SEQ ID NO: 13547 - DNA, 20 bp, Artificial sequence  Reverse Primer
  Primer
ggctgccttcttttgtttac

SEQ ID NO: 13548 - DNA, 27 bp, Artificial sequence  Reverse Primer
  Primer
attttatagctgatgaaactgagaaac

SEQ ID NO: 13549 - DNA, 25 bp, Artificial sequence  Reverse Primer
  Primer
taatggagatcttttcatttatgca

SEQ ID NO: 13550 - DNA, 30 bp, Artificial sequence  Reverse Primer
  Primer
tgaagatactataagtttaatcaaagactg

SEQ ID NO: 13551 - DNA, 30 bp, Artificial sequence  Reverse Primer
  Primer
agtgatatagtcactaatattttaaccaat

SEQ ID NO: 13552 - DNA, 21 bp, Artificial sequence  Reverse Primer
  Primer
tactgaatgctgsrcatggtt

SEQ ID NO: 13553 - DNA, 26 bp, Artificial sequence  Reverse Primer
  Primer
ccctttattgtacagacctttttaaa

SEQ ID NO: 13554 - DNA, 24 bp, Artificial sequence  Reverse Primer
  Primer
tttttactgtgtgagttccaagtg

SEQ ID NO: 13555 - DNA, 23 bp, Artificial sequence  Reverse Primer
  Primer
aactgacacaaacctgagaactg

SEQ ID NO: 13556 - DNA, 27 bp, Artificial sequence  Reverse Primer
  Primer
tgctacttgattatttgtttagaacag

SEQ ID NO: 13557 - DNA, 26 bp, Artificial sequence  Reverse Primer
  Primer
ttacaataagtgtgttttgtcaaagg

SEQ ID NO: 13558 - DNA, 22 bp, Artificial sequence  Reverse Primer
  Primer
cagaaaaggacattcatgaagc

SEQ ID NO: 13559 - DNA, 28 bp, Artificial sequence  Reverse Primer
  Primer
taagtctaatgtttgaggaaatgtctag

SEQ ID NO: 13560 - DNA, 30 bp, Artificial sequence  Reverse Primer
  Primer
tttatgtaaaagctcacttatataatcttc

SEQ ID NO: 13561 - DNA, 23 bp, Artificial sequence  Reverse Primer
  Primer
tgaattcaatgaacgtttttctg

SEQ ID NO: 13562 - DNA, 22 bp, Artificial sequence  Reverse Primer
  Primer
atctctcacattaccccatgaa

SEQ ID NO: 13563 - DNA, 20 bp, Artificial sequence  Reverse Primer
  Primer
aaacaatgaaggcrcaaaga

SEQ ID NO: 13564 - DNA, 23 bp, Artificial sequence  Reverse Primer
  Primer
aatatttaaatgcaattctgggg

SEQ ID NO: 13565 - DNA, 18 bp, Artificial sequence  Reverse Primer
  Primer
agaamtgcagccacgctt

SEQ ID NO: 13566 - DNA, 30 bp, Artificial sequence  Reverse Primer
  Primer
atagttgtaaagtggaactataacaattaa

SEQ ID NO: 13567 - DNA, 28 bp, Artificial sequence  Reverse Primer
  Primer
atagtctagatttagtgagtcaagggaa

SEQ ID NO: 13568 - DNA, 26 bp, Artificial sequence  Reverse Primer
  Primer
tatagctgataaatgtggtcaagaaa

SEQ ID NO: 13569 - DNA, 26 bp, Artificial sequence  Reverse Primer
  Primer
ataaacaaatatgttgtaggagcatg

SEQ ID NO: 13570 - DNA, 18 bp, Artificial sequence  Reverse Primer
  Primer
agggtccccagagccact

SEQ ID NO: 13571 - DNA, 22 bp, Artificial sequence  Reverse Primer
  Primer
aagacctgggtattaacagcaa

SEQ ID NO: 13572 - DNA, 29 bp, Artificial sequence  Reverse Primer
  Primer
acaaaaaagtagttcttagcttttgtaca

SEQ ID NO: 13573 - DNA, 20 bp, Artificial sequence  Reverse Primer
  Primer
agttaggcctacaggcagga

SEQ ID NO: 13574 - DNA, 24 bp, Artificial sequence  Reverse Primer
  Primer
tttcttaaaatttcattaatcggc

SEQ ID NO: 13575 - DNA, 23 bp, Artificial sequence  Reverse Primer
  Primer
attctggattacaatccatacgg

SEQ ID NO: 13576 - DNA, 30 bp, Artificial sequence  Reverse Primer
  Primer
gttatatttacatagttactaggggcagtt

SEQ ID NO: 13577 - DNA, 23 bp, Artificial sequence  Reverse Primer
  Primer
tattgaagaccatcctcctaagc

SEQ ID NO: 13578 - DNA, 26 bp, Artificial sequence  Reverse Primer
  Primer
aaacatcctgcttaaggaattaatag

SEQ ID NO: 13579 - DNA, 18 bp, Artificial sequence  Reverse Primer
  Primer
ttgatyctcggggctccc

SEQ ID NO: 13580 - DNA, 19 bp, Artificial sequence  Reverse Primer
  Primer
ccatggttaagatccccat

SEQ ID NO: 13581 - DNA, 24 bp, Artificial sequence  Reverse Primer
  Primer
ataaagatttatgaaagggctttg

SEQ ID NO: 13582 - DNA, 28 bp, Artificial sequence  Reverse Primer
  Primer
gtgtcatattttgatagtttwtccaagt

SEQ ID NO: 13583 - DNA, 27 bp, Artificial sequence  Reverse Primer
  Primer
aatgagtaagtcttttgtgagtctgat

SEQ ID NO: 13584 - DNA, 23 bp, Artificial sequence  Reverse Primer
  Primer
agacagctgatgttgttagtcca

SEQ ID NO: 13585 - DNA, 22 bp, Artificial sequence  Reverse Primer
  Primer
tgataggaattagcagaagcag

SEQ ID NO: 13586 - DNA, 27 bp, Artificial sequence  Reverse Primer
  Primer
gttttgttcatgaaaatattcatactg

SEQ ID NO: 13587 - DNA, 28 bp, Artificial sequence  Reverse Primer
  Primer
aatcagtacattctgtatttgaatgttt

SEQ ID NO: 13588 - DNA, 21 bp, Artificial sequence  Reverse Primer
  Primer
agctgctttttcttctgcttt

SEQ ID NO: 13589 - DNA, 19 bp, Artificial sequence  Reverse Primer
  Primer
cacccctaaactgcaggtg

SEQ ID NO: 13590 - DNA, 23 bp, Artificial sequence  Reverse Primer
  Primer
gttttctctttcactgttaggca

SEQ ID NO: 13591 - DNA, 24 bp, Artificial sequence  Reverse Primer
  Primer
tcaaattgagaaagaaagtgattg

SEQ ID NO: 13592 - DNA, 23 bp, Artificial sequence  Reverse Primer
  Primer
aaaaatagtaaaccagcacacta

SEQ ID NO: 13593 - DNA, 26 bp, Artificial sequence  Reverse Primer
  Primer
aatttaggtttacagctgtattctgc

SEQ ID NO: 13594 - DNA, 25 bp, Artificial sequence  Reverse Primer
  Primer
aaataacatacctccttatggaagg

SEQ ID NO: 13595 - DNA, 20 bp, Artificial sequence  Reverse Primer
  Primer
agatgaatgtcactgagcgg

SEQ ID NO: 13596 - DNA, 21 bp, Artificial sequence  Reverse Primer
  Primer
tggagatgaatgtcactgagc

SEQ ID NO: 13597 - DNA, 24 bp, Artificial sequence  Reverse Primer
  Primer
taatccttcatttcagagcaaatc

SEQ ID NO: 13598 - DNA, 26 bp, Artificial sequence  Reverse Primer
  Primer
ttgttcacaactttctgaatctttaa

SEQ ID NO: 13599 - DNA, 18 bp, Artificial sequence  Reverse Primer
  Primer
tccctgcaacacccactc

SEQ ID NO: 13600 - DNA, 24 bp, Artificial sequence  Reverse Primer
  Primer
atgtctgcaagattcttctctttt

SEQ ID NO: 13601 - DNA, 19 bp, Artificial sequence  Reverse Primer
  Primer
tatttctccctggctctgg

SEQ ID NO: 13602 - DNA, 21 bp, Artificial sequence  Reverse Primer
  Primer
tagtcaactttggcaaaaccg

SEQ ID NO: 13603 - DNA, 30 bp, Artificial sequence  Reverse Primer
  Primer
ttttcttagttgtctacaataaaaagtgag

SEQ ID NO: 13604 - DNA, 20 bp, Artificial sequence  Reverse Primer
  Primer
gcatgcaagcctataaatgg

SEQ ID NO: 13605 - DNA, 18 bp, Artificial sequence  Reverse Primer
  Primer
aaaagacagccctgctcc

SEQ ID NO: 13606 - DNA, 27 bp, Artificial sequence  Reverse Primer
  Primer
tcttctgatttcagaataagatcaaat

SEQ ID NO: 13607 - DNA, 23 bp, Artificial sequence  Reverse Primer
  Primer
tgttctaattcactgtttgcagg

SEQ ID NO: 13608 - DNA, 18 bp, Artificial sequence  Reverse Primer
  Primer
agctcactccctccaggg

SEQ ID NO: 13609 - DNA, 26 bp, Artificial sequence  Reverse Primer
  Primer
tttcaaatatgcagtttttagaacac

SEQ ID NO: 13610 - DNA, 22 bp, Artificial sequence  Reverse Primer
  Primer
aatttctccrggaagcatttat

SEQ ID NO: 13611 - DNA, 19 bp, Artificial sequence  Reverse Primer
  Primer
agaccttgaggccatctca

SEQ ID NO: 13612 - DNA, 23 bp, Artificial sequence  Reverse Primer
  Primer
tatcatctccatgatgaggaaat

SEQ ID NO: 13613 - DNA, 20 bp, Artificial sequence  Reverse Primer
  Primer
tctcagaggacagtgcatcg

SEQ ID NO: 13614 - DNA, 29 bp, Artificial sequence  Reverse Primer
  Primer
tctctcacatatattatgagatcacaact

SEQ ID NO: 13615 - DNA, 27 bp, Artificial sequence  Reverse Primer
  Primer
tgataaaatgttagcttcttttgtttc

SEQ ID NO: 13616 - DNA, 23 bp, Artificial sequence  Reverse Primer
  Primer
taatttattcaaccagtctccca

SEQ ID NO: 13617 - DNA, 18 bp, Artificial sequence  Reverse Primer
  Primer
aagtgagcgtgaggggct

SEQ ID NO: 13618 - DNA, 30 bp, Artificial sequence  Reverse Primer
  Primer
gagaagtctctttaacaatagaattacaaa

SEQ ID NO: 13619 - DNA, 30 bp, Artificial sequence  Reverse Primer
  Primer
gtagatatttgagcaaagttaaacagttat

SEQ ID NO: 13620 - DNA, 29 bp, Artificial sequence  Reverse Primer
  Primer
tatgctaaatcttatttaatggactatgc

SEQ ID NO: 13621 - DNA, 23 bp, Artificial sequence  Reverse Primer
  Primer
tgcaattaaccagagatatgagc

SEQ ID NO: 13622 - DNA, 24 bp, Artificial sequence  Reverse Primer
  Primer
atgaatcagatcctctactcttcc

SEQ ID NO: 13623 - DNA, 20 bp, Artificial sequence  Reverse Primer
  Primer
ccaacaatgattccaaggtg

SEQ ID NO: 13624 - DNA, 26 bp, Artificial sequence  Reverse Primer
  Primer
tgtttttactgaatgtcttgaatgtt

SEQ ID NO: 13625 - DNA, 20 bp, Artificial sequence  Reverse Primer
  Primer
aggcatcagcaaattttttg

SEQ ID NO: 13626 - DNA, 28 bp, Artificial sequence  Reverse Primer
  Primer
taactcttacctaaagttaatttcccac

SEQ ID NO: 13627 - DNA, 26 bp, Artificial sequence  Reverse Primer
  Primer
cagatatttcatactctcagttgcat

SEQ ID NO: 13628 - DNA, 18 bp, Artificial sequence  Reverse Primer
  Primer
tctcggctcttayggagc

SEQ ID NO: 13629 - DNA, 21 bp, Artificial sequence  Reverse Primer
  Primer
agaggaaacaaacacaagacc

SEQ ID NO: 13630 - DNA, 22 bp, Artificial sequence  Reverse Primer
  Primer
actcttacctctcgactggagg

SEQ ID NO: 13631 - DNA, 22 bp, Artificial sequence  Reverse Primer
  Primer
agcctccatttcttctaggact

SEQ ID NO: 13632 - DNA, 21 bp, Artificial sequence  Reverse Primer
  Primer
ttgtcctgtgagatayagggg

SEQ ID NO: 13633 - DNA, 23 bp, Artificial sequence  Reverse Primer
  Primer
ttgcatggattaatcaatttttg

SEQ ID NO: 13634 - DNA, 26 bp, Artificial sequence  Reverse Primer
  Primer
tggtatttaaaagcaggttacagata

SEQ ID NO: 13635 - DNA, 18 bp, Artificial sequence  Reverse Primer
  Primer
tcacttgctcacatgggg

SEQ ID NO: 13636 - DNA, 20 bp, Artificial sequence  Reverse Primer
  Primer
tagtgtcgcagaatcgaaca

SEQ ID NO: 13637 - DNA, 22 bp, Artificial sequence  Reverse Primer
  Primer
atcagggaagaactatcacctc

SEQ ID NO: 13638 - DNA, 18 bp, Artificial sequence  Reverse Primer
  Primer
acaccaccatgggacatg

SEQ ID NO: 13639 - DNA, 24 bp, Artificial sequence  Reverse Primer
  Primer
taaactttctcatttgaaggaacc

SEQ ID NO: 13640 - DNA, 29 bp, Artificial sequence  Reverse Primer
  Primer
taacagtcctctgacatatatacaaagag

SEQ ID NO: 13641 - DNA, 28 bp, Artificial sequence  Reverse Primer
  Primer
aaaagtcttattattcccattcttactg

SEQ ID NO: 13642 - DNA, 21 bp, Artificial sequence  Reverse Primer
  Primer
agtgcttgaaacaacacaacc

SEQ ID NO: 13643 - DNA, 27 bp, Artificial sequence  Reverse Primer
  Primer
cttaattttctttattataattgggcc

SEQ ID NO: 13644 - DNA, 18 bp, Artificial sequence  Reverse Primer
  Primer
taaccaaaccctggctgg

SEQ ID NO: 13645 - DNA, 24 bp, Artificial sequence  Reverse Primer
  Primer
tgtataatatcctctcccactcct

SEQ ID NO: 13646 - DNA, 23 bp, Artificial sequence  Reverse Primer
  Primer
agttgcttcataaatccaagtgg

SEQ ID NO: 13647 - DNA, 25 bp, Artificial sequence  Reverse Primer
  Primer
agtatgtacagcaccattgtacagt

SEQ ID NO: 13648 - DNA, 28 bp, Artificial sequence  Reverse Primer
  Primer
tttaatatcatgcattttgaactactag

SEQ ID NO: 13649 - DNA, 30 bp, Artificial sequence  Reverse Primer
  Primer
aaataatttatagaggagagattatttacc

SEQ ID NO: 13650 - DNA, 28 bp, Artificial sequence  Reverse Primer
  Primer
acacacatacacatactcaatttttttt

SEQ ID NO: 13651 - DNA, 24 bp, Artificial sequence  Reverse Primer
  Primer
agagtagccagaaattcagactca

SEQ ID NO: 13652 - DNA, 23 bp, Artificial sequence  Reverse Primer
  Primer
aaattcgtaagtacctgagctcc

SEQ ID NO: 13653 - DNA, 22 bp, Artificial sequence  Reverse Primer
  Primer
atccctgtaccaagatcacaga

SEQ ID NO: 13654 - DNA, 24 bp, Artificial sequence  Reverse Primer
  Primer
tagaacaamaaaacttcctttcca

SEQ ID NO: 13655 - DNA, 22 bp, Artificial sequence  Reverse Primer
  Primer
atacaggggaggagataggttc

SEQ ID NO: 13656 - DNA, 18 bp, Artificial sequence  Reverse Primer
  Primer
aacacgccccyagttcat

SEQ ID NO: 13657 - DNA, 27 bp, Artificial sequence  Reverse Primer
  Primer
cagtatagcatttcctcttgagataat

SEQ ID NO: 13658 - DNA, 19 bp, Artificial sequence  Reverse Primer
  Primer
atataaatggcccgtgagc

SEQ ID NO: 13659 - DNA, 18 bp, Artificial sequence  Reverse Primer
  Primer
aaactgccgcccatcctc

SEQ ID NO: 13660 - DNA, 25 bp, Artificial sequence  Reverse Primer
  Primer
tttataaatcctctgcaaatttctg

SEQ ID NO: 13661 - DNA, 22 bp, Artificial sequence  Reverse Primer
  Primer
actcacagacttagttgctccg

SEQ ID NO: 13662 - DNA, 21 bp, Artificial sequence  Reverse Primer
  Primer
taagcagtctgaacagcaagc

SEQ ID NO: 13663 - DNA, 26 bp, Artificial sequence  Reverse Primer
  Primer
gttagtctgttaaaagcatgttctca

SEQ ID NO: 13664 - DNA, 22 bp, Artificial sequence  Reverse Primer
  Primer
gacaaaatgtgtcagcagtagc

SEQ ID NO: 13665 - DNA, 27 bp, Artificial sequence  Reverse Primer
  Primer
attaacactgtattttgaccaagaagt

SEQ ID NO: 13666 - DNA, 27 bp, Artificial sequence  Reverse Primer
  Primer
tgtgtacaaagtatgcaagaaaaataa

SEQ ID NO: 13667 - DNA, 24 bp, Artificial sequence  Reverse Primer
  Primer
atasaacttgacagagctgtaccc

SEQ ID NO: 13668 - DNA, 25 bp, Artificial sequence  Reverse Primer
  Primer
aaaagaatcaaaggacagagttttt

SEQ ID NO: 13669 - DNA, 22 bp, Artificial sequence  Reverse Primer
  Primer
aaagttccacatccaagaacag

SEQ ID NO: 13670 - DNA, 28 bp, Artificial sequence  Reverse Primer
  Primer
aaaaataatttcagatacctttcaagtg

SEQ ID NO: 13671 - DNA, 22 bp, Artificial sequence  Reverse Primer
  Primer
ttgaagaagagtcttgagcgtc

SEQ ID NO: 13672 - DNA, 24 bp, Artificial sequence  Reverse Primer
  Primer
aaaacaattacctattgatttgcc

SEQ ID NO: 13673 - DNA, 20 bp, Artificial sequence  Reverse Primer
  Primer
ttctggtctgacgtcatcct

SEQ ID NO: 13674 - DNA, 26 bp, Artificial sequence  Reverse Primer
  Primer
agagaagttagataatttgcctgaaa

SEQ ID NO: 13675 - DNA, 25 bp, Artificial sequence  Reverse Primer
  Primer
acaatagctcattggtaataatgga

SEQ ID NO: 13676 - DNA, 30 bp, Artificial sequence  Reverse Primer
  Primer
ttacacaatattgaatataaacaactacag

SEQ ID NO: 13677 - DNA, 22 bp, Artificial sequence  Reverse Primer
  Primer
ttaacgtcactgctgtttatcc

SEQ ID NO: 13678 - DNA, 28 bp, Artificial sequence  Reverse Primer
  Primer
taagtataaatttatcattggcttttcc

SEQ ID NO: 13679 - DNA, 20 bp, Artificial sequence  Reverse Primer
  Primer
cagtgagagcgaatgacaca

SEQ ID NO: 13680 - DNA, 24 bp, Artificial sequence  Reverse Primer
  Primer
tttttatgtcttggctctccttac

SEQ ID NO: 13681 - DNA, 25 bp, Artificial sequence  Reverse Primer
  Primer
aatatggcttgaatcagtcattatc

SEQ ID NO: 13682 - DNA, 19 bp, Artificial sequence  Reverse Primer
  Primer
ttcccttccaaagacagga

SEQ ID NO: 13683 - DNA, 18 bp, Artificial sequence  Reverse Primer
  Primer
agcagtccgggcagagct

SEQ ID NO: 13684 - DNA, 26 bp, Artificial sequence  Reverse Primer
  Primer
atcagaaaagagatccttgtagaaca

SEQ ID NO: 13685 - DNA, 18 bp, Artificial sequence  Reverse Primer
  Primer
aagggagcagggttgggg

SEQ ID NO: 13686 - DNA, 18 bp, Artificial sequence  Reverse Primer
  Primer
tggcaacccacgcctgta

SEQ ID NO: 13687 - DNA, 22 bp, Artificial sequence  Reverse Primer
  Primer
cctgcattttctcagattgtag

SEQ ID NO: 13688 - DNA, 21 bp, Artificial sequence  Reverse Primer
  Primer
atgggaggtatgctttcagaa

SEQ ID NO: 13689 - DNA, 22 bp, Artificial sequence  Reverse Primer
  Primer
tttcagaggacacttaccagag

SEQ ID NO: 13690 - DNA, 24 bp, Artificial sequence  Reverse Primer
  Primer
gtgttgaattctgacactagcttt

SEQ ID NO: 13691 - DNA, 19 bp, Artificial sequence  Reverse Primer
  Primer
ttctttgtggctgatcctg

SEQ ID NO: 13692 - DNA, 21 bp, Artificial sequence  Reverse Primer
  Primer
attcaaggaaacaaacagcct

SEQ ID NO: 13693 - DNA, 22 bp, Artificial sequence  Reverse Primer
  Primer
tttgaacacaggtgttgaattc

SEQ ID NO: 13694 - DNA, 25 bp, Artificial sequence  Reverse Primer
  Primer
tgtcacattttaacagtcaacaaga

SEQ ID NO: 13695 - DNA, 21 bp, Artificial sequence  Reverse Primer
  Primer
ttgaagaggtcatggtcagat

SEQ ID NO: 13696 - DNA, 24 bp, Artificial sequence  Reverse Primer
  Primer
ggaagagatgaagaggatatttcc

SEQ ID NO: 13697 - DNA, 29 bp, Artificial sequence  Reverse Primer
  Primer
ttacttaggtcagaaaaagataatttgtg

SEQ ID NO: 13698 - DNA, 18 bp, Artificial sequence  Reverse Primer
  Primer
agtggacgctgcagacag

SEQ ID NO: 13699 - DNA, 26 bp, Artificial sequence  Reverse Primer
  Primer
atatggtactcaaatccttagatgga

SEQ ID NO: 13700 - DNA, 19 bp, Artificial sequence  Reverse Primer
  Primer
atttggtttcctgccaaga

SEQ ID NO: 13701 - DNA, 20 bp, Artificial sequence  Reverse Primer
  Primer
tttgaaagtgcaaaacatgg

SEQ ID NO: 13702 - DNA, 20 bp, Artificial sequence  Reverse Primer
  Primer
agcagtagtccatgctacgc

SEQ ID NO: 13703 - DNA, 26 bp, Artificial sequence  Reverse Primer
  Primer
ttctcattagstggtagattacttga

SEQ ID NO: 13704 - DNA, 19 bp, Artificial sequence  Reverse Primer
  Primer
tgtccccaaactcctgttc

SEQ ID NO: 13705 - DNA, 23 bp, Artificial sequence  Reverse Primer
  Primer
agatcagagtgatgggactatcc

SEQ ID NO: 13706 - DNA, 18 bp, Artificial sequence  Reverse Primer
  Primer
tcccgcccgacacagatg

SEQ ID NO: 13707 - DNA, 24 bp, Artificial sequence  Reverse Primer
  Primer
tttatatagactggatgagctggg

SEQ ID NO: 13708 - DNA, 24 bp, Artificial sequence  Reverse Primer
  Primer
cgaatgtcaaattgtggatttata

SEQ ID NO: 13709 - DNA, 25 bp, Artificial sequence  Reverse Primer
  Primer
taacaacgtgtttgaaaactatgac

SEQ ID NO: 13710 - DNA, 30 bp, Artificial sequence  Reverse Primer
  Primer
ttagtagggagtatgtttttaattgactac

SEQ ID NO: 13711 - DNA, 24 bp, Artificial sequence  Reverse Primer
  Primer
tagatttcaraggttagatcaggg

SEQ ID NO: 13712 - DNA, 24 bp, Artificial sequence  Reverse Primer
  Primer
tttgtgtccattttttagacacac

SEQ ID NO: 13713 - DNA, 21 bp, Artificial sequence  Reverse Primer
  Primer
ccagagtttctttgggttgat

SEQ ID NO: 13714 - DNA, 24 bp, Artificial sequence  Reverse Primer
  Primer
taagtacaaaggcaggacctaaaa

SEQ ID NO: 13715 - DNA, 26 bp, Artificial sequence  Reverse Primer
  Primer
aggaataaaatgctttaaatgacatc

SEQ ID NO: 13716 - DNA, 30 bp, Artificial sequence  Reverse Primer
  Primer
caagactgtaaaaaataagtgaatactgta

SEQ ID NO: 13717 - DNA, 20 bp, Artificial sequence  Reverse Primer
  Primer
tattttccactgggaatggc

SEQ ID NO: 13718 - DNA, 25 bp, Artificial sequence  Reverse Primer
  Primer
atcatttactccataaatcaagctg

SEQ ID NO: 13719 - DNA, 26 bp, Artificial sequence  Reverse Primer
  Primer
aacagagaacaaaaattaaaaagctg

SEQ ID NO: 13720 - DNA, 24 bp, Artificial sequence  Reverse Primer
  Primer
aaattgttcactgaatttaatggg

SEQ ID NO: 13721 - DNA, 20 bp, Artificial sequence  Reverse Primer
  Primer
atctgaccaaccagcttctg

SEQ ID NO: 13722 - DNA, 28 bp, Artificial sequence  Reverse Primer
  Primer
agatgattattctggaaaagagataact

SEQ ID NO: 13723 - DNA, 22 bp, Artificial sequence  Reverse Primer
  Primer
aatcttgggggaaaagattatc

SEQ ID NO: 13724 - DNA, 18 bp, Artificial sequence  Reverse Primer
  Primer
atgtttgcacccctggca

SEQ ID NO: 13725 - DNA, 29 bp, Artificial sequence  Reverse Primer
  Primer
tctttatgttgaattaagaaagtagtgtg

SEQ ID NO: 13726 - DNA, 21 bp, Artificial sequence  Reverse Primer
  Primer
atttgagccaagctaaccatc

SEQ ID NO: 13727 - DNA, 22 bp, Artificial sequence  Reverse Primer
  Primer
aatcccaaccttctactaccct

SEQ ID NO: 13728 - DNA, 20 bp, Artificial sequence  Reverse Primer
  Primer
atgccaatacaaaaccttcc

SEQ ID NO: 13729 - DNA, 21 bp, Artificial sequence  Reverse Primer
  Primer
tttgaacagagagatgccaaa

SEQ ID NO: 13730 - DNA, 29 bp, Artificial sequence  Reverse Primer
  Primer
atatctcttaaagtacttatcctacatgg

SEQ ID NO: 13731 - DNA, 28 bp, Artificial sequence  Reverse Primer
  Primer
atatatttttactctttccatttgcttc

SEQ ID NO: 13732 - DNA, 20 bp, Artificial sequence  Reverse Primer
  Primer
agacagttgcgatgggatat

SEQ ID NO: 13733 - DNA, 25 bp, Artificial sequence  Reverse Primer
  Primer
aagttgtttgatttacttgcttgtt

SEQ ID NO: 13734 - DNA, 20 bp, Artificial sequence  Reverse Primer
  Primer
attatcgtggtggttaccca

SEQ ID NO: 13735 - DNA, 21 bp, Artificial sequence  Reverse Primer
  Primer
acattgatccattgaaactgc

SEQ ID NO: 13736 - DNA, 18 bp, Artificial sequence  Reverse Primer
  Primer
gcagggagcagtttcagg

SEQ ID NO: 13737 - DNA, 25 bp, Artificial sequence  Reverse Primer
  Primer
aaaatcactcattgttcactcactt

SEQ ID NO: 13738 - DNA, 25 bp, Artificial sequence  Reverse Primer
  Primer
aacttgtaccattaaaccacaaacc

SEQ ID NO: 13739 - DNA, 23 bp, Artificial sequence  Reverse Primer
  Primer
ttcttgagacaattagcattgtg

SEQ ID NO: 13740 - DNA, 29 bp, Artificial sequence  Reverse Primer
  Primer
tttgttctttacctaaattctytacaact

SEQ ID NO: 13741 - DNA, 27 bp, Artificial sequence  Reverse Primer
  Primer
tgtgcccatatgaatattagttactta

SEQ ID NO: 13742 - DNA, 21 bp, Artificial sequence  Reverse Primer
  Primer
tttgtttctcccactgagtga

SEQ ID NO: 13743 - DNA, 21 bp, Artificial sequence  Reverse Primer
  Primer
tggtctacacacacacatgca

SEQ ID NO: 13744 - DNA, 30 bp, Artificial sequence  Reverse Primer
  Primer
tctatacattgataacagataactcatcaa

SEQ ID NO: 13745 - DNA, 23 bp, Artificial sequence  Reverse Primer
  Primer
taagcacagtgtgaattctttga

SEQ ID NO: 13746 - DNA, 20 bp, Artificial sequence  Reverse Primer
  Primer
aactgcatcttgtttccagg

SEQ ID NO: 13747 - DNA, 25 bp, Artificial sequence  Reverse Primer
  Primer
tkaaaacattcctcccttatctaaa

SEQ ID NO: 13748 - DNA, 30 bp, Artificial sequence  Reverse Primer
  Primer
agaaaatgtcaataatatgatatatgtccc

SEQ ID NO: 13749 - DNA, 29 bp, Artificial sequence  Reverse Primer
  Primer
aacttccatctagttcctaataagatttt

SEQ ID NO: 13750 - DNA, 20 bp, Artificial sequence  Reverse Primer
  Primer
tggcctcaaggaartatctc

SEQ ID NO: 13751 - DNA, 21 bp, Artificial sequence  Reverse Primer
  Primer
aggcttttctaaaccaggctt

SEQ ID NO: 13752 - DNA, 30 bp, Artificial sequence  Reverse Primer
  Primer
aagactctgggtaaatagaaagtattagta

SEQ ID NO: 13753 - DNA, 23 bp, Artificial sequence  Reverse Primer
  Primer
aagatccactagagaaggcaatg

SEQ ID NO: 13754 - DNA, 19 bp, Artificial sequence  Reverse Primer
  Primer
atgaccggcataacaactg

SEQ ID NO: 13755 - DNA, 20 bp, Artificial sequence  Reverse Primer
  Primer
tagaccacgagcaaaagctg

SEQ ID NO: 13756 - DNA, 30 bp, Artificial sequence  Reverse Primer
  Primer
taaaagctcacttatataatcttctccttt

SEQ ID NO: 13757 - DNA, 26 bp, Artificial sequence  Reverse Primer
  Primer
ttagtgggaggaattgagtaataatt

SEQ ID NO: 13758 - DNA, 24 bp, Artificial sequence  Reverse Primer
  Primer
ttttcttttttgcttcatctttct

SEQ ID NO: 13759 - DNA, 22 bp, Artificial sequence  Reverse Primer
  Primer
aaactcccactactgtcaagga

SEQ ID NO: 13760 - DNA, 26 bp, Artificial sequence  Reverse Primer
  Primer
aatttgaaagtagaactacaactgca

SEQ ID NO: 13761 - DNA, 21 bp, Artificial sequence  Reverse Primer
  Primer
aaaayactgatttcacgtcct

SEQ ID NO: 13762 - DNA, 21 bp, Artificial sequence  Reverse Primer
  Primer
attcaaacagctcactcttgc

SEQ ID NO: 13763 - DNA, 23 bp, Artificial sequence  Reverse Primer
  Primer
ttcttaactgtgcccatcatatt

SEQ ID NO: 13764 - DNA, 26 bp, Artificial sequence  Reverse Primer
  Primer
tatggatttatggttagtttttcatg

SEQ ID NO: 13765 - DNA, 28 bp, Artificial sequence  Reverse Primer
  Primer
atataccctttgacttattagcatatcc

SEQ ID NO: 13766 - DNA, 28 bp, Artificial sequence  Reverse Primer
  Primer
ttttatataaagtagacctgagtcatcc

SEQ ID NO: 13767 - DNA, 27 bp, Artificial sequence  Reverse Primer
  Primer
attactgtctcaaagaaataccagact

SEQ ID NO: 13768 - DNA, 27 bp, Artificial sequence  Reverse Primer
  Primer
aattttatratagggactacatgctgt

SEQ ID NO: 13769 - DNA, 24 bp, Artificial sequence  Reverse Primer
  Primer
aagaatgactggaacaaggttatt

SEQ ID NO: 13770 - DNA, 25 bp, Artificial sequence  Reverse Primer
  Primer
tgcataatccagtgaagtatgttaa

SEQ ID NO: 13771 - DNA, 19 bp, Artificial sequence  Reverse Primer
  Primer
gttttcctgatcacccctc

SEQ ID NO: 13772 - DNA, 18 bp, Artificial sequence  Reverse Primer
  Primer
gggaggagcctcccttct

SEQ ID NO: 13773 - DNA, 27 bp, Artificial sequence  Reverse Primer
  Primer
tttctcagattacaaatactagtctgc

SEQ ID NO: 13774 - DNA, 24 bp, Artificial sequence  Reverse Primer
  Primer
taaaaagtttgacaaaagtggaag

SEQ ID NO: 13775 - DNA, 29 bp, Artificial sequence  Reverse Primer
  Primer
taagaatgtagtagtgaattgatctgaaa

SEQ ID NO: 13776 - DNA, 23 bp, Artificial sequence  Reverse Primer
  Primer
tctttgtatgatttggaaagcag

SEQ ID NO: 13777 - DNA, 28 bp, Artificial sequence  Reverse Primer
  Primer
tatacccaaatataaagccttaggtaaa

SEQ ID NO: 13778 - DNA, 28 bp, Artificial sequence  Reverse Primer
  Primer
tacgaacaaaatggtaattttaatagag

SEQ ID NO: 13779 - DNA, 28 bp, Artificial sequence  Reverse Primer
  Primer
aaaacatttaaaatacactgtacatcca

SEQ ID NO: 13780 - DNA, 23 bp, Artificial sequence  Reverse Primer
  Primer
aaagtttatattcttgcccatgg

SEQ ID NO: 13781 - DNA, 24 bp, Artificial sequence  Reverse Primer
  Primer
aattgttttgtttattttgctcct

SEQ ID NO: 13782 - DNA, 21 bp, Artificial sequence  Reverse Primer
  Primer
aaaggatcatggtggagactt

SEQ ID NO: 13783 - DNA, 24 bp, Artificial sequence  Reverse Primer
  Primer
aaaacatcacacacttgctagaaa

SEQ ID NO: 13784 - DNA, 22 bp, Artificial sequence  Reverse Primer
  Primer
tacaaagaaaacctgcatgaaa

SEQ ID NO: 13785 - DNA, 23 bp, Artificial sequence  Reverse Primer
  Primer
ttaaaacagggaaaaaattaagc

SEQ ID NO: 13786 - DNA, 20 bp, Artificial sequence  Reverse Primer
  Primer
tgaggatctagccctctcaa

SEQ ID NO: 13787 - DNA, 20 bp, Artificial sequence  Reverse Primer
  Primer
aagtagaaagcacagggcag

SEQ ID NO: 13788 - DNA, 21 bp, Artificial sequence  Reverse Primer
  Primer
ttttattggtggcatttgaag

SEQ ID NO: 13789 - DNA, 19 bp, Artificial sequence  Reverse Primer
  Primer
tttccatcccctgtcagtc

SEQ ID NO: 13790 - DNA, 24 bp, Artificial sequence  Reverse Primer
  Primer
ttgacctgaaattatgtttgtgtg

SEQ ID NO: 13791 - DNA, 27 bp, Artificial sequence  Reverse Primer
  Primer
aacctttgctagctattatctttaaca

SEQ ID NO: 13792 - DNA, 18 bp, Artificial sequence  Reverse Primer
  Primer
gctggcctggaatctcag

SEQ ID NO: 13793 - DNA, 22 bp, Artificial sequence  Reverse Primer
  Primer
actctgcctctttgtgtttctc

SEQ ID NO: 13794 - DNA, 30 bp, Artificial sequence  Reverse Primer
  Primer
tttctcatagtctatattctttgttctatc

SEQ ID NO: 13795 - DNA, 23 bp, Artificial sequence  Reverse Primer
  Primer
cagaatttaaatgaggtttgacg

SEQ ID NO: 13796 - DNA, 18 bp, Artificial sequence  Reverse Primer
  Primer
acctcggaattaaggcga

SEQ ID NO: 13797 - DNA, 29 bp, Artificial sequence  Reverse Primer
  Primer
cttgaaatactcttggatttagaagataa

SEQ ID NO: 13798 - DNA, 28 bp, Artificial sequence  Reverse Primer
  Primer
cttaaattttatgttttggttgttacag

SEQ ID NO: 13799 - DNA, 18 bp, Artificial sequence  Reverse Primer
  Primer
atccaggccctttcccaa

SEQ ID NO: 13800 - DNA, 22 bp, Artificial sequence  Reverse Primer
  Primer
aaaatgattcagacggttttcc

SEQ ID NO: 13801 - DNA, 18 bp, Artificial sequence  Reverse Primer
  Primer
tctttggcattgcaagca

SEQ ID NO: 13802 - DNA, 23 bp, Artificial sequence  Reverse Primer
  Primer
aagatgaagtaggccttctcaaa

SEQ ID NO: 13803 - DNA, 18 bp, Artificial sequence  Reverse Primer
  Primer
tgcaggggaagcagaagt

SEQ ID NO: 13804 - DNA, 21 bp, Artificial sequence  Reverse Primer
  Primer
acacaggtcccagagatcttg

SEQ ID NO: 13805 - DNA, 30 bp, Artificial sequence  Reverse Primer
  Primer
gaagccagtagagtactaaaataaataatt

SEQ ID NO: 13806 - DNA, 19 bp, Artificial sequence  Reverse Primer
  Primer
cgggatccgggtttgtgta

SEQ ID NO: 13807 - DNA, 30 bp, Artificial sequence  Reverse Primer
  Primer
tttactcatactagactcatttctttctgt

SEQ ID NO: 13808 - DNA, 24 bp, Artificial sequence  Reverse Primer
  Primer
tttgctaaagacaaagttcttctg

SEQ ID NO: 13809 - DNA, 18 bp, Artificial sequence  Reverse Primer
  Primer
caagggctggatcagagg

SEQ ID NO: 13810 - DNA, 20 bp, Artificial sequence  Reverse Primer
  Primer
ttttctgcctwaatcccatg

SEQ ID NO: 13811 - DNA, 18 bp, Artificial sequence  Reverse Primer
  Primer
tgctctgtgctgcgtgtt

SEQ ID NO: 13812 - DNA, 19 bp, Artificial sequence  Reverse Primer
  Primer
tggtgcctaagggtcaact

SEQ ID NO: 13813 - DNA, 27 bp, Artificial sequence  Reverse Primer
  Primer
tttaaagatatgtctgaaaggagaatg

SEQ ID NO: 13814 - DNA, 22 bp, Artificial sequence  Reverse Primer
  Primer
gcggttcaaagaaacagtaaca

SEQ ID NO: 13815 - DNA, 26 bp, Artificial sequence  Reverse Primer
  Primer
ttatttccatgagttatctaccttgg

SEQ ID NO: 13816 - DNA, 21 bp, Artificial sequence  Reverse Primer
  Primer
tcagggtactgctctgctaac

SEQ ID NO: 13817 - DNA, 18 bp, Artificial sequence  Reverse Primer
  Primer
tgggggcatggtgaagga

SEQ ID NO: 13818 - DNA, 19 bp, Artificial sequence  Reverse Primer
  Primer
accatcctccaggacatga

SEQ ID NO: 13819 - DNA, 23 bp, Artificial sequence  Reverse Primer
  Primer
atctgtaacagacgtggaacact

SEQ ID NO: 13820 - DNA, 21 bp, Artificial sequence  Reverse Primer
  Primer
tatcccaagagtcacatgctt

SEQ ID NO: 13821 - DNA, 26 bp, Artificial sequence  Reverse Primer
  Primer
ttatctctcaatatgctaaaaaacca

SEQ ID NO: 13822 - DNA, 22 bp, Artificial sequence  Reverse Primer
  Primer
agaaatcatagcagttgtgcct

SEQ ID NO: 13823 - DNA, 18 bp, Artificial sequence  Reverse Primer
  Primer
aggttgcagccattcctc

SEQ ID NO: 13824 - DNA, 27 bp, Artificial sequence  Reverse Primer
  Primer
tgatatcataaatgtaccctatccatt

SEQ ID NO: 13825 - DNA, 29 bp, Artificial sequence  Reverse Primer
  Primer
cacatgggatattataataaacagaattc

SEQ ID NO: 13826 - DNA, 24 bp, Artificial sequence  Reverse Primer
  Primer
aatgaggtatttttagcttttgcc

SEQ ID NO: 13827 - DNA, 24 bp, Artificial sequence  Reverse Primer
  Primer
tcaggacaggtaaatgagtatctc

SEQ ID NO: 13828 - DNA, 23 bp, Artificial sequence  Reverse Primer
  Primer
gcttctcacctgtatgttttctc

SEQ ID NO: 13829 - DNA, 19 bp, Artificial sequence  Reverse Primer
  Primer
ttaccctgtggtcagaacg

SEQ ID NO: 13830 - DNA, 19 bp, Artificial sequence  Reverse Primer
  Primer
ttctttggtggcagactcc

SEQ ID NO: 13831 - DNA, 20 bp, Artificial sequence  Reverse Primer
  Primer
aaactagggcaaggtgaagg

SEQ ID NO: 13832 - DNA, 19 bp, Artificial sequence  Reverse Primer
  Primer
actgcctcccaagacagtg

SEQ ID NO: 13833 - DNA, 27 bp, Artificial sequence  Reverse Primer
  Primer
ctatttcccacattcttaaaacttaaa

SEQ ID NO: 13834 - DNA, 23 bp, Artificial sequence  Reverse Primer
  Primer
ccatcaaatccatatctmcacac

SEQ ID NO: 13835 - DNA, 24 bp, Artificial sequence  Reverse Primer
  Primer
tacaattccatcatctaaaccaca

SEQ ID NO: 13836 - DNA, 30 bp, Artificial sequence  Reverse Primer
  Primer
ataactgagacatttttagtcctagttttc

SEQ ID NO: 13837 - DNA, 24 bp, Artificial sequence  Reverse Primer
  Primer
aggaaaaagatatttcctgacctg

SEQ ID NO: 13838 - DNA, 29 bp, Artificial sequence  Reverse Primer
  Primer
caaagtgactcagttataaatacatgtgt

SEQ ID NO: 13839 - DNA, 25 bp, Artificial sequence  Reverse Primer
  Primer
aagaatttaaaagagaaaaacccac

SEQ ID NO: 13840 - DNA, 27 bp, Artificial sequence  Reverse Primer
  Primer
agtaaggaatataagctctgcacataa

SEQ ID NO: 13841 - DNA, 19 bp, Artificial sequence  Reverse Primer
  Primer
gatgcctcgtgaaataccc

SEQ ID NO: 13842 - DNA, 26 bp, Artificial sequence  Reverse Primer
  Primer
gagccaggaacatttatattttttat

SEQ ID NO: 13843 - DNA, 24 bp, Artificial sequence  Reverse Primer
  Primer
agaatttatttgaaggtgctttca

SEQ ID NO: 13844 - DNA, 19 bp, Artificial sequence  Reverse Primer
  Primer
aggttcaagaaggagggga

SEQ ID NO: 13845 - DNA, 19 bp, Artificial sequence  Reverse Primer
  Primer
tctgtgagatcaggaaggg

SEQ ID NO: 13846 - DNA, 21 bp, Artificial sequence  Reverse Primer
  Primer
aaaaggagaatgtccaggtga

SEQ ID NO: 13847 - DNA, 18 bp, Artificial sequence  Reverse Primer
  Primer
tggaggtcgtgaagtggt

SEQ ID NO: 13848 - DNA, 28 bp, Artificial sequence  Reverse Primer
  Primer
gttaagttcaatcaagaccaaatatagg

SEQ ID NO: 13849 - DNA, 27 bp, Artificial sequence  Reverse Primer
  Primer
tgagtcaactaaartctaattcagacc

SEQ ID NO: 13850 - DNA, 22 bp, Artificial sequence  Reverse Primer
  Primer
tgctgaagaacagcaaatagat

SEQ ID NO: 13851 - DNA, 21 bp, Artificial sequence  Reverse Primer
  Primer
ctgtaagcaagcagcagattt

SEQ ID NO: 13852 - DNA, 18 bp, Artificial sequence  Reverse Primer
  Primer
atccttcccactggagcc

SEQ ID NO: 13853 - DNA, 23 bp, Artificial sequence  Reverse Primer
  Primer
aattttgcaaacttacttggctt

SEQ ID NO: 13854 - DNA, 21 bp, Artificial sequence  Reverse Primer
  Primer
attgtcagctttctcwtgcaa

SEQ ID NO: 13855 - DNA, 19 bp, Artificial sequence  Reverse Primer
  Primer
aaagtgaaggtcaaggcca

SEQ ID NO: 13856 - DNA, 21 bp, Artificial sequence  Reverse Primer
  Primer
aaaccccagaccaataacttg

SEQ ID NO: 13857 - DNA, 22 bp, Artificial sequence  Reverse Primer
  Primer
ttgttgcatcttttctgagtgt

SEQ ID NO: 13858 - DNA, 23 bp, Artificial sequence  Reverse Primer
  Primer
tgtcagagtagcaatcagacatg

SEQ ID NO: 13859 - DNA, 27 bp, Artificial sequence  Reverse Primer
  Primer
gctgtattcgtctatttttttaaatgt

SEQ ID NO: 13860 - DNA, 26 bp, Artificial sequence  Reverse Primer
  Primer
acatcttcttgaaattgaaattcttg

SEQ ID NO: 13861 - DNA, 26 bp, Artificial sequence  Reverse Primer
  Primer
atttttcctcttctcttccttatctc

SEQ ID NO: 13862 - DNA, 20 bp, Artificial sequence  Reverse Primer
  Primer
aaggtcttccctctttccct

SEQ ID NO: 13863 - DNA, 25 bp, Artificial sequence  Reverse Primer
  Primer
ttaaaagttagcctcaaaatgatcc

SEQ ID NO: 13864 - DNA, 25 bp, Artificial sequence  Reverse Primer
  Primer
aattaatttgtttcacctctggatt

SEQ ID NO: 13865 - DNA, 27 bp, Artificial sequence  Reverse Primer
  Primer
gaattatctcattttcttatctgcaag

SEQ ID NO: 13866 - DNA, 18 bp, Artificial sequence  Reverse Primer
  Primer
tgaagccaaaggacagcg

SEQ ID NO: 13867 - DNA, 19 bp, Artificial sequence  Reverse Primer
  Primer
aaagtgaaggtcaaggcca

SEQ ID NO: 13868 - DNA, 27 bp, Artificial sequence  Reverse Primer
  Primer
aatttatgatccttcagaaagtagtga

SEQ ID NO: 13869 - DNA, 24 bp, Artificial sequence  Reverse Primer
  Primer
aaaaattgacagaagtgaaggtgt

SEQ ID NO: 13870 - DNA, 27 bp, Artificial sequence  Reverse Primer
  Primer
gagtggaaagctcttactctttatttt

SEQ ID NO: 13871 - DNA, 23 bp, Artificial sequence  Reverse Primer
  Primer
tggtaaactacacattccctgtg

SEQ ID NO: 13872 - DNA, 29 bp, Artificial sequence  Reverse Primer
  Primer
catataaaaatacctttaactcaaggatc

SEQ ID NO: 13873 - DNA, 27 bp, Artificial sequence  Reverse Primer
  Primer
ttcttatgctagtatgaaacttttcca

SEQ ID NO: 13874 - DNA, 19 bp, Artificial sequence  Reverse Primer
  Primer
tggtaaatccacaaaggcc

SEQ ID NO: 13875 - DNA, 22 bp, Artificial sequence  Reverse Primer
  Primer
gctgtgtcttcccctacataag

SEQ ID NO: 13876 - DNA, 22 bp, Artificial sequence  Reverse Primer
  Primer
tttgggaaattcattcacagtc

SEQ ID NO: 13877 - DNA, 27 bp, Artificial sequence  Reverse Primer
  Primer
ttyrtatgtggattaccatgacatatt

SEQ ID NO: 13878 - DNA, 18 bp, Artificial sequence  Reverse Primer
  Primer
gggtccagagtccagctg

SEQ ID NO: 13879 - DNA, 24 bp, Artificial sequence  Reverse Primer
  Primer
tgttgttagtagggtgtttctttc

SEQ ID NO: 13880 - DNA, 20 bp, Artificial sequence  Reverse Primer
  Primer
actaaaccaccaccaccttg

SEQ ID NO: 13881 - DNA, 22 bp, Artificial sequence  Reverse Primer
  Primer
ttcatttaccccaatttttcat

SEQ ID NO: 13882 - DNA, 18 bp, Artificial sequence  Reverse Primer
  Primer
tgyagggccacacagctg

SEQ ID NO: 13883 - DNA, 30 bp, Artificial sequence  Reverse Primer
  Primer
cttgtgatatagaaaatgctaatagtctgt

SEQ ID NO: 13884 - DNA, 25 bp, Artificial sequence  Reverse Primer
  Primer
aaaggaaaaggttrtgatgataatg

SEQ ID NO: 13885 - DNA, 18 bp, Artificial sequence  Reverse Primer
  Primer
aaatgtcgtctgcgcgag

SEQ ID NO: 13886 - DNA, 23 bp, Artificial sequence  Reverse Primer
  Primer
catttctgataaattcccaagtg

SEQ ID NO: 13887 - DNA, 18 bp, Artificial sequence  Reverse Primer
  Primer
ttgacatgaacagggcag

SEQ ID NO: 13888 - DNA, 26 bp, Artificial sequence  Reverse Primer
  Primer
agttacaatttttatttgttgctcac

SEQ ID NO: 13889 - DNA, 18 bp, Artificial sequence  Reverse Primer
  Primer
ttctagaaaggggagccg

SEQ ID NO: 13890 - DNA, 26 bp, Artificial sequence  Reverse Primer
  Primer
tttaataggtagaactgtcaggaagg

SEQ ID NO: 13891 - DNA, 22 bp, Artificial sequence  Reverse Primer
  Primer
tatataaaggcccaagatcgtg

SEQ ID NO: 13892 - DNA, 20 bp, Artificial sequence  Reverse Primer
  Primer
aaatttgcctggaattgttg

SEQ ID NO: 13893 - DNA, 30 bp, Artificial sequence  Reverse Primer
  Primer
aaaacacacttatatagtacactcaagaaa

SEQ ID NO: 13894 - DNA, 24 bp, Artificial sequence  Reverse Primer
  Primer
tcgctataagggttacacagttac

SEQ ID NO: 13895 - DNA, 23 bp, Artificial sequence  Reverse Primer
  Primer
aaaataaagggagaaagactccg

SEQ ID NO: 13896 - DNA, 26 bp, Artificial sequence  Reverse Primer
  Primer
tttaattttgaatagaactgcacaga

SEQ ID NO: 13897 - DNA, 22 bp, Artificial sequence  Reverse Primer
  Primer
attgtgctggtaatctgcattt

SEQ ID NO: 13898 - DNA, 23 bp, Artificial sequence  Reverse Primer
  Primer
aaaattcatgcaaagacaacatt

SEQ ID NO: 13899 - DNA, 20 bp, Artificial sequence  Reverse Primer
  Primer
ttcaggaatcctttgcattg

SEQ ID NO: 13900 - DNA, 26 bp, Artificial sequence  Reverse Primer
  Primer
ttcataaggtatttgaatgtcacttg

SEQ ID NO: 13901 - DNA, 23 bp, Artificial sequence  Reverse Primer
  Primer
tcatcattgaactttcagttgag

SEQ ID NO: 13902 - DNA, 30 bp, Artificial sequence  Reverse Primer
  Primer
atatataataactgacattatggctgaaat

SEQ ID NO: 13903 - DNA, 20 bp, Artificial sequence  Reverse Primer
  Primer
aggagatcctgctcaaggac

SEQ ID NO: 13904 - DNA, 28 bp, Artificial sequence  Reverse Primer
  Primer
aatacaataaacactggaattttctttc

SEQ ID NO: 13905 - DNA, 27 bp, Artificial sequence  Reverse Primer
  Primer
aaaagaaagcacatctatctttacaac

SEQ ID NO: 13906 - DNA, 23 bp, Artificial sequence  Reverse Primer
  Primer
ttccagctcaatatcactgaatc

SEQ ID NO: 13907 - DNA, 22 bp, Artificial sequence  Reverse Primer
  Primer
aacagagaaaactgtggaaccc

SEQ ID NO: 13908 - DNA, 22 bp, Artificial sequence  Reverse Primer
  Primer
ttttatgtggagctggaatctg

SEQ ID NO: 13909 - DNA, 18 bp, Artificial sequence  Reverse Primer
  Primer
atacagggggagaagccg

SEQ ID NO: 13910 - DNA, 28 bp, Artificial sequence  Reverse Primer
  Primer
agggaattaatattgtttaagaaacaca

SEQ ID NO: 13911 - DNA, 20 bp, Artificial sequence  Reverse Primer
  Primer
aaaatcaggcagacagagcc

SEQ ID NO: 13912 - DNA, 20 bp, Artificial sequence  Reverse Primer
  Primer
aactcratgcttgaaggagc

SEQ ID NO: 13913 - DNA, 21 bp, Artificial sequence  Reverse Primer
  Primer
atggttgtttcctgtggaatt

SEQ ID NO: 13914 - DNA, 21 bp, Artificial sequence  Reverse Primer
  Primer
aggaagaagtagcaacccact

SEQ ID NO: 13915 - DNA, 28 bp, Artificial sequence  Reverse Primer
  Primer
actgcttaataactttgaagaaaacttt

SEQ ID NO: 13916 - DNA, 25 bp, Artificial sequence  Reverse Primer
  Primer
tcagattcytcaaatcaatgtttta

SEQ ID NO: 13917 - DNA, 24 bp, Artificial sequence  Reverse Primer
  Primer
gatgaatacaaatgtatacagcca

SEQ ID NO: 13918 - DNA, 18 bp, Artificial sequence  Reverse Primer
  Primer
agtgggctgctgactcca

SEQ ID NO: 13919 - DNA, 18 bp, Artificial sequence  Reverse Primer
  Primer
aggcctccagaacggata

SEQ ID NO: 13920 - DNA, 28 bp, Artificial sequence  Reverse Primer
  Primer
acttataaaaatcataataggcaaggaa

SEQ ID NO: 13921 - DNA, 25 bp, Artificial sequence  Reverse Primer
  Primer
aaagactttgtagtgggagagaact

SEQ ID NO: 13922 - DNA, 29 bp, Artificial sequence  Reverse Primer
  Primer
attacttcttatctgaggtatttgaaaga

SEQ ID NO: 13923 - DNA, 30 bp, Artificial sequence  Reverse Primer
  Primer
gtgttatatttttccttcagatatatttcc

SEQ ID NO: 13924 - DNA, 21 bp, Artificial sequence  Reverse Primer
  Primer
agctgatgccatttacattca

SEQ ID NO: 13925 - DNA, 21 bp, Artificial sequence  Reverse Primer
  Primer
tggatcaacaatatccctcct

SEQ ID NO: 13926 - DNA, 22 bp, Artificial sequence  Reverse Primer
  Primer
taagtttgattcgacaaagctg

SEQ ID NO: 13927 - DNA, 25 bp, Artificial sequence  Reverse Primer
  Primer
acactgtccctgtatcctactgtaa

SEQ ID NO: 13928 - DNA, 26 bp, Artificial sequence  Reverse Primer
  Primer
atcaaagatacatctacatgtggaaa

SEQ ID NO: 13929 - DNA, 27 bp, Artificial sequence  Reverse Primer
  Primer
agaagaaatgagtatctgattaaacca

SEQ ID NO: 13930 - DNA, 19 bp, Artificial sequence  Reverse Primer
  Primer
tttgtaattggcagcaacg

SEQ ID NO: 13931 - DNA, 22 bp, Artificial sequence  Reverse Primer
  Primer
taagagagtctcacrgaggagc

SEQ ID NO: 13932 - DNA, 26 bp, Artificial sequence  Reverse Primer
  Primer
ttaatagcatggttgatagaaatctg

SEQ ID NO: 13933 - DNA, 28 bp, Artificial sequence  Reverse Primer
  Primer
atacagtactgtgtatcatttaatccca

SEQ ID NO: 13934 - DNA, 18 bp, Artificial sequence  Reverse Primer
  Primer
atgcgcacttcagtctcg

SEQ ID NO: 13935 - DNA, 28 bp, Artificial sequence  Reverse Primer
  Primer
cttcttgtctttttgttttaaatttacc

SEQ ID NO: 13936 - DNA, 18 bp, Artificial sequence  Reverse Primer
  Primer
agtttcaggrtggagggg

SEQ ID NO: 13937 - DNA, 21 bp, Artificial sequence  Reverse Primer
  Primer
ttgtgctatcctgccaaatag

SEQ ID NO: 13938 - DNA, 23 bp, Artificial sequence  Reverse Primer
  Primer
tttttgcttttaaaacatccaga

SEQ ID NO: 13939 - DNA, 25 bp, Artificial sequence  Reverse Primer
  Primer
ttaaaaaatccacttggtactcatt

SEQ ID NO: 13940 - DNA, 24 bp, Artificial sequence  Reverse Primer
  Primer
attggaaaattcatactggaaaga

SEQ ID NO: 13941 - DNA, 23 bp, Artificial sequence  Reverse Primer
  Primer
ttgaaattttaagcatcactgct

SEQ ID NO: 13942 - DNA, 21 bp, Artificial sequence  Reverse Primer
  Primer
tgaaagcccatgttttacaca

SEQ ID NO: 13943 - DNA, 26 bp, Artificial sequence  Reverse Primer
  Primer
attcttcaagtaatttaacagaggct

SEQ ID NO: 13944 - DNA, 25 bp, Artificial sequence  Reverse Primer
  Primer
attcaccacttcttagattgattca

SEQ ID NO: 13945 - DNA, 23 bp, Artificial sequence  Reverse Primer
  Primer
gagaaacagtaatttgcgtgaat

SEQ ID NO: 13946 - DNA, 19 bp, Artificial sequence  Reverse Primer
  Primer
aggagggcattatggtgag

SEQ ID NO: 13947 - DNA, 26 bp, Artificial sequence  Reverse Primer
  Primer
aggagaaagaagaattaatcaacaaa

SEQ ID NO: 13948 - DNA, 18 bp, Artificial sequence  Reverse Primer
  Primer
ctgcccaccacgctgaag

SEQ ID NO: 13949 - DNA, 21 bp, Artificial sequence  Reverse Primer
  Primer
tatggagagaactggagcacc

SEQ ID NO: 13950 - DNA, 23 bp, Artificial sequence  Reverse Primer
  Primer
attcatcacttagggacacagtg

SEQ ID NO: 13951 - DNA, 24 bp, Artificial sequence  Reverse Primer
  Primer
tgcagcaaacaaaataataaatcc

SEQ ID NO: 13952 - DNA, 18 bp, Artificial sequence  Reverse Primer
  Primer
ttacggatcaaggcagcc

SEQ ID NO: 13953 - DNA, 19 bp, Artificial sequence  Reverse Primer
  Primer
atgaaggcagrgaytggag

SEQ ID NO: 13954 - DNA, 30 bp, Artificial sequence  Reverse Primer
  Primer
agtatatggatttaaagaaggagctactag

SEQ ID NO: 13955 - DNA, 27 bp, Artificial sequence  Reverse Primer
  Primer
acttagaaatttcacataaaagcaatg

SEQ ID NO: 13956 - DNA, 25 bp, Artificial sequence  Reverse Primer
  Primer
aaaccttatgaatgtactgaatgtg

SEQ ID NO: 13957 - DNA, 28 bp, Artificial sequence  Reverse Primer
  Primer
aatagtctatttccattccataaaagaa

SEQ ID NO: 13958 - DNA, 24 bp, Artificial sequence  Reverse Primer
  Primer
ttaggttcccagaaaaactaagtg

SEQ ID NO: 13959 - DNA, 22 bp, Artificial sequence  Reverse Primer
  Primer
tataggaaggtcaagctgctca

SEQ ID NO: 13960 - DNA, 28 bp, Artificial sequence  Reverse Primer
  Primer
caaaacgttgttaatatttaatatctgg

SEQ ID NO: 13961 - DNA, 29 bp, Artificial sequence  Reverse Primer
  Primer
tctcgatatttatagttttccatkatatg

SEQ ID NO: 13962 - DNA, 18 bp, Artificial sequence  Reverse Primer
  Primer
caccagcagggacagacc

SEQ ID NO: 13963 - DNA, 22 bp, Artificial sequence  Reverse Primer
  Primer
tctcttattgattcctgccaga

SEQ ID NO: 13964 - DNA, 27 bp, Artificial sequence  Reverse Primer
  Primer
atattacactcattgtctcttttgacc

SEQ ID NO: 13965 - DNA, 24 bp, Artificial sequence  Reverse Primer
  Primer
atgctattcctctcttgatgtttt

SEQ ID NO: 13966 - DNA, 22 bp, Artificial sequence  Reverse Primer
  Primer
tcattgcaatacagccattaca

SEQ ID NO: 13967 - DNA, 22 bp, Artificial sequence  Reverse Primer
  Primer
tacaaagcaaagatatgaccgc

SEQ ID NO: 13968 - DNA, 26 bp, Artificial sequence  Reverse Primer
  Primer
aatttgaattattgactaggataccc

SEQ ID NO: 13969 - DNA, 25 bp, Artificial sequence  Reverse Primer
  Primer
aattaaytatctaaccacttctgaa

SEQ ID NO: 13970 - DNA, 26 bp, Artificial sequence  Reverse Primer
  Primer
atgtttactttcagataatgcaatca

SEQ ID NO: 13971 - DNA, 24 bp, Artificial sequence  Reverse Primer
  Primer
aataaacagcagaacttgaacctg

SEQ ID NO: 13972 - DNA, 21 bp, Artificial sequence  Reverse Primer
  Primer
aattagatgtttgggttccga

SEQ ID NO: 13973 - DNA, 23 bp, Artificial sequence  Reverse Primer
  Primer
tactagagctcagctcacaaacg

SEQ ID NO: 13974 - DNA, 30 bp, Artificial sequence  Reverse Primer
  Primer
ttaacattactattagtgtgtgttgtatcc

SEQ ID NO: 13975 - DNA, 29 bp, Artificial sequence  Reverse Primer
  Primer
tctgtctgtgtatgtacttaacctatctg

SEQ ID NO: 13976 - DNA, 30 bp, Artificial sequence  Reverse Primer
  Primer
tagaacagaaaatgtagagaaaaatatgtc

SEQ ID NO: 13977 - DNA, 18 bp, Artificial sequence  Reverse Primer
  Primer
tcccatctggtcatccat

SEQ ID NO: 13978 - DNA, 20 bp, Artificial sequence  Reverse Primer
  Primer
accgagtgtgtgttttggac

SEQ ID NO: 13979 - DNA, 22 bp, Artificial sequence  Reverse Primer
  Primer
ttagtttgctagagcgtcacaa

SEQ ID NO: 13980 - DNA, 26 bp, Artificial sequence  Reverse Primer
  Primer
tactgtaggatttcagtttatggagg

SEQ ID NO: 13981 - DNA, 28 bp, Artificial sequence  Reverse Primer
  Primer
atgatatgcctctaagaaaataggtatt

SEQ ID NO: 13982 - DNA, 28 bp, Artificial sequence  Reverse Primer
  Primer
tctacttcattatttatcctttttttgc

SEQ ID NO: 13983 - DNA, 22 bp, Artificial sequence  Reverse Primer
  Primer
ttcaggatcaatatggtcctct

SEQ ID NO: 13984 - DNA, 20 bp, Artificial sequence  Reverse Primer
  Primer
agttggacaagctcaccaac

SEQ ID NO: 13985 - DNA, 24 bp, Artificial sequence  Reverse Primer
  Primer
atatgaaaagatgcagagatgtgt

SEQ ID NO: 13986 - DNA, 19 bp, Artificial sequence  Reverse Primer
  Primer
gaggatgaccttcagctcg

SEQ ID NO: 13987 - DNA, 24 bp, Artificial sequence  Reverse Primer
  Primer
ttattgctgtacagttggatatgg

SEQ ID NO: 13988 - DNA, 21 bp, Artificial sequence  Reverse Primer
  Primer
atatgcagcagaaagcctctc

SEQ ID NO: 13989 - DNA, 26 bp, Artificial sequence  Reverse Primer
  Primer
tgaaacaaatgtaacataaagtttgc

SEQ ID NO: 13990 - DNA, 27 bp, Artificial sequence  Reverse Primer
  Primer
tcgcacactgaaatagtctattatatc

SEQ ID NO: 13991 - DNA, 19 bp, Artificial sequence  Reverse Primer
  Primer
gagagaggcggggtcctta

SEQ ID NO: 13992 - DNA, 24 bp, Artificial sequence  Reverse Primer
  Primer
taaactacataagcacctggcata

SEQ ID NO: 13993 - DNA, 24 bp, Artificial sequence  Reverse Primer
  Primer
tgctacttttgaaagatcatcatc

SEQ ID NO: 13994 - DNA, 20 bp, Artificial sequence  Reverse Primer
  Primer
agaaggaggacatcacacga

SEQ ID NO: 13995 - DNA, 27 bp, Artificial sequence  Reverse Primer
  Primer
aaccttacattgaaggtatgattagtg

SEQ ID NO: 13996 - DNA, 29 bp, Artificial sequence  Reverse Primer
  Primer
atatattcctttttccctatgtrgtttat

SEQ ID NO: 13997 - DNA, 21 bp, Artificial sequence  Reverse Primer
  Primer
acaaaaaaggatttcaagcag

SEQ ID NO: 13998 - DNA, 19 bp, Artificial sequence  Reverse Primer
  Primer
actccacggacaactggat

SEQ ID NO: 13999 - DNA, 23 bp, Artificial sequence  Reverse Primer
  Primer
gtgttcaaacatttggatatggt

SEQ ID NO: 14000 - DNA, 22 bp, Artificial sequence  Reverse Primer
  Primer
caagcttgatatcctatggagc

SEQ ID NO: 14001 - DNA, 22 bp, Artificial sequence  Reverse Primer
  Primer
ttcagctcataaacaacaggag

SEQ ID NO: 14002 - DNA, 18 bp, Artificial sequence  Reverse Primer
  Primer
atgtttgtcgggtgcagt

SEQ ID NO: 14003 - DNA, 18 bp, Artificial sequence  Reverse Primer
  Primer
actgagcacacgcagggg

SEQ ID NO: 14004 - DNA, 18 bp, Artificial sequence  Reverse Primer
  Primer
cagttgctccttctgggg

SEQ ID NO: 14005 - DNA, 18 bp, Artificial sequence  Reverse Primer
  Primer
gtgacagtgccttggcca

SEQ ID NO: 14006 - DNA, 18 bp, Artificial sequence  Reverse Primer
  Primer
acagggaattcctccgct

SEQ ID NO: 14007 - DNA, 24 bp, Artificial sequence  Reverse Primer
  Primer
acagacttaggaggtgattttgaa

SEQ ID NO: 14008 - DNA, 25 bp, Artificial sequence  Reverse Primer
  Primer
tttctcatcaataccagttaatcac

SEQ ID NO: 14009 - DNA, 24 bp, Artificial sequence  Reverse Primer
  Primer
atttttcaatttaaatggctcatc

SEQ ID NO: 14010 - DNA, 23 bp, Artificial sequence  Reverse Primer
  Primer
tcaactcagatttgcttgacttt

SEQ ID NO: 14011 - DNA, 24 bp, Artificial sequence  Reverse Primer
  Primer
aggacacaagagtggttagacatt

SEQ ID NO: 14012 - DNA, 19 bp, Artificial sequence  Reverse Primer
  Primer
agacaygcaagggaacatc

SEQ ID NO: 14013 - DNA, 18 bp, Artificial sequence  Reverse Primer
  Primer
gtaatgtgccaggccctc

SEQ ID NO: 14014 - DNA, 18 bp, Artificial sequence  Reverse Primer
  Primer
tgctctcacagccttcca

SEQ ID NO: 14015 - DNA, 18 bp, Artificial sequence  Reverse Primer
  Primer
tgtggtgctctgcgtgta

SEQ ID NO: 14016 - DNA, 27 bp, Artificial sequence  Reverse Primer
  Primer
cttcacacattcaataataaaaccttt

SEQ ID NO: 14017 - DNA, 18 bp, Artificial sequence  Reverse Primer
  Primer
atgaccttggcttgctgg

SEQ ID NO: 14018 - DNA, 21 bp, Artificial sequence  Reverse Primer
  Primer
attttgagaccttgatgagcg

SEQ ID NO: 14019 - DNA, 21 bp, Artificial sequence  Reverse Primer
  Primer
aaraaccagaacacaaacagc

SEQ ID NO: 14020 - DNA, 24 bp, Artificial sequence  Reverse Primer
  Primer
aaggcttgattttaataaggattg

SEQ ID NO: 14021 - DNA, 30 bp, Artificial sequence  Reverse Primer
  Primer
actatcaagttatatgataagcagtaattt

SEQ ID NO: 14022 - DNA, 28 bp, Artificial sequence  Reverse Primer
  Primer
tattgcatatcaataatactagctggat

SEQ ID NO: 14023 - DNA, 26 bp, Artificial sequence  Reverse Primer
  Primer
aattttctagcaattaaagagtggtc

SEQ ID NO: 14024 - DNA, 22 bp, Artificial sequence  Reverse Primer
  Primer
gatgaaggcattctaagcagag

SEQ ID NO: 14025 - DNA, 18 bp, Artificial sequence  Reverse Primer
  Primer
ggcccacagcactgtaga

SEQ ID NO: 14026 - DNA, 25 bp, Artificial sequence  Reverse Primer
  Primer
agcataaattgttgtagtgtttttg

SEQ ID NO: 14027 - DNA, 29 bp, Artificial sequence  Reverse Primer
  Primer
tagtatatatgtttccaggctactctctc

SEQ ID NO: 14028 - DNA, 22 bp, Artificial sequence  Reverse Primer
  Primer
ttacagcgtgtaagtttcttgg

SEQ ID NO: 14029 - DNA, 25 bp, Artificial sequence  Reverse Primer
  Primer
ttagattgaaccaaagcattaaaag

SEQ ID NO: 14030 - DNA, 28 bp, Artificial sequence  Reverse Primer
  Primer
tttatttataatatgggtgtggagtaaa

SEQ ID NO: 14031 - DNA, 25 bp, Artificial sequence  Reverse Primer
  Primer
aaactgagtaaccaaatgagtgttt

SEQ ID NO: 14032 - DNA, 19 bp, Artificial sequence  Reverse Primer
  Primer
tckgctttgctccatcttc

SEQ ID NO: 14033 - DNA, 27 bp, Artificial sequence  Reverse Primer
  Primer
taattttacaggatttaattctggtct

SEQ ID NO: 14034 - DNA, 24 bp, Artificial sequence  Reverse Primer
  Primer
ttaaaagttgttttttctggattg

SEQ ID NO: 14035 - DNA, 20 bp, Artificial sequence  Reverse Primer
  Primer
ccatcatctgaatccacctt

SEQ ID NO: 14036 - DNA, 28 bp, Artificial sequence  Reverse Primer
  Primer
ttaatattaatttttgtgatgaccttcc

SEQ ID NO: 14037 - DNA, 22 bp, Artificial sequence  Reverse Primer
  Primer
aaaatttacctcccacacatca

SEQ ID NO: 14038 - DNA, 19 bp, Artificial sequence  Reverse Primer
  Primer
cataacccaaagcagctgg

SEQ ID NO: 14039 - DNA, 25 bp, Artificial sequence  Reverse Primer
  Primer
tctgcygcactagaatataagtttc

SEQ ID NO: 14040 - DNA, 30 bp, Artificial sequence  Reverse Primer
  Primer
gtctatttagttaattattgcagtatttgt

SEQ ID NO: 14041 - DNA, 26 bp, Artificial sequence  Reverse Primer
  Primer
attttaaaaattgccactgagtagat

SEQ ID NO: 14042 - DNA, 21 bp, Artificial sequence  Reverse Primer
  Primer
atttcagccttgactaggtgg

SEQ ID NO: 14043 - DNA, 22 bp, Artificial sequence  Reverse Primer
  Primer
aagtagggccacaattacaagg

SEQ ID NO: 14044 - DNA, 20 bp, Artificial sequence  Reverse Primer
  Primer
ataaaagggttgttgcttgg

SEQ ID NO: 14045 - DNA, 21 bp, Artificial sequence  Reverse Primer
  Primer
acctagtcatggctcttgacc

SEQ ID NO: 14046 - DNA, 18 bp, Artificial sequence  Reverse Primer
  Primer
aggagggagggaggctca

SEQ ID NO: 14047 - DNA, 28 bp, Artificial sequence  Reverse Primer
  Primer
taccttgaaaactacatttactaccaac

SEQ ID NO: 14048 - DNA, 23 bp, Artificial sequence  Reverse Primer
  Primer
ttcaatctaagtagccttgtccc

SEQ ID NO: 14049 - DNA, 22 bp, Artificial sequence  Reverse Primer
  Primer
aaaatttacctcccacacatca

SEQ ID NO: 14050 - DNA, 21 bp, Artificial sequence  Reverse Primer
  Primer
aatgctccaattccttgaatc

SEQ ID NO: 14051 - DNA, 29 bp, Artificial sequence  Reverse Primer
  Primer
tcacatcagtggtagtaaaataaatgtat

SEQ ID NO: 14052 - DNA, 30 bp, Artificial sequence  Reverse Primer; identical to SEQ ID NO: 12813
  Primer

SEQ ID NO: 14053 - DNA, 30 bp, Artificial sequence  Reverse Primer
  Primer
ttatgagtactctgttaaaaatagacttaa

SEQ ID NO: 14054 - DNA, 28 bp, Artificial sequence  Reverse Primer
  Primer
atcactttagcagttaattcacaatatt

SEQ ID NO: 14055 - DNA, 29 bp, Artificial sequence  Reverse Primer
  Primer
tgtagtagtaaccttttttctcctaagtg

SEQ ID NO: 14056 - DNA, 27 bp, Artificial sequence  Reverse Primer
  Primer
aaaaacagttgttaatgaaagaaaacc

SEQ ID NO: 14057 - DNA, 23 bp, Artificial sequence  Reverse Primer
  Primer
tctgttgagctacagaggaaaaa

SEQ ID NO: 14058 - DNA, 26 bp, Artificial sequence  Reverse Primer
  Primer
agttctataaatgggttgaatttgaa

SEQ ID NO: 14059 - DNA, 20 bp, Artificial sequence  Reverse Primer
  Primer
ctgtgctgagactcccagat

SEQ ID NO: 14060 - DNA, 19 bp, Artificial sequence  Reverse Primer
  Primer
ttccattacctcccactgc

SEQ ID NO: 14061 - DNA, 30 bp, Artificial sequence  Reverse Primer
  Primer
tttcacttagaagttacttgatattaaaag

SEQ ID NO: 14062 - DNA, 21 bp, Artificial sequence  Reverse Primer
  Primer
atctggaattgggtcatctct

SEQ ID NO: 14063 - DNA, 22 bp, Artificial sequence  Reverse Primer
  Primer
acactatgttgtcctcacatgg

SEQ ID NO: 14064 - DNA, 27 bp, Artificial sequence  Reverse Primer
  Primer
ttttgtaaaataatcgatgctttactc

SEQ ID NO: 14065 - DNA, 19 bp, Artificial sequence  Reverse Primer
  Primer
aactctgtggaagcaccca

SEQ ID NO: 14066 - DNA, 21 bp, Artificial sequence  Reverse Primer
  Primer
tctcctggctcatgtagagag

SEQ ID NO: 14067 - DNA, 26 bp, Artificial sequence  Reverse Primer
  Primer
gtgcaacacattaatgagtcatagta

SEQ ID NO: 14068 - DNA, 24 bp, Artificial sequence  Reverse Primer
  Primer
taacagacagttattgggacacaa

SEQ ID NO: 14069 - DNA, 23 bp, Artificial sequence  Reverse Primer
  Primer
tggccatatgtaatatgtaggga

SEQ ID NO: 14070 - DNA, 28 bp, Artificial sequence  Reverse Primer
  Primer
aatgcattagaaatctaaaatatcatgc

SEQ ID NO: 14071 - DNA, 22 bp, Artificial sequence  Reverse Primer
  Primer
ccygataactgtgttggatctg

SEQ ID NO: 14072 - DNA, 22 bp, Artificial sequence  Reverse Primer
  Primer
ttttcaggaactagagctctgc

SEQ ID NO: 14073 - DNA, 19 bp, Artificial sequence  Reverse Primer
  Primer
tctgaggggcaaagagaag

SEQ ID NO: 14074 - DNA, 27 bp, Artificial sequence  Reverse Primer
  Primer
ttgcatatttgattagctaraacctat

SEQ ID NO: 14075 - DNA, 24 bp, Artificial sequence  Reverse Primer
  Primer
ttcatccacattatggtttgtatt

SEQ ID NO: 14076 - DNA, 18 bp, Artificial sequence  Reverse Primer
  Primer
agggtggggggacacaga

SEQ ID NO: 14077 - DNA, 20 bp, Artificial sequence  Reverse Primer
  Primer
atgttgctgattgacttccc

SEQ ID NO: 14078 - DNA, 18 bp, Artificial sequence  Reverse Primer
  Primer
tagggctcctctgaaggg

SEQ ID NO: 14079 - DNA, 24 bp, Artificial sequence  Reverse Primer
  Primer
aatagctgaattttctgtgctttg

SEQ ID NO: 14080 - DNA, 22 bp, Artificial sequence  Reverse Primer
  Primer
ttttagaatgcagctttgtgac

SEQ ID NO: 14081 - DNA, 24 bp, Artificial sequence  Reverse Primer
  Primer
agggacatgaaaagatactttctg

SEQ ID NO: 14082 - DNA, 21 bp, Artificial sequence  Reverse Primer
  Primer
ttcttgttgctccacagattg

SEQ ID NO: 14083 - DNA, 29 bp, Artificial sequence  Reverse Primer
  Primer
taagctctaggaataaaatgatgagtaag

SEQ ID NO: 14084 - DNA, 23 bp, Artificial sequence  Reverse Primer
  Primer
aattaggctaacaggtaggcaga

SEQ ID NO: 14085 - DNA, 28 bp, Artificial sequence  Reverse Primer
  Primer
tacatttttctttattatgactttggac

SEQ ID NO: 14086 - DNA, 25 bp, Artificial sequence  Reverse Primer
  Primer
ctgcaycattgtatatttctaccag

SEQ ID NO: 14087 - DNA, 24 bp, Artificial sequence  Reverse Primer
  Primer
ttttgagaaggaracaaattatgg

SEQ ID NO: 14088 - DNA, 18 bp, Artificial sequence  Reverse Primer
  Primer
cagccagctgttcacgca

SEQ ID NO: 14089 - DNA, 21 bp, Artificial sequence  Reverse Primer
  Primer
aaagggattttgtttgctttt

SEQ ID NO: 14090 - DNA, 21 bp, Artificial sequence  Reverse Primer
  Primer
atttttgagggagaaaccatg

SEQ ID NO: 14091 - DNA, 29 bp, Artificial sequence  Reverse Primer
  Primer
attaaatatagctgtctttatctttgtgc

SEQ ID NO: 14092 - DNA, 30 bp, Artificial sequence  Reverse Primer
  Primer
ccaattagatataagttacctgttatttag

SEQ ID NO: 14093 - DNA, 25 bp, Artificial sequence  Reverse Primer
  Primer
aagatcattttatgtccttctgtca

SEQ ID NO: 14094 - DNA, 27 bp, Artificial sequence  Reverse Primer
  Primer
attacgtcttatgttgtttccataatc

SEQ ID NO: 14095 - DNA, 25 bp, Artificial sequence  Reverse Primer
  Primer
armaatattacagtgttcccttcca

SEQ ID NO: 14096 - DNA, 25 bp, Artificial sequence  Reverse Primer
  Primer
aattactcggactagaggaaactct

SEQ ID NO: 14097 - DNA, 24 bp, Artificial sequence  Reverse Primer
  Primer
tatcttctgctctctgtcctcttg

SEQ ID NO: 14098 - DNA, 20 bp, Artificial sequence  Reverse Primer
  Primer
aaaagcctaccttccatccc

SEQ ID NO: 14099 - DNA, 19 bp, Artificial sequence  Reverse Primer
  Primer
acaagtctgcagttgctgc

SEQ ID NO: 14100 - DNA, 24 bp, Artificial sequence  Reverse Primer
  Primer
agtggcataatcagattcaaattt

SEQ ID NO: 14101 - DNA, 24 bp, Artificial sequence  Reverse Primer
  Primer
tcctttgatgatcacatacatttt

SEQ ID NO: 14102 - DNA, 25 bp, Artificial sequence  Reverse Primer
  Primer
tttttttgttttctaaacagtccag

SEQ ID NO: 14103 - DNA, 18 bp, Artificial sequence  Reverse Primer
  Primer
tcctgtcgatcctgtgcc

SEQ ID NO: 14104 - DNA, 26 bp, Artificial sequence  Reverse Primer
  Primer
agccttttgtatcatattttgtttct

SEQ ID NO: 14105 - DNA, 21 bp, Artificial sequence  Reverse Primer
  Primer
attcttgctcttggaactccc

SEQ ID NO: 14106 - DNA, 22 bp, Artificial sequence  Reverse Primer
  Primer
atattctgtgctgttttcctgc

SEQ ID NO: 14107 - DNA, 20 bp, Artificial sequence  Reverse Primer
  Primer
tccttgccatgttactgctt

SEQ ID NO: 14108 - DNA, 28 bp, Artificial sequence  Reverse Primer
  Primer
aaggaaatttaaatgttaaaasacctac

SEQ ID NO: 14109 - DNA, 23 bp, Artificial sequence  Reverse Primer
  Primer
tggtggatcagcaagtataaaag

SEQ ID NO: 14110 - DNA, 28 bp, Artificial sequence  Reverse Primer
  Primer
gaaagagaaaagatattaaggagatcag

SEQ ID NO: 14111 - DNA, 22 bp, Artificial sequence  Reverse Primer
  Primer
tgctctccttgatcatgtttac

SEQ ID NO: 14112 - DNA, 23 bp, Artificial sequence  Reverse Primer
  Primer
atttacagagttccatcgtttgt

SEQ ID NO: 14113 - DNA, 18 bp, Artificial sequence  Reverse Primer
  Primer
ttgaacggaagccttgcc

SEQ ID NO: 14114 - DNA, 26 bp, Artificial sequence  Reverse Primer
  Primer
tccacaagtgttattattcataaagc

SEQ ID NO: 14115 - DNA, 24 bp, Artificial sequence  Reverse Primer
  Primer
gaggaaatatgtccatcaacattt

SEQ ID NO: 14116 - DNA, 18 bp, Artificial sequence  Reverse Primer
  Primer
tagatggggaaacgtgct

SEQ ID NO: 14117 - DNA, 29 bp, Artificial sequence  Reverse Primer
  Primer
tcttgagaggtaagatttttacaatattc

SEQ ID NO: 14118 - DNA, 20 bp, Artificial sequence  Reverse Primer
  Primer
cctgagggtggagtacaaag

SEQ ID NO: 14119 - DNA, 22 bp, Artificial sequence  Reverse Primer
  Primer
tccacatttgatgatgaaacag

SEQ ID NO: 14120 - DNA, 28 bp, Artificial sequence  Reverse Primer
  Primer
tataatgggcaagtgatgtaataatatg

SEQ ID NO: 14121 - DNA, 18 bp, Artificial sequence  Reverse Primer
  Primer
tgcactttcctcggatga

SEQ ID NO: 14122 - DNA, 23 bp, Artificial sequence  Reverse Primer
  Primer
tttgctaatckagtccaatctca

SEQ ID NO: 14123 - DNA, 19 bp, Artificial sequence  Reverse Primer
  Primer
atcccatctccccttttct

SEQ ID NO: 14124 - DNA, 26 bp, Artificial sequence  Reverse Primer
  Primer
aacaaggggagtagtattgtttttta

SEQ ID NO: 14125 - DNA, 25 bp, Artificial sequence  Reverse Primer
  Primer
ttaagattcctgtaaggtaggtgtg

SEQ ID NO: 14126 - DNA, 21 bp, Artificial sequence  Reverse Primer
  Primer
aggtttaggagaaggggtttg

SEQ ID NO: 14127 - DNA, 23 bp, Artificial sequence  Reverse Primer
  Primer
tgtcttgacatcacctyatttga

SEQ ID NO: 14128 - DNA, 30 bp, Artificial sequence  Reverse Primer
  Primer
agttatgatatataaaatgaatagactgga

SEQ ID NO: 14129 - DNA, 30 bp, Artificial sequence  Reverse Primer
  Primer
atataaagatctcagtaaaggtaattacac

SEQ ID NO: 14130 - DNA, 25 bp, Artificial sequence  Reverse Primer
  Primer
ttacattagaaaaatccaccctaca

SEQ ID NO: 14131 - DNA, 28 bp, Artificial sequence  Reverse Primer
  Primer
atatgtttcacatttatacaacacaaca

SEQ ID NO: 14132 - DNA, 25 bp, Artificial sequence  Reverse Primer
  Primer
acttttccacggtagtagtaacaca

SEQ ID NO: 14133 - DNA, 19 bp, Artificial sequence  Reverse Primer
  Primer
acagcacagccagaatagc

SEQ ID NO: 14134 - DNA, 25 bp, Artificial sequence  Reverse Primer
  Primer
taatccgaactttctgtgtagtgtc

SEQ ID NO: 14135 - DNA, 19 bp, Artificial sequence  Reverse Primer
  Primer
ccatctaccccaaaaccag

SEQ ID NO: 14136 - DNA, 26 bp, Artificial sequence  Reverse Primer
  Primer
tattttatccactgcaattacacaat

SEQ ID NO: 14137 - DNA, 21 bp, Artificial sequence  Reverse Primer
  Primer
aaaaatttgaaaaacctggca

SEQ ID NO: 14138 - DNA, 25 bp, Artificial sequence  Reverse Primer
  Primer
ttttacagtttcttggagcttttta

SEQ ID NO: 14139 - DNA, 20 bp, Artificial sequence  Reverse Primer
  Primer
taggaaagtatggccagcag

SEQ ID NO: 14140 - DNA, 23 bp, Artificial sequence  Reverse Primer
  Primer
aattacaggcaaggaagaagaaa

SEQ ID NO: 14141 - DNA, 29 bp, Artificial sequence  Reverse Primer
  Primer
tttcttgtttctaagatagagtgtattgg

SEQ ID NO: 14142 - DNA, 20 bp, Artificial sequence  Reverse Primer
  Primer
ttctggagctctgtgacaag

SEQ ID NO: 14143 - DNA, 24 bp, Artificial sequence  Reverse Primer
  Primer
gtattgcatcataaagatgaaccc

SEQ ID NO: 14144 - DNA, 23 bp, Artificial sequence  Reverse Primer
  Primer
aagagcagcagagaaatgtaaaa

SEQ ID NO: 14145 - DNA, 28 bp, Artificial sequence  Reverse Primer
  Primer
ataatattttccagcatcatttagaatc

SEQ ID NO: 14146 - DNA, 24 bp, Artificial sequence  Reverse Primer
  Primer
attttattgagacatcctcaagct

SEQ ID NO: 14147 - DNA, 28 bp, Artificial sequence  Reverse Primer
  Primer
aattgtattagaattataaatggatggg

SEQ ID NO: 14148 - DNA, 22 bp, Artificial sequence  Reverse Primer
  Primer
agagaggcccttgatctattca

SEQ ID NO: 14149 - DNA, 27 bp, Artificial sequence  Reverse Primer
  Primer
ggtcagaaactattatcagatgaaaaa

SEQ ID NO: 14150 - DNA, 23 bp, Artificial sequence  Reverse Primer
  Primer
tgtgtatttcatcatttccctct

SEQ ID NO: 14151 - DNA, 27 bp, Artificial sequence  Reverse Primer
  Primer
attcaacattactcagagacagaagat

SEQ ID NO: 14152 - DNA, 21 bp, Artificial sequence  Reverse Primer
  Primer
ttgttcaccatagtcccatga

SEQ ID NO: 14153 - DNA, 25 bp, Artificial sequence  Reverse Primer
  Primer
ttatgttgtttgaaactcctaaacc

SEQ ID NO: 14154 - DNA, 23 bp, Artificial sequence  Reverse Primer
  Primer
aaagagaatatcggaggraaaat

SEQ ID NO: 14155 - DNA, 20 bp, Artificial sequence  Reverse Primer
  Primer
attctattccccmcaaagca

SEQ ID NO: 14156 - DNA, 18 bp, Artificial sequence  Reverse Primer
  Primer
agcggttccttcagagcc

SEQ ID NO: 14157 - DNA, 24 bp, Artificial sequence  Reverse Primer
  Primer
aaaaataattcaagagcagtggtt

SEQ ID NO: 14158 - DNA, 19 bp, Artificial sequence  Reverse Primer
  Primer
taacaccggccattatctg

SEQ ID NO: 14159 - DNA, 20 bp, Artificial sequence  Reverse Primer
  Primer
tgtcctttgaatccaagttg

SEQ ID NO: 14160 - DNA, 19 bp, Artificial sequence  Reverse Primer
  Primer
ttcaaagctgtggagcatg

SEQ ID NO: 14161 - DNA, 27 bp, Artificial sequence  Reverse Primer
  Primer
aacagattacaggaagctatgaataaa

SEQ ID NO: 14162 - DNA, 18 bp, Artificial sequence  Reverse Primer
  Primer
ttcctggacctcctccct

SEQ ID NO: 14163 - DNA, 20 bp, Artificial sequence  Reverse Primer
  Primer
tgagtttgacgcccttagtt

SEQ ID NO: 14164 - DNA, 26 bp, Artificial sequence  Reverse Primer
  Primer
ttctcatatgaacacttctctcatct

SEQ ID NO: 14165 - DNA, 24 bp, Artificial sequence  Reverse Primer
  Primer
aataattacaagtccacaggcatc

SEQ ID NO: 14166 - DNA, 18 bp, Artificial sequence  Reverse Primer
  Primer
agggaagtccacagaggc

SEQ ID NO: 14167 - DNA, 20 bp, Artificial sequence  Reverse Primer
  Primer
aggaagagcaacacagcttc

SEQ ID NO: 14168 - DNA, 24 bp, Artificial sequence  Reverse Primer
  Primer
aatctcagtcacgttgtatcttgg

SEQ ID NO: 14169 - DNA, 24 bp, Artificial sequence  Reverse Primer
  Primer
tagcctcttgatgaaaagaaactg

SEQ ID NO: 14170 - DNA, 24 bp, Artificial sequence  Reverse Primer
  Primer
atatatgcatgcctcttgtctttc

SEQ ID NO: 14171 - DNA, 22 bp, Artificial sequence  Reverse Primer
  Primer
atacctgaaatttagcctctgc

SEQ ID NO: 14172 - DNA, 24 bp, Artificial sequence  Reverse Primer
  Primer
tttctgagttgcattgtgatactg

SEQ ID NO: 14173 - DNA, 18 bp, Artificial sequence  Reverse Primer
  Primer
tccgaggggccttcagac

SEQ ID NO: 14174 - DNA, 28 bp, Artificial sequence  Reverse Primer
  Primer
ttgaacttaatattttcctagattcctt

SEQ ID NO: 14175 - DNA, 21 bp, Artificial sequence  Reverse Primer
  Primer
cttggggtattttcagaagct

SEQ ID NO: 14176 - DNA, 28 bp, Artificial sequence  Reverse Primer
  Primer
aataatgaccttccaagattatatagca

SEQ ID NO: 14177 - DNA, 21 bp, Artificial sequence  Reverse Primer
  Primer
ccctgaggtctctcatgaatt

SEQ ID NO: 14178 - DNA, 24 bp, Artificial sequence  Reverse Primer
  Primer
agagctagtttgggtaaaggtagc

SEQ ID NO: 14179 - DNA, 26 bp, Artificial sequence  Reverse Primer
  Primer
aatgtaaagatgttggtttacctacc

SEQ ID NO: 14180 - DNA, 24 bp, Artificial sequence  Reverse Primer
  Primer
tatattttcagttccaaaagggat

SEQ ID NO: 14181 - DNA, 20 bp, Artificial sequence  Reverse Primer
  Primer
gaggggagaggtaaggtgaa

SEQ ID NO: 14182 - DNA, 27 bp, Artificial sequence  Reverse Primer
  Primer
aaatttcaattcaagattatcacagac

SEQ ID NO: 14183 - DNA, 19 bp, Artificial sequence  Reverse Primer
  Primer
ctcctccttccccttctca

SEQ ID NO: 14184 - DNA, 23 bp, Artificial sequence  Reverse Primer
  Primer
ttccttcattatcagcttcaaaa

SEQ ID NO: 14185 - DNA, 26 bp, Artificial sequence  Reverse Primer
  Primer
tacaaattcaatccttagactgaaag

SEQ ID NO: 14186 - DNA, 29 bp, Artificial sequence  Reverse Primer
  Primer
taaatctcactttttctggttagtaaatc

SEQ ID NO: 14187 - DNA, 21 bp, Artificial sequence  Reverse Primer
  Primer
tgcrrtgaaggagctacaaga

SEQ ID NO: 14188 - DNA, 19 bp, Artificial sequence  Reverse Primer
  Primer
tcaccagctttccatcctc

SEQ ID NO: 14189 - DNA, 27 bp, Artificial sequence  Reverse Primer
  Primer
atgcatatatgttgtataagcattgaa

SEQ ID NO: 14190 - DNA, 24 bp, Artificial sequence  Reverse Primer
  Primer
agacctggagaaatatkttaaagg

SEQ ID NO: 14191 - DNA, 23 bp, Artificial sequence  Reverse Primer
  Primer
tatgttggaagtcacatttaccc

SEQ ID NO: 14192 - DNA, 18 bp, Artificial sequence  Reverse Primer
  Primer
acatcccccgcatgcaga

SEQ ID NO: 14193 - DNA, 23 bp, Artificial sequence  Reverse Primer
  Primer
atatgttatttttggatggtggg

SEQ ID NO: 14194 - DNA, 24 bp, Artificial sequence  Reverse Primer
  Primer
aaatattagacacagatttgccct

SEQ ID NO: 14195 - DNA, 20 bp, Artificial sequence  Reverse Primer
  Primer
aggagatggtgagtcctgag

SEQ ID NO: 14196 - DNA, 24 bp, Artificial sequence  Reverse Primer
  Primer
aaagagagaacgatctaaaacagg

SEQ ID NO: 14197 - DNA, 23 bp, Artificial sequence  Reverse Primer
  Primer
cagtgactrgatgacagaggatc

SEQ ID NO: 14198 - DNA, 22 bp, Artificial sequence  Reverse Primer
  Primer
tctttgttcctcacctcatttt

SEQ ID NO: 14199 - DNA, 18 bp, Artificial sequence  Reverse Primer
  Primer
aaacccatccttgtgggc

SEQ ID NO: 14200 - DNA, 21 bp, Artificial sequence  Reverse Primer
  Primer
aaagaagaacactggtgggag

SEQ ID NO: 14201 - DNA, 25 bp, Artificial sequence  Reverse Primer
  Primer
tatatctgaagagttggtgaggact

SEQ ID NO: 14202 - DNA, 18 bp, Artificial sequence  Reverse Primer
  Primer
tgggcacaaaaggagcta

SEQ ID NO: 14203 - DNA, 22 bp, Artificial sequence  Reverse Primer
  Primer
tcatctaagtgccttgatgagc

SEQ ID NO: 14204 - DNA, 20 bp, Artificial sequence  Reverse Primer
  Primer
taggggctgacaaagacttc

SEQ ID NO: 14205 - DNA, 18 bp, Artificial sequence  Reverse Primer
  Primer
atgatgaacagcagccac

SEQ ID NO: 14206 - DNA, 20 bp, Artificial sequence  Reverse Primer
  Primer
atggagaggcccatttagtg

SEQ ID NO: 14207 - DNA, 20 bp, Artificial sequence  Reverse Primer
  Primer
tggcactgctaatgttttgg

SEQ ID NO: 14208 - DNA, 24 bp, Artificial sequence  Reverse Primer
  Primer
tggttagctagaaaatgaaggaat

SEQ ID NO: 14209 - DNA, 26 bp, Artificial sequence  Reverse Primer
  Primer
aaccttatctcttcctctacttttca

SEQ ID NO: 14210 - DNA, 27 bp, Artificial sequence  Reverse Primer
  Primer
tttctatagctgctcaaataaatgtct

SEQ ID NO: 14211 - DNA, 25 bp, Artificial sequence  Reverse Primer
  Primer
aaaaggagctatccaagattactca

SEQ ID NO: 14212 - DNA, 18 bp, Artificial sequence  Reverse Primer
  Primer
actgttgctgccgcccgt

SEQ ID NO: 14213 - DNA, 21 bp, Artificial sequence  Reverse Primer
  Primer
gcaccaggcaggcatgttata

SEQ ID NO: 14214 - DNA, 18 bp, Artificial sequence  Reverse Primer
  Primer
ttcccagaacccgaggtg

SEQ ID NO: 14215 - DNA, 27 bp, Artificial sequence  Reverse Primer
  Primer
agtgaatgagtaagtcttttgtgagtc

SEQ ID NO: 14216 - DNA, 18 bp, Artificial sequence  Reverse Primer
  Primer
gtggagaagcctcccaaa

SEQ ID NO: 14217 - DNA, 22 bp, Artificial sequence  Reverse Primer
  Primer
tctagcaaacctttaagccaaa

SEQ ID NO: 14218 - DNA, 22 bp, Artificial sequence  Reverse Primer
  Primer
gcagttgtcttgttcactgtgt

SEQ ID NO: 14219 - DNA, 21 bp, Artificial sequence  Reverse Primer
  Primer
gtatccttctgttggtctccc

SEQ ID NO: 14220 - DNA, 25 bp, Artificial sequence  Reverse Primer
  Primer
tacagtttactcaggaagcttgaga

SEQ ID NO: 14221 - DNA, 21 bp, Artificial sequence  Reverse Primer
  Primer
ttcagtggtgaagactcttgc

SEQ ID NO: 14222 - DNA, 27 bp, Artificial sequence  Reverse Primer
  Primer
aaagagtcattagaattttgaaagtga

SEQ ID NO: 14223 - DNA, 23 bp, Artificial sequence  Reverse Primer
  Primer
aaattccaactttttctgttgtg

SEQ ID NO: 14224 - DNA, 26 bp, Artificial sequence  Reverse Primer
  Primer
ataattcctcaaggtaagttaagcac

SEQ ID NO: 14225 - DNA, 26 bp, Artificial sequence  Reverse Primer
  Primer
taatgaccttcaaaataggaaaaaac

SEQ ID NO: 14226 - DNA, 24 bp, Artificial sequence  Reverse Primer
  Primer
taaaagctaatgacaggatctttg

SEQ ID NO: 14227 - DNA, 24 bp, Artificial sequence  Reverse Primer
  Primer
aagagctctgtgacttcctgtaga

SEQ ID NO: 14228 - DNA, 24 bp, Artificial sequence  Reverse Primer
  Primer
aaaaataaaatgtgctttgaaagg

SEQ ID NO: 14229 - DNA, 26 bp, Artificial sequence  Reverse Primer
  Primer
aaattaacacagcattgtaaatcaac

SEQ ID NO: 14230 - DNA, 24 bp, Artificial sequence  Reverse Primer
  Primer
aatcatcctgaggattagctgtag

SEQ ID NO: 14231 - DNA, 26 bp, Artificial sequence  Reverse Primer
  Primer
tcgactgtacatttattagctcattt

SEQ ID NO: 14232 - DNA, 18 bp, Artificial sequence  Reverse Primer
  Primer
agggagactgcccttcca

SEQ ID NO: 14233 - DNA, 30 bp, Artificial sequence  Reverse Primer
  Primer
atctcagactataagtttataatttctccc

SEQ ID NO: 14234 - DNA, 24 bp, Artificial sequence  Reverse Primer
  Primer
ttctggaatttgtgaaatttaatc

SEQ ID NO: 14235 - DNA, 18 bp, Artificial sequence  Reverse Primer
  Primer
accaggcccgcttgtcac

SEQ ID NO: 14236 - DNA, 27 bp, Artificial sequence  Reverse Primer
  Primer
aaactccataaagttaggacttctctc

SEQ ID NO: 14237 - DNA, 22 bp, Artificial sequence  Reverse Primer
  Primer
agccttgtgcttagacatgatt

SEQ ID NO: 14238 - DNA, 18 bp, Artificial sequence  Reverse Primer
  Primer
gccctcaggcactgtcag

SEQ ID NO: 14239 - DNA, 22 bp, Artificial sequence  Reverse Primer
  Primer
agcacaaaagcacatagacaca

SEQ ID NO: 14240 - DNA, 23 bp, Artificial sequence  Reverse Primer
  Primer
atgatcttgttctggaaatctcc

SEQ ID NO: 14241 - DNA, 21 bp, Artificial sequence  Reverse Primer
  Primer
tgattacatccatgcyagagg

SEQ ID NO: 14242 - DNA, 27 bp, Artificial sequence  Reverse Primer
  Primer
acagtctcttgaattttaaaacacatc

SEQ ID NO: 14243 - DNA, 18 bp, Artificial sequence  Reverse Primer
  Primer
aaaattcttcaggccgcc

SEQ ID NO: 14244 - DNA, 23 bp, Artificial sequence  Reverse Primer
  Primer
tgttctgagtccttcagagtgtt

SEQ ID NO: 14245 - DNA, 22 bp, Artificial sequence  Reverse Primer
  Primer
tgtgttgaacaggatagacagc

SEQ ID NO: 14246 - DNA, 25 bp, Artificial sequence  Reverse Primer
  Primer
aaaattttctcttcagtctgctttc

SEQ ID NO: 14247 - DNA, 30 bp, Artificial sequence  Reverse Primer
  Primer
tgtactattttttgtaaytagtctgttgat

SEQ ID NO: 14248 - DNA, 28 bp, Artificial sequence  Reverse Primer
  Primer
tataagataaattaggcaaggacagtac

SEQ ID NO: 14249 - DNA, 23 bp, Artificial sequence  Reverse Primer
  Primer
atttaatcaaaccaggatctgtg

SEQ ID NO: 14250 - DNA, 20 bp, Artificial sequence  Reverse Primer
  Primer
actgtggaggagactgcaag

SEQ ID NO: 14251 - DNA, 26 bp, Artificial sequence  Reverse Primer
  Primer
ttaaaatatcaacaggaacacagaac

SEQ ID NO: 14252 - DNA, 20 bp, Artificial sequence  Reverse Primer
  Primer
accaaagaggggaatcaaag

SEQ ID NO: 14253 - DNA, 21 bp, Artificial sequence  Reverse Primer
  Primer
agccgagaggttttgtgtact

SEQ ID NO: 14254 - DNA, 21 bp, Artificial sequence  Reverse Primer
  Primer
tcttcatgacactggtgttgg

SEQ ID NO: 14255 - DNA, 27 bp, Artificial sequence  Reverse Primer
  Primer
tagagcacagggaactagatttaatat

SEQ ID NO: 14256 - DNA, 23 bp, Artificial sequence  Reverse Primer
  Primer
tttcattacttgcattggtactg

SEQ ID NO: 14257 - DNA, 23 bp, Artificial sequence  Reverse Primer
  Primer
agggcaggtaaaagaawtatcaa

SEQ ID NO: 14258 - DNA, 29 bp, Artificial sequence  Reverse Primer
  Primer
taagtataaccaagtgactaaatcctagc

SEQ ID NO: 14259 - DNA, 24 bp, Artificial sequence  Reverse Primer
  Primer
aattgctttgtcatttaaaaggtc

SEQ ID NO: 14260 - DNA, 28 bp, Artificial sequence  Reverse Primer
  Primer
tggacacttaytatgaaacaaattatct

SEQ ID NO: 14261 - DNA, 22 bp, Artificial sequence  Reverse Primer
  Primer
ttgccaacatagtaatttcacc

SEQ ID NO: 14262 - DNA, 30 bp, Artificial sequence  Reverse Primer
  Primer
ctaaacttcttatacttctccatgtattag

SEQ ID NO: 14263 - DNA, 24 bp, Artificial sequence  Reverse Primer
  Primer
ttccaaacacaatgagttatcaaa

SEQ ID NO: 14264 - DNA, 23 bp, Artificial sequence  Reverse Primer
  Primer
atgcatgttcaattctttgtttc

SEQ ID NO: 14265 - DNA, 30 bp, Artificial sequence  Reverse Primer
  Primer
gattctaagataatagacttatacgacaaa

SEQ ID NO: 14266 - DNA, 23 bp, Artificial sequence  Reverse Primer
  Primer
taatgttttactgctcttgaggg

SEQ ID NO: 14267 - DNA, 25 bp, Artificial sequence  Reverse Primer
  Primer
aaaagagggaattctttttataagc

SEQ ID NO: 14268 - DNA, 19 bp, Artificial sequence  Reverse Primer
  Primer
accaggtgtccaaccactc

SEQ ID NO: 14269 - DNA, 23 bp, Artificial sequence  Reverse Primer
  Primer
taggtttaggaagtgcattcaca

SEQ ID NO: 14270 - DNA, 26 bp, Artificial sequence  Reverse Primer
  Primer
atgatagtgatgatgtcataggactg

SEQ ID NO: 14271 - DNA, 20 bp, Artificial sequence  Reverse Primer
  Primer
atcactttcctcctcttggc

SEQ ID NO: 14272 - DNA, 22 bp, Artificial sequence  Reverse Primer
  Primer
tgatttacattcaacccactca

SEQ ID NO: 14273 - DNA, 22 bp, Artificial sequence  Reverse Primer
  Primer
gacaaggctgaaattggttaac

SEQ ID NO: 14274 - DNA, 21 bp, Artificial sequence  Reverse Primer
  Primer
ccctaggacttgcctagagac

SEQ ID NO: 14275 - DNA, 21 bp, Artificial sequence  Reverse Primer
  Primer
aactagagtctccctcctccc

SEQ ID NO: 14276 - DNA, 27 bp, Artificial sequence  Reverse Primer
  Primer
aatactttggacacagtagtaaggatt

SEQ ID NO: 14277 - DNA, 21 bp, Artificial sequence  Reverse Primer
  Primer
ttttataggccaatcactcgg

SEQ ID NO: 14278 - DNA, 18 bp, Artificial sequence  Reverse Primer
  Primer
ggaggagggatgacctgg

SEQ ID NO: 14279 - DNA, 27 bp, Artificial sequence  Reverse Primer
  Primer
tatcaaaatttatatgtgcacttcagt

SEQ ID NO: 14280 - DNA, 21 bp, Artificial sequence  Reverse Primer
  Primer
tatcttgtgcctggtagcatt

SEQ ID NO: 14281 - DNA, 22 bp, Artificial sequence  Reverse Primer
  Primer
tcataagtcaatccatccattc

SEQ ID NO: 14282 - DNA, 28 bp, Artificial sequence  Reverse Primer
  Primer
taaagcctgaatttaatactctatgacc

SEQ ID NO: 14283 - DNA, 18 bp, Artificial sequence  Reverse Primer
  Primer
tcattgggttccctgggc

SEQ ID NO: 14284 - DNA, 23 bp, Artificial sequence  Reverse Primer
  Primer
aaacagcaatgtacctggagtta

SEQ ID NO: 14285 - DNA, 24 bp, Artificial sequence  Reverse Primer
  Primer
tgtataaagatggatgaggcaata

SEQ ID NO: 14286 - DNA, 28 bp, Artificial sequence  Reverse Primer
  Primer
tttgtttatccttacttaatttcaagtc

SEQ ID NO: 14287 - DNA, 27 bp, Artificial sequence  Reverse Primer
  Primer
aaaacttatcagccctaaagctatatg

SEQ ID NO: 14288 - DNA, 24 bp, Artificial sequence  Reverse Primer
  Primer
ttatgagatagtgttgtttcctcc

SEQ ID NO: 14289 - DNA, 25 bp, Artificial sequence  Reverse Primer
  Primer
gcatgatggcttgtcttatacttat

SEQ ID NO: 14290 - DNA, 28 bp, Artificial sequence  Reverse Primer
  Primer
tattgtgtaacaagcatcattatagaag

SEQ ID NO: 14291 - DNA, 23 bp, Artificial sequence  Reverse Primer
  Primer
ttgttttttgttcaaaaggaagc

SEQ ID NO: 14292 - DNA, 18 bp, Artificial sequence  Reverse Primer
  Primer
catgggagactgcctcca

SEQ ID NO: 14293 - DNA, 20 bp, Artificial sequence  Reverse Primer
  Primer
acacagctataaagcaggcg

SEQ ID NO: 14294 - DNA, 22 bp, Artificial sequence  Reverse Primer
  Primer
ttaacaccactgaactgtacgc

SEQ ID NO: 14295 - DNA, 23 bp, Artificial sequence  Reverse Primer
  Primer
tggtcaccctttaacaagtctat

SEQ ID NO: 14296 - DNA, 18 bp, Artificial sequence  Reverse Primer
  Primer
acacgtgtccagggctcc

SEQ ID NO: 14297 - DNA, 24 bp, Artificial sequence  Reverse Primer
  Primer
acattcttaaatgaaactggcttt

SEQ ID NO: 14298 - DNA, 18 bp, Artificial sequence  Reverse Primer
  Primer
gcaggtcaggtggtgtgg

SEQ ID NO: 14299 - DNA, 20 bp, Artificial sequence  Reverse Primer
  Primer
aggccacagtacaaggaacc

SEQ ID NO: 14300 - DNA, 25 bp, Artificial sequence  Reverse Primer
  Primer
ttcaaactcagactagaacctatgc

SEQ ID NO: 14301 - DNA, 26 bp, Artificial sequence  Reverse Primer
  Primer
tagccaaggaaatattttaacattct

SEQ ID NO: 14302 - DNA, 28 bp, Artificial sequence  Reverse Primer
  Primer
taaattgtagacttaatctcaaaaaagg

SEQ ID NO: 14303 - DNA, 18 bp, Artificial sequence  Reverse Primer
  Primer
tttcctcatgctggcaga

SEQ ID NO: 14304 - DNA, 27 bp, Artificial sequence  Reverse Primer
  Primer
ttatcgactagcatgttatttctatgg

SEQ ID NO: 14305 - DNA, 18 bp, Artificial sequence  Reverse Primer
  Primer
accggcagggtgtaacga

SEQ ID NO: 14306 - DNA, 18 bp, Artificial sequence  Reverse Primer
  Primer
tccctgcaaaagcctcag

SEQ ID NO: 14307 - DNA, 30 bp, Artificial sequence  Reverse Primer
  Primer
ttaaatgactttattaacagacttcttaac

SEQ ID NO: 14308 - DNA, 18 bp, Artificial sequence  Reverse Primer
  Primer
aaggtcatcagcgccgac

SEQ ID NO: 14309 - DNA, 25 bp, Artificial sequence  Reverse Primer
  Primer
aatgtcactggaatatgtctttctg

SEQ ID NO: 14310 - DNA, 19 bp, Artificial sequence  Reverse Primer
  Primer
tgcccctcrtcttctcttc

SEQ ID NO: 14311 - DNA, 23 bp, Artificial sequence  Reverse Primer
  Primer
atggtgttaaacgaatactggaa

SEQ ID NO: 14312 - DNA, 28 bp, Artificial sequence  Reverse Primer
  Primer
aatttcttctaacagaaaagaagtcaac

SEQ ID NO: 14313 - DNA, 24 bp, Artificial sequence  Reverse Primer
  Primer
aaaacacaaataaatagcatgtgc

SEQ ID NO: 14314 - DNA, 27 bp, Artificial sequence  Reverse Primer
  Primer
aaaatgagctgatttatgtaaactgtt

SEQ ID NO: 14315 - DNA, 26 bp, Artificial sequence  Reverse Primer
  Primer
tttcagtgttgaaagtgatagatttt

SEQ ID NO: 14316 - DNA, 24 bp, Artificial sequence  Reverse Primer
  Primer
aaagaactgaaagatacaaatccg

SEQ ID NO: 14317 - DNA, 18 bp, Artificial sequence  Reverse Primer
  Primer
gccctcaggcactgtcag

SEQ ID NO: 14318 - DNA, 22 bp, Artificial sequence  Reverse Primer
  Primer
attcagcaacccaggatatatg

SEQ ID NO: 14319 - DNA, 21 bp, Artificial sequence  Reverse Primer
  Primer
ttgaggagccattctaccttc

SEQ ID NO: 14320 - DNA, 30 bp, Artificial sequence  Reverse Primer
  Primer
gaatacatgaggtcacaactaattttatat

SEQ ID NO: 14321 - DNA, 27 bp, Artificial sequence  Reverse Primer
  Primer
ataaattgccaccatataaaaattacc

SEQ ID NO: 14322 - DNA, 18 bp, Artificial sequence  Reverse Primer
  Primer
ttttccccctgtgttcct

SEQ ID NO: 14323 - DNA, 28 bp, Artificial sequence  Reverse Primer
  Primer
ataatttttgatgatatgactcttcttc

SEQ ID NO: 14324 - DNA, 22 bp, Artificial sequence  Reverse Primer
  Primer
aaaattaacaagggcaagcttt

SEQ ID NO: 14325 - DNA, 18 bp, Artificial sequence  Reverse Primer
  Primer
aatagggagccatggagg

SEQ ID NO: 14326 - DNA, 19 bp, Artificial sequence  Reverse Primer
  Primer
atagctgctttccaaggga

SEQ ID NO: 14327 - DNA, 26 bp, Artificial sequence  Reverse Primer
  Primer
attaagtctggattgacttcaactct

SEQ ID NO: 14328 - DNA, 25 bp, Artificial sequence  Reverse Primer
  Primer
aacatctatacttcatgagctcctc

SEQ ID NO: 14329 - DNA, 25 bp, Artificial sequence  Reverse Primer
  Primer
aacatctatacttcatgagctcctc

SEQ ID NO: 14330 - DNA, 25 bp, Artificial sequence  Reverse Primer
  Primer
gtattaaagaasgggttttctgatt

SEQ ID NO: 14331 - DNA, 21 bp, Artificial sequence  Reverse Primer
  Primer
ttcttcaaaggcagcatgtaa

SEQ ID NO: 14332 - DNA, 22 bp, Artificial sequence  Reverse Primer
  Primer
tcataagtcaatccatccattc

SEQ ID NO: 14333 - DNA, 28 bp, Artificial sequence  Reverse Primer
  Primer
taaagcctgaatttaatactctatgacc

SEQ ID NO: 14334 - DNA, 18 bp, Artificial sequence  Reverse Primer
  Primer
tcattgggttccctgggc

SEQ ID NO: 14335 - DNA, 19 bp, Artificial sequence  Reverse Primer
  Primer
tttagggcttggtcctgtg

SEQ ID NO: 14336 - DNA, 21 bp, Artificial sequence  Reverse Primer
  Primer
tactccacagaaaagaggcaa

SEQ ID NO: 14337 - DNA, 22 bp, Artificial sequence  Reverse Primer
  Primer
acaatcaccctcacatygtatc

SEQ ID NO: 14338 - DNA, 20 bp, Artificial sequence  Reverse Primer
  Primer
taatggcccttgatagcaaa

SEQ ID NO: 14339 - DNA, 23 bp, Artificial sequence  Reverse Primer
  Primer
taacatccagtcacaggaaattg

SEQ ID NO: 14340 - DNA, 18 bp, Artificial sequence  Reverse Primer
  Primer
agcagtccctctccacac

SEQ ID NO: 14341 - DNA, 28 bp, Artificial sequence  Reverse Primer
  Primer
actatgaatgttttaatttgaatactgg

SEQ ID NO: 14342 - DNA, 28 bp, Artificial sequence  Reverse Primer
  Primer
tataagataaattaggcaaggacagtac

SEQ ID NO: 14343 - DNA, 27 bp, Artificial sequence  Reverse Primer
  Primer
tttcttagagttactcgaaactgaatg

SEQ ID NO: 14344 - DNA, 26 bp, Artificial sequence  Reverse Primer
  Primer
atatatcagtgtcctggcatataacc

SEQ ID NO: 14345 - DNA, 23 bp, Artificial sequence  Reverse Primer
  Primer
acttgttttagggaggaaaaagg

SEQ ID NO: 14346 - DNA, 19 bp, Artificial sequence  Reverse Primer
  Primer
ctgaactctccctgcctct

SEQ ID NO: 14347 - DNA, 22 bp, Artificial sequence  Reverse Primer
  Primer
aaataccaagaaagcacactgg

SEQ ID NO: 14348 - DNA, 25 bp, Artificial sequence  Reverse Primer
  Primer
ttgtcaaggtacatgtctttatcag

SEQ ID NO: 14349 - DNA, 23 bp, Artificial sequence  Reverse Primer
  Primer
tatgatagaccttgattgccagt

SEQ ID NO: 14350 - DNA, 28 bp, Artificial sequence  Reverse Primer
  Primer
atggtaaagtaattatcctccaattaaa

SEQ ID NO: 14351 - DNA, 25 bp, Artificial sequence  Reverse Primer
  Primer
tctgaaggataaagataagaggctt

SEQ ID NO: 14352 - DNA, 30 bp, Artificial sequence  Reverse Primer
  Primer
taatagatatcttacaagcttctgattaag

SEQ ID NO: 14353 - DNA, 25 bp, Artificial sequence  Reverse Primer
  Primer
aatattacataatgctcctccactg

SEQ ID NO: 14354 - DNA, 21 bp, Artificial sequence  Reverse Primer
  Primer
ctgggaaatcccataacagag

SEQ ID NO: 14355 - DNA, 21 bp, Artificial sequence  Reverse Primer
  Primer
tttgtggaagagcttcagaga

SEQ ID NO: 14356 - DNA, 23 bp, Artificial sequence  Reverse Primer
  Primer
ccaactactaagcctgcactcta

SEQ ID NO: 14357 - DNA, 24 bp, Artificial sequence  Reverse Primer
  Primer
acaaaggtagttgctttcttctca

SEQ ID NO: 14358 - DNA, 24 bp, Artificial sequence  Reverse Primer
  Primer
taaactcactctgctgctattgtc

SEQ ID NO: 14359 - DNA, 22 bp, Artificial sequence  Reverse Primer
  Primer
tcatcttttgtttttcctccag

SEQ ID NO: 14360 - DNA, 23 bp, Artificial sequence  Reverse Primer
  Primer
aaacagcaatgtacctggagtta

SEQ ID NO: 14361 - DNA, 24 bp, Artificial sequence  Reverse Primer
  Primer
tgtataaagatggatgaggcaata

SEQ ID NO: 14362 - DNA, 28 bp, Artificial sequence  Reverse Primer
  Primer
tttgtttatccttacttaatttcaagtc

SEQ ID NO: 14363 - DNA, 27 bp, Artificial sequence  Reverse Primer
  Primer
aaaacttatcagccctaaagctatatg

SEQ ID NO: 14364 - DNA, 24 bp, Artificial sequence  Reverse Primer
  Primer
ttatgagatagtgttgtttcctcc

SEQ ID NO: 14365 - DNA, 25 bp, Artificial sequence  Reverse Primer
  Primer
gcatgatggcttgtcttatacttat

SEQ ID NO: 14366 - DNA, 28 bp, Artificial sequence  Reverse Primer
  Primer
tattgtgtaacaagcatcattatagaag

SEQ ID NO: 14367 - DNA, 23 bp, Artificial sequence  Reverse Primer
  Primer
ttgttttttgttcaaaaggaagc

SEQ ID NO: 14368 - DNA, 18 bp, Artificial sequence  Reverse Primer
  Primer
catgggagactgcctcca

SEQ ID NO: 14369 - DNA, 20 bp, Artificial sequence  Reverse Primer
  Primer
acacagctataaagcaggcg

SEQ ID NO: 14370 - DNA, 22 bp, Artificial sequence  Reverse Primer
  Primer
ttaacaccactgaactgtacgc

SEQ ID NO: 14371 - DNA, 23 bp, Artificial sequence  Reverse Primer
  Primer
tggtcaccctttaacaagtctat

SEQ ID NO: 14372 - DNA, 18 bp, Artificial sequence  Reverse Primer
  Primer
acacgtgtccagggctcc

SEQ ID NO: 14373 - DNA, 24 bp, Artificial sequence  Reverse Primer
  Primer
acattcttaaatgaaactggcttt

SEQ ID NO: 14374 - DNA, 26 bp, Artificial sequence  Reverse Primer
  Primer
tggcaaaactaatacatttgtaaagt

SEQ ID NO: 14375 - DNA, 30 bp, Artificial sequence  Reverse Primer
  Primer
tatatatgtgtcttaggcttaaaaaggtaa

SEQ ID NO: 14376 - DNA, 28 bp, Artificial sequence  Reverse Primer
  Primer
attatgtctattgtgaagtcatcaagac

SEQ ID NO: 14377 - DNA, 22 bp, Artificial sequence  Reverse Primer
  Primer
aaagtgaacgaatgaatcaagc

SEQ ID NO: 14378 - DNA, 19 bp, Artificial sequence  Reverse Primer
  Primer
tacctcaccatgaacctcg

SEQ ID NO: 14379 - DNA, 22 bp, Artificial sequence  Reverse Primer
  Primer
tgtatggactcagaaagaagca

SEQ ID NO: 14380 - DNA, 21 bp, Artificial sequence  Reverse Primer
  Primer
ttctcttcctcatgagctgtt

SEQ ID NO: 14381 - DNA, 26 bp, Artificial sequence  Reverse Primer
  Primer
ataatgttgcagaatttccttcttat

SEQ ID NO: 14382 - DNA, 23 bp, Artificial sequence  Reverse Primer
  Primer
tgtgatgctcgggtaagtataac

SEQ ID NO: 14383 - DNA, 30 bp, Artificial sequence  Reverse Primer
  Primer
ataaactgtaaaggatatctatttattccc

SEQ ID NO: 14384 - DNA, 22 bp, Artificial sequence  Reverse Primer
  Primer
tcttaagaatacaggttcccgg

SEQ ID NO: 14385 - DNA, 30 bp, Artificial sequence  Reverse Primer
  Primer
atctgaatactagtgagattttatatgtgt

SEQ ID NO: 14386 - DNA, 18 bp, Artificial sequence  Reverse Primer
  Primer
aaaggaaggagggcctac

SEQ ID NO: 14387 - DNA, 30 bp, Artificial sequence  Reverse Primer
  Primer
aaaggtatgctgagtagttaagactctatt

SEQ ID NO: 14388 - DNA, 29 bp, Artificial sequence  Reverse Primer
  Primer
atatctcaggaacttaactaaatgtaagg

SEQ ID NO: 14389 - DNA, 25 bp, Artificial sequence  Reverse Primer
  Primer
tcaatttcatgcacataatagatcc

SEQ ID NO: 14390 - DNA, 30 bp, Artificial sequence  Reverse Primer
  Primer
taaaacaagcttaatttgtattaggtagtc

SEQ ID NO: 14391 - DNA, 18 bp, Artificial sequence  Reverse Primer
  Primer
gaggacaagctgggacca

SEQ ID NO: 14392 - DNA, 18 bp, Artificial sequence  Reverse Primer
  Primer
agtcatgaaggcagcagc

SEQ ID NO: 14393 - DNA, 23 bp, Artificial sequence  Reverse Primer
  Primer
agaccctattgtaagtggaggat

SEQ ID NO: 14394 - DNA, 27 bp, Artificial sequence  Reverse Primer
  Primer
acagtctcttgaattttaaaacacatc

SEQ ID NO: 14395 - DNA, 25 bp, Artificial sequence  Reverse Primer
  Primer
tataaagggaaggtcaacataaaga

SEQ ID NO: 14396 - DNA, 18 bp, Artificial sequence  Reverse Primer
  Primer
atgccctgggaggcacca

SEQ ID NO: 14397 - DNA, 18 bp, Artificial sequence  Reverse Primer
  Primer
tgcccatcatgatctcct

SEQ ID NO: 14398 - DNA, 21 bp, Artificial sequence  Reverse Primer
  Primer
aattatctgccaaccagctct

SEQ ID NO: 14399 - DNA, 23 bp, Artificial sequence  Reverse Primer
  Primer
attcatctcttgtggtcatcagt

SEQ ID NO: 14400 - DNA, 25 bp, Artificial sequence  Reverse Primer
  Primer
aaatcagaagaaaaaataccttcct

SEQ ID NO: 14401 - DNA, 19 bp, Artificial sequence  Reverse Primer
  Primer
agaccaccgatcagaaagc

SEQ ID NO: 14402 - DNA, 22 bp, Artificial sequence  Reverse Primer
  Primer
tgggcttagattcacttctctg

SEQ ID NO: 14403 - DNA, 21 bp, Artificial sequence  Reverse Primer
  Primer
tgtagtggaaatgcaaagtcc

SEQ ID NO: 14404 - DNA, 24 bp, Artificial sequence  Reverse Primer
  Primer
ttaatctattcgcttccagttttg

SEQ ID NO: 14405 - DNA, 18 bp, Artificial sequence  Reverse Primer
  Primer
tcaggacaccccctcaat

SEQ ID NO: 14406 - DNA, 23 bp, Artificial sequence  Reverse Primer
  Primer
attttggattcaggtaggttagg

SEQ ID NO: 14407 - DNA, 18 bp, Artificial sequence  Reverse Primer
  Primer
aaaattcttcaggccgcc

SEQ ID NO: 14408 - DNA, 28 bp, Artificial sequence  Reverse Primer
  Primer
acacattttctgctttaggataaatatt

SEQ ID NO: 14409 - DNA, 18 bp, Artificial sequence  Reverse Primer
  Primer
aaggacgacaggcaggtt

SEQ ID NO: 14410 - DNA, 30 bp, Artificial sequence  Reverse Primer
  Primer
tataactaataagcaaacagttaacaagct

SEQ ID NO: 14411 - DNA, 29 bp, Artificial sequence  Reverse Primer
  Primer
atctggaaaagaatatgtacgtataactg

SEQ ID NO: 14412 - DNA, 21 bp, Artificial sequence  Reverse Primer
  Primer
ttttgtgttgctcatccgtat

SEQ ID NO: 14413 - DNA, 21 bp, Artificial sequence  Reverse Primer
  Primer
agtttggtcttgacttcccat

SEQ ID NO: 14414 - DNA, 22 bp, Artificial sequence  Reverse Primer
  Primer
agccttgtgcttagacatgatt

SEQ ID NO: 14415 - DNA, 29 bp, Artificial sequence  Reverse Primer
  Primer
ctctgaatactagagataacttcacgatc

SEQ ID NO: 14416 - DNA, 23 bp, Artificial sequence  Reverse Primer
  Primer
acaaagaggatggaatcacttct

SEQ ID NO: 14417 - DNA, 22 bp, Artificial sequence  Reverse Primer
  Primer
agcacaaaagcacatagacaca

SEQ ID NO: 14418 - DNA, 30 bp, Artificial sequence  Reverse Primer
  Primer
atatagttttggaaaccattactctatagg

SEQ ID NO: 14419 - DNA, 18 bp, Artificial sequence  Reverse Primer
  Primer
atccgggcatctcccagt

SEQ ID NO: 14420 - DNA, 29 bp, Artificial sequence  Reverse Primer
  Primer
ttttcctatatagatataaatgccagttc

SEQ ID NO: 14421 - DNA, 23 bp, Artificial sequence  Reverse Primer
  Primer
aaatacaaagctggagatgaaag

SEQ ID NO: 14422 - DNA, 19 bp, Artificial sequence  Reverse Primer
  Primer
cacttcctgtgacctgcac

SEQ ID NO: 14423 - DNA, 28 bp, Artificial sequence  Reverse Primer
  Primer
aagtatctccttttacttcttaaacacc

SEQ ID NO: 14424 - DNA, 18 bp, Artificial sequence  Reverse Primer
  Primer
aagacagcatggacggtc

SEQ ID NO: 14425 - DNA, 19 bp, Artificial sequence  Reverse Primer
  Primer
aagtctccagaccagtgcc

SEQ ID NO: 14426 - DNA, 20 bp, Artificial sequence  Reverse Primer
  Primer
agctgttcagtagccgtgaa

SEQ ID NO: 14427 - DNA, 24 bp, Artificial sequence  Reverse Primer
  Primer
tttaatgtactgacacatcaatgc

SEQ ID NO: 14428 - DNA, 27 bp, Artificial sequence  Reverse Primer
  Primer
agttttcaatgtaaaaaattacaaggc

SEQ ID NO: 14429 - DNA, 28 bp, Artificial sequence  Reverse Primer
  Primer
actaaaatatcataatctttttgactgc

SEQ ID NO: 14430 - DNA, 22 bp, Artificial sequence  Reverse Primer
  Primer
atttttatggatgagaacaccg

SEQ ID NO: 14431 - DNA, 23 bp, Artificial sequence  Reverse Primer
  Primer
tttgtttgagttcaaattccatt

SEQ ID NO: 14432 - DNA, 30 bp, Artificial sequence  Reverse Primer
  Primer
gttatattttgtatccaaatcagatgatag

SEQ ID NO: 14433 - DNA, 28 bp, Artificial sequence  Reverse Primer
  Primer
atttttaagtttcttacctaatttgagc

SEQ ID NO: 14434 - DNA, 22 bp, Artificial sequence  Reverse Primer
  Primer
tgtgttgaacaggatagacagc

SEQ ID NO: 14435 - DNA, 21 bp, Artificial sequence  Reverse Primer
  Primer
cagaacaagtgctccatacgt

SEQ ID NO: 14436 - DNA, 22 bp, Artificial sequence  Reverse Primer
  Primer
aaaaacgagataatgagcttcc

SEQ ID NO: 14437 - DNA, 27 bp, Artificial sequence  Reverse Primer
  Primer
atgaaatctacaaaaaattcctgtaag

SEQ ID NO: 14438 - DNA, 24 bp, Artificial sequence  Reverse Primer
  Primer
aaatctttgcaatttaggatcttc

SEQ ID NO: 14439 - DNA, 21 bp, Artificial sequence  Reverse Primer
  Primer
attacgattttacatcccgct

SEQ ID NO: 14440 - DNA, 25 bp, Artificial sequence  Reverse Primer
  Primer
actcttgggtgtatctcttaactgg

SEQ ID NO: 14441 - DNA, 27 bp, Artificial sequence  Reverse Primer
  Primer
tgttttatagaaagacaggaagaacat

SEQ ID NO: 14442 - DNA, 27 bp, Artificial sequence  Reverse Primer
  Primer
ttatattgagtcaagaaaatatgcaag

SEQ ID NO: 14443 - DNA, 19 bp, Artificial sequence  Reverse Primer
  Primer
tcatgtgaaggtgaacgtg

SEQ ID NO: 14444 - DNA, 18 bp, Artificial sequence  Reverse Primer
  Primer
aggatggggaaggagccc

SEQ ID NO: 14445 - DNA, 24 bp, Artificial sequence  Reverse Primer
  Primer
tgccttttgtctgtaaaaaaactt

SEQ ID NO: 14446 - DNA, 23 bp, Artificial sequence  Reverse Primer
  Primer
tgaataaattttcaggtacaggc

SEQ ID NO: 14447 - DNA, 28 bp, Artificial sequence  Reverse Primer
  Primer
tgacttttactctaaaataattcatgct

SEQ ID NO: 14448 - DNA, 24 bp, Artificial sequence  Reverse Primer
  Primer
aaatattttcatcatcttcccaca

SEQ ID NO: 14449 - DNA, 27 bp, Artificial sequence  Reverse Primer
  Primer
acttttgaagcagtarcagtttatttt

SEQ ID NO: 14450 - DNA, 20 bp, Artificial sequence  Reverse Primer
  Primer
ataaatgctcgctttccaga

SEQ ID NO: 14451 - DNA, 25 bp, Artificial sequence  Reverse Primer
  Primer
ataactgttcacttgattcctcttc

SEQ ID NO: 14452 - DNA, 23 bp, Artificial sequence  Reverse Primer
  Primer
ccctgacaacaataaactttcaa

SEQ ID NO: 14453 - DNA, 26 bp, Artificial sequence  Reverse Primer
  Primer
tataaaccrcttcataaagtttgtgt

SEQ ID NO: 14454 - DNA, 26 bp, Artificial sequence  Reverse Primer
  Primer
aattaaacttggtttcagacttaagg

SEQ ID NO: 14455 - DNA, 29 bp, Artificial sequence  Reverse Primer
  Primer
tttctactagataaacagtgtcatgctaa

SEQ ID NO: 14456 - DNA, 25 bp, Artificial sequence  Reverse Primer
  Primer
attcatttcttctctcacaagttca

SEQ ID NO: 14457 - DNA, 22 bp, Artificial sequence  Reverse Primer
  Primer
ctctcgctggtgatacatttct

SEQ ID NO: 14458 - DNA, 28 bp, Artificial sequence  Reverse Primer
  Primer
aaatccttttttattacragtgtaaagc

SEQ ID NO: 14459 - DNA, 22 bp, Artificial sequence  Reverse Primer
  Primer
ctgtacttctccccaaattgaa

SEQ ID NO: 14460 - DNA, 25 bp, Artificial sequence  Reverse Primer
  Primer
atttactggcagagaatcatcttag

SEQ ID NO: 14461 - DNA, 24 bp, Artificial sequence  Reverse Primer
  Primer
agaggtattttctcaccttgtctc

SEQ ID NO: 14462 - DNA, 26 bp, Artificial sequence  Reverse Primer
  Primer
taaagcatttttatttcatagcacag

SEQ ID NO: 14463 - DNA, 30 bp, Artificial sequence  Reverse Primer
  Primer
agttacctatatgaagaatgtttgtaccta

SEQ ID NO: 14464 - DNA, 27 bp, Artificial sequence  Reverse Primer
  Primer
atgggcatggttactacaatatataaa

SEQ ID NO: 14465 - DNA, 22 bp, Artificial sequence  Reverse Primer
  Primer
ctggctccattctaagctttag

SEQ ID NO: 14466 - DNA, 19 bp, Artificial sequence  Reverse Primer
  Primer
atgctgatttccaaaggga

SEQ ID NO: 14467 - DNA, 21 bp, Artificial sequence  Reverse Primer
  Primer
acctccacacttatccttcct

SEQ ID NO: 14468 - DNA, 19 bp, Artificial sequence  Reverse Primer
  Primer
aattttccactgggtgtgg

SEQ ID NO: 14469 - DNA, 26 bp, Artificial sequence  Reverse Primer
  Primer
atttgttaaggacaaaaaatctcaac

SEQ ID NO: 14470 - DNA, 22 bp, Artificial sequence  Reverse Primer
  Primer
ttctaccctgtaaktaaggccc

SEQ ID NO: 14471 - DNA, 22 bp, Artificial sequence  Reverse Primer
  Primer
aggttgtacatgagtcacagca

SEQ ID NO: 14472 - DNA, 27 bp, Artificial sequence  Reverse Primer
  Primer
gcttgaattaaaacttacacctaactg

SEQ ID NO: 14473 - DNA, 20 bp, Artificial sequence  Reverse Primer
  Primer
gtgctgggagacagtttttc

SEQ ID NO: 14474 - DNA, 19 bp, Artificial sequence  Reverse Primer
  Primer
tgctaatcccaaattccca

SEQ ID NO: 14475 - DNA, 30 bp, Artificial sequence  Reverse Primer
  Primer
atattattgtacatagttcaaactggtgtc

SEQ ID NO: 14476 - DNA, 29 bp, Artificial sequence  Reverse Primer
  Primer
taaataagctagttcatgtaaagtccttc

SEQ ID NO: 14477 - DNA, 21 bp, Artificial sequence  Reverse Primer
  Primer
aaagrcttgtgtgccactaga

SEQ ID NO: 14478 - DNA, 18 bp, Artificial sequence  Reverse Primer
  Primer
tcctttctcgttcgtcga

SEQ ID NO: 14479 - DNA, 25 bp, Artificial sequence  Reverse Primer
  Primer
tatttttccagtcatctttgaagac

SEQ ID NO: 14480 - DNA, 23 bp, Artificial sequence  Reverse Primer
  Primer
aaatcagaggtgaagtcaggact

SEQ ID NO: 14481 - DNA, 19 bp, Artificial sequence  Reverse Primer
  Primer
ttacacagtggctggcttc

SEQ ID NO: 14482 - DNA, 24 bp, Artificial sequence  Reverse Primer
  Primer
aaggtgattgaactcaaattcatt

SEQ ID NO: 14483 - DNA, 22 bp, Artificial sequence  Reverse Primer
  Primer
ccagctttgtcactgaagaatt

SEQ ID NO: 14484 - DNA, 26 bp, Artificial sequence  Reverse Primer
  Primer
acagagagcaccttatttagtgaatt

SEQ ID NO: 14485 - DNA, 28 bp, Artificial sequence  Reverse Primer
  Primer
gatcttaggaaaagaaatctgaaaatag

SEQ ID NO: 14486 - DNA, 26 bp, Artificial sequence  Reverse Primer
  Primer
tctgaacaattatagtcagatttcct

SEQ ID NO: 14487 - DNA, 18 bp, Artificial sequence  Reverse Primer
  Primer
tggtggagccctgtgtgg

SEQ ID NO: 14488 - DNA, 25 bp, Artificial sequence  Reverse Primer
  Primer
tattgctctacttgaaatgtgtttg

SEQ ID NO: 14489 - DNA, 19 bp, Artificial sequence  Reverse Primer
  Primer
acaccccagccacgagcat

SEQ ID NO: 14490 - DNA, 19 bp, Artificial sequence  Reverse Primer
  Primer
acacccctcaccaccttag

SEQ ID NO: 14491 - DNA, 22 bp, Artificial sequence  Reverse Primer
  Primer
acacaccttgtagttttcaggc

SEQ ID NO: 14492 - DNA, 30 bp, Artificial sequence  Reverse Primer
  Primer
cttacaactaaattagatagaaattcagtc

SEQ ID NO: 14493 - DNA, 26 bp, Artificial sequence  Reverse Primer
  Primer
aaaggaagaaattyraaaaacagatg

SEQ ID NO: 14494 - DNA, 23 bp, Artificial sequence  Reverse Primer
  Primer
tgatagcctgttatgctgatttt

SEQ ID NO: 14495 - DNA, 27 bp, Artificial sequence  Reverse Primer
  Primer
tgactaatacagaaagagaggaaacat

SEQ ID NO: 14496 - DNA, 23 bp, Artificial sequence  Reverse Primer
  Primer
tttacatattttgacagtgtgcc

SEQ ID NO: 14497 - DNA, 21 bp, Artificial sequence  Reverse Primer
  Primer
tcaattcctctacatcaggca

SEQ ID NO: 14498 - DNA, 18 bp, Artificial sequence  Reverse Primer
  Primer
agaagcctgcctcctgcc

SEQ ID NO: 14499 - DNA, 22 bp, Artificial sequence  Reverse Primer
  Primer
attgggtttgagacttgagtga

SEQ ID NO: 14500 - DNA, 24 bp, Artificial sequence  Reverse Primer
  Primer
tgctctagagmgaagttttgtagc

SEQ ID NO: 14501 - DNA, 18 bp, Artificial sequence  Reverse Primer
  Primer
cactgtccacacccctca

SEQ ID NO: 14502 - DNA, 25 bp, Artificial sequence  Reverse Primer
  Primer
agaaagaaaaatgaaactggaattg

SEQ ID NO: 14503 - DNA, 27 bp, Artificial sequence  Reverse Primer
  Primer
tattttcagattatctgttacgtttca

SEQ ID NO: 14504 - DNA, 19 bp, Artificial sequence  Reverse Primer
  Primer
acagaggytcagcttggag

SEQ ID NO: 14505 - DNA, 23 bp, Artificial sequence  Reverse Primer
  Primer
aatatgtcttctaattcatgccc

SEQ ID NO: 14506 - DNA, 23 bp, Artificial sequence  Reverse Primer
  Primer
tgttctgagtccttcagagtgtt

SEQ ID NO: 14507 - DNA, 20 bp, Artificial sequence  Reverse Primer
  Primer
gcctgaaggtcagaggtctc

SEQ ID NO: 14508 - DNA, 25 bp, Artificial sequence  Reverse Primer
  Primer
aaaaacagggtatacacaccaataa

SEQ ID NO: 14509 - DNA, 18 bp, Artificial sequence  Reverse Primer
  Primer
tgaaaatggcccccttct

SEQ ID NO: 14510 - DNA, 25 bp, Artificial sequence  Reverse Primer
  Primer
tatatctgtcatccctaaacctgaa

SEQ ID NO: 14511 - DNA, 24 bp, Artificial sequence  Reverse Primer
  Primer
tgatgtgaatattgtgatgattga

SEQ ID NO: 14512 - DNA, 23 bp, Artificial sequence  Reverse Primer
  Primer
aaagaactgatgtcagaaactgg

SEQ ID NO: 14513 - DNA, 24 bp, Artificial sequence  Reverse Primer
  Primer
aaatgttgtcacagtagtacccaa

SEQ ID NO: 14514 - DNA, 25 bp, Artificial sequence  Reverse Primer
  Primer
gggaaattatacaatcatgtttgag

SEQ ID NO: 14515 - DNA, 27 bp, Artificial sequence  Reverse Primer
  Primer
attatcagtcccatattacaaatgaag

SEQ ID NO: 14516 - DNA, 25 bp, Artificial sequence  Reverse Primer
  Primer
aaagagatttagacaaaagcacagc

SEQ ID NO: 14517 - DNA, 30 bp, Artificial sequence  Reverse Primer
  Primer
ttttcctaatagtcatatctacatgaaaac

SEQ ID NO: 14518 - DNA, 22 bp, Artificial sequence  Reverse Primer
  Primer
tatttcccctgatgacaagtgt

SEQ ID NO: 14519 - DNA, 26 bp, Artificial sequence  Reverse Primer
  Primer
aatcaagtaaactctctcatttcacc

SEQ ID NO: 14520 - DNA, 21 bp, Artificial sequence  Reverse Primer
  Primer
tttccagagcctgaggttact

SEQ ID NO: 14521 - DNA, 24 bp, Artificial sequence  Reverse Primer
  Primer
taatcacttcgattctttcagtgt

SEQ ID NO: 14522 - DNA, 27 bp, Artificial sequence  Reverse Primer
  Primer
tttgcttttaaatgaggtaagacttag

SEQ ID NO: 14523 - DNA, 28 bp, Artificial sequence  Reverse Primer
  Primer
tactttttctacatacaaacatgatgag

SEQ ID NO: 14524 - DNA, 27 bp, Artificial sequence  Reverse Primer
  Primer
ctctttccagacattcctttaattata

SEQ ID NO: 14525 - DNA, 25 bp, Artificial sequence  Reverse Primer
  Primer
atagctttgttgaccttagcactaa

SEQ ID NO: 14526 - DNA, 27 bp, Artificial sequence  Reverse Primer
  Primer
aattatttaagtaacctgagacagacc

SEQ ID NO: 14527 - DNA, 22 bp, Artificial sequence  Reverse Primer
  Primer
tttaagcatggtaggtgtctgc

SEQ ID NO: 14528 - DNA, 24 bp, Artificial sequence  Reverse Primer
  Primer
accactcatctcaatttcattttt

SEQ ID NO: 14529 - DNA, 22 bp, Artificial sequence  Reverse Primer
  Primer
aatggcatctcagagaaaaatt

SEQ ID NO: 14530 - DNA, 24 bp, Artificial sequence  Reverse Primer
  Primer
acctacaggtggtcagatattttg

SEQ ID NO: 14531 - DNA, 23 bp, Artificial sequence  Reverse Primer
  Primer
aaggtatcactctcatatgcctc

SEQ ID NO: 14532 - DNA, 19 bp, Artificial sequence  Reverse Primer
  Primer
aggaaacgcattcagcttg

SEQ ID NO: 14533 - DNA, 25 bp, Artificial sequence  Reverse Primer
  Primer
ttggtaagaagtagaaatggatgat

SEQ ID NO: 14534 - DNA, 25 bp, Artificial sequence  Reverse Primer
  Primer
tggctatttaaatattacacaatcc

SEQ ID NO: 14535 - DNA, 26 bp, Artificial sequence  Reverse Primer
  Primer
taatgaagatttgatagaggaaacag

SEQ ID NO: 14536 - DNA, 28 bp, Artificial sequence  Reverse Primer
  Primer
ttattgaatttttcaagtacttattggg

SEQ ID NO: 14537 - DNA, 22 bp, Artificial sequence  Reverse Primer
  Primer
ggagctactgataccaaggaga

SEQ ID NO: 14538 - DNA, 20 bp, Artificial sequence  Reverse Primer
  Primer
tgaagtaggctgtgagaggc

SEQ ID NO: 14539 - DNA, 20 bp, Artificial sequence  Reverse Primer
  Primer
aaaaaacatccttcctgcaa

SEQ ID NO: 14540 - DNA, 22 bp, Artificial sequence  Reverse Primer
  Primer
aaaaagagccaaagtgagtcat

SEQ ID NO: 14541 - DNA, 27 bp, Artificial sequence  Reverse Primer
  Primer
ctttctggccaatattaagtacaatat

SEQ ID NO: 14542 - DNA, 22 bp, Artificial sequence  Reverse Primer
  Primer
acaatgaagaaccaccatgatt

SEQ ID NO: 14543 - DNA, 28 bp, Artificial sequence  Reverse Primer
  Primer
taaaagtagggttacaatttaacagtga

SEQ ID NO: 14544 - DNA, 25 bp, Artificial sequence  Reverse Primer
  Primer
atttgttaagtatacaccatggagc

SEQ ID NO: 14545 - DNA, 28 bp, Artificial sequence  Reverse Primer
  Primer
aacaataatgtggttacaaagaaataca

SEQ ID NO: 14546 - DNA, 28 bp, Artificial sequence  Reverse Primer
  Primer
tagtttcatttaaatcattttctcactg

SEQ ID NO: 14547 - DNA, 28 bp, Artificial sequence  Reverse Primer
  Primer
actagctatctgtttacacatgtagtgc

SEQ ID NO: 14548 - DNA, 27 bp, Artificial sequence  Reverse Primer
  Primer
aaaaatctgtgaagtgtatgagtgtac

SEQ ID NO: 14549 - DNA, 24 bp, Artificial sequence  Reverse Primer
  Primer
aaattaaagatacttgcattggga

SEQ ID NO: 14550 - DNA, 21 bp, Artificial sequence  Reverse Primer
  Primer
ggaaggggaaaatcaattaag

SEQ ID NO: 14551 - DNA, 26 bp, Artificial sequence  Reverse Primer
  Primer
ttttgcaactgaattataaccatact

SEQ ID NO: 14552 - DNA, 30 bp, Artificial sequence  Reverse Primer
  Primer
tataatatatgcatagcactgattcctatt

SEQ ID NO: 14553 - DNA, 26 bp, Artificial sequence  Reverse Primer
  Primer
agtatcacaaaagattattgctagcc

SEQ ID NO: 14554 - DNA, 21 bp, Artificial sequence  Reverse Primer
  Primer
atgaatgaatgtctgtctccc

SEQ ID NO: 14555 - DNA, 24 bp, Artificial sequence  Reverse Primer
  Primer
agttcaatgtgactgcaaaattaa

SEQ ID NO: 14556 - DNA, 26 bp, Artificial sequence  Reverse Primer
  Primer
tatgtcagaaatgtgagacagttttt

SEQ ID NO: 14557 - DNA, 21 bp, Artificial sequence  Reverse Primer
  Primer
aaatatgtcaaatggacccac

SEQ ID NO: 14558 - DNA, 21 bp, Artificial sequence  Reverse Primer
  Primer
ttcgtgtcttgtcgacatctt

SEQ ID NO: 14559 - DNA, 30 bp, Artificial sequence  Reverse Primer
  Primer
ttacatctaagaatatgtaaggagtcattt

SEQ ID NO: 14560 - DNA, 26 bp, Artificial sequence  Reverse Primer
  Primer
aaactaaaaccccaacctaataattc

SEQ ID NO: 14561 - DNA, 25 bp, Artificial sequence  Reverse Primer
  Primer
aaaagtcactagacagatggatgat

SEQ ID NO: 14562 - DNA, 23 bp, Artificial sequence  Reverse Primer
  Primer
atatgctttcaaatcaatcttgg

SEQ ID NO: 14563 - DNA, 27 bp, Artificial sequence  Reverse Primer
  Primer
tagaaagtactcccactctatagcact

SEQ ID NO: 14564 - DNA, 22 bp, Artificial sequence  Reverse Primer
  Primer
aaatcaactcttggaagaagcg

SEQ ID NO: 14565 - DNA, 30 bp, Artificial sequence  Reverse Primer
  Primer
aaaagactcagctaatttatactctaaaag

SEQ ID NO: 14566 - DNA, 27 bp, Artificial sequence  Reverse Primer
  Primer
atttattaatatactgagccaccagtc

SEQ ID NO: 14567 - DNA, 25 bp, Artificial sequence  Reverse Primer
  Primer
ttagaacactttttcatccctaacg

SEQ ID NO: 14568 - DNA, 30 bp, Artificial sequence  Reverse Primer
  Primer
aatatggtgaggaaattaatataagagttg

SEQ ID NO: 14569 - DNA, 21 bp, Artificial sequence  Reverse Primer
  Primer
tgattacatccatgcyagagg

SEQ ID NO: 14570 - DNA, 28 bp, Artificial sequence  Reverse Primer
  Primer
aacttcttttctgatttcttgwctagat

SEQ ID NO: 14571 - DNA, 27 bp, Artificial sequence  Reverse Primer
  Primer
aaaatgataatgatgtgataggaaatc

SEQ ID NO: 14572 - DNA, 24 bp, Artificial sequence  Reverse Primer
  Primer
acatcagtaaaaaccaaaaacagc

SEQ ID NO: 14573 - DNA, 28 bp, Artificial sequence  Reverse Primer
  Primer
tatatatacttgccaaaaaatatggcta

SEQ ID NO: 14574 - DNA, 26 bp, Artificial sequence  Reverse Primer
  Primer
aaaaaaatcttatctaccctgtgaag

SEQ ID NO: 14575 - DNA, 23 bp, Artificial sequence  Reverse Primer
  Primer
tgttatcattcagaactgcctct

SEQ ID NO: 14576 - DNA, 24 bp, Artificial sequence  Reverse Primer
  Primer
aaatggagaaaatgaaaggtatga

SEQ ID NO: 14577 - DNA, 21 bp, Artificial sequence  Reverse Primer
  Primer
ttttctgcagttcacacttcc

SEQ ID NO: 14578 - DNA, 27 bp, Artificial sequence  Reverse Primer
  Primer
aattgtttatatggaacaaagtcctta

SEQ ID NO: 14579 - DNA, 21 bp, Artificial sequence  Reverse Primer
  Primer
ttgcctagttaatgccaaaac

SEQ ID NO: 14580 - DNA, 23 bp, Artificial sequence  Reverse Primer
  Primer
ttatttactccttgtcattccca

SEQ ID NO: 14581 - DNA, 22 bp, Artificial sequence  Reverse Primer
  Primer
taggtcattttacttctgggcc

SEQ ID NO: 14582 - DNA, 24 bp, Artificial sequence  Reverse Primer
  Primer
aaaataatagacccactcaaggag

SEQ ID NO: 14583 - DNA, 26 bp, Artificial sequence  Reverse Primer
  Primer
ttaaaatatcaacaggaacacagaac

SEQ ID NO: 14584 - DNA, 23 bp, Artificial sequence  Reverse Primer
  Primer
tctgctgacagtaacaacagcta

SEQ ID NO: 14585 - DNA, 24 bp, Artificial sequence  Reverse Primer
  Primer
agaatatcagagagtgatcccact

SEQ ID NO: 14586 - DNA, 22 bp, Artificial sequence  Reverse Primer
  Primer
tgaggagcagacattattcaaa

SEQ ID NO: 14587 - DNA, 25 bp, Artificial sequence  Reverse Primer
  Primer
tttttatcccactatacgtcttgtt

SEQ ID NO: 14588 - DNA, 18 bp, Artificial sequence  Reverse Primer
  Primer
actcagaggcgagcactc

SEQ ID NO: 14589 - DNA, 19 bp, Artificial sequence  Reverse Primer
  Primer
attttcagaagcagggagg

SEQ ID NO: 14590 - DNA, 26 bp, Artificial sequence  Reverse Primer
  Primer
gagtttcaaattaatgaattatgggt

SEQ ID NO: 14591 - DNA, 23 bp, Artificial sequence  Reverse Primer
  Primer
atgatcttgttctggaaatctcc

SEQ ID NO: 14592 - DNA, 18 bp, Artificial sequence  Reverse Primer
  Primer
ttggtggctcagtcggtt

SEQ ID NO: 14593 - DNA, 30 bp, Artificial sequence  Reverse Primer
  Primer
taaaaactagtaggagtaactctayaatat

SEQ ID NO: 14594 - DNA, 20 bp, Artificial sequence  Reverse Primer
  Primer
tcttggaaacatcaagcagg

SEQ ID NO: 14595 - DNA, 30 bp, Artificial sequence  Reverse Primer; identical to SEQ ID NO: 14247
  Primer

SEQ ID NO: 14596 - DNA, 20 bp, Artificial sequence  Reverse Primer
  Primer
actgtggaggagactgcaag

SEQ ID NO: 14597 - DNA, 30 bp, Artificial sequence  Reverse Primer
  Primer
ggatattatagttaaagaaaaggaactctt

SEQ ID NO: 14598 - DNA, 22 bp, Artificial sequence  Reverse Primer
  Primer
ttcatccttagagttccctttg

SEQ ID NO: 14599 - DNA, 23 bp, Artificial sequence  Reverse Primer
  Primer
ttcaatctctctcctttattgca

SEQ ID NO: 14600 - DNA, 18 bp, Artificial sequence  Reverse Primer
  Primer
agcccccacctagtttgc

SEQ ID NO: 14601 - DNA, 28 bp, Artificial sequence  Reverse Primer
  Primer
aatgaatcaaagtattaaatctgtttcc

SEQ ID NO: 14602 - DNA, 18 bp, Artificial sequence  Reverse Primer
  Primer
atcctttccccacacctg

SEQ ID NO: 14603 - DNA, 27 bp, Artificial sequence  Reverse Primer
  Primer
tatgctgcatctgtattttacataaat

SEQ ID NO: 14604 - DNA, 20 bp, Artificial sequence  Reverse Primer
  Primer
ttatgggttatggcaaaagg

SEQ ID NO: 14605 - DNA, 24 bp, Artificial sequence  Forward Primer
  Primer
attcccaagaaagacaatttaatg

SEQ ID NO: 14606 - DNA, 20 bp, Artificial sequence  Forward Primer
  Primer
atggagaaactgaggcagag

SEQ ID NO: 14607 - DNA, 21 bp, Artificial sequence  Forward Primer
  Primer
gctttctaggctttaaaaatt

SEQ ID NO: 14608 - DNA, 19 bp, Artificial sequence  Forward Primer
  Primer
ccagaaaaggcagtctcta

SEQ ID NO: 14609 - DNA, 26 bp, Artificial sequence  Forward Primer
  Primer
catgtaattttcccatttagactttt

SEQ ID NO: 14610 - DNA, 24 bp, Artificial sequence  Forward Primer
  Primer
aaaatcaaaggtaattttttccct

SEQ ID NO: 14611 - DNA, 21 bp, Artificial sequence  Forward Primer
  Primer
tttgtgcagagatggatcaat

SEQ ID NO: 14612 - DNA, 20 bp, Artificial sequence  Forward Primer
  Primer
attcaggactgtcctcaccc

SEQ ID NO: 14613 - DNA, 21 bp, Artificial sequence  Forward Primer
  Primer
aaatagaaacctaggtggggc

SEQ ID NO: 14614 - DNA, 19 bp, Artificial sequence  Forward Primer
  Primer
ggcttagggtgccatttat

SEQ ID NO: 14615 - DNA, 22 bp, Artificial sequence  Forward Primer
  Primer
attgagagaatcacccctacaa

SEQ ID NO: 14616 - DNA, 22 bp, Artificial sequence  Forward Primer
  Primer
attcgttaggtgagactaatgg

SEQ ID NO: 14617 - DNA, 19 bp, Artificial sequence  Forward Primer
  Primer
aggttctggggtgtgatgt

SEQ ID NO: 14618 - DNA, 20 bp, Artificial sequence  Forward Primer
  Primer
ctagtgaatgctcagcttct

SEQ ID NO: 14619 - DNA, 20 bp, Artificial sequence  Forward Primer
  Primer
gcaatttgggattacaaagt

SEQ ID NO: 14620 - DNA, 21 bp, Artificial sequence  Forward Primer
  Primer
gctcctccagtttctagctat

SEQ ID NO: 14621 - DNA, 20 bp, Artificial sequence  Forward Primer
  Primer
agtcataagggctttaggag

SEQ ID NO: 14622 - DNA, 18 bp, Artificial sequence  Forward Primer
  Primer
cacagagrcagtgcccag

SEQ ID NO: 14623 - DNA, 20 bp, Artificial sequence  Forward Primer
  Primer
aattacagaatcctcgggct

SEQ ID NO: 14624 - DNA, 24 bp, Artificial sequence  Forward Primer
  Primer
aaagactgttggagagaaggacta

SEQ ID NO: 14625 - DNA, 26 bp, Artificial sequence  Forward Primer
  Primer
ataagtcggacatcttctactctttg

SEQ ID NO: 14626 - DNA, 18 bp, Artificial sequence  Forward Primer
  Primer
attgagaaacggcctggc

SEQ ID NO: 14627 - DNA, 18 bp, Artificial sequence  Forward Primer
  Primer
acgggaagccttttagcc

SEQ ID NO: 14628 - DNA, 24 bp, Artificial sequence  Forward Primer
  Primer
gtattttctctttacatttcacaa

SEQ ID NO: 14629 - DNA, 26 bp, Artificial sequence  Forward Primer
  Primer
ataaaactgaaaaattgagaagtcca

SEQ ID NO: 14630 - DNA, 29 bp, Artificial sequence  Forward Primer
  Primer
tttacctaattcctgtaaatacttttgac

SEQ ID NO: 14631 - DNA, 22 bp, Artificial sequence  Forward Primer
  Primer
ttatttcttccctctggggtat

SEQ ID NO: 14632 - DNA, 23 bp, Artificial sequence  Forward Primer
  Primer
atcttctttcctgtccttcttga

SEQ ID NO: 14633 - DNA, 30 bp, Artificial sequence  Forward Primer
  Primer
attttcattagctataagtcagaatactgg

SEQ ID NO: 14634 - DNA, 25 bp, Artificial sequence  Forward Primer
  Primer
aaaagcaaggtaacttcaatttttc

SEQ ID NO: 14635 - DNA, 23 bp, Artificial sequence  Forward Primer
  Primer
ttgcaagggatgaaatctactaa

SEQ ID NO: 14636 - DNA, 21 bp, Artificial sequence  Forward Primer
  Primer
tttgtttgttgaatgagggaa

SEQ ID NO: 14637 - DNA, 23 bp, Artificial sequence  Forward Primer
  Primer
ataatagcaacagagcagacagc

SEQ ID NO: 14638 - DNA, 19 bp, Artificial sequence  Forward Primer
  Primer
tttcaaagtccccaaagga

SEQ ID NO: 14639 - DNA, 24 bp, Artificial sequence  Forward Primer
  Primer
aaattaggcataacagctaccttg

SEQ ID NO: 14640 - DNA, 18 bp, Artificial sequence  Forward Primer
  Primer
ggttgtggaatcttccgg

SEQ ID NO: 14641 - DNA, 21 bp, Artificial sequence  Forward Primer
  Primer
tttaaatgcaaattccatcca

SEQ ID NO: 14642 - DNA, 21 bp, Artificial sequence  Forward Primer
  Primer
actctcctttgccatttctca

SEQ ID NO: 14643 - DNA, 22 bp, Artificial sequence  Forward Primer
  Primer
aaaacatgatccagacaggtgt

SEQ ID NO: 14644 - DNA, 18 bp, Artificial sequence  Forward Primer
  Primer
tgggctctttccagcatc

SEQ ID NO: 14645 - DNA, 20 bp, Artificial sequence  Forward Primer
  Primer
gggaggagttttcacataga

SEQ ID NO: 14646 - DNA, 18 bp, Artificial sequence  Forward Primer
  Primer
agcagcgacttccccata

SEQ ID NO: 14647 - DNA, 28 bp, Artificial sequence  Forward Primer
  Primer
aatttttacaaaagtgtcaattactcac

SEQ ID NO: 14648 - DNA, 27 bp, Artificial sequence  Forward Primer
  Primer
agaaaattccctaaaactgactttaaa

SEQ ID NO: 14649 - DNA, 19 bp, Artificial sequence  Forward Primer
  Primer
gtggtgttcctttgtggaa

SEQ ID NO: 14650 - DNA, 25 bp, Artificial sequence  Forward Primer
  Primer
ttaaaattattccagcctaactgag

SEQ ID NO: 14651 - DNA, 22 bp, Artificial sequence  Forward Primer
  Primer
ttcattttaccaagaggaaaca

SEQ ID NO: 14652 - DNA, 26 bp, Artificial sequence  Forward Primer
  Primer
aatatacatttgtgcaactcaaaatg

SEQ ID NO: 14653 - DNA, 21 bp, Artificial sequence  Forward Primer
  Primer
aggatttgtgtcaaactccag

SEQ ID NO: 14654 - DNA, 22 bp, Artificial sequence  Forward Primer
  Primer
ttttcatagctgtccacttgaa

SEQ ID NO: 14655 - DNA, 24 bp, Artificial sequence  Forward Primer
  Primer
acttcaaaaactaggaccaacaat

SEQ ID NO: 14656 - DNA, 23 bp, Artificial sequence  Forward Primer
  Primer
agtgattcagaaaccactgaagc

SEQ ID NO: 14657 - DNA, 24 bp, Artificial sequence  Forward Primer
  Primer
caaaacaggcaatattctaaatta

SEQ ID NO: 14658 - DNA, 29 bp, Artificial sequence  Forward Primer
  Primer
acactttcctcttatgcaaatatatctac

SEQ ID NO: 14659 - DNA, 18 bp, Artificial sequence  Forward Primer
  Primer
tttgaaagggccaggatc

SEQ ID NO: 14660 - DNA, 20 bp, Artificial sequence  Forward Primer
  Primer
aaatgctgccagtatgttgg

SEQ ID NO: 14661 - DNA, 23 bp, Artificial sequence  Forward Primer
  Primer
aaaaattctctctcgtctgtcct

SEQ ID NO: 14662 - DNA, 18 bp, Artificial sequence  Forward Primer
  Primer
ctacatcgaggggcctga

SEQ ID NO: 14663 - DNA, 27 bp, Artificial sequence  Forward Primer
  Primer
cttagaaatcaaatcatgaaattatgg

SEQ ID NO: 14664 - DNA, 26 bp, Artificial sequence  Forward Primer
  Primer
cagcattgaagattatgttaaaaaag

SEQ ID NO: 14665 - DNA, 28 bp, Artificial sequence  Forward Primer
  Primer
ctgataaaacgataatttttactgtttg

SEQ ID NO: 14666 - DNA, 28 bp, Artificial sequence  Forward Primer
  Primer
aaattacagaggtaatatgtgattttgg

SEQ ID NO: 14667 - DNA, 23 bp, Artificial sequence  Forward Primer
  Primer
aagtgagttagtctgacaggggt

SEQ ID NO: 14668 - DNA, 18 bp, Artificial sequence  Forward Primer
  Primer
tcgtctcctcctctgctc

SEQ ID NO: 14669 - DNA, 22 bp, Artificial sequence  Forward Primer
  Primer
acaggatttcctaagtccaacc

SEQ ID NO: 14670 - DNA, 30 bp, Artificial sequence  Forward Primer
  Primer
agactaaatgacctattaaattaagtgtat

SEQ ID NO: 14671 - DNA, 25 bp, Artificial sequence  Forward Primer
  Primer
aaaacattccaaattacatcttgtc

SEQ ID NO: 14672 - DNA, 22 bp, Artificial sequence  Forward Primer
  Primer
tggaaacaatccaacactgata

SEQ ID NO: 14673 - DNA, 28 bp, Artificial sequence  Forward Primer
  Primer
tgtctaggagataaaactgataggattt

SEQ ID NO: 14674 - DNA, 24 bp, Artificial sequence  Forward Primer
  Primer
aaagcatttttagggagaagtaca

SEQ ID NO: 14675 - DNA, 19 bp, Artificial sequence  Forward Primer
  Primer
ccatctttgccacttactc

SEQ ID NO: 14676 - DNA, 21 bp, Artificial sequence  Forward Primer
  Primer
aatcatgtctctcgtcctcag

SEQ ID NO: 14677 - DNA, 21 bp, Artificial sequence  Forward Primer
  Primer
tctcagtttggttatgttgcc

SEQ ID NO: 14678 - DNA, 25 bp, Artificial sequence  Forward Primer
  Primer
attcctgtttggatcatttatgtaa

SEQ ID NO: 14679 - DNA, 26 bp, Artificial sequence  Forward Primer
  Primer
attaattaaccctagatgggaatacc

SEQ ID NO: 14680 - DNA, 25 bp, Artificial sequence  Forward Primer
  Primer
cagacttggaggaaatgttaaatta

SEQ ID NO: 14681 - DNA, 22 bp, Artificial sequence  Forward Primer
  Primer
tcaggaaatgtaggaaaatgag

SEQ ID NO: 14682 - DNA, 24 bp, Artificial sequence  Forward Primer
  Primer
tgcaattgttttactagttgactg

SEQ ID NO: 14683 - DNA, 24 bp, Artificial sequence  Forward Primer
  Primer
aacctgaatgtcatagtattttga

SEQ ID NO: 14684 - DNA, 24 bp, Artificial sequence  Forward Primer
  Primer
ggactggacatctaatttatcaat

SEQ ID NO: 14685 - DNA, 23 bp, Artificial sequence  Forward Primer
  Primer
acctgtacaatggtagatgttct

SEQ ID NO: 14686 - DNA, 22 bp, Artificial sequence  Forward Primer
  Primer
aataggcatccagcttctaacc

SEQ ID NO: 14687 - DNA, 19 bp, Artificial sequence  Forward Primer
  Primer
acgtggatggcaaactaca

SEQ ID NO: 14688 - DNA, 27 bp, Artificial sequence  Forward Primer
  Primer
aatacctaagatcagccaggtatatct

SEQ ID NO: 14689 - DNA, 27 bp, Artificial sequence  Forward Primer
  Primer
atttagaagtttaactgtttgtctgtg

SEQ ID NO: 14690 - DNA, 28 bp, Artificial sequence  Forward Primer
  Primer
gtagaagtcatttgtgtttttcattatc

SEQ ID NO: 14691 - DNA, 28 bp, Artificial sequence  Forward Primer
  Primer
ttaaagtgtgatgacattagaacagata

SEQ ID NO: 14692 - DNA, 21 bp, Artificial sequence  Forward Primer
  Primer
taatggtgtcggttcatctct

SEQ ID NO: 14693 - DNA, 28 bp, Artificial sequence  Forward Primer
  Primer
ataagtaattttgagtgtcttattttgg

SEQ ID NO: 14694 - DNA, 24 bp, Artificial sequence  Forward Primer
  Primer
gatgagttagttaaccctgctgtg

SEQ ID NO: 14695 - DNA, 20 bp, Artificial sequence  Forward Primer
  Primer
aaagactccagggagaggag

SEQ ID NO: 14696 - DNA, 24 bp, Artificial sequence  Forward Primer
  Primer
aggtataggaaaaatgaaaaagag

SEQ ID NO: 14697 - DNA, 24 bp, Artificial sequence  Forward Primer
  Primer
tgaagcaagtgaatatactctttt

SEQ ID NO: 14698 - DNA, 22 bp, Artificial sequence  Forward Primer
  Primer
attaccaagtgtgcaagtgatg

SEQ ID NO: 14699 - DNA, 21 bp, Artificial sequence  Forward Primer
  Primer
tttccctgtaagatgacacct

SEQ ID NO: 14700 - DNA, 23 bp, Artificial sequence  Forward Primer
  Primer
tcaccaataactttccattgaga

SEQ ID NO: 14701 - DNA, 23 bp, Artificial sequence  Forward Primer
  Primer
gctaactgctctcttttctatgt

SEQ ID NO: 14702 - DNA, 21 bp, Artificial sequence  Forward Primer
  Primer
atgcattgcagaagtccttta

SEQ ID NO: 14703 - DNA, 22 bp, Artificial sequence  Forward Primer
  Primer
attactcaagggagctctcacg

SEQ ID NO: 14704 - DNA, 19 bp, Artificial sequence  Forward Primer
  Primer
tagaaagaggcgtgtgtgc

SEQ ID NO: 14705 - DNA, 21 bp, Artificial sequence  Forward Primer
  Primer
tcctggatattttcagtgtga

SEQ ID NO: 14706 - DNA, 20 bp, Artificial sequence  Forward Primer
  Primer
actagattgagaggtcctgg

SEQ ID NO: 14707 - DNA, 20 bp, Artificial sequence  Forward Primer
  Primer
attgaggtgagcttgcctag

SEQ ID NO: 14708 - DNA, 26 bp, Artificial sequence  Forward Primer
  Primer
aatttagtcctgtcaaaagattcttg

SEQ ID NO: 14709 - DNA, 22 bp, Artificial sequence  Forward Primer
  Primer
ttagggtttaaggtgctctgaa

SEQ ID NO: 14710 - DNA, 21 bp, Artificial sequence  Forward Primer
  Primer
tggtagccaactggtgtaaca

SEQ ID NO: 14711 - DNA, 20 bp, Artificial sequence  Forward Primer
  Primer
acacagcaccccagattatc

SEQ ID NO: 14712 - DNA, 18 bp, Artificial sequence  Forward Primer
  Primer
acgctggccacccacaca

SEQ ID NO: 14713 - DNA, 23 bp, Artificial sequence  Forward Primer
  Primer
aaagtaacagtgatggtggaaag

SEQ ID NO: 14714 - DNA, 20 bp, Artificial sequence  Forward Primer
  Primer
accagctgagtcactgatgc

SEQ ID NO: 14715 - DNA, 21 bp, Artificial sequence  Forward Primer
  Primer
ttcatcagttgaggcctaagt

SEQ ID NO: 14716 - DNA, 22 bp, Artificial sequence  Forward Primer
  Primer
ataaggacctgcaatttttgaa

SEQ ID NO: 14717 - DNA, 24 bp, Artificial sequence  Forward Primer
  Primer
ttaayggttttgagtgagctttag

SEQ ID NO: 14718 - DNA, 23 bp, Artificial sequence  Forward Primer
  Primer
ttcaaatataaacctttgctttc

SEQ ID NO: 14719 - DNA, 25 bp, Artificial sequence  Forward Primer
  Primer
ttgtttttctcctatttgcmtattt

SEQ ID NO: 14720 - DNA, 26 bp, Artificial sequence  Forward Primer
  Primer
aataattctaagcctacttaaaactg

SEQ ID NO: 14721 - DNA, 27 bp, Artificial sequence  Forward Primer
  Primer
aaaatacagtcatgattctcattatcc

SEQ ID NO: 14722 - DNA, 30 bp, Artificial sequence  Forward Primer
  Primer
tgtgatgtttatgtaaactataaatgaagg

SEQ ID NO: 14723 - DNA, 30 bp, Artificial sequence  Forward Primer
  Primer
attctaaagtaaatgtataggtacccacta

SEQ ID NO: 14724 - DNA, 27 bp, Artificial sequence  Forward Primer
  Primer
acatttacaaagttgcaaatacagtac

SEQ ID NO: 14725 - DNA, 30 bp, Artificial sequence  Forward Primer
  Primer
tattttaaatgtctagttataatgaagggg

SEQ ID NO: 14726 - DNA, 25 bp, Artificial sequence  Forward Primer
  Primer
aacatgacatcagatagagaaattc

SEQ ID NO: 14727 - DNA, 21 bp, Artificial sequence  Forward Primer
  Primer
aatggaataatggcttctaaa

SEQ ID NO: 14728 - DNA, 22 bp, Artificial sequence  Forward Primer
  Primer
aaatgattttaagtggttgggc

SEQ ID NO: 14729 - DNA, 24 bp, Artificial sequence  Forward Primer
  Primer
ttaccctcctaccacatagaattc

SEQ ID NO: 14730 - DNA, 20 bp, Artificial sequence  Forward Primer
  Primer
aaccaattctattccagccc

SEQ ID NO: 14731 - DNA, 30 bp, Artificial sequence  Forward Primer
  Primer
gcactattatactcaatgttactactagag

SEQ ID NO: 14732 - DNA, 24 bp, Artificial sequence  Forward Primer
  Primer
tggattttataaagatcactcttg

SEQ ID NO: 14733 - DNA, 23 bp, Artificial sequence  Forward Primer
  Primer
aaggtcatgaatgagctatttga

SEQ ID NO: 14734 - DNA, 26 bp, Artificial sequence  Forward Primer
  Primer
ttttacatggttctttattcctagaa

SEQ ID NO: 14735 - DNA, 24 bp, Artificial sequence  Forward Primer
  Primer
ttaaatctaaggtgtcagcacatt

SEQ ID NO: 14736 - DNA, 23 bp, Artificial sequence  Forward Primer
  Primer
tttggggtataaaatctagaagt

SEQ ID NO: 14737 - DNA, 22 bp, Artificial sequence  Forward Primer
  Primer
aaagtgtacaaattcactgtca

SEQ ID NO: 14738 - DNA, 27 bp, Artificial sequence  Forward Primer
  Primer
taatctcatctaaaccatattctcttg

SEQ ID NO: 14739 - DNA, 24 bp, Artificial sequence  Forward Primer
  Primer
ttaaaaggatcctacaaattcctg

SEQ ID NO: 14740 - DNA, 28 bp, Artificial sequence  Forward Primer
  Primer
tatttgttggattaagtaggtttctaaa

SEQ ID NO: 14741 - DNA, 21 bp, Artificial sequence  Forward Primer
  Primer
aartgtgaccttggaattgaa

SEQ ID NO: 14742 - DNA, 28 bp, Artificial sequence  Forward Primer
  Primer
ctctttttttcaaactatttctttgtct

SEQ ID NO: 14743 - DNA, 24 bp, Artificial sequence  Forward Primer
  Primer
aatagacaagtcaacttcagatgc

SEQ ID NO: 14744 - DNA, 28 bp, Artificial sequence  Forward Primer
  Primer
cctcagatttactaaacaaaaatatcaa

SEQ ID NO: 14745 - DNA, 28 bp, Artificial sequence  Forward Primer
  Primer
atgatgccagatatatttcatattgtaa

SEQ ID NO: 14746 - DNA, 30 bp, Artificial sequence  Forward Primer
  Primer
aaattatagtatgtgtaaagtgtacaatgt

SEQ ID NO: 14747 - DNA, 26 bp, Artificial sequence  Forward Primer
  Primer
tttgtgattaagacctcttatttctg

SEQ ID NO: 14748 - DNA, 27 bp, Artificial sequence  Forward Primer
  Primer
tttctaaaaaagctgttgatctatttg

SEQ ID NO: 14749 - DNA, 23 bp, Artificial sequence  Forward Primer
  Primer
agacatcaggtgtggttgttagt

SEQ ID NO: 14750 - DNA, 22 bp, Artificial sequence  Forward Primer
  Primer
atgaacttgaactgattggctt

SEQ ID NO: 14751 - DNA, 24 bp, Artificial sequence  Forward Primer
  Primer
atttttggattatctgagtattgc

SEQ ID NO: 14752 - DNA, 21 bp, Artificial sequence  Forward Primer
  Primer
tttccctacctcatctaatct

SEQ ID NO: 14753 - DNA, 22 bp, Artificial sequence  Forward Primer
  Primer
ataaaaagagaaggaacagggg

SEQ ID NO: 14754 - DNA, 18 bp, Artificial sequence  Forward Primer
  Primer
tgacacccccagagcttc

SEQ ID NO: 14755 - DNA, 19 bp, Artificial sequence  Forward Primer
  Primer
aatatccgaaggaggggac

SEQ ID NO: 14756 - DNA, 24 bp, Artificial sequence  Forward Primer
  Primer
taaatgaaaggtcatggaatctct

SEQ ID NO: 14757 - DNA, 18 bp, Artificial sequence  Forward Primer
  Primer
tgtggccaggatggaggc

SEQ ID NO: 14758 - DNA, 26 bp, Artificial sequence  Forward Primer
  Primer
acatcttatctcttctttgtccattt

SEQ ID NO: 14759 - DNA, 24 bp, Artificial sequence  Forward Primer
  Primer
aggaagaagactctaacttacaag

SEQ ID NO: 14760 - DNA, 24 bp, Artificial sequence  Forward Primer
  Primer
ttattttttaggcctttgaagttt

SEQ ID NO: 14761 - DNA, 21 bp, Artificial sequence  Forward Primer
  Primer
tcattgaaacatttgacatcg

SEQ ID NO: 14762 - DNA, 20 bp, Artificial sequence  Forward Primer
  Primer
tgtctgttgagcttctggaa

SEQ ID NO: 14763 - DNA, 18 bp, Artificial sequence  Forward Primer
  Primer
tgccaggaagggaagaat

SEQ ID NO: 14764 - DNA, 20 bp, Artificial sequence  Forward Primer
  Primer
tgttgaaagtggagaccagg

SEQ ID NO: 14765 - DNA, 24 bp, Artificial sequence  Forward Primer
  Primer
aattgtaaaatgtcctttggaaca

SEQ ID NO: 14766 - DNA, 18 bp, Artificial sequence  Forward Primer
  Primer
ggccctcggaaaatccag

SEQ ID NO: 14767 - DNA, 21 bp, Artificial sequence  Forward Primer
  Primer
tttgaaatccccctaaatgaa

SEQ ID NO: 14768 - DNA, 22 bp, Artificial sequence  Forward Primer
  Primer
aatagctggaaggcatttctac

SEQ ID NO: 14769 - DNA, 25 bp, Artificial sequence  Forward Primer
  Primer
atgagaaaacacattgtattgtttg

SEQ ID NO: 14770 - DNA, 28 bp, Artificial sequence  Forward Primer
  Primer
atttgttgaagagagtaccactaagttt

SEQ ID NO: 14771 - DNA, 19 bp, Artificial sequence  Forward Primer
  Primer
cacagatattggtggctct

SEQ ID NO: 14772 - DNA, 25 bp, Artificial sequence  Forward Primer
  Primer
aaaaataaaaagccagattctaagc

SEQ ID NO: 14773 - DNA, 23 bp, Artificial sequence  Forward Primer
  Primer
atacatcaaaaatgcatcctcaa

SEQ ID NO: 14774 - DNA, 30 bp, Artificial sequence  Forward Primer
  Primer
ctactcagtttataatttgatgatgttact

SEQ ID NO: 14775 - DNA, 23 bp, Artificial sequence  Forward Primer
  Primer
gctcattttaaacaaatcttctt

SEQ ID NO: 14776 - DNA, 28 bp, Artificial sequence  Forward Primer
  Primer
ttctagaagtaaacaagaatccaatacc

SEQ ID NO: 14777 - DNA, 30 bp, Artificial sequence  Forward Primer
  Primer
tttatagattcttctacatagttaaaatgg

SEQ ID NO: 14778 - DNA, 19 bp, Artificial sequence  Forward Primer
  Primer
agcatcttgatttgcgact

SEQ ID NO: 14779 - DNA, 20 bp, Artificial sequence  Forward Primer
  Primer
taaagcccttaagccacact

SEQ ID NO: 14780 - DNA, 25 bp, Artificial sequence  Forward Primer
  Primer
agacaaaaggtcagatcagatatac

SEQ ID NO: 14781 - DNA, 24 bp, Artificial sequence  Forward Primer
  Primer
ttctaataccacagacaacccttc

SEQ ID NO: 14782 - DNA, 18 bp, Artificial sequence  Forward Primer
  Primer
tgcttggggagcaaagga

SEQ ID NO: 14783 - DNA, 21 bp, Artificial sequence  Forward Primer
  Primer
agatgtaaccatgaagtggca

SEQ ID NO: 14784 - DNA, 19 bp, Artificial sequence  Forward Primer
  Primer
tttgcaaagcttagacggc

SEQ ID NO: 14785 - DNA, 18 bp, Artificial sequence  Forward Primer
  Primer
gggtcttcccaaacgggg

SEQ ID NO: 14786 - DNA, 20 bp, Artificial sequence  Forward Primer
  Primer
acctcctccaggaagttttc

SEQ ID NO: 14787 - DNA, 26 bp, Artificial sequence  Forward Primer
  Primer
ttccatgtgacttaargtagtttctc

SEQ ID NO: 14788 - DNA, 18 bp, Artificial sequence  Forward Primer
  Primer
tctctgctgcctgccaca

SEQ ID NO: 14789 - DNA, 19 bp, Artificial sequence  Forward Primer
  Primer
ctgagttttgttcctggtg

SEQ ID NO: 14790 - DNA, 24 bp, Artificial sequence  Forward Primer
  Primer
tctaaaagaaattcccagcataaa

SEQ ID NO: 14791 - DNA, 26 bp, Artificial sequence  Forward Primer
  Primer
aggaagagtagagagactagaattgc

SEQ ID NO: 14792 - DNA, 27 bp, Artificial sequence  Forward Primer
  Primer
atgctgattttattcacttatcctaag

SEQ ID NO: 14793 - DNA, 26 bp, Artificial sequence  Forward Primer
  Primer
atttatagtggagagctctaagcagt

SEQ ID NO: 14794 - DNA, 23 bp, Artificial sequence  Forward Primer
  Primer
aatgtttcattggttctgatttc

SEQ ID NO: 14795 - DNA, 20 bp, Artificial sequence  Forward Primer
  Primer
ccatcagtctacatttccca

SEQ ID NO: 14796 - DNA, 23 bp, Artificial sequence  Forward Primer
  Primer
tccttaaatcactggagataatg

SEQ ID NO: 14797 - DNA, 27 bp, Artificial sequence  Forward Primer
  Primer
aatggatcttaacaataaaaagttgag

SEQ ID NO: 14798 - DNA, 24 bp, Artificial sequence  Forward Primer
  Primer
tcattagttgatttacaaagttgt

SEQ ID NO: 14799 - DNA, 26 bp, Artificial sequence  Forward Primer
  Primer
tattttctccccttagagtaagaaca

SEQ ID NO: 14800 - DNA, 21 bp, Artificial sequence  Forward Primer
  Primer
tgcctcattttcaaaacacat

SEQ ID NO: 14801 - DNA, 21 bp, Artificial sequence  Forward Primer
  Primer
atgctttagtttcccataagt

SEQ ID NO: 14802 - DNA, 30 bp, Artificial sequence  Forward Primer
  Primer
tagaggatcataacaaacctattatctaat

SEQ ID NO: 14803 - DNA, 19 bp, Artificial sequence  Forward Primer
  Primer
aatttcagcaaggcttccc

SEQ ID NO: 14804 - DNA, 22 bp, Artificial sequence  Forward Primer
  Primer
tgagctttcttatttcccagac

SEQ ID NO: 14805 - DNA, 19 bp, Artificial sequence  Forward Primer
  Primer
taaattgtggacagggcag

SEQ ID NO: 14806 - DNA, 23 bp, Artificial sequence  Forward Primer
  Primer
ctgttgttgtgtttatatttcct

SEQ ID NO: 14807 - DNA, 25 bp, Artificial sequence  Forward Primer
  Primer
atccttttgtaattccctttctaga

SEQ ID NO: 14808 - DNA, 29 bp, Artificial sequence  Forward Primer
  Primer
tttaaaatactacaggttaccaaagaaga

SEQ ID NO: 14809 - DNA, 28 bp, Artificial sequence  Forward Primer
  Primer
aatatgtagcaaaagttgacttaaagag

SEQ ID NO: 14810 - DNA, 26 bp, Artificial sequence  Forward Primer
  Primer
aatatccatcccactagttaagatgt

SEQ ID NO: 14811 - DNA, 24 bp, Artificial sequence  Forward Primer
  Primer
acttttttactcctttgttttagt

SEQ ID NO: 14812 - DNA, 22 bp, Artificial sequence  Forward Primer
  Primer
agctaatgacatctgcactttg

SEQ ID NO: 14813 - DNA, 20 bp, Artificial sequence  Forward Primer
  Primer
accagtgcagctgacctaca

SEQ ID NO: 14814 - DNA, 22 bp, Artificial sequence  Forward Primer
  Primer
aacatgcaacagcacagagtat

SEQ ID NO: 14815 - DNA, 21 bp, Artificial sequence  Forward Primer
  Primer
atgtgaaatccccttatcaca

SEQ ID NO: 14816 - DNA, 21 bp, Artificial sequence  Forward Primer
  Primer
cggattacactggatctgaac

SEQ ID NO: 14817 - DNA, 22 bp, Artificial sequence  Forward Primer
  Primer
aaaatgattccagccattatga

SEQ ID NO: 14818 - DNA, 29 bp, Artificial sequence  Forward Primer
  Primer
taagtgaaagagttctatctagagcctaa

SEQ ID NO: 14819 - DNA, 22 bp, Artificial sequence  Forward Primer
  Primer
aattttctgggtgacttgtcag

SEQ ID NO: 14820 - DNA, 25 bp, Artificial sequence  Forward Primer
  Primer
taattgaatcttggaaaatatggtg

SEQ ID NO: 14821 - DNA, 18 bp, Artificial sequence  Forward Primer
  Primer
tggcattgcaggcggatt

SEQ ID NO: 14822 - DNA, 25 bp, Artificial sequence  Forward Primer
  Primer
aaattaatgatgaacattcgaactg

SEQ ID NO: 14823 - DNA, 26 bp, Artificial sequence  Forward Primer
  Primer
aataagttctggatagcatcacacta

SEQ ID NO: 14824 - DNA, 26 bp, Artificial sequence  Forward Primer
  Primer
tctttcagaacactataaaaacaagg

SEQ ID NO: 14825 - DNA, 23 bp, Artificial sequence  Forward Primer
  Primer
attacaattgagttgggaactcc

SEQ ID NO: 14826 - DNA, 24 bp, Artificial sequence  Forward Primer
  Primer
aaagaatgatgagattgtgtcaaa

SEQ ID NO: 14827 - DNA, 28 bp, Artificial sequence  Forward Primer
  Primer
tgtcatcaaaatggtaatagatattttc

SEQ ID NO: 14828 - DNA, 24 bp, Artificial sequence  Forward Primer
  Primer
aaagttcataattagaacaagggc

SEQ ID NO: 14829 - DNA, 22 bp, Artificial sequence  Forward Primer
  Primer
agctgagaaataatggaacagc

SEQ ID NO: 14830 - DNA, 20 bp, Artificial sequence  Forward Primer
  Primer
cactctttcttcctcttcct

SEQ ID NO: 14831 - DNA, 22 bp, Artificial sequence  Forward Primer
  Primer
ttcaagtttctttggctttcat

SEQ ID NO: 14832 - DNA, 28 bp, Artificial sequence  Forward Primer
  Primer
tccattttcttagataatatttagaggc

SEQ ID NO: 14833 - DNA, 20 bp, Artificial sequence  Forward Primer
  Primer
agatctctgcatcctggtcc

SEQ ID NO: 14834 - DNA, 18 bp, Artificial sequence  Forward Primer
  Primer
tagggtggttgtggggct

SEQ ID NO: 14835 - DNA, 25 bp, Artificial sequence  Forward Primer
  Primer
ttcagaattcttgacaggaacttaa

SEQ ID NO: 14836 - DNA, 23 bp, Artificial sequence  Forward Primer
  Primer
ttttatctaactgaaagaggccg

SEQ ID NO: 14837 - DNA, 20 bp, Artificial sequence  Forward Primer
  Primer
acttacgcatgtcgaacaga

SEQ ID NO: 14838 - DNA, 18 bp, Artificial sequence  Forward Primer
  Primer
tgctgctagcggatgagg

SEQ ID NO: 14839 - DNA, 21 bp, Artificial sequence  Forward Primer
  Primer
accttctagctcgctctcaga

SEQ ID NO: 14840 - DNA, 18 bp, Artificial sequence  Forward Primer
  Primer
agccatcatggcacttct

SEQ ID NO: 14841 - DNA, 21 bp, Artificial sequence  Forward Primer
  Primer
agctggttttaggtgacaaaa

SEQ ID NO: 14842 - DNA, 18 bp, Artificial sequence  Forward Primer
  Primer
cacgaacacggtcatacg

SEQ ID NO: 14843 - DNA, 21 bp, Artificial sequence  Forward Primer
  Primer
tatgacttcatggacctgctg

SEQ ID NO: 14844 - DNA, 20 bp, Artificial sequence  Forward Primer
  Primer
cactcctttctcttcctctc

SEQ ID NO: 14845 - DNA, 22 bp, Artificial sequence  Forward Primer
  Primer
attatgtcccttcagtttctgg

SEQ ID NO: 14846 - DNA, 27 bp, Artificial sequence  Forward Primer
  Primer
tatttattcaacacacaattactgagg

SEQ ID NO: 14847 - DNA, 23 bp, Artificial sequence  Forward Primer
  Primer
atttgaaattctgaaacagttgg

SEQ ID NO: 14848 - DNA, 20 bp, Artificial sequence  Forward Primer
  Primer
agcctttcctctgtcagtga

SEQ ID NO: 14849 - DNA, 19 bp, Artificial sequence  Forward Primer
  Primer
ggaaagcttgaggggataa

SEQ ID NO: 14850 - DNA, 19 bp, Artificial sequence  Forward Primer
  Primer
cccaaaatcgtgatcaaat

SEQ ID NO: 14851 - DNA, 30 bp, Artificial sequence  Forward Primer
  Primer
agtatgcttttctttaatattatcaggagt

SEQ ID NO: 14852 - DNA, 27 bp, Artificial sequence  Forward Primer
  Primer
actgaacatattctaataacttagggg

SEQ ID NO: 14853 - DNA, 22 bp, Artificial sequence  Forward Primer
  Primer
ttcaggttcttctttctttcct

SEQ ID NO: 14854 - DNA, 24 bp, Artificial sequence  Forward Primer
  Primer
aaattatctgaaactacagtgcaa

SEQ ID NO: 14855 - DNA, 24 bp, Artificial sequence  Forward Primer
  Primer
aacttcaggagttgaattaatcta

SEQ ID NO: 14856 - DNA, 21 bp, Artificial sequence  Forward Primer
  Primer
tcatctttgaaacaatcaaca

SEQ ID NO: 14857 - DNA, 30 bp, Artificial sequence  Forward Primer
  Primer
tattatcatcatcatagttaacactattct

SEQ ID NO: 14858 - DNA, 21 bp, Artificial sequence  Forward Primer
  Primer
tatcagcatgattttgtcagg

SEQ ID NO: 14859 - DNA, 21 bp, Artificial sequence  Forward Primer
  Primer
tcttcatgtctgaggatcttt

SEQ ID NO: 14860 - DNA, 23 bp, Artificial sequence  Forward Primer
  Primer
tatggggacatcttagattcagt

SEQ ID NO: 14861 - DNA, 25 bp, Artificial sequence  Forward Primer
  Primer
gagtaaaaatggattggagaaaatt

SEQ ID NO: 14862 - DNA, 27 bp, Artificial sequence  Forward Primer
  Primer
aaacactatcaatcatattgtcttgaa

SEQ ID NO: 14863 - DNA, 19 bp, Artificial sequence  Forward Primer
  Primer
ccacggatcgagagtttag

SEQ ID NO: 14864 - DNA, 30 bp, Artificial sequence  Forward Primer
  Primer
ggtgtttatagaatataactaagaaaaaca

SEQ ID NO: 14865 - DNA, 21 bp, Artificial sequence  Forward Primer
  Primer
tcatgcttttttagtgtctca

SEQ ID NO: 14866 - DNA, 21 bp, Artificial sequence  Forward Primer
  Primer
tagtgaatgaccccatttcag

SEQ ID NO: 14867 - DNA, 27 bp, Artificial sequence  Forward Primer
  Primer
ataaagtagatcagctttttcactcat

SEQ ID NO: 14868 - DNA, 20 bp, Artificial sequence  Forward Primer
  Primer
atggctccagaattgttttc

SEQ ID NO: 14869 - DNA, 21 bp, Artificial sequence  Forward Primer
  Primer
ctgcaagctttgttttcaaac

SEQ ID NO: 14870 - DNA, 20 bp, Artificial sequence  Forward Primer
  Primer
ggcttgtgctttatttttac

SEQ ID NO: 14871 - DNA, 26 bp, Artificial sequence  Forward Primer
  Primer
aaattttatgaaaaacagatagaggg

SEQ ID NO: 14872 - DNA, 27 bp, Artificial sequence  Forward Primer
  Primer
tttgaagtgtactgataatcaaagaga

SEQ ID NO: 14873 - DNA, 21 bp, Artificial sequence  Forward Primer
  Primer
tattaggggtcagacctttat

SEQ ID NO: 14874 - DNA, 19 bp, Artificial sequence  Forward Primer
  Primer
aggagagaggagaatccag

SEQ ID NO: 14875 - DNA, 18 bp, Artificial sequence  Forward Primer
  Primer
tggggacttgtgttgctt

SEQ ID NO: 14876 - DNA, 23 bp, Artificial sequence  Forward Primer
  Primer
atattcccatttcctggtatcag

SEQ ID NO: 14877 - DNA, 30 bp, Artificial sequence  Forward Primer
  Primer
gtcaattagtttttagtagtgtatacttct

SEQ ID NO: 14878 - DNA, 26 bp, Artificial sequence  Forward Primer
  Primer
taaatcactgacttttctttcttcaa

SEQ ID NO: 14879 - DNA, 24 bp, Artificial sequence  Forward Primer
  Primer
aagggtaagaaatcagctctgtaa

SEQ ID NO: 14880 - DNA, 23 bp, Artificial sequence  Forward Primer
  Primer
atttatcctcacttctgtttctt

SEQ ID NO: 14881 - DNA, 27 bp, Artificial sequence  Forward Primer
  Primer
aactgatgctaagcatattttacattt

SEQ ID NO: 14882 - DNA, 23 bp, Artificial sequence  Forward Primer
  Primer
tggatacaaacatagaaaatgag

SEQ ID NO: 14883 - DNA, 28 bp, Artificial sequence  Forward Primer
  Primer
acaaagagtaagaaacaacttaatgact

SEQ ID NO: 14884 - DNA, 19 bp, Artificial sequence  Forward Primer
  Primer
ctgaaagggtaggacagcc

SEQ ID NO: 14885 - DNA, 20 bp, Artificial sequence  Forward Primer
  Primer
aactcagagcggaaaatgta

SEQ ID NO: 14886 - DNA, 23 bp, Artificial sequence  Forward Primer
  Primer
ttttattgccctttacttttttg

SEQ ID NO: 14887 - DNA, 21 bp, Artificial sequence  Forward Primer
  Primer
aaagattagtgcccacgtctg

SEQ ID NO: 14888 - DNA, 20 bp, Artificial sequence  Forward Primer
  Primer
ctttcctctggttttccttg

SEQ ID NO: 14889 - DNA, 27 bp, Artificial sequence  Forward Primer
  Primer
acctgttaattcacatagtgatttctt

SEQ ID NO: 14890 - DNA, 23 bp, Artificial sequence  Forward Primer
  Primer
aggaatgaggttttttgttttgt

SEQ ID NO: 14891 - DNA, 23 bp, Artificial sequence  Forward Primer
  Primer
ttataacatatgatgtctgccta

SEQ ID NO: 14892 - DNA, 28 bp, Artificial sequence  Forward Primer
  Primer
aaattagtaaaagatcaatgaggaagaa

SEQ ID NO: 14893 - DNA, 18 bp, Artificial sequence  Forward Primer
  Primer
tctgagaaccggcatctg

SEQ ID NO: 14894 - DNA, 20 bp, Artificial sequence  Forward Primer
  Primer
actcttttttccccactttg

SEQ ID NO: 14895 - DNA, 25 bp, Artificial sequence  Forward Primer
  Primer
ttttcctcaaatactccagtttaga

SEQ ID NO: 14896 - DNA, 19 bp, Artificial sequence  Forward Primer
  Primer
ctgctgggggtctaagtag

SEQ ID NO: 14897 - DNA, 23 bp, Artificial sequence  Forward Primer
  Primer
gaacggaacttattcgtatatag

SEQ ID NO: 14898 - DNA, 23 bp, Artificial sequence  Forward Primer
  Primer
tactaatacaaacccattgctgg

SEQ ID NO: 14899 - DNA, 19 bp, Artificial sequence  Forward Primer
  Primer
gttccagaggaggcagaaa

SEQ ID NO: 14900 - DNA, 18 bp, Artificial sequence  Forward Primer
  Primer
tcataagggcaccagctg

SEQ ID NO: 14901 - DNA, 23 bp, Artificial sequence  Forward Primer
  Primer
aatcaggctgagaataagaggaa

SEQ ID NO: 14902 - DNA, 20 bp, Artificial sequence  Forward Primer
  Primer
tcacgagcatttgtgacaag

SEQ ID NO: 14903 - DNA, 18 bp, Artificial sequence  Forward Primer
  Primer
aaaatcccacattcagcg

SEQ ID NO: 14904 - DNA, 18 bp, Artificial sequence  Forward Primer
  Primer
gggcaggattgcagacag

SEQ ID NO: 14905 - DNA, 21 bp, Artificial sequence  Forward Primer
  Primer
gggtctgcattagtttttaga

SEQ ID NO: 14906 - DNA, 24 bp, Artificial sequence  Forward Primer
  Primer
aactcaacaaaaacaagtagggtc

SEQ ID NO: 14907 - DNA, 19 bp, Artificial sequence  Forward Primer
  Primer
taggcatcctctggacagg

SEQ ID NO: 14908 - DNA, 26 bp, Artificial sequence  Forward Primer
  Primer
aaaaggctgtaaggataatttaattc

SEQ ID NO: 14909 - DNA, 24 bp, Artificial sequence  Forward Primer
  Primer
atgatcagtgagaactcttcaatg

SEQ ID NO: 14910 - DNA, 26 bp, Artificial sequence  Forward Primer
  Primer
aagagaacctgttcataagttcattt

SEQ ID NO: 14911 - DNA, 28 bp, Artificial sequence  Forward Primer
  Primer
cttaccagtcttcataaaataaaaaatg

SEQ ID NO: 14912 - DNA, 22 bp, Artificial sequence  Forward Primer
  Primer
aggacaaaatggaatagaaaat

SEQ ID NO: 14913 - DNA, 30 bp, Artificial sequence  Forward Primer
  Primer
cagttaaatttcttcatctttatataggtc

SEQ ID NO: 14914 - DNA, 27 bp, Artificial sequence  Forward Primer
  Primer
attaaatcacagaaattaaaccatgtc

SEQ ID NO: 14915 - DNA, 27 bp, Artificial sequence  Forward Primer
  Primer
atttctttttaattatatggctctggt

SEQ ID NO: 14916 - DNA, 25 bp, Artificial sequence  Forward Primer
  Primer
aagcttattaaagacaaatgaatgg

SEQ ID NO: 14917 - DNA, 27 bp, Artificial sequence  Forward Primer
  Primer
attttaataatatggtttcatggtgac

SEQ ID NO: 14918 - DNA, 21 bp, Artificial sequence  Forward Primer
  Primer
ttctgagcaaactacttcttg

SEQ ID NO: 14919 - DNA, 23 bp, Artificial sequence  Forward Primer
  Primer
ccattgagattacataagtttct

SEQ ID NO: 14920 - DNA, 28 bp, Artificial sequence  Forward Primer
  Primer
tcttctaatttacctgtattaaattctg

SEQ ID NO: 14921 - DNA, 21 bp, Artificial sequence  Forward Primer
  Primer
ccctagtacccactaatctgc

SEQ ID NO: 14922 - DNA, 28 bp, Artificial sequence  Forward Primer
  Primer
ttattagtctatgctatctacctggaag

SEQ ID NO: 14923 - DNA, 19 bp, Artificial sequence  Forward Primer
  Primer
gacccagttcaggtgtcac

SEQ ID NO: 14924 - DNA, 30 bp, Artificial sequence  Forward Primer
  Primer
gtctaagatgttagaatttcttttttaaga

SEQ ID NO: 14925 - DNA, 25 bp, Artificial sequence  Forward Primer
  Primer
atctgtattccaaagatctcacttc

SEQ ID NO: 14926 - DNA, 18 bp, Artificial sequence  Forward Primer
  Primer
tggggcgtggctcttcta

SEQ ID NO: 14927 - DNA, 27 bp, Artificial sequence  Forward Primer
  Primer
aaaaataatttgcttagaagaaacagg

SEQ ID NO: 14928 - DNA, 23 bp, Artificial sequence  Forward Primer
  Primer
aaaacaaccacagaacagaaaga

SEQ ID NO: 14929 - DNA, 28 bp, Artificial sequence  Forward Primer
  Primer
atcttacagtcaaactgaataagacaga

SEQ ID NO: 14930 - DNA, 20 bp, Artificial sequence  Forward Primer
  Primer
tgaatgcaacacaaagaagg

SEQ ID NO: 14931 - DNA, 27 bp, Artificial sequence  Forward Primer
  Primer
taaaaaccagagtgagtacctgtattt

SEQ ID NO: 14932 - DNA, 26 bp, Artificial sequence  Forward Primer
  Primer
ttactattccaagtgtaaagcagact

SEQ ID NO: 14933 - DNA, 27 bp, Artificial sequence  Forward Primer
  Primer
ggattactttatgtatcaaaaaacatg

SEQ ID NO: 14934 - DNA, 23 bp, Artificial sequence  Forward Primer
  Primer
attctaacaaaccgaggatactg

SEQ ID NO: 14935 - DNA, 24 bp, Artificial sequence  Forward Primer
  Primer
ttgttatttattcacagacatttg

SEQ ID NO: 14936 - DNA, 19 bp, Artificial sequence  Forward Primer
  Primer
atgtccagagcaatttggc

SEQ ID NO: 14937 - DNA, 18 bp, Artificial sequence  Forward Primer
  Primer
atgggtgagccacacgtg

SEQ ID NO: 14938 - DNA, 18 bp, Artificial sequence  Forward Primer
  Primer
aagccggaaggaggaaag

SEQ ID NO: 14939 - DNA, 23 bp, Artificial sequence  Forward Primer
  Primer
aaattctttcttccgatttcatt

SEQ ID NO: 14940 - DNA, 21 bp, Artificial sequence  Forward Primer
  Primer
aagcttcagtaggctgtgttg

SEQ ID NO: 14941 - DNA, 19 bp, Artificial sequence  Forward Primer
  Primer
tttgcccaattcatcttcc

SEQ ID NO: 14942 - DNA, 22 bp, Artificial sequence  Forward Primer
  Primer
aaatagcccagtaaccttttcc

SEQ ID NO: 14943 - DNA, 24 bp, Artificial sequence  Forward Primer
  Primer
aaacccagacacagtacactagct

SEQ ID NO: 14944 - DNA, 20 bp, Artificial sequence  Forward Primer
  Primer
tcatgcttagctccttggtc

SEQ ID NO: 14945 - DNA, 21 bp, Artificial sequence  Forward Primer
  Primer
aatgacgacagctactgcatc

SEQ ID NO: 14946 - DNA, 20 bp, Artificial sequence  Forward Primer
  Primer
agcaaactggaacaccaaga

SEQ ID NO: 14947 - DNA, 18 bp, Artificial sequence  Forward Primer
  Primer
accacacctgcagatgcc

SEQ ID NO: 14948 - DNA, 22 bp, Artificial sequence  Forward Primer
  Primer
tgaagtgggaaactttctaccc

SEQ ID NO: 14949 - DNA, 19 bp, Artificial sequence  Forward Primer
  Primer
tggggcaggagtttgatat

SEQ ID NO: 14950 - DNA, 19 bp, Artificial sequence  Forward Primer
  Primer
gtgagcagacggacaatga

SEQ ID NO: 14951 - DNA, 27 bp, Artificial sequence  Forward Primer
  Primer
aatgatcgttttgttactaaaatcttc

SEQ ID NO: 14952 - DNA, 24 bp, Artificial sequence  Forward Primer
  Primer
attttaaagaagcagtgaaaaacc

SEQ ID NO: 14953 - DNA, 25 bp, Artificial sequence  Forward Primer
  Primer
aaatatagtgctcatctgtgtctcc

SEQ ID NO: 14954 - DNA, 25 bp, Artificial sequence  Forward Primer
  Primer
gacagtcctatttatactttgagaa

SEQ ID NO: 14955 - DNA, 28 bp, Artificial sequence  Forward Primer
  Primer
ctcaaattcctaaaataaacactaaaca

SEQ ID NO: 14956 - DNA, 24 bp, Artificial sequence  Forward Primer
  Primer
tggtttctcakttgcttttaatta

SEQ ID NO: 14957 - DNA, 24 bp, Artificial sequence  Forward Primer
  Primer
atatttcatccccatgtcaactat

SEQ ID NO: 14958 - DNA, 19 bp, Artificial sequence  Forward Primer
  Primer
ttgtggaactcccattgag

SEQ ID NO: 14959 - DNA, 24 bp, Artificial sequence  Forward Primer
  Primer
taaaagatgagaaaaaggaatcca

SEQ ID NO: 14960 - DNA, 26 bp, Artificial sequence  Forward Primer
  Primer
tacaatacttttcgttgtttcctagt

SEQ ID NO: 14961 - DNA, 21 bp, Artificial sequence  Forward Primer
  Primer
aagtggtgtatgtacctgggg

SEQ ID NO: 14962 - DNA, 20 bp, Artificial sequence  Forward Primer
  Primer
crtgagacctcaggcaagta

SEQ ID NO: 14963 - DNA, 23 bp, Artificial sequence  Forward Primer
  Primer
gccaaattgctaaaatatgattg

SEQ ID NO: 14964 - DNA, 26 bp, Artificial sequence  Forward Primer
  Primer
attaatactgtttctgtctccttcaa

SEQ ID NO: 14965 - DNA, 27 bp, Artificial sequence  Forward Primer
  Primer
ccttamtagcaaaacatagtcttagga

SEQ ID NO: 14966 - DNA, 26 bp, Artificial sequence  Forward Primer
  Primer
ataaggaaatggaaagttattgctta

SEQ ID NO: 14967 - DNA, 20 bp, Artificial sequence  Forward Primer
  Primer
tagtttttcaattgcctcat

SEQ ID NO: 14968 - DNA, 28 bp, Artificial sequence  Forward Primer
  Primer
ccataacagtacatttttatctagcatt

SEQ ID NO: 14969 - DNA, 24 bp, Artificial sequence  Forward Primer
  Primer
aaccctgtacagtgtgttactgag

SEQ ID NO: 14970 - DNA, 22 bp, Artificial sequence  Forward Primer
  Primer
taatcctgacgatacatgaaaa

SEQ ID NO: 14971 - DNA, 26 bp, Artificial sequence  Forward Primer
  Primer
aggaaacacctcttatgtttctaatc

SEQ ID NO: 14972 - DNA, 20 bp, Artificial sequence  Forward Primer
  Primer
agtctttattgagcgcttgg

SEQ ID NO: 14973 - DNA, 21 bp, Artificial sequence  Forward Primer
  Primer
gcatttatcaacaaagagaga

SEQ ID NO: 14974 - DNA, 25 bp, Artificial sequence  Forward Primer
  Primer
aataatgtcacatgacttgtgtttt

SEQ ID NO: 14975 - DNA, 22 bp, Artificial sequence  Forward Primer
  Primer
ataagctttcattcccatgagg

SEQ ID NO: 14976 - DNA, 25 bp, Artificial sequence  Forward Primer
  Primer
acttcacaacagccttgtaaattaa

SEQ ID NO: 14977 - DNA, 21 bp, Artificial sequence  Forward Primer
  Primer
accctctccaaaacctagttc

SEQ ID NO: 14978 - DNA, 27 bp, Artificial sequence  Forward Primer
  Primer
tataagagaaggggagaaaagatactg

SEQ ID NO: 14979 - DNA, 28 bp, Artificial sequence  Forward Primer
  Primer
actttcaagtgttctttgttcttatttt

SEQ ID NO: 14980 - DNA, 24 bp, Artificial sequence  Forward Primer
  Primer
aatagcaggaaatgtacaaaaagg

SEQ ID NO: 14981 - DNA, 20 bp, Artificial sequence  Forward Primer
  Primer
aaagaattctctggcacagc

SEQ ID NO: 14982 - DNA, 22 bp, Artificial sequence  Forward Primer
  Primer
aaaaattcccccaaatattctg

SEQ ID NO: 14983 - DNA, 23 bp, Artificial sequence  Forward Primer
  Primer
aagctgtcattgtagagaacaac

SEQ ID NO: 14984 - DNA, 23 bp, Artificial sequence  Forward Primer
  Primer
aggaaataagagattgtgaacac

SEQ ID NO: 14985 - DNA, 22 bp, Artificial sequence  Forward Primer
  Primer
atctgccaaattactagcataa

SEQ ID NO: 14986 - DNA, 29 bp, Artificial sequence  Forward Primer
  Primer
aaagattctctcatctgaatagcttataa

SEQ ID NO: 14987 - DNA, 24 bp, Artificial sequence  Forward Primer
  Primer
aatcagttgcatcaagaaagaatt

SEQ ID NO: 14988 - DNA, 18 bp, Artificial sequence  Forward Primer
  Primer
tcgcggccactcctaaaa

SEQ ID NO: 14989 - DNA, 22 bp, Artificial sequence  Forward Primer
  Primer
aaatgagttccgttcatctgac

SEQ ID NO: 14990 - DNA, 26 bp, Artificial sequence  Forward Primer
  Primer
agcatttaaaaacagctttacaactt

SEQ ID NO: 14991 - DNA, 24 bp, Artificial sequence  Forward Primer
  Primer
tttttgaaagttcccttagtgact

SEQ ID NO: 14992 - DNA, 25 bp, Artificial sequence  Forward Primer
  Primer
tattctctcttatttccctgtctga

SEQ ID NO: 14993 - DNA, 22 bp, Artificial sequence  Forward Primer
  Primer
atatgcttaattcctcaacaac

SEQ ID NO: 14994 - DNA, 20 bp, Artificial sequence  Forward Primer
  Primer
cctccgtagtctgaaaagta

SEQ ID NO: 14995 - DNA, 19 bp, Artificial sequence  Forward Primer
  Primer
attttggcaacacacactt

SEQ ID NO: 14996 - DNA, 20 bp, Artificial sequence  Forward Primer
  Primer
tgatgaaaacctgagtgatg

SEQ ID NO: 14997 - DNA, 18 bp, Artificial sequence  Forward Primer
  Primer
atatcgactcacccccgg

SEQ ID NO: 14998 - DNA, 25 bp, Artificial sequence  Forward Primer
  Primer
taagctctttccacaaacaagtatt

SEQ ID NO: 14999 - DNA, 18 bp, Artificial sequence  Forward Primer
  Primer
tgcaggggaattcttggc

SEQ ID NO: 15000 - DNA, 18 bp, Artificial sequence  Forward Primer
  Primer
cgccagtctcgcttaaga

SEQ ID NO: 15001 - DNA, 27 bp, Artificial sequence  Forward Primer
  Primer
aaaaataacttaaaggacttccctagt

SEQ ID NO: 15002 - DNA, 19 bp, Artificial sequence  Forward Primer
  Primer
acctccacccttccaactt

SEQ ID NO: 15003 - DNA, 19 bp, Artificial sequence  Forward Primer
  Primer
agagagaagacagaagggg

SEQ ID NO: 15004 - DNA, 20 bp, Artificial sequence  Forward Primer
  Primer
tcagtacctacggtgtgcct

SEQ ID NO: 15005 - DNA, 25 bp, Artificial sequence  Forward Primer
  Primer
caatctgcatcattacattactacc

SEQ ID NO: 15006 - DNA, 18 bp, Artificial sequence  Forward Primer
  Primer
tttatccccaacccgaga

SEQ ID NO: 15007 - DNA, 22 bp, Artificial sequence  Forward Primer
  Primer
tcatttcttagttttgccaagt

SEQ ID NO: 15008 - DNA, 26 bp, Artificial sequence  Forward Primer
  Primer
tttacaaaaattgtctactcatggtt

SEQ ID NO: 15009 - DNA, 24 bp, Artificial sequence  Forward Primer
  Primer
aattttattacacggtttttctgc

SEQ ID NO: 15010 - DNA, 18 bp, Artificial sequence  Forward Primer
  Primer
cttgtgtgtcgaatcgca

SEQ ID NO: 15011 - DNA, 21 bp, Artificial sequence  Forward Primer
  Primer
tccaagtttctgactcctaaa

SEQ ID NO: 15012 - DNA, 27 bp, Artificial sequence  Forward Primer
  Primer
aataattacaataaatctggacaatgg

SEQ ID NO: 15013 - DNA, 26 bp, Artificial sequence  Forward Primer
  Primer
tttaaaagggtgaagtataccctaca

SEQ ID NO: 15014 - DNA, 30 bp, Artificial sequence  Forward Primer
  Primer
tattagcaaagagttatattacttgactac

SEQ ID NO: 15015 - DNA, 27 bp, Artificial sequence  Forward Primer
  Primer
aagagtatctggctcatattaagacag

SEQ ID NO: 15016 - DNA, 20 bp, Artificial sequence  Forward Primer
  Primer
aacacacaatttggccttcc

SEQ ID NO: 15017 - DNA, 24 bp, Artificial sequence  Forward Primer
  Primer
caaatttagtatcttcaaaccata

SEQ ID NO: 15018 - DNA, 23 bp, Artificial sequence  Forward Primer
  Primer
ttgataaaatccaagagcttaat

SEQ ID NO: 15019 - DNA, 25 bp, Artificial sequence  Forward Primer
  Primer
aatagtcaataaatgagctgagaaa

SEQ ID NO: 15020 - DNA, 23 bp, Artificial sequence  Forward Primer
  Primer
ttcaggtttccacaaaataacat

SEQ ID NO: 15021 - DNA, 20 bp, Artificial sequence  Forward Primer
  Primer
tactcacttcctccaccaga

SEQ ID NO: 15022 - DNA, 23 bp, Artificial sequence  Forward Primer
  Primer
taagaagacagacaaggagacta

SEQ ID NO: 15023 - DNA, 27 bp, Artificial sequence  Forward Primer
  Primer
ttatggtgtcattatcttaaagagtgc

SEQ ID NO: 15024 - DNA, 30 bp, Artificial sequence  Forward Primer
  Primer
ttaaattataataagctatgtaagaactct

SEQ ID NO: 15025 - DNA, 24 bp, Artificial sequence  Forward Primer
  Primer
tttacacagaatgagcctcttatc

SEQ ID NO: 15026 - DNA, 22 bp, Artificial sequence  Forward Primer
  Primer
tgcagttaaaatcaaaaatctg

SEQ ID NO: 15027 - DNA, 21 bp, Artificial sequence  Forward Primer
  Primer
gtgaattttagaaattccgtt

SEQ ID NO: 15028 - DNA, 25 bp, Artificial sequence  Forward Primer
  Primer
ttttggtaacattaacttctcaatg

SEQ ID NO: 15029 - DNA, 24 bp, Artificial sequence  Forward Primer
  Primer
agcctaatacttctagaattgctc

SEQ ID NO: 15030 - DNA, 18 bp, Artificial sequence  Forward Primer
  Primer
agtggtcggcttccaaag

SEQ ID NO: 15031 - DNA, 24 bp, Artificial sequence  Forward Primer
  Primer
caaaacatttactttacatttcct

SEQ ID NO: 15032 - DNA, 22 bp, Artificial sequence  Forward Primer
  Primer
aaaagtggtacagatgaaccca

SEQ ID NO: 15033 - DNA, 23 bp, Artificial sequence  Forward Primer
  Primer
atagttggagaatcctgtttcct

SEQ ID NO: 15034 - DNA, 30 bp, Artificial sequence  Forward Primer
  Primer
attcttaatattgtgttataagactctggg

SEQ ID NO: 15035 - DNA, 19 bp, Artificial sequence  Forward Primer
  Primer
agattgatggcctcatgct

SEQ ID NO: 15036 - DNA, 23 bp, Artificial sequence  Forward Primer
  Primer
agtcccctgagtaatatagcagc

SEQ ID NO: 15037 - DNA, 19 bp, Artificial sequence  Forward Primer
  Primer
aatttttcccatcactgct

SEQ ID NO: 15038 - DNA, 25 bp, Artificial sequence  Forward Primer
  Primer
aacctagactagcttagcagaagtt

SEQ ID NO: 15039 - DNA, 18 bp, Artificial sequence  Forward Primer
  Primer
attggccgtctgacagaa

SEQ ID NO: 15040 - DNA, 25 bp, Artificial sequence  Forward Primer
  Primer
ttctaagattgctccaatgtatagg

SEQ ID NO: 15041 - DNA, 22 bp, Artificial sequence  Forward Primer
  Primer
acttacacccaacctgctatct

SEQ ID NO: 15042 - DNA, 18 bp, Artificial sequence  Forward Primer
  Primer
tgtcccagacacacgaac

SEQ ID NO: 15043 - DNA, 22 bp, Artificial sequence  Forward Primer
  Primer
aatgactgttaagcttttcgga

SEQ ID NO: 15044 - DNA, 23 bp, Artificial sequence  Forward Primer
  Primer
ttaattccctgaaaaatcagctt

SEQ ID NO: 15045 - DNA, 18 bp, Artificial sequence  Forward Primer
  Primer
acaggcagtcagacggtg

SEQ ID NO: 15046 - DNA, 18 bp, Artificial sequence  Forward Primer
  Primer
tgcgtcactttgcagagc

SEQ ID NO: 15047 - DNA, 21 bp, Artificial sequence  Forward Primer
  Primer
aagaaagtctgaccattgctg

SEQ ID NO: 15048 - DNA, 20 bp, Artificial sequence  Forward Primer
  Primer
gcagagtcgaaattgtaagt

SEQ ID NO: 15049 - DNA, 30 bp, Artificial sequence  Forward Primer
  Primer
aggtaaaaacaatttatatgtctatgtgtg

SEQ ID NO: 15050 - DNA, 26 bp, Artificial sequence  Forward Primer
  Primer
cacatcttcaaacgatatctaaaaaa

SEQ ID NO: 15051 - DNA, 23 bp, Artificial sequence  Forward Primer
  Primer
ttgtggtgtaactccttatgtat

SEQ ID NO: 15052 - DNA, 27 bp, Artificial sequence  Forward Primer
  Primer
ggtaaaatatcattctgaagatcaaaa

SEQ ID NO: 15053 - DNA, 29 bp, Artificial sequence  Forward Primer
  Primer
aacaagtgatctattttaacatgtacaga

SEQ ID NO: 15054 - DNA, 24 bp, Artificial sequence  Forward Primer
  Primer
taaacaaaagagaaagaggcaaga

SEQ ID NO: 15055 - DNA, 26 bp, Artificial sequence  Forward Primer
  Primer
atacatgtaccctgataagaaaggac

SEQ ID NO: 15056 - DNA, 30 bp, Artificial sequence  Forward Primer
  Primer
tttttataaagtgagacactcataaatagg

SEQ ID NO: 15057 - DNA, 23 bp, Artificial sequence  Forward Primer
  Primer
ttttgtgtttgggaaaaaataag

SEQ ID NO: 15058 - DNA, 21 bp, Artificial sequence  Forward Primer
  Primer
agtcattcctgcatttaaaac

SEQ ID NO: 15059 - DNA, 23 bp, Artificial sequence  Forward Primer
  Primer
cacctgagagaaatcaaatttca

SEQ ID NO: 15060 - DNA, 28 bp, Artificial sequence  Forward Primer
  Primer
ttttggtagatattctgattaaagacag

SEQ ID NO: 15061 - DNA, 24 bp, Artificial sequence  Forward Primer
  Primer
tttctcatccaataaaactcaaag

SEQ ID NO: 15062 - DNA, 22 bp, Artificial sequence  Forward Primer
  Primer
caaatcaagaaacagctaatga

SEQ ID NO: 15063 - DNA, 23 bp, Artificial sequence  Forward Primer
  Primer
tgcttagaattatgatgcttttc

SEQ ID NO: 15064 - DNA, 21 bp, Artificial sequence  Forward Primer
  Primer
tattgaaatgagagaatggcg

SEQ ID NO: 15065 - DNA, 22 bp, Artificial sequence  Forward Primer
  Primer
tatgatgcctctttccctatgt

SEQ ID NO: 15066 - DNA, 28 bp, Artificial sequence  Forward Primer
  Primer
gaccataatatacatttttctgaaatca

SEQ ID NO: 15067 - DNA, 22 bp, Artificial sequence  Forward Primer
  Primer
agcatactgttcacattatctg

SEQ ID NO: 15068 - DNA, 18 bp, Artificial sequence  Forward Primer
  Primer
tttacaagcagcccttgc

SEQ ID NO: 15069 - DNA, 24 bp, Artificial sequence  Forward Primer
  Primer
tgaagctcataaaaatgtttacat

SEQ ID NO: 15070 - DNA, 30 bp, Artificial sequence  Forward Primer
  Primer
ataagaaacaaaagagtaaatataccaagc

SEQ ID NO: 15071 - DNA, 26 bp, Artificial sequence  Forward Primer
  Primer
accttatctattacaaggttctcctg

SEQ ID NO: 15072 - DNA, 27 bp, Artificial sequence  Forward Primer
  Primer
gcagtatttttttcctctctaaacttt

SEQ ID NO: 15073 - DNA, 19 bp, Artificial sequence  Forward Primer
  Primer
aaagcaatctatggcattg

SEQ ID NO: 15074 - DNA, 19 bp, Artificial sequence  Forward Primer
  Primer
tgaaaccaaaggtccagct

SEQ ID NO: 15075 - DNA, 25 bp, Artificial sequence  Forward Primer
  Primer
tttataaattcagtttacacaccag

SEQ ID NO: 15076 - DNA, 24 bp, Artificial sequence  Forward Primer
  Primer
aatcaaggatttcaacaaaatcat

SEQ ID NO: 15077 - DNA, 23 bp, Artificial sequence  Forward Primer
  Primer
caaaaatggcaaaaataatttcc

SEQ ID NO: 15078 - DNA, 22 bp, Artificial sequence  Forward Primer
  Primer
ttcacagatgagacggaataca

SEQ ID NO: 15079 - DNA, 18 bp, Artificial sequence  Forward Primer
  Primer
agagggagaggccccttc

SEQ ID NO: 15080 - DNA, 26 bp, Artificial sequence  Forward Primer
  Primer
ttattttggaattgctatattgagag

SEQ ID NO: 15081 - DNA, 27 bp, Artificial sequence  Forward Primer
  Primer
aattagaattcaagctattcaatgaag

SEQ ID NO: 15082 - DNA, 27 bp, Artificial sequence  Forward Primer
  Primer
tttctgtgaaagcaaaaatatagattc

SEQ ID NO: 15083 - DNA, 27 bp, Artificial sequence  Forward Primer
  Primer
ctatgcagtgacacatgataattattt

SEQ ID NO: 15084 - DNA, 19 bp, Artificial sequence  Forward Primer
  Primer
ctctcctgtgttccacatg

SEQ ID NO: 15085 - DNA, 20 bp, Artificial sequence  Forward Primer
  Primer
accgattattgtttcaacgc

SEQ ID NO: 15086 - DNA, 22 bp, Artificial sequence  Forward Primer
  Primer
atgtgactgcacattttgagag

SEQ ID NO: 15087 - DNA, 21 bp, Artificial sequence  Forward Primer
  Primer
aagcttttcttgcaaacaacc

SEQ ID NO: 15088 - DNA, 18 bp, Artificial sequence  Forward Primer
  Primer
ggtggtgggatgaactgg

SEQ ID NO: 15089 - DNA, 18 bp, Artificial sequence  Forward Primer
  Primer
tccaaccacattggctct

SEQ ID NO: 15090 - DNA, 27 bp, Artificial sequence  Forward Primer
  Primer
ctccataaatttcaattgataagaaag

SEQ ID NO: 15091 - DNA, 28 bp, Artificial sequence  Forward Primer
  Primer
tcttgaaaattatgtttgagataaatcc

SEQ ID NO: 15092 - DNA, 23 bp, Artificial sequence  Forward Primer
  Primer
ttatgccagaacgtaagagtatg

SEQ ID NO: 15093 - DNA, 24 bp, Artificial sequence  Forward Primer
  Primer
attaaatagggcataaggtggttt

SEQ ID NO: 15094 - DNA, 26 bp, Artificial sequence  Forward Primer
  Primer
ataataatggtctttggttctctgac

SEQ ID NO: 15095 - DNA, 26 bp, Artificial sequence  Forward Primer
  Primer
tactgatcatgtatgtgaattttatc

SEQ ID NO: 15096 - DNA, 25 bp, Artificial sequence  Forward Primer
  Primer
tttagtaaatgacattttcccaatg

SEQ ID NO: 15097 - DNA, 30 bp, Artificial sequence  Forward Primer
  Primer
aagaagtaatactcttgtaattaacatagg

SEQ ID NO: 15098 - DNA, 29 bp, Artificial sequence  Forward Primer
  Primer
tacctgttttatatgagctaagaatgatt

SEQ ID NO: 15099 - DNA, 25 bp, Artificial sequence  Forward Primer
  Primer
aaaaattaaatggttatgtcaggtg

SEQ ID NO: 15100 - DNA, 21 bp, Artificial sequence  Forward Primer
  Primer
tacaagtgacccaatcatcat

SEQ ID NO: 15101 - DNA, 27 bp, Artificial sequence  Forward Primer
  Primer
agaaataccttgagtatttgaagtcat

SEQ ID NO: 15102 - DNA, 20 bp, Artificial sequence  Forward Primer
  Primer
gatggatcagaactagcctt

SEQ ID NO: 15103 - DNA, 27 bp, Artificial sequence  Forward Primer
  Primer
aagcttgttagtgatttctaaagagta

SEQ ID NO: 15104 - DNA, 18 bp, Artificial sequence  Forward Primer
  Primer
attcccacggcactgacg

SEQ ID NO: 15105 - DNA, 19 bp, Artificial sequence  Forward Primer
  Primer
aaacactgtgtcagccctg

SEQ ID NO: 15106 - DNA, 19 bp, Artificial sequence  Forward Primer
  Primer
gcagtccccgtgtaagaaa

SEQ ID NO: 15107 - DNA, 20 bp, Artificial sequence  Forward Primer
  Primer
ttggacatgttctcagagcc

SEQ ID NO: 15108 - DNA, 22 bp, Artificial sequence  Forward Primer
  Primer
tggaggagacagagaagactct

SEQ ID NO: 15109 - DNA, 20 bp, Artificial sequence  Forward Primer
  Primer
aagatccgaaactgaaaaca

SEQ ID NO: 15110 - DNA, 22 bp, Artificial sequence  Forward Primer
  Primer
ttaaggaatttacccaaggtca

SEQ ID NO: 15111 - DNA, 24 bp, Artificial sequence  Forward Primer
  Primer
tatcttacccatcttggactctgt

SEQ ID NO: 15112 - DNA, 28 bp, Artificial sequence  Forward Primer
  Primer
aagatgatgaagataaaagagaaaaaga

SEQ ID NO: 15113 - DNA, 22 bp, Artificial sequence  Forward Primer
  Primer
attcccactagtgtccatgaga

SEQ ID NO: 15114 - DNA, 19 bp, Artificial sequence  Forward Primer
  Primer
aataatttttgcgtgtcgg

SEQ ID NO: 15115 - DNA, 23 bp, Artificial sequence  Forward Primer
  Primer
agagatcgaatcctcatcttctg

SEQ ID NO: 15116 - DNA, 29 bp, Artificial sequence  Forward Primer
  Primer
taaaaggtgtagctcttacactagtaaca

SEQ ID NO: 15117 - DNA, 18 bp, Artificial sequence  Forward Primer
  Primer
gcttggctggagttggtg

SEQ ID NO: 15118 - DNA, 23 bp, Artificial sequence  Forward Primer
  Primer
aaggctgtgactaaatacctacg

SEQ ID NO: 15119 - DNA, 18 bp, Artificial sequence  Forward Primer
  Primer
acggcatatgttccaacc

SEQ ID NO: 15120 - DNA, 20 bp, Artificial sequence  Forward Primer
  Primer
accaaggaccattctagcag

SEQ ID NO: 15121 - DNA, 20 bp, Artificial sequence  Forward Primer
  Primer
agttctctttcagcgttcct

SEQ ID NO: 15122 - DNA, 24 bp, Artificial sequence  Forward Primer
  Primer
atatttaaatccattcccttgaca

SEQ ID NO: 15123 - DNA, 26 bp, Artificial sequence  Forward Primer
  Primer
ataaaaatgcttaacaggcaaatatc

SEQ ID NO: 15124 - DNA, 24 bp, Artificial sequence  Forward Primer
  Primer
tcaagataatatatatgcagcaaa

SEQ ID NO: 15125 - DNA, 28 bp, Artificial sequence  Forward Primer
  Primer
aatagaaatgatagtttgttctttatgc

SEQ ID NO: 15126 - DNA, 22 bp, Artificial sequence  Forward Primer
  Primer
cactcaagtaaggcaagaacct

SEQ ID NO: 15127 - DNA, 30 bp, Artificial sequence  Forward Primer
  Primer
aattctaacataaaaggttgtatactgtgt

SEQ ID NO: 15128 - DNA, 27 bp, Artificial sequence  Forward Primer
  Primer
taaaaatgttcaaatttctctaagctg

SEQ ID NO: 15129 - DNA, 24 bp, Artificial sequence  Forward Primer
  Primer
aaatagcagtagaacttggagata

SEQ ID NO: 15130 - DNA, 24 bp, Artificial sequence  Forward Primer
  Primer
tttaaagattcactcaacaattag

SEQ ID NO: 15131 - DNA, 28 bp, Artificial sequence  Forward Primer
  Primer
aaacggtacttcttagattgataaattt

SEQ ID NO: 15132 - DNA, 22 bp, Artificial sequence  Forward Primer
  Primer
aaagtgagcataacaaagcctg

SEQ ID NO: 15133 - DNA, 26 bp, Artificial sequence  Forward Primer
  Primer
actgagtcacttttctgtatacctga

SEQ ID NO: 15134 - DNA, 28 bp, Artificial sequence  Forward Primer
  Primer
ttaatataatcctacgataaagggtttt

SEQ ID NO: 15135 - DNA, 24 bp, Artificial sequence  Forward Primer
  Primer
tccagcttgtgtttattcactagt

SEQ ID NO: 15136 - DNA, 30 bp, Artificial sequence  Forward Primer
  Primer
tctttctaacaacacttaaatctaaaactg

SEQ ID NO: 15137 - DNA, 27 bp, Artificial sequence  Forward Primer
  Primer
taataaatcagattggggtgttatatc

SEQ ID NO: 15138 - DNA, 27 bp, Artificial sequence  Forward Primer
  Primer
accaccatatatttggatttaataatc

SEQ ID NO: 15139 - DNA, 28 bp, Artificial sequence  Forward Primer
  Primer
atcaaatctgcatatcaagatattaaac

SEQ ID NO: 15140 - DNA, 25 bp, Artificial sequence  Forward Primer
  Primer
ttaactataacacagaccaatgggt

SEQ ID NO: 15141 - DNA, 22 bp, Artificial sequence  Forward Primer
  Primer
gctagtatttgtttctctggac

SEQ ID NO: 15142 - DNA, 25 bp, Artificial sequence  Forward Primer
  Primer
tattgattgtagagcttcttttgct

SEQ ID NO: 15143 - DNA, 24 bp, Artificial sequence  Forward Primer
  Primer
tgtgtacaggtgatttataaaggc

SEQ ID NO: 15144 - DNA, 28 bp, Artificial sequence  Forward Primer
  Primer
aatagtatgaataaaaagagcacaattc

SEQ ID NO: 15145 - DNA, 21 bp, Artificial sequence  Forward Primer
  Primer
atgttggtaagaaaggaatca

SEQ ID NO: 15146 - DNA, 28 bp, Artificial sequence  Forward Primer
  Primer
taaaagtcaatatggaacaatgataaag

SEQ ID NO: 15147 - DNA, 25 bp, Artificial sequence  Forward Primer
  Primer
aacagataatgagcttcatctaccc

SEQ ID NO: 15148 - DNA, 27 bp, Artificial sequence  Forward Primer
  Primer
atgcatgaacaagagtagatcttaact

SEQ ID NO: 15149 - DNA, 29 bp, Artificial sequence  Forward Primer
  Primer
aaataatctttcctaatatcagaagatcc

SEQ ID NO: 15150 - DNA, 26 bp, Artificial sequence  Forward Primer
  Primer
ctactctagcaataatttccaaagct

SEQ ID NO: 15151 - DNA, 24 bp, Artificial sequence  Forward Primer
  Primer
atcatgtaaaccaaatcactagta

SEQ ID NO: 15152 - DNA, 28 bp, Artificial sequence  Forward Primer
  Primer
tatatcaaggttgtataccaaagaaaga

SEQ ID NO: 15153 - DNA, 18 bp, Artificial sequence  Forward Primer
  Primer
tgcctccaaccacaattc

SEQ ID NO: 15154 - DNA, 22 bp, Artificial sequence  Forward Primer
  Primer
aataaaatcatccaccttcacc

SEQ ID NO: 15155 - DNA, 28 bp, Artificial sequence  Forward Primer
  Primer
catattaacagttatatttgggttgaga

SEQ ID NO: 15156 - DNA, 28 bp, Artificial sequence  Forward Primer
  Primer
aaaattaacttcagaatttattaggctg

SEQ ID NO: 15157 - DNA, 22 bp, Artificial sequence  Forward Primer
  Primer
agaaactgaatttgtggaattc

SEQ ID NO: 15158 - DNA, 20 bp, Artificial sequence  Forward Primer
  Primer
tggcaactgtctcaaaaaca

SEQ ID NO: 15159 - DNA, 22 bp, Artificial sequence  Forward Primer
  Primer
tttatttttggcaactccaaac

SEQ ID NO: 15160 - DNA, 20 bp, Artificial sequence  Forward Primer
  Primer
gaaagtctcttatccccctt

SEQ ID NO: 15161 - DNA, 19 bp, Artificial sequence  Forward Primer
  Primer
cttgatttcgatggcatgg

SEQ ID NO: 15162 - DNA, 25 bp, Artificial sequence  Forward Primer
  Primer
aaaacctaacatattcactacctgg

SEQ ID NO: 15163 - DNA, 23 bp, Artificial sequence  Forward Primer
  Primer
atgcaagtatcacatctaagaat

SEQ ID NO: 15164 - DNA, 24 bp, Artificial sequence  Forward Primer
  Primer
tagtaatgccagagccacaatata

SEQ ID NO: 15165 - DNA, 18 bp, Artificial sequence  Forward Primer
  Primer
atatgcccgtgactccgc

SEQ ID NO: 15166 - DNA, 18 bp, Artificial sequence  Forward Primer
  Primer
aagctcagaagtggctcg

SEQ ID NO: 15167 - DNA, 19 bp, Artificial sequence  Forward Primer
  Primer
atagaggggacaggaggga

SEQ ID NO: 15168 - DNA, 22 bp, Artificial sequence  Forward Primer
  Primer
ttggagatttcccagagatact

SEQ ID NO: 15169 - DNA, 18 bp, Artificial sequence  Forward Primer
  Primer
cgggtgacaaggaagcat

SEQ ID NO: 15170 - DNA, 19 bp, Artificial sequence  Forward Primer
  Primer
atattcccatcaacggctg

SEQ ID NO: 15171 - DNA, 20 bp, Artificial sequence  Forward Primer
  Primer
tatctggccaaatgctgtct

SEQ ID NO: 15172 - DNA, 23 bp, Artificial sequence  Forward Primer
  Primer
aatgtgcaaggtcatgtgttatc

SEQ ID NO: 15173 - DNA, 22 bp, Artificial sequence  Forward Primer
  Primer
attcttttgccttgttctaacc

SEQ ID NO: 15174 - DNA, 23 bp, Artificial sequence  Forward Primer
  Primer
ttttaaaaatgtgatccttggag

SEQ ID NO: 15175 - DNA, 20 bp, Artificial sequence  Forward Primer
  Primer
agcagctgaagcacagaaag

SEQ ID NO: 15176 - DNA, 21 bp, Artificial sequence  Forward Primer
  Primer
tcccttaccattattctgttc

SEQ ID NO: 15177 - DNA, 18 bp, Artificial sequence  Forward Primer
  Primer
aacagctgtcaggaggca

SEQ ID NO: 15178 - DNA, 21 bp, Artificial sequence  Forward Primer
  Primer
aaaccgaattagaaaactcgg

SEQ ID NO: 15179 - DNA, 22 bp, Artificial sequence  Forward Primer
  Primer
agtgggtaagactctgagctcc

SEQ ID NO: 15180 - DNA, 20 bp, Artificial sequence  Forward Primer
  Primer
tagaagagcctcccgagatt

SEQ ID NO: 15181 - DNA, 22 bp, Artificial sequence  Forward Primer
  Primer
ttttccagagggtaatcatcag

SEQ ID NO: 15182 - DNA, 18 bp, Artificial sequence  Forward Primer
  Primer
ygtgtgtaacgtgggcag

SEQ ID NO: 15183 - DNA, 18 bp, Artificial sequence  Forward Primer
  Primer
aaatcgcagctccaggtc

SEQ ID NO: 15184 - DNA, 18 bp, Artificial sequence  Forward Primer
  Primer
tgcagaggtgcagaaaag

SEQ ID NO: 15185 - DNA, 19 bp, Artificial sequence  Forward Primer
  Primer
acttggagcatcgaaaacc

SEQ ID NO: 15186 - DNA, 27 bp, Artificial sequence  Forward Primer
  Primer
caaacaggctatgctttaatgtatatt

SEQ ID NO: 15187 - DNA, 21 bp, Artificial sequence  Forward Primer
  Primer
aaatagtgaatgacaggggga

SEQ ID NO: 15188 - DNA, 28 bp, Artificial sequence  Forward Primer
  Primer
agaagaggatagtgtgatatgtaccttc

SEQ ID NO: 15189 - DNA, 18 bp, Artificial sequence  Forward Primer
  Primer
tgattggcagtgtgaggc

SEQ ID NO: 15190 - DNA, 23 bp, Artificial sequence  Forward Primer
  Primer
acatgaaactcttcttctgtaaa

SEQ ID NO: 15191 - DNA, 22 bp, Artificial sequence  Forward Primer
  Primer
ttttgagcacattgttctaagc

SEQ ID NO: 15192 - DNA, 26 bp, Artificial sequence  Forward Primer
  Primer
taatacttgtagcttcaggaaattga

SEQ ID NO: 15193 - DNA, 28 bp, Artificial sequence  Forward Primer
  Primer
tcgattattaatatttattcaccctcta

SEQ ID NO: 15194 - DNA, 26 bp, Artificial sequence  Forward Primer
  Primer
ttcagaatgtagagtgtttttgtgtt

SEQ ID NO: 15195 - DNA, 24 bp, Artificial sequence  Forward Primer
  Primer
aaaaaacacattgacaacagtttc

SEQ ID NO: 15196 - DNA, 28 bp, Artificial sequence  Forward Primer
  Primer
attatttcaatagaaaaatataggcagg

SEQ ID NO: 15197 - DNA, 21 bp, Artificial sequence  Forward Primer
  Primer
taaacaaggctgccaaatatt

SEQ ID NO: 15198 - DNA, 24 bp, Artificial sequence  Forward Primer
  Primer
aaatatatgtgaaaacacacaggg

SEQ ID NO: 15199 - DNA, 22 bp, Artificial sequence  Forward Primer
  Primer
tttttcgaggtccgattttata

SEQ ID NO: 15200 - DNA, 20 bp, Artificial sequence  Forward Primer
  Primer
tcagaagctaagcagggttg

SEQ ID NO: 15201 - DNA, 25 bp, Artificial sequence  Forward Primer
  Primer
agatttccaagtagcctttctatct

SEQ ID NO: 15202 - DNA, 19 bp, Artificial sequence  Forward Primer
  Primer
aaagcragcattgcgttaa

SEQ ID NO: 15203 - DNA, 20 bp, Artificial sequence  Forward Primer
  Primer
atccacccttttgtaggtgt

SEQ ID NO: 15204 - DNA, 19 bp, Artificial sequence  Forward Primer
  Primer
taaagccaatgcaaaagca

SEQ ID NO: 15205 - DNA, 25 bp, Artificial sequence  Forward Primer
  Primer
aaaccctgaatagaaaataagcttc

SEQ ID NO: 15206 - DNA, 30 bp, Artificial sequence  Forward Primer
  Primer
ttccctagtttagtagaaagtcttaattac

SEQ ID NO: 15207 - DNA, 24 bp, Artificial sequence  Forward Primer
  Primer
atgataaactttgcactctgtttt

SEQ ID NO: 15208 - DNA, 24 bp, Artificial sequence  Forward Primer
  Primer
aaaggggaaattagtggaaataat

SEQ ID NO: 15209 - DNA, 19 bp, Artificial sequence  Forward Primer
  Primer
atacccaagcccaaaatct

SEQ ID NO: 15210 - DNA, 19 bp, Artificial sequence  Forward Primer
  Primer
gctctgtgagtgtcttggt

SEQ ID NO: 15211 - DNA, 23 bp, Artificial sequence  Forward Primer
  Primer
tgcctactaatgatttctattct

SEQ ID NO: 15212 - DNA, 21 bp, Artificial sequence  Forward Primer
  Primer
cgaggtactccttagatgcta

SEQ ID NO: 15213 - DNA, 21 bp, Artificial sequence  Forward Primer
  Primer
ctttgtcatttaatccaaaca

SEQ ID NO: 15214 - DNA, 22 bp, Artificial sequence  Forward Primer
  Primer
attcagaagcaagttcacaacc

SEQ ID NO: 15215 - DNA, 19 bp, Artificial sequence  Forward Primer
  Primer
cctaggcacaccattgtct

SEQ ID NO: 15216 - DNA, 30 bp, Artificial sequence  Forward Primer
  Primer
agctttaagaaataataatagtaataactg

SEQ ID NO: 15217 - DNA, 23 bp, Artificial sequence  Forward Primer
  Primer
atcatcaaggcaaataatcaaat

SEQ ID NO: 15218 - DNA, 26 bp, Artificial sequence  Forward Primer
  Primer
aacattgtcttgtggttttattttac

SEQ ID NO: 15219 - DNA, 20 bp, Artificial sequence  Forward Primer
  Primer
tgcttcaatatctccaggca

SEQ ID NO: 15220 - DNA, 25 bp, Artificial sequence  Forward Primer
  Primer
tcttycttttgattaggcatattat

SEQ ID NO: 15221 - DNA, 24 bp, Artificial sequence  Forward Primer
  Primer
ttttctaatgaaaaaattctgtgc

SEQ ID NO: 15222 - DNA, 24 bp, Artificial sequence  Forward Primer
  Primer
ataggacacagaagaacaaaaaca

SEQ ID NO: 15223 - DNA, 21 bp, Artificial sequence  Forward Primer
  Primer
agaataagcagtcaaggaatg

SEQ ID NO: 15224 - DNA, 20 bp, Artificial sequence  Forward Primer
  Primer
cattgttccatgaaaggacc

SEQ ID NO: 15225 - DNA, 23 bp, Artificial sequence  Forward Primer
  Primer
aatcagtaaacaacaaaagccaa

SEQ ID NO: 15226 - DNA, 23 bp, Artificial sequence  Forward Primer
  Primer
attacaatggtcagtttagagcc

SEQ ID NO: 15227 - DNA, 19 bp, Artificial sequence  Forward Primer
  Primer
accccaggcatctgaaata

SEQ ID NO: 15228 - DNA, 19 bp, Artificial sequence  Forward Primer
  Primer
ggatctagtgtggggacac

SEQ ID NO: 15229 - DNA, 19 bp, Artificial sequence  Forward Primer
  Primer
aagctggggttggttactg

SEQ ID NO: 15230 - DNA, 19 bp, Artificial sequence  Forward Primer
  Primer
ttccactccaaacaccaga

SEQ ID NO: 15231 - DNA, 26 bp, Artificial sequence  Forward Primer
  Primer
aaaaattgttgatgaaactagggtag

SEQ ID NO: 15232 - DNA, 24 bp, Artificial sequence  Forward Primer
  Primer
attcamgtcttagtgaataatgga

SEQ ID NO: 15233 - DNA, 19 bp, Artificial sequence  Forward Primer
  Primer
ctaaattttggagcaggca

SEQ ID NO: 15234 - DNA, 26 bp, Artificial sequence  Forward Primer
  Primer
agtcaagagggttctttatgtcatag

SEQ ID NO: 15235 - DNA, 25 bp, Artificial sequence  Forward Primer
  Primer
attctatgggttttttggtaagaac

SEQ ID NO: 15236 - DNA, 26 bp, Artificial sequence  Forward Primer
  Primer
aaatgacacatatgtttaaaatggag

SEQ ID NO: 15237 - DNA, 24 bp, Artificial sequence  Forward Primer
  Primer
atctcagtcttcagagtggaattt

SEQ ID NO: 15238 - DNA, 21 bp, Artificial sequence  Forward Primer
  Primer
aatgcacccttaattctttcc

SEQ ID NO: 15239 - DNA, 18 bp, Artificial sequence  Forward Primer
  Primer
aaggtcggggtggctgca

SEQ ID NO: 15240 - DNA, 19 bp, Artificial sequence  Forward Primer
  Primer
acagccctgctcaaaagac

SEQ ID NO: 15241 - DNA, 18 bp, Artificial sequence  Forward Primer
  Primer
aattcctatttgccgcca

SEQ ID NO: 15242 - DNA, 25 bp, Artificial sequence  Forward Primer
  Primer
aagttattccattaggaaaaggaga

SEQ ID NO: 15243 - DNA, 18 bp, Artificial sequence  Forward Primer
  Primer
aaagctggaggggacagg

SEQ ID NO: 15244 - DNA, 27 bp, Artificial sequence  Forward Primer
  Primer
tttgaatctactaaagaaggaaattga

SEQ ID NO: 15245 - DNA, 22 bp, Artificial sequence  Forward Primer
  Primer
ttttcctgctaatgactgactc

SEQ ID NO: 15246 - DNA, 25 bp, Artificial sequence  Forward Primer
  Primer
aaactatgatcccataagatgtgtg

SEQ ID NO: 15247 - DNA, 26 bp, Artificial sequence  Forward Primer
  Primer
ttcttaaaaaatactggaacaatgag

SEQ ID NO: 15248 - DNA, 28 bp, Artificial sequence  Forward Primer
  Primer
aacttgatgtgaatatgtaaataccaag

SEQ ID NO: 15249 - DNA, 21 bp, Artificial sequence  Forward Primer
  Primer
tattttggtcgtttccataac

SEQ ID NO: 15250 - DNA, 20 bp, Artificial sequence  Forward Primer
  Primer
ccatttaggtcaccacagtt

SEQ ID NO: 15251 - DNA, 27 bp, Artificial sequence  Forward Primer
  Primer
atctatttgaaaagattaaatgagggt

SEQ ID NO: 15252 - DNA, 27 bp, Artificial sequence  Forward Primer
  Primer
ataattgctttacagaaaaccatagtg

SEQ ID NO: 15253 - DNA, 26 bp, Artificial sequence  Forward Primer
  Primer
taaatcaaggatttagatgcattagg

SEQ ID NO: 15254 - DNA, 26 bp, Artificial sequence  Forward Primer
  Primer
attgaacagtactgaaattgattcag

SEQ ID NO: 15255 - DNA, 29 bp, Artificial sequence  Forward Primer
  Primer
agaggtacattagatactaatagagtcat

SEQ ID NO: 15256 - DNA, 24 bp, Artificial sequence  Forward Primer
  Primer
atcttgaattgatttatttttgcc

SEQ ID NO: 15257 - DNA, 18 bp, Artificial sequence  Forward Primer
  Primer
ttccatgttgcccgtttt

SEQ ID NO: 15258 - DNA, 30 bp, Artificial sequence  Forward Primer
  Primer
taacagtatatcataggaaagtaccaatac

SEQ ID NO: 15259 - DNA, 22 bp, Artificial sequence  Forward Primer
  Primer
taacattcatgggaaggaaaag

SEQ ID NO: 15260 - DNA, 24 bp, Artificial sequence  Forward Primer
  Primer
acatgttctttgatccataagttt

SEQ ID NO: 15261 - DNA, 24 bp, Artificial sequence  Forward Primer
  Primer
atttaaggcttgcctatgttctaa

SEQ ID NO: 15262 - DNA, 19 bp, Artificial sequence  Forward Primer
  Primer
tggaaccattgcttctagg

SEQ ID NO: 15263 - DNA, 25 bp, Artificial sequence  Forward Primer
  Primer
atgtactaggacctgagagaattca

SEQ ID NO: 15264 - DNA, 30 bp, Artificial sequence  Forward Primer
  Primer
ttcctttcatatatctctttagtctttctc

SEQ ID NO: 15265 - DNA, 28 bp, Artificial sequence  Forward Primer
  Primer
tattagaaaagctacctactttcatgtg

SEQ ID NO: 15266 - DNA, 25 bp, Artificial sequence  Forward Primer
  Primer
tgacattttcttaatkttatggaga

SEQ ID NO: 15267 - DNA, 24 bp, Artificial sequence  Forward Primer
  Primer
aaaagattgctttaattttccatg

SEQ ID NO: 15268 - DNA, 30 bp, Artificial sequence  Forward Primer
  Primer
atatatagtaggtccttgttattaaatatc

SEQ ID NO: 15269 - DNA, 23 bp, Artificial sequence  Forward Primer
  Primer
aaaagatatgaagacaaaacacc

SEQ ID NO: 15270 - DNA, 30 bp, Artificial sequence  Forward Primer
  Primer
attggtcaattccagagtatatattaactt

SEQ ID NO: 15271 - DNA, 20 bp, Artificial sequence  Forward Primer
  Primer
acagattcatgtccgttgga

SEQ ID NO: 15272 - DNA, 24 bp, Artificial sequence  Forward Primer
  Primer
aaagaattatttgacccaaaatgt

SEQ ID NO: 15273 - DNA, 24 bp, Artificial sequence  Forward Primer
  Primer
atgcaccttttattgcatttataa

SEQ ID NO: 15274 - DNA, 29 bp, Artificial sequence  Forward Primer
  Primer
acttatatctatctgctcattcataaagc

SEQ ID NO: 15275 - DNA, 19 bp, Artificial sequence  Forward Primer
  Primer
acagcagatgcttggtcat

SEQ ID NO: 15276 - DNA, 28 bp, Artificial sequence  Forward Primer
  Primer
ctttaaattattccaaatttcactatgc

SEQ ID NO: 15277 - DNA, 24 bp, Artificial sequence  Forward Primer
  Primer
gattgaagcaaaatattcctaatt

SEQ ID NO: 15278 - DNA, 25 bp, Artificial sequence  Forward Primer
  Primer
ttaaataacaacattgcctgtacaa

SEQ ID NO: 15279 - DNA, 18 bp, Artificial sequence  Forward Primer
  Primer
agccttgtccaggcagac

SEQ ID NO: 15280 - DNA, 20 bp, Artificial sequence  Forward Primer
  Primer
atggatcttgagttgggact

SEQ ID NO: 15281 - DNA, 18 bp, Artificial sequence  Forward Primer
  Primer
ttgcaatgctcctctgga

SEQ ID NO: 15282 - DNA, 18 bp, Artificial sequence  Forward Primer
  Primer
tgtgtgtaaaggggccag

SEQ ID NO: 15283 - DNA, 18 bp, Artificial sequence  Forward Primer
  Primer
ttttccaaaggtggcagg

SEQ ID NO: 15284 - DNA, 18 bp, Artificial sequence  Forward Primer
  Primer
cagcttcaagcagaaccc

SEQ ID NO: 15285 - DNA, 18 bp, Artificial sequence  Forward Primer
  Primer
ttgcatgtgcttgcattc

SEQ ID NO: 15286 - DNA, 21 bp, Artificial sequence  Forward Primer
  Primer
tcgatttccatgtaaagaccc

SEQ ID NO: 15287 - DNA, 20 bp, Artificial sequence  Forward Primer
  Primer
aagggttaacagatttgggg

SEQ ID NO: 15288 - DNA, 19 bp, Artificial sequence  Forward Primer
  Primer
aacaatgaggggctggtag

SEQ ID NO: 15289 - DNA, 22 bp, Artificial sequence  Forward Primer
  Primer
gccttgttgagttcttttaatt

SEQ ID NO: 15290 - DNA, 23 bp, Artificial sequence  Forward Primer
  Primer
taggaggttacagatatgtgcgt

SEQ ID NO: 15291 - DNA, 25 bp, Artificial sequence  Forward Primer
  Primer
tatctaagcatctcacatgaacttg

SEQ ID NO: 15292 - DNA, 18 bp, Artificial sequence  Forward Primer
  Primer
tcgctgccttgacagaat

SEQ ID NO: 15293 - DNA, 19 bp, Artificial sequence  Forward Primer
  Primer
ctgagctcctgagaaggct

SEQ ID NO: 15294 - DNA, 19 bp, Artificial sequence  Forward Primer
  Primer
accaccttaaatttccgat

SEQ ID NO: 15295 - DNA, 22 bp, Artificial sequence  Forward Primer
  Primer
aatcaatccaggactgttcttg

SEQ ID NO: 15296 - DNA, 18 bp, Artificial sequence  Forward Primer
  Primer
aaagcacagacgcccgca

SEQ ID NO: 15297 - DNA, 19 bp, Artificial sequence  Forward Primer
  Primer
aaactgaagctgggtcttg

SEQ ID NO: 15298 - DNA, 24 bp, Artificial sequence  Forward Primer
  Primer
tattttttgctaatgattgctttg

SEQ ID NO: 15299 - DNA, 22 bp, Artificial sequence  Forward Primer
  Primer
atatttgatgcccagactacga

SEQ ID NO: 15300 - DNA, 20 bp, Artificial sequence  Forward Primer
  Primer
tgcatatgtaagcacaacgg

SEQ ID NO: 15301 - DNA, 26 bp, Artificial sequence  Forward Primer
  Primer
ggctgaaaaagtatttgaagaaataa

SEQ ID NO: 15302 - DNA, 26 bp, Artificial sequence  Forward Primer
  Primer
cagattctttaccatttgaactacaa

SEQ ID NO: 15303 - DNA, 26 bp, Artificial sequence  Forward Primer
  Primer
aggtcatataatatctggatgttgat

SEQ ID NO: 15304 - DNA, 24 bp, Artificial sequence  Forward Primer
  Primer
tggtggtaatgagatcatttaata

SEQ ID NO: 15305 - DNA, 23 bp, Artificial sequence  Forward Primer
  Primer
tttacaccatgtttatcaagaga

SEQ ID NO: 15306 - DNA, 23 bp, Artificial sequence  Forward Primer
  Primer
tgaatatctggatgctaacaacc

SEQ ID NO: 15307 - DNA, 30 bp, Artificial sequence  Forward Primer
  Primer
acaatcctgtagagaaatgtaagttactaa

SEQ ID NO: 15308 - DNA, 20 bp, Artificial sequence  Forward Primer
  Primer
ttactctcccaattcccctg

SEQ ID NO: 15309 - DNA, 28 bp, Artificial sequence  Forward Primer
  Primer
ttttagttctttaattttggagaagaag

SEQ ID NO: 15310 - DNA, 24 bp, Artificial sequence  Forward Primer
  Primer
acacactactctcttggaatctgg

SEQ ID NO: 15311 - DNA, 22 bp, Artificial sequence  Forward Primer
  Primer
taaaaggggtctacttcggttt

SEQ ID NO: 15312 - DNA, 23 bp, Artificial sequence  Forward Primer
  Primer
acaagtaaagtagacttccacag

SEQ ID NO: 15313 - DNA, 23 bp, Artificial sequence  Forward Primer
  Primer
aaaacttattactgggaggctca

SEQ ID NO: 15314 - DNA, 20 bp, Artificial sequence  Forward Primer
  Primer
ctccatctgtagccacttca

SEQ ID NO: 15315 - DNA, 25 bp, Artificial sequence  Forward Primer
  Primer
aaaattctggatctgaccttctagt

SEQ ID NO: 15316 - DNA, 19 bp, Artificial sequence  Forward Primer
  Primer
aggagaaagccacataacc

SEQ ID NO: 15317 - DNA, 21 bp, Artificial sequence  Forward Primer
  Primer
agcaaatttcaaaaccatgac

SEQ ID NO: 15318 - DNA, 24 bp, Artificial sequence  Forward Primer
  Primer
agtttgggtaaatgttatctattg

SEQ ID NO: 15319 - DNA, 25 bp, Artificial sequence  Forward Primer
  Primer
tatttctgctaccgctaactttact

SEQ ID NO: 15320 - DNA, 23 bp, Artificial sequence  Forward Primer
  Primer
cccaagatttattttcatttcct

SEQ ID NO: 15321 - DNA, 24 bp, Artificial sequence  Forward Primer
  Primer
tacagctatagggtagaaagggtg

SEQ ID NO: 15322 - DNA, 22 bp, Artificial sequence  Forward Primer
  Primer
ccaactgacatctgttttctga

SEQ ID NO: 15323 - DNA, 23 bp, Artificial sequence  Forward Primer
  Primer
aaaaggaaagatatacccatttg

SEQ ID NO: 15324 - DNA, 18 bp, Artificial sequence  Forward Primer
  Primer
aaaaatctgccattgcca

SEQ ID NO: 15325 - DNA, 25 bp, Artificial sequence  Forward Primer
  Primer
gcttctggaaatcattaatttcttt

SEQ ID NO: 15326 - DNA, 18 bp, Artificial sequence  Forward Primer
  Primer
atggcgtgtggtggggga

SEQ ID NO: 15327 - DNA, 24 bp, Artificial sequence  Forward Primer
  Primer
aactgtaattcaaaaacatacatg

SEQ ID NO: 15328 - DNA, 26 bp, Artificial sequence  Forward Primer
  Primer
tgtgtaaatctcagttctcaattacc

SEQ ID NO: 15329 - DNA, 25 bp, Artificial sequence  Forward Primer
  Primer
tatagatggctctataaaacattgg

SEQ ID NO: 15330 - DNA, 18 bp, Artificial sequence  Forward Primer
  Primer
aatgcaaacgaccagagg

SEQ ID NO: 15331 - DNA, 24 bp, Artificial sequence  Forward Primer
  Primer
gaacatcagaktcgtrattttata

SEQ ID NO: 15332 - DNA, 25 bp, Artificial sequence  Forward Primer
  Primer
agagatgaaattaaaactagagcac

SEQ ID NO: 15333 - DNA, 23 bp, Artificial sequence  Forward Primer
  Primer
gtattattcaggataggcaagat

SEQ ID NO: 15334 - DNA, 28 bp, Artificial sequence  Forward Primer
  Primer
gatgtgagtttatagcttttgtttaaaa

SEQ ID NO: 15335 - DNA, 23 bp, Artificial sequence  Forward Primer
  Primer
ataaacgctcattgatatgacct

SEQ ID NO: 15336 - DNA, 26 bp, Artificial sequence  Forward Primer
  Primer
aaactaattgatatggagatctggac

SEQ ID NO: 15337 - DNA, 20 bp, Artificial sequence  Forward Primer
  Primer
ttttctacctcgcagcaaac

SEQ ID NO: 15338 - DNA, 19 bp, Artificial sequence  Forward Primer
  Primer
actgtcatgccctgatttc

SEQ ID NO: 15339 - DNA, 19 bp, Artificial sequence  Forward Primer
  Primer
gcacatcatcttgaaaaaa

SEQ ID NO: 15340 - DNA, 23 bp, Artificial sequence  Forward Primer
  Primer
aatggggtattaaacagtgaaaa

SEQ ID NO: 15341 - DNA, 30 bp, Artificial sequence  Forward Primer
  Primer
tgataaagtaagaagtgtattaaagatgac

SEQ ID NO: 15342 - DNA, 27 bp, Artificial sequence  Forward Primer
  Primer
atatgagttttaattccgttaatcctc

SEQ ID NO: 15343 - DNA, 18 bp, Artificial sequence  Forward Primer
  Primer
agggtggctcgtggctct

SEQ ID NO: 15344 - DNA, 25 bp, Artificial sequence  Forward Primer
  Primer
tttatagtgtttgctttaatttgcc

SEQ ID NO: 15345 - DNA, 27 bp, Artificial sequence  Forward Primer
  Primer
ttaaaaaactcaccaagttaaaactgt

SEQ ID NO: 15346 - DNA, 20 bp, Artificial sequence  Forward Primer
  Primer
tgtgcrggattttcactagt

SEQ ID NO: 15347 - DNA, 18 bp, Artificial sequence  Forward Primer
  Primer
aggtcagtggggatgcaa

SEQ ID NO: 15348 - DNA, 18 bp, Artificial sequence  Forward Primer
  Primer
taacccacgccaatcctg

SEQ ID NO: 15349 - DNA, 18 bp, Artificial sequence  Forward Primer
  Primer
tggcagggagggactagt

SEQ ID NO: 15350 - DNA, 19 bp, Artificial sequence  Forward Primer
  Primer
aatgcactcacgagctgaa

SEQ ID NO: 15351 - DNA, 20 bp, Artificial sequence  Forward Primer
  Primer
tttgctttcaaggtttggac

SEQ ID NO: 15352 - DNA, 18 bp, Artificial sequence  Forward Primer
  Primer
tttggagggcaagcagct

SEQ ID NO: 15353 - DNA, 20 bp, Artificial sequence  Forward Primer
  Primer
aactgcttgaatgtgtgcac

SEQ ID NO: 15354 - DNA, 21 bp, Artificial sequence  Forward Primer
  Primer
aagacgtccatgtcctagatc

SEQ ID NO: 15355 - DNA, 28 bp, Artificial sequence  Forward Primer
  Primer
ataggtgaaaattgtagaaggaaaataa

SEQ ID NO: 15356 - DNA, 24 bp, Artificial sequence  Forward Primer
  Primer
ttgacttaaggatgcttctacaaa

SEQ ID NO: 15357 - DNA, 18 bp, Artificial sequence  Forward Primer
  Primer
tgtgtgtgttccccaacc

SEQ ID NO: 15358 - DNA, 19 bp, Artificial sequence  Forward Primer
  Primer
tggaacagtccatgagttc

SEQ ID NO: 15359 - DNA, 28 bp, Artificial sequence  Forward Primer
  Primer
cttcatttgtaagacctgagtttatcta

SEQ ID NO: 15360 - DNA, 26 bp, Artificial sequence  Forward Primer
  Primer
atatcatttctttacacaagaaccaa

SEQ ID NO: 15361 - DNA, 24 bp, Artificial sequence  Forward Primer
  Primer
aataatgtgattccaagtgtgaca

SEQ ID NO: 15362 - DNA, 22 bp, Artificial sequence  Forward Primer
  Primer
aaaccatcttctttagggaact

SEQ ID NO: 15363 - DNA, 20 bp, Artificial sequence  Forward Primer
  Primer
tggctcctctagattaagga

SEQ ID NO: 15364 - DNA, 26 bp, Artificial sequence  Forward Primer
  Primer
tttttaaagtgctgttacttcaagag

SEQ ID NO: 15365 - DNA, 25 bp, Artificial sequence  Forward Primer
  Primer
gacatactaaagacttggtagaaaa

SEQ ID NO: 15366 - DNA, 30 bp, Artificial sequence  Forward Primer
  Primer
tgacaacatagatgttcttataatattgtt

SEQ ID NO: 15367 - DNA, 20 bp, Artificial sequence  Forward Primer
  Primer
tcaggcaataaattttgtca

SEQ ID NO: 15368 - DNA, 24 bp, Artificial sequence  Forward Primer
  Primer
tccatggtctgataaaataagatt

SEQ ID NO: 15369 - DNA, 23 bp, Artificial sequence  Forward Primer
  Primer
agcttgagaagagtgatatcttg

SEQ ID NO: 15370 - DNA, 27 bp, Artificial sequence  Forward Primer
  Primer
ttataaattgcaagctgtacaaatcta

SEQ ID NO: 15371 - DNA, 24 bp, Artificial sequence  Forward Primer
  Primer
tgaaatcacagccatatcaactag

SEQ ID NO: 15372 - DNA, 28 bp, Artificial sequence  Forward Primer
  Primer
ggtatatttttcaaaatctttttctgtc

SEQ ID NO: 15373 - DNA, 24 bp, Artificial sequence  Forward Primer
  Primer
ttgtagttaggatgggtgttcttt

SEQ ID NO: 15374 - DNA, 20 bp, Artificial sequence  Forward Primer
  Primer
tgtactctgtggaagggctt

SEQ ID NO: 15375 - DNA, 28 bp, Artificial sequence  Forward Primer
  Primer
ttaaaagaattaaggaaatctgtatgtg

SEQ ID NO: 15376 - DNA, 20 bp, Artificial sequence  Forward Primer
  Primer
aatcagcttcatgcacagag

SEQ ID NO: 15377 - DNA, 27 bp, Artificial sequence  Forward Primer
  Primer
tatttaagaggggatttacaactctac

SEQ ID NO: 15378 - DNA, 27 bp, Artificial sequence  Forward Primer
  Primer
taaaattatctggggagtaataactgt

SEQ ID NO: 15379 - DNA, 25 bp, Artificial sequence  Forward Primer
  Primer
ttttaaccaccattttacagaagaa

SEQ ID NO: 15380 - DNA, 29 bp, Artificial sequence  Forward Primer
  Primer
tataaaactctctactcaataatggaagg

SEQ ID NO: 15381 - DNA, 23 bp, Artificial sequence  Forward Primer
  Primer
ttattaaatagcaagatggttca

SEQ ID NO: 15382 - DNA, 18 bp, Artificial sequence  Forward Primer
  Primer
tgcaagggagtcagagca

SEQ ID NO: 15383 - DNA, 30 bp, Artificial sequence  Forward Primer
  Primer
cagaaactaggtaagtagaaattatgaaat

SEQ ID NO: 15384 - DNA, 27 bp, Artificial sequence  Forward Primer
  Primer
ttaattagatccactaacttctggaaa

SEQ ID NO: 15385 - DNA, 25 bp, Artificial sequence  Forward Primer
  Primer
ccataaagtttttattttgtttccc

SEQ ID NO: 15386 - DNA, 24 bp, Artificial sequence  Forward Primer
  Primer
aattgttttcttttgtcttcattg

SEQ ID NO: 15387 - DNA, 28 bp, Artificial sequence  Forward Primer
  Primer
atattatcacaactgattccaaacataa

SEQ ID NO: 15388 - DNA, 30 bp, Artificial sequence  Forward Primer
  Primer
tgtacagttgatgtaagtataattaagtag

SEQ ID NO: 15389 - DNA, 25 bp, Artificial sequence  Forward Primer
  Primer
tggagaatgtggatacatgtctata

SEQ ID NO: 15390 - DNA, 20 bp, Artificial sequence  Forward Primer
  Primer
ttaagctccgagacaaatta

SEQ ID NO: 15391 - DNA, 20 bp, Artificial sequence  Forward Primer
  Primer
taacatggcagctggtttct

SEQ ID NO: 15392 - DNA, 20 bp, Artificial sequence  Forward Primer
  Primer
tcaccaagaatttgtcattt

SEQ ID NO: 15393 - DNA, 26 bp, Artificial sequence  Forward Primer
  Primer
tcatgtcagatttttcaaataagatg

SEQ ID NO: 15394 - DNA, 28 bp, Artificial sequence  Forward Primer
  Primer
atgaataactatttgaagaggtaaaaac

SEQ ID NO: 15395 - DNA, 24 bp, Artificial sequence  Forward Primer
  Primer
agaaagtgagtcaggatttctttg

SEQ ID NO: 15396 - DNA, 18 bp, Artificial sequence  Forward Primer
  Primer
aggagtgggaacaccctg

SEQ ID NO: 15397 - DNA, 18 bp, Artificial sequence  Forward Primer
  Primer
acgcctccatttcatcca

SEQ ID NO: 15398 - DNA, 22 bp, Artificial sequence  Forward Primer
  Primer
ttatttggggatcttaaatgca

SEQ ID NO: 15399 - DNA, 21 bp, Artificial sequence  Forward Primer
  Primer
atccttttgttcactgccttc

SEQ ID NO: 15400 - DNA, 18 bp, Artificial sequence  Forward Primer
  Primer
ttccactctgccagcagg

SEQ ID NO: 15401 - DNA, 18 bp, Artificial sequence  Forward Primer
  Primer
acccgctcctgcagcgat

SEQ ID NO: 15402 - DNA, 24 bp, Artificial sequence  Forward Primer
  Primer
tagattgtttaagaagcaggagct

SEQ ID NO: 15403 - DNA, 24 bp, Artificial sequence  Forward Primer
  Primer
ttataggaggctgtgataattaga

SEQ ID NO: 15404 - DNA, 28 bp, Artificial sequence  Forward Primer
  Primer
atcattttgaatattatttagacttgcc

SEQ ID NO: 15405 - DNA, 19 bp, Artificial sequence  Forward Primer
  Primer
tttgactcactggacccct

SEQ ID NO: 15406 - DNA, 20 bp, Artificial sequence  Forward Primer
  Primer
tatcaaggcggayataagtg

SEQ ID NO: 15407 - DNA, 21 bp, Artificial sequence  Forward Primer
  Primer
tagaagtctaggctccccacc

SEQ ID NO: 15408 - DNA, 20 bp, Artificial sequence  Forward Primer
  Primer
cggtttagtagaggtgggtc

SEQ ID NO: 15409 - DNA, 24 bp, Artificial sequence  Forward Primer
  Primer
attatgagcaaaactgggttattt

SEQ ID NO: 15410 - DNA, 27 bp, Artificial sequence  Forward Primer
  Primer
accacaatctcctttaataatgaagta

SEQ ID NO: 15411 - DNA, 25 bp, Artificial sequence  Forward Primer
  Primer
aattttgtattgggctgtactgtat

SEQ ID NO: 15412 - DNA, 30 bp, Artificial sequence  Forward Primer
  Primer
atgtcttagtttagttagcttgagactata

SEQ ID NO: 15413 - DNA, 24 bp, Artificial sequence  Forward Primer
  Primer
tttataaaaatccttgtgggaaat

SEQ ID NO: 15414 - DNA, 19 bp, Artificial sequence  Forward Primer
  Primer
atacgttttggycaatgca

SEQ ID NO: 15415 - DNA, 28 bp, Artificial sequence  Forward Primer
  Primer
aaatgatgagttcattaaaaagagatac

SEQ ID NO: 15416 - DNA, 22 bp, Artificial sequence  Forward Primer
  Primer
attaacttgttatccccatgca

SEQ ID NO: 15417 - DNA, 24 bp, Artificial sequence  Forward Primer
  Primer
taaagtagttcacccttcctgatc

SEQ ID NO: 15418 - DNA, 18 bp, Artificial sequence  Forward Primer
  Primer
tgggcgattcacagaaat

SEQ ID NO: 15419 - DNA, 21 bp, Artificial sequence  Forward Primer
  Primer
atgagatgccattgtctaaaa

SEQ ID NO: 15420 - DNA, 24 bp, Artificial sequence  Forward Primer
  Primer
attatttaccactgagtcacctgg

SEQ ID NO: 15421 - DNA, 25 bp, Artificial sequence  Forward Primer
  Primer
tcaaaatatttactgtctggtcctt

SEQ ID NO: 15422 - DNA, 24 bp, Artificial sequence  Forward Primer
  Primer
tcgttgtaaattaataaaatggcg

SEQ ID NO: 15423 - DNA, 22 bp, Artificial sequence  Forward Primer
  Primer
ttccacccagaaaatttaagtg

SEQ ID NO: 15424 - DNA, 22 bp, Artificial sequence  Forward Primer
  Primer
tgggaaaacaaagtgtgtgtaa

SEQ ID NO: 15425 - DNA, 30 bp, Artificial sequence  Forward Primer
  Primer
atgtgtataatctgtcaatattatttgtag

SEQ ID NO: 15426 - DNA, 24 bp, Artificial sequence  Forward Primer
  Primer
caacattacatggtcaataaaaaa

SEQ ID NO: 15427 - DNA, 24 bp, Artificial sequence  Forward Primer
  Primer
tggttgtttctctgtctagtagga

SEQ ID NO: 15428 - DNA, 26 bp, Artificial sequence  Forward Primer
  Primer
tttaaagtaaatatcttcatccccag

SEQ ID NO: 15429 - DNA, 20 bp, Artificial sequence  Forward Primer
  Primer
agaggaggcagaaaaggaaa

SEQ ID NO: 15430 - DNA, 25 bp, Artificial sequence  Forward Primer
  Primer
tatggagagagattctctaagtgag

SEQ ID NO: 15431 - DNA, 25 bp, Artificial sequence  Forward Primer
  Primer
ttaaatccccacttattgtgtaaat

SEQ ID NO: 15432 - DNA, 26 bp, Artificial sequence  Forward Primer
  Primer
ttgtatttatccaatacctgttaatg

SEQ ID NO: 15433 - DNA, 25 bp, Artificial sequence  Forward Primer
  Primer
ttccttaatttcatgtgacttaaca

SEQ ID NO: 15434 - DNA, 24 bp, Artificial sequence  Forward Primer
  Primer
tttaaaattcaggaaaccagctac

SEQ ID NO: 15435 - DNA, 22 bp, Artificial sequence  Forward Primer
  Primer
aaaggcagacaaacaccatagt

SEQ ID NO: 15436 - DNA, 30 bp, Artificial sequence  Forward Primer
  Primer
tcaagttctgagtatttgagtatagattat

SEQ ID NO: 15437 - DNA, 26 bp, Artificial sequence  Forward Primer
  Primer
tttcttacattttctacctctgttga

SEQ ID NO: 15438 - DNA, 20 bp, Artificial sequence  Forward Primer
  Primer
atctccatatgtgattggct

SEQ ID NO: 15439 - DNA, 28 bp, Artificial sequence  Forward Primer
  Primer
attaagtcctttataactttgacatctt

SEQ ID NO: 15440 - DNA, 22 bp, Artificial sequence  Forward Primer
  Primer
ctcctttgaaaaatcagagtac

SEQ ID NO: 15441 - DNA, 25 bp, Artificial sequence  Forward Primer
  Primer
ttttcctcactgatacagaagactg

SEQ ID NO: 15442 - DNA, 18 bp, Artificial sequence  Forward Primer
  Primer
tctgggctcagaaaatgc

SEQ ID NO: 15443 - DNA, 26 bp, Artificial sequence  Forward Primer
  Primer
cttaagcaaatcaattcatatctttg

SEQ ID NO: 15444 - DNA, 26 bp, Artificial sequence  Forward Primer
  Primer
aatgatgagagagacaagatatgtga

SEQ ID NO: 15445 - DNA, 26 bp, Artificial sequence  Forward Primer
  Primer
aatccagtactttatcacatcttcct

SEQ ID NO: 15446 - DNA, 21 bp, Artificial sequence  Forward Primer
  Primer
ttagaaagcttttagcgtgtt

SEQ ID NO: 15447 - DNA, 24 bp, Artificial sequence  Forward Primer
  Primer
atttcaagcctcttgattagatga

SEQ ID NO: 15448 - DNA, 24 bp, Artificial sequence  Forward Primer
  Primer
acatatggctagaaaacctagtct

SEQ ID NO: 15449 - DNA, 21 bp, Artificial sequence  Forward Primer
  Primer
ggtgtgattttaaggtcttga

SEQ ID NO: 15450 - DNA, 18 bp, Artificial sequence  Forward Primer
  Primer
ggcagggccagatcgatg

SEQ ID NO: 15451 - DNA, 18 bp, Artificial sequence  Forward Primer
  Primer
accctccccactggaagt

SEQ ID NO: 15452 - DNA, 19 bp, Artificial sequence  Forward Primer
  Primer
tgagtggtcaggctacacg

SEQ ID NO: 15453 - DNA, 24 bp, Artificial sequence  Forward Primer
  Primer
aaaagaaacagaaaccaatcaaca

SEQ ID NO: 15454 - DNA, 19 bp, Artificial sequence  Forward Primer
  Primer
ttcaatccctggttggaga

SEQ ID NO: 15455 - DNA, 23 bp, Artificial sequence  Forward Primer
  Primer
tctttgtttcttaatcacagatc

SEQ ID NO: 15456 - DNA, 20 bp, Artificial sequence  Forward Primer
  Primer
aggctcagtttgaaacagtt

SEQ ID NO: 15457 - DNA, 24 bp, Artificial sequence  Forward Primer
  Primer
aactacacaaacagaaaagaggga

SEQ ID NO: 15458 - DNA, 23 bp, Artificial sequence  Forward Primer
  Primer
tttttaagcacatagagttgttg

SEQ ID NO: 15459 - DNA, 23 bp, Artificial sequence  Forward Primer
  Primer
taaataatggcccctgaagatat

SEQ ID NO: 15460 - DNA, 26 bp, Artificial sequence  Forward Primer
  Primer
attttatccataataatctccttgca

SEQ ID NO: 15461 - DNA, 18 bp, Artificial sequence  Forward Primer
  Primer
ttgggcatcgggtgctgt

SEQ ID NO: 15462 - DNA, 18 bp, Artificial sequence  Forward Primer
  Primer
gactgcgctgggtcttca

SEQ ID NO: 15463 - DNA, 23 bp, Artificial sequence  Forward Primer
  Primer
tgattctgtttctgagtcataga

SEQ ID NO: 15464 - DNA, 26 bp, Artificial sequence  Forward Primer
  Primer
tgaagaatatctttctcaaatgttca

SEQ ID NO: 15465 - DNA, 30 bp, Artificial sequence  Forward Primer
  Primer
gtgacctctatgatttatattagttgaaat

SEQ ID NO: 15466 - DNA, 20 bp, Artificial sequence  Forward Primer
  Primer
aaagctaactctagagggcg

SEQ ID NO: 15467 - DNA, 24 bp, Artificial sequence  Forward Primer
  Primer
tgagcctttctatgagtaaaattt

SEQ ID NO: 15468 - DNA, 24 bp, Artificial sequence  Forward Primer
  Primer
ttttaaaaggagccacagaatatg

SEQ ID NO: 15469 - DNA, 21 bp, Artificial sequence  Forward Primer
  Primer
acaaaggcaatgaaacatact

SEQ ID NO: 15470 - DNA, 23 bp, Artificial sequence  Forward Primer
  Primer
tccaaatacatttgctttattgc

SEQ ID NO: 15471 - DNA, 29 bp, Artificial sequence  Forward Primer
  Primer
aaaaataacctataacgtcagtgtaattc

SEQ ID NO: 15472 - DNA, 19 bp, Artificial sequence  Forward Primer
  Primer
ccctttgtacagggtaggg

SEQ ID NO: 15473 - DNA, 26 bp, Artificial sequence  Forward Primer
  Primer
attcctgagagacgacaatagtatat

SEQ ID NO: 15474 - DNA, 27 bp, Artificial sequence  Forward Primer
  Primer
tccagagaactaaaatcatatcaaaat

SEQ ID NO: 15475 - DNA, 27 bp, Artificial sequence  Forward Primer
  Primer
tttggttcttagtaaacaagatttgat

SEQ ID NO: 15476 - DNA, 28 bp, Artificial sequence  Forward Primer
  Primer
taaatgaaattgtttacaagagtgagat

SEQ ID NO: 15477 - DNA, 27 bp, Artificial sequence  Forward Primer
  Primer
agttacttgttacaagacagaagcact

SEQ ID NO: 15478 - DNA, 23 bp, Artificial sequence  Forward Primer
  Primer
tcatacaatcacaagagtaaaca

SEQ ID NO: 15479 - DNA, 18 bp, Artificial sequence  Forward Primer
  Primer
gctggccattcatcacca

SEQ ID NO: 15480 - DNA, 21 bp, Artificial sequence  Forward Primer
  Primer
aagataacacccatgaggctg

SEQ ID NO: 15481 - DNA, 30 bp, Artificial sequence  Forward Primer
  Primer
ttcttggtatttattatttagagattctgt

SEQ ID NO: 15482 - DNA, 28 bp, Artificial sequence  Forward Primer
  Primer
tataattgactcaagaatttttgtgatg

SEQ ID NO: 15483 - DNA, 22 bp, Artificial sequence  Forward Primer
  Primer
atgaaataagtgcttcattggc

SEQ ID NO: 15484 - DNA, 26 bp, Artificial sequence  Forward Primer
  Primer
ttttatcaaactgatagcaargaagt

SEQ ID NO: 15485 - DNA, 20 bp, Artificial sequence  Forward Primer
  Primer
tggtttccatcaaccatttc

SEQ ID NO: 15486 - DNA, 19 bp, Artificial sequence  Forward Primer
  Primer
tcatgtctgagagcccctc

SEQ ID NO: 15487 - DNA, 22 bp, Artificial sequence  Forward Primer
  Primer
tagagtcacttctggacagtgg

SEQ ID NO: 15488 - DNA, 27 bp, Artificial sequence  Forward Primer
  Primer
atttattaatcacaaacttacagaccc

SEQ ID NO: 15489 - DNA, 21 bp, Artificial sequence  Forward Primer
  Primer
aaggtgctgatagatagcagg

SEQ ID NO: 15490 - DNA, 20 bp, Artificial sequence  Forward Primer
  Primer
aaatggctgagcactagctg

SEQ ID NO: 15491 - DNA, 20 bp, Artificial sequence  Forward Primer
  Primer
tctcctgctcctttttcaga

SEQ ID NO: 15492 - DNA, 22 bp, Artificial sequence  Forward Primer
  Primer
gctgaaactacctctcaggtaa

SEQ ID NO: 15493 - DNA, 18 bp, Artificial sequence  Forward Primer
  Primer
aagggctgctcaagggca

SEQ ID NO: 15494 - DNA, 24 bp, Artificial sequence  Forward Primer
  Primer
ttaatccaaacctctgaataaggt

SEQ ID NO: 15495 - DNA, 30 bp, Artificial sequence  Forward Primer
  Primer
catgatagtctgtatgtactagcatatatt

SEQ ID NO: 15496 - DNA, 27 bp, Artificial sequence  Forward Primer
  Primer
tatactatgtcctaaacacagttaaag

SEQ ID NO: 15497 - DNA, 19 bp, Artificial sequence  Forward Primer
  Primer
aacaaccaatccaaccttt

SEQ ID NO: 15498 - DNA, 21 bp, Artificial sequence  Forward Primer
  Primer
actgttttttcttctctctcc

SEQ ID NO: 15499 - DNA, 24 bp, Artificial sequence  Forward Primer
  Primer
aaaaagaaagactcaacgtcctag

SEQ ID NO: 15500 - DNA, 24 bp, Artificial sequence  Forward Primer
  Primer
aaagagagaaaggtgacacaaaat

SEQ ID NO: 15501 - DNA, 25 bp, Artificial sequence  Forward Primer
  Primer
ttactattctctctggttttacatc

SEQ ID NO: 15502 - DNA, 22 bp, Artificial sequence  Forward Primer
  Primer
agataattcattcatttctcca

SEQ ID NO: 15503 - DNA, 24 bp, Artificial sequence  Forward Primer
  Primer
tgctttggaaataagatcctaaaa

SEQ ID NO: 15504 - DNA, 23 bp, Artificial sequence  Forward Primer
  Primer
tttccagtgtttttagaaatgaa

SEQ ID NO: 15505 - DNA, 24 bp, Artificial sequence  Forward Primer
  Primer
aaaggtggaaatttattgaaattg

SEQ ID NO: 15506 - DNA, 23 bp, Artificial sequence  Forward Primer
  Primer
atacctgattctgttgagttcag

SEQ ID NO: 15507 - DNA, 28 bp, Artificial sequence  Forward Primer
  Primer
atgtccacatatgaaagaattaaagtag

SEQ ID NO: 15508 - DNA, 26 bp, Artificial sequence  Forward Primer
  Primer
tgcactctatcaaaatcttaattgtt

SEQ ID NO: 15509 - DNA, 24 bp, Artificial sequence  Forward Primer
  Primer
ttagtgcctatcatccacattaaa

SEQ ID NO: 15510 - DNA, 24 bp, Artificial sequence  Forward Primer
  Primer
ataattggaagttttggcttaacc

SEQ ID NO: 15511 - DNA, 30 bp, Artificial sequence  Forward Primer
  Primer
ttctaaacttcatatagatggttaatgatg

SEQ ID NO: 15512 - DNA, 27 bp, Artificial sequence  Forward Primer
  Primer
aattatagtagtagaagggtgcctgtt

SEQ ID NO: 15513 - DNA, 27 bp, Artificial sequence  Forward Primer
  Primer
atatcacattcatagttttgagatttc

SEQ ID NO: 15514 - DNA, 21 bp, Artificial sequence  Forward Primer
  Primer
attcattccacacacctcact

SEQ ID NO: 15515 - DNA, 26 bp, Artificial sequence  Forward Primer
  Primer
tacttgtacaaagtctcaaaactaac

SEQ ID NO: 15516 - DNA, 23 bp, Artificial sequence  Forward Primer
  Primer
aacaatagaagcagtgtgtctga

SEQ ID NO: 15517 - DNA, 29 bp, Artificial sequence  Forward Primer
  Primer
atatacataagcattgaagttctcatagg

SEQ ID NO: 15518 - DNA, 22 bp, Artificial sequence  Forward Primer
  Primer
tgccaaaaatatgtgaaacatt

SEQ ID NO: 15519 - DNA, 18 bp, Artificial sequence  Forward Primer
  Primer
aactcactgggagccacc

SEQ ID NO: 15520 - DNA, 24 bp, Artificial sequence  Forward Primer
  Primer
ccctttctgtatgtatttatgtca

SEQ ID NO: 15521 - DNA, 28 bp, Artificial sequence  Forward Primer
  Primer
ctattgtaattggtttaaaaagaatgtg

SEQ ID NO: 15522 - DNA, 25 bp, Artificial sequence  Forward Primer
  Primer
aaatcatgtgctatgcttttatttg

SEQ ID NO: 15523 - DNA, 28 bp, Artificial sequence  Forward Primer
  Primer
ttagataaactcacctcatcagaatatg

SEQ ID NO: 15524 - DNA, 24 bp, Artificial sequence  Forward Primer
  Primer
agaactttcagtctcgttgctatt

SEQ ID NO: 15525 - DNA, 21 bp, Artificial sequence  Forward Primer
  Primer
gttttattcagagrgttgacc

SEQ ID NO: 15526 - DNA, 24 bp, Artificial sequence  Forward Primer
  Primer
attacaaagcatcttttccttttt

SEQ ID NO: 15527 - DNA, 23 bp, Artificial sequence  Forward Primer
  Primer
tggttagccaaagtgtaagattg

SEQ ID NO: 15528 - DNA, 30 bp, Artificial sequence  Forward Primer
  Primer
ctttaaattaaaagttaacaagtatagcag

SEQ ID NO: 15529 - DNA, 28 bp, Artificial sequence  Forward Primer
  Primer
gttttgtgtcattagaatatgaactaat

SEQ ID NO: 15530 - DNA, 24 bp, Artificial sequence  Forward Primer
  Primer
aaaagtactggtgtgctttaagaa

SEQ ID NO: 15531 - DNA, 22 bp, Artificial sequence  Forward Primer
  Primer
tccaacctccataaatttcaat

SEQ ID NO: 15532 - DNA, 24 bp, Artificial sequence  Forward Primer
  Primer
ttgataatagccacaaagatcctt

SEQ ID NO: 15533 - DNA, 22 bp, Artificial sequence  Forward Primer
  Primer
actgagcagttcagtttctcca

SEQ ID NO: 15534 - DNA, 18 bp, Artificial sequence  Forward Primer
  Primer
catcctcaccttcgacca

SEQ ID NO: 15535 - DNA, 23 bp, Artificial sequence  Forward Primer
  Primer
aacattcttctaaagctctcaaa

SEQ ID NO: 15536 - DNA, 18 bp, Artificial sequence  Forward Primer
  Primer
tgcttccggcatctagag

SEQ ID NO: 15537 - DNA, 18 bp, Artificial sequence  Forward Primer
  Primer
atgcacatgcacccaggg

SEQ ID NO: 15538 - DNA, 19 bp, Artificial sequence  Forward Primer
  Primer
agaggagtttgggcagtta

SEQ ID NO: 15539 - DNA, 21 bp, Artificial sequence  Forward Primer
  Primer
aacaatggcaaaacctttttc

SEQ ID NO: 15540 - DNA, 25 bp, Artificial sequence  Forward Primer
  Primer
attgccctcatttgttaatataaga

SEQ ID NO: 15541 - DNA, 28 bp, Artificial sequence  Forward Primer
  Primer
taatattttgttacattctttgatggtg

SEQ ID NO: 15542 - DNA, 27 bp, Artificial sequence  Forward Primer
  Primer
aatgtataaatgatattggggagacta

SEQ ID NO: 15543 - DNA, 23 bp, Artificial sequence  Forward Primer
  Primer
tttatgtgaaagaaaaygtgcaa

SEQ ID NO: 15544 - DNA, 28 bp, Artificial sequence  Forward Primer
  Primer
tttaaaaagtaatcatcacattgatacc

SEQ ID NO: 15545 - DNA, 23 bp, Artificial sequence  Forward Primer
  Primer
aactcaaacattttgagcattca

SEQ ID NO: 15546 - DNA, 25 bp, Artificial sequence  Forward Primer
  Primer
tctaattaccagacactttttgctc

SEQ ID NO: 15547 - DNA, 22 bp, Artificial sequence  Forward Primer
  Primer
acaaaattgaggaacagtttaa

SEQ ID NO: 15548 - DNA, 23 bp, Artificial sequence  Forward Primer
  Primer
acagaaaagaggtaatgccactc

SEQ ID NO: 15549 - DNA, 25 bp, Artificial sequence  Forward Primer
  Primer
aagtttaattccatttcagaggatc

SEQ ID NO: 15550 - DNA, 25 bp, Artificial sequence  Forward Primer
  Primer
aaattcgaatatttctatgagggat

SEQ ID NO: 15551 - DNA, 26 bp, Artificial sequence  Forward Primer
  Primer
catttctcttaacaccatgattctaa

SEQ ID NO: 15552 - DNA, 18 bp, Artificial sequence  Forward Primer
  Primer
actccggcagcgtcgtca

SEQ ID NO: 15553 - DNA, 25 bp, Artificial sequence  Forward Primer
  Primer
taaacaacttatctgatgacactgc

SEQ ID NO: 15554 - DNA, 22 bp, Artificial sequence  Forward Primer
  Primer
ctataggctcagtaggacaaag

SEQ ID NO: 15555 - DNA, 27 bp, Artificial sequence  Forward Primer
  Primer
aggtttcagataatactttgtcaagaa

SEQ ID NO: 15556 - DNA, 22 bp, Artificial sequence  Forward Primer
  Primer
ttactcccacaaacacatcaaa

SEQ ID NO: 15557 - DNA, 24 bp, Artificial sequence  Forward Primer
  Primer
ataaaaactctacatgctttgaat

SEQ ID NO: 15558 - DNA, 21 bp, Artificial sequence  Forward Primer
  Primer
aatmaaccacgctatttgtgc

SEQ ID NO: 15559 - DNA, 23 bp, Artificial sequence  Forward Primer
  Primer
ttctaatattagggccatctcca

SEQ ID NO: 15560 - DNA, 21 bp, Artificial sequence  Forward Primer
  Primer
aattcaattcagtggggattt

SEQ ID NO: 15561 - DNA, 24 bp, Artificial sequence  Forward Primer
  Primer
aatccaaaactgtcacaaatacct

SEQ ID NO: 15562 - DNA, 26 bp, Artificial sequence  Forward Primer
  Primer
aacatccatacaaattttctaaaacc

SEQ ID NO: 15563 - DNA, 20 bp, Artificial sequence  Forward Primer
  Primer
tatcaatcctttgaagtgcc

SEQ ID NO: 15564 - DNA, 18 bp, Artificial sequence  Forward Primer
  Primer
tcctgaggcccctcctgt

SEQ ID NO: 15565 - DNA, 25 bp, Artificial sequence  Forward Primer
  Primer
tttgactgaactraaacacttccta

SEQ ID NO: 15566 - DNA, 23 bp, Artificial sequence  Forward Primer
  Primer
attcataacgtatcgtccaaacc

SEQ ID NO: 15567 - DNA, 25 bp, Artificial sequence  Forward Primer
  Primer
aaaagtgaacttttcaagcagtagc

SEQ ID NO: 15568 - DNA, 19 bp, Artificial sequence  Forward Primer
  Primer
acgtcctgaatatgggctg

SEQ ID NO: 15569 - DNA, 20 bp, Artificial sequence  Forward Primer
  Primer
agggtagatgcttctgctgt

SEQ ID NO: 15570 - DNA, 23 bp, Artificial sequence  Forward Primer
  Primer
actttgttgttcagatcctttgg

SEQ ID NO: 15571 - DNA, 25 bp, Artificial sequence  Forward Primer
  Primer
ctcatctaaggatatggtcatacca

SEQ ID NO: 15572 - DNA, 25 bp, Artificial sequence  Forward Primer
  Primer
tttttatttcaaagcacctgtaaag

SEQ ID NO: 15573 - DNA, 25 bp, Artificial sequence  Forward Primer
  Primer
actttattcaagaacacatctccaa

SEQ ID NO: 15574 - DNA, 24 bp, Artificial sequence  Forward Primer
  Primer
taagccctttacataaagttacat

SEQ ID NO: 15575 - DNA, 30 bp, Artificial sequence  Forward Primer
  Primer
ataaaaatacactattacactatagcccat

SEQ ID NO: 15576 - DNA, 26 bp, Artificial sequence  Forward Primer
  Primer
ggttcttttttgaccataagaatatt

SEQ ID NO: 15577 - DNA, 20 bp, Artificial sequence  Forward Primer
  Primer
ataatccaagtagcacaggg

SEQ ID NO: 15578 - DNA, 28 bp, Artificial sequence  Forward Primer
  Primer
acttttagatcacctcttaaatcatttt

SEQ ID NO: 15579 - DNA, 22 bp, Artificial sequence  Forward Primer
  Primer
acataaaattgcttccaggatg

SEQ ID NO: 15580 - DNA, 23 bp, Artificial sequence  Forward Primer
  Primer
tgtgtcagctaaaaaggagaaga

SEQ ID NO: 15581 - DNA, 20 bp, Artificial sequence  Forward Primer
  Primer
ataccttcgctggatcacag

SEQ ID NO: 15582 - DNA, 26 bp, Artificial sequence  Forward Primer
  Primer
ttttccacagactcatagatagaaac

SEQ ID NO: 15583 - DNA, 18 bp, Artificial sequence  Forward Primer
  Primer
atggaggcttgtygggat

SEQ ID NO: 15584 - DNA, 18 bp, Artificial sequence  Forward Primer
  Primer
tcagttggtccacggcag

SEQ ID NO: 15585 - DNA, 23 bp, Artificial sequence  Forward Primer
  Primer
atttaataaaggcaactgtgcaa

SEQ ID NO: 15586 - DNA, 19 bp, Artificial sequence  Forward Primer
  Primer
tggatcctctcaagcatgc

SEQ ID NO: 15587 - DNA, 22 bp, Artificial sequence  Forward Primer
  Primer
agagttctggtgagttacccat

SEQ ID NO: 15588 - DNA, 18 bp, Artificial sequence  Forward Primer
  Primer
atcagggtcttggggaca

SEQ ID NO: 15589 - DNA, 25 bp, Artificial sequence  Forward Primer
  Primer
tttcacctaaaatctctaccttcaa

SEQ ID NO: 15590 - DNA, 24 bp, Artificial sequence  Forward Primer
  Primer
taaaccaaggcatatttagaaagg

SEQ ID NO: 15591 - DNA, 20 bp, Artificial sequence  Forward Primer
  Primer
tgcaagacgactccagagtt

SEQ ID NO: 15592 - DNA, 22 bp, Artificial sequence  Forward Primer
  Primer
aaaccagagaaaaggttgcttt

SEQ ID NO: 15593 - DNA, 29 bp, Artificial sequence  Forward Primer
  Primer
atatttcagattctgtcttcttacagtct

SEQ ID NO: 15594 - DNA, 27 bp, Artificial sequence  Forward Primer
  Primer
tttctgaaatcctttagatacctcttt

SEQ ID NO: 15595 - DNA, 23 bp, Artificial sequence  Forward Primer
  Primer
agtaactcaagttggttgataga

SEQ ID NO: 15596 - DNA, 25 bp, Artificial sequence  Forward Primer
  Primer
aattctgtatttttggccttctaac

SEQ ID NO: 15597 - DNA, 27 bp, Artificial sequence  Forward Primer
  Primer
aaaatacagtcatgattctcattatcc

SEQ ID NO: 15598 - DNA, 26 bp, Artificial sequence  Forward Primer
  Primer
atatctstggctaattttaccttttc

SEQ ID NO: 15599 - DNA, 27 bp, Artificial sequence  Forward Primer
  Primer
tactgaaaggaggtgtatgagtaagtt

SEQ ID NO: 15600 - DNA, 23 bp, Artificial sequence  Forward Primer
  Primer
aaagaatcagccatgaatactga

SEQ ID NO: 15601 - DNA, 18 bp, Artificial sequence  Forward Primer
  Primer
ttagtgsaggagacggca

SEQ ID NO: 15602 - DNA, 19 bp, Artificial sequence  Forward Primer
  Primer
atgaagggctgatcctctc

SEQ ID NO: 15603 - DNA, 24 bp, Artificial sequence  Forward Primer
  Primer
atgaataaaacaagtcttccctaa

SEQ ID NO: 15604 - DNA, 25 bp, Artificial sequence  Forward Primer
  Primer
ctgttgaatcatttttytttctttg

SEQ ID NO: 15605 - DNA, 24 bp, Artificial sequence  Forward Primer
  Primer
tggttcttataaaaagcactgaaa

SEQ ID NO: 15606 - DNA, 27 bp, Artificial sequence  Forward Primer
  Primer
ctcaatctacatttttccaactttaag

SEQ ID NO: 15607 - DNA, 19 bp, Artificial sequence  Forward Primer
  Primer
atgcaaacgagagagtccc

SEQ ID NO: 15608 - DNA, 19 bp, Artificial sequence  Forward Primer
  Primer
gaagtagcacctggcacac

SEQ ID NO: 15609 - DNA, 24 bp, Artificial sequence  Forward Primer
  Primer
tgctctccattttacagatgataa

SEQ ID NO: 15610 - DNA, 18 bp, Artificial sequence  Forward Primer
  Primer
accactggaagggctgtg

SEQ ID NO: 15611 - DNA, 25 bp, Artificial sequence  Forward Primer
  Primer
attcttgtctgagcaataaagtgag

SEQ ID NO: 15612 - DNA, 20 bp, Artificial sequence  Forward Primer
  Primer
tcctgtcagccatagttgtc

SEQ ID NO: 15613 - DNA, 26 bp, Artificial sequence  Forward Primer
  Primer
aggtgagaattcctagaatcatctat

SEQ ID NO: 15614 - DNA, 22 bp, Artificial sequence  Forward Primer
  Primer
aaccctgcagtctctagacctt

SEQ ID NO: 15615 - DNA, 25 bp, Artificial sequence  Forward Primer
  Primer
ttctattcagccagttggtacttaa

SEQ ID NO: 15616 - DNA, 23 bp, Artificial sequence  Forward Primer
  Primer
tagaacctatgcttcctcacttg

SEQ ID NO: 15617 - DNA, 19 bp, Artificial sequence  Forward Primer
  Primer
tatacacatgccctcacgc

SEQ ID NO: 15618 - DNA, 23 bp, Artificial sequence  Forward Primer
  Primer
agactgctcatgttcttatccag

SEQ ID NO: 15619 - DNA, 25 bp, Artificial sequence  Forward Primer
  Primer
ttctagtttttactgtgtgtggtcc

SEQ ID NO: 15620 - DNA, 19 bp, Artificial sequence  Forward Primer
  Primer
aaagaccatagggatggcc

SEQ ID NO: 15621 - DNA, 18 bp, Artificial sequence  Forward Primer
  Primer
agcatgaacatgcctcgc

SEQ ID NO: 15622 - DNA, 20 bp, Artificial sequence  Forward Primer
  Primer
aatgaccccatttcagaagc

SEQ ID NO: 15623 - DNA, 18 bp, Artificial sequence  Forward Primer
  Primer
atctggccctgsagtgaa

SEQ ID NO: 15624 - DNA, 18 bp, Artificial sequence  Forward Primer
  Primer
tttgccttgttgcacttg

SEQ ID NO: 15625 - DNA, 18 bp, Artificial sequence  Forward Primer
  Primer
tccgaggtgacggggcta

SEQ ID NO: 15626 - DNA, 18 bp, Artificial sequence  Forward Primer
  Primer
cgcagccaataccacgtg

SEQ ID NO: 15627 - DNA, 18 bp, Artificial sequence  Forward Primer
  Primer
tgcgagggggtgtgttgc

SEQ ID NO: 15628 - DNA, 19 bp, Artificial sequence  Forward Primer
  Primer
tgtgtgagtggctgtggtt

SEQ ID NO: 15629 - DNA, 19 bp, Artificial sequence  Forward Primer
  Primer
tggggtaagaaggtgcagt

SEQ ID NO: 15630 - DNA, 19 bp, Artificial sequence  Forward Primer
  Primer
gggaaactcggaaattctc

SEQ ID NO: 15631 - DNA, 20 bp, Artificial sequence  Forward Primer
  Primer
aaagatggcagaagcacaac

SEQ ID NO: 15632 - DNA, 18 bp, Artificial sequence  Forward Primer
  Primer
acaaacccaaatgcccag

SEQ ID NO: 15633 - DNA, 28 bp, Artificial sequence  Forward Primer
  Primer
agactttaaggatcagaaggtaagtaag

SEQ ID NO: 15634 - DNA, 20 bp, Artificial sequence  Forward Primer
  Primer
gagcgtgtggtcttgagatg

SEQ ID NO: 15635 - DNA, 22 bp, Artificial sequence  Forward Primer
  Primer
ttctttgtccctgagtgacttc

SEQ ID NO: 15636 - DNA, 19 bp, Artificial sequence  Forward Primer
  Primer
ttgtgagatgcagctgtcc

SEQ ID NO: 15637 - DNA, 22 bp, Artificial sequence  Forward Primer
  Primer
aaagatgaaggttgctacttgc

SEQ ID NO: 15638 - DNA, 25 bp, Artificial sequence  Forward Primer
  Primer
ttcacaaggatttaactcaaaaact

SEQ ID NO: 15639 - DNA, 19 bp, Artificial sequence  Forward Primer
  Primer
tcagcaacctggtgtacca

SEQ ID NO: 15640 - DNA, 18 bp, Artificial sequence  Forward Primer
  Primer
agttgctgggacatggtg

SEQ ID NO: 15641 - DNA, 19 bp, Artificial sequence  Forward Primer
  Primer
atactttgcaaccccatgg

SEQ ID NO: 15642 - DNA, 21 bp, Artificial sequence  Forward Primer
  Primer
ttgagatacacgaggctgaac

SEQ ID NO: 15643 - DNA, 23 bp, Artificial sequence  Forward Primer
  Primer
atttttctagcctctgctcttct

SEQ ID NO: 15644 - DNA, 23 bp, Artificial sequence  Forward Primer
  Primer
atgagattgataactgaggtcaa

SEQ ID NO: 15645 - DNA, 24 bp, Artificial sequence  Forward Primer
  Primer
tcaggcagttactattaccaagag

SEQ ID NO: 15646 - DNA, 24 bp, Artificial sequence  Forward Primer
  Primer
tttgggactctaaaggaaattaag

SEQ ID NO: 15647 - DNA, 27 bp, Artificial sequence  Forward Primer
  Primer
aaacattagaaaaagtacaggtgaaca

SEQ ID NO: 15648 - DNA, 22 bp, Artificial sequence  Forward Primer
  Primer
tgaagggtaaagaatgaaagaa

SEQ ID NO: 15649 - DNA, 24 bp, Artificial sequence  Forward Primer
  Primer
atcatgatctttttttctgttagt

SEQ ID NO: 15650 - DNA, 20 bp, Artificial sequence  Forward Primer
  Primer
tgattgacctgtccattcaa

SEQ ID NO: 15651 - DNA, 28 bp, Artificial sequence  Forward Primer
  Primer
aaaactaaagatgcttctatagctcata

SEQ ID NO: 15652 - DNA, 26 bp, Artificial sequence  Forward Primer
  Primer
ttttctcagttgctattaatttttgc

SEQ ID NO: 15653 - DNA, 26 bp, Artificial sequence  Forward Primer
  Primer
aaatcctgagagcaatcttataaaag

SEQ ID NO: 15654 - DNA, 19 bp, Artificial sequence  Forward Primer
  Primer
araagcaatccaaagcctc

SEQ ID NO: 15655 - DNA, 26 bp, Artificial sequence  Forward Primer
  Primer
ttatggagagatgaatgtgaactaag

SEQ ID NO: 15656 - DNA, 23 bp, Artificial sequence  Forward Primer
  Primer
atggaatcaaagaccatgtgtac

SEQ ID NO: 15657 - DNA, 24 bp, Artificial sequence  Forward Primer
  Primer
aggaggatatccctgatctttaac

SEQ ID NO: 15658 - DNA, 22 bp, Artificial sequence  Forward Primer
  Primer
acasacagcaatgctagaaagc

SEQ ID NO: 15659 - DNA, 21 bp, Artificial sequence  Forward Primer
  Primer
aatttcaacaaagctcccatt

SEQ ID NO: 15660 - DNA, 26 bp, Artificial sequence  Forward Primer
  Primer
tttataaatgatttttcctccaagtc

SEQ ID NO: 15661 - DNA, 20 bp, Artificial sequence  Forward Primer
  Primer
taggcagtcaggaaggactg

SEQ ID NO: 15662 - DNA, 24 bp, Artificial sequence  Forward Primer
  Primer
atttaatgttggtcaggtaatcca

SEQ ID NO: 15663 - DNA, 24 bp, Artificial sequence  Forward Primer
  Primer
taatcctgacgatacatgaaaatc

SEQ ID NO: 15664 - DNA, 19 bp, Artificial sequence  Forward Primer
  Primer
atgcaaacccacagatttg

SEQ ID NO: 15665 - DNA, 24 bp, Artificial sequence  Forward Primer
  Primer
aaatgaaaacatggtacttccttg

SEQ ID NO: 15666 - DNA, 27 bp, Artificial sequence  Forward Primer
  Primer
ttaaaattaggatttggatacgtaatg

SEQ ID NO: 15667 - DNA, 30 bp, Artificial sequence  Forward Primer
  Primer
attatatattcaggattctaagctctgttt

SEQ ID NO: 15668 - DNA, 20 bp, Artificial sequence  Forward Primer
  Primer
ataggcaactaagaatgctg

SEQ ID NO: 15669 - DNA, 24 bp, Artificial sequence  Forward Primer
  Primer
ttatttcttagcagcctgaaagac

SEQ ID NO: 15670 - DNA, 20 bp, Artificial sequence  Forward Primer
  Primer
tgaatgacacctgtcccttc

SEQ ID NO: 15671 - DNA, 30 bp, Artificial sequence  Forward Primer
  Primer
ttaaaatatctcagtatcttccttttctac

SEQ ID NO: 15672 - DNA, 27 bp, Artificial sequence  Forward Primer
  Primer
taaagatttaggggaactcagtgtata

SEQ ID NO: 15673 - DNA, 25 bp, Artificial sequence  Forward Primer
  Primer
ataattttgttttcaaaagggagag

SEQ ID NO: 15674 - DNA, 27 bp, Artificial sequence  Forward Primer
  Primer
caggtgaaatttaaatgaagtaacatt

SEQ ID NO: 15675 - DNA, 28 bp, Artificial sequence  Forward Primer
  Primer
ccaatgcattagtaaaattaaatagtga

SEQ ID NO: 15676 - DNA, 24 bp, Artificial sequence  Forward Primer
  Primer
acagagaaaggaatatagtggcag

SEQ ID NO: 15677 - DNA, 25 bp, Artificial sequence  Forward Primer
  Primer
atgcagtgcaaatgtgtataaagta

SEQ ID NO: 15678 - DNA, 19 bp, Artificial sequence  Forward Primer
  Primer
ctctacatgggtgggatgt

SEQ ID NO: 15679 - DNA, 20 bp, Artificial sequence  Forward Primer
  Primer
tgtcttgatcatgaaaggcc

SEQ ID NO: 15680 - DNA, 23 bp, Artificial sequence  Forward Primer
  Primer
attccaataaaggacgaagaaat

SEQ ID NO: 15681 - DNA, 18 bp, Artificial sequence  Forward Primer
  Primer
agattttggaggcatggg

SEQ ID NO: 15682 - DNA, 25 bp, Artificial sequence  Forward Primer
  Primer
agtgagtagctaaatgtccttcatg

SEQ ID NO: 15683 - DNA, 28 bp, Artificial sequence  Forward Primer
  Primer
tatattcatatacaatttgattcacgtc

SEQ ID NO: 15684 - DNA, 20 bp, Artificial sequence  Forward Primer
  Primer
tacagatgagggcacattag

SEQ ID NO: 15685 - DNA, 21 bp, Artificial sequence  Forward Primer
  Primer
tacctatctgtggttgcgatc

SEQ ID NO: 15686 - DNA, 21 bp, Artificial sequence  Forward Primer
  Primer
atttgaacacagaatgtggcc

SEQ ID NO: 15687 - DNA, 27 bp, Artificial sequence  Forward Primer
  Primer
ttctggttcaagataagagtaatctag

SEQ ID NO: 15688 - DNA, 23 bp, Artificial sequence  Forward Primer
  Primer
tggctggatatctttagctctaa

SEQ ID NO: 15689 - DNA, 21 bp, Artificial sequence  Forward Primer
  Primer
tcggagtccataaaaataatg

SEQ ID NO: 15690 - DNA, 23 bp, Artificial sequence  Forward Primer
  Primer
aataagatgcgtggctagacttt

SEQ ID NO: 15691 - DNA, 28 bp, Artificial sequence  Forward Primer
  Primer
atatagtccggatttctatgttaactct

SEQ ID NO: 15692 - DNA, 25 bp, Artificial sequence  Forward Primer
  Primer
tatttcaaatgtgaagacagaaaag

SEQ ID NO: 15693 - DNA, 28 bp, Artificial sequence  Forward Primer
  Primer
accttattggtagaacaaaaactaaaac

SEQ ID NO: 15694 - DNA, 20 bp, Artificial sequence  Forward Primer
  Primer
ttcatttctcgacaccagtg

SEQ ID NO: 15695 - DNA, 24 bp, Artificial sequence  Forward Primer
  Primer
ttagtccttgtagagacacatggc

SEQ ID NO: 15696 - DNA, 27 bp, Artificial sequence  Forward Primer
  Primer
cagaagctacttcattagaatctagga

SEQ ID NO: 15697 - DNA, 20 bp, Artificial sequence  Forward Primer
  Primer
aaaaaactagcyccagggaa

SEQ ID NO: 15698 - DNA, 23 bp, Artificial sequence  Forward Primer
  Primer
ttattttcatgttcttaggggag

SEQ ID NO: 15699 - DNA, 27 bp, Artificial sequence  Forward Primer
  Primer
ttttatattgtccattactctgcacta

SEQ ID NO: 15700 - DNA, 26 bp, Artificial sequence  Forward Primer
  Primer
ctaggagatttattgcattatgaaca

SEQ ID NO: 15701 - DNA, 18 bp, Artificial sequence  Forward Primer
  Primer
aaggggtgggggtagaag

SEQ ID NO: 15702 - DNA, 19 bp, Artificial sequence  Forward Primer
  Primer
gccacaggaaaaatgatcc

SEQ ID NO: 15703 - DNA, 21 bp, Artificial sequence  Forward Primer
  Primer
tactgaacccatctgtcttgc

SEQ ID NO: 15704 - DNA, 24 bp, Artificial sequence  Forward Primer
  Primer
atgtacatgcagagtaacatcacc

SEQ ID NO: 15705 - DNA, 25 bp, Artificial sequence  Forward Primer
  Primer
ccagggaagctctagatttttataa

SEQ ID NO: 15706 - DNA, 23 bp, Artificial sequence  Forward Primer
  Primer
aacacttatcacatcctaggcac

SEQ ID NO: 15707 - DNA, 22 bp, Artificial sequence  Forward Primer
  Primer
attacttcccttcttacgggtc

SEQ ID NO: 15708 - DNA, 24 bp, Artificial sequence  Forward Primer
  Primer
attttggatggtctgaactttagt

SEQ ID NO: 15709 - DNA, 24 bp, Artificial sequence  Forward Primer
  Primer
aattcaatcaaatgtcaaaatgtg

SEQ ID NO: 15710 - DNA, 21 bp, Artificial sequence  Forward Primer
  Primer
aaaatgatcaccacatggaga

SEQ ID NO: 15711 - DNA, 24 bp, Artificial sequence  Forward Primer
  Primer
aacagcattaatggaagtgattag

SEQ ID NO: 15712 - DNA, 24 bp, Artificial sequence  Forward Primer
  Primer
agatttacgttattttaattggca

SEQ ID NO: 15713 - DNA, 29 bp, Artificial sequence  Forward Primer
  Primer
ttgtcatatgtattactgtttccataagt

SEQ ID NO: 15714 - DNA, 30 bp, Artificial sequence  Forward Primer
  Primer
caatattattaagcattatatgtacacaca

SEQ ID NO: 15715 - DNA, 20 bp, Artificial sequence  Forward Primer
  Primer
attggcttcatgttgttcat

SEQ ID NO: 15716 - DNA, 23 bp, Artificial sequence  Forward Primer
  Primer
attttcaagtgaaattgatgctc

SEQ ID NO: 15717 - DNA, 20 bp, Artificial sequence  Forward Primer
  Primer
agagacatactcccaaagcc

SEQ ID NO: 15718 - DNA, 29 bp, Artificial sequence  Forward Primer
  Primer
aataagatagaagcttatttctcttcctt

SEQ ID NO: 15719 - DNA, 18 bp, Artificial sequence  Forward Primer
  Primer
tggtctcccgaggcagag

SEQ ID NO: 15720 - DNA, 18 bp, Artificial sequence  Forward Primer
  Primer
cacacatgcgcagaaagg

SEQ ID NO: 15721 - DNA, 24 bp, Artificial sequence  Forward Primer
  Primer
aatttacctttgattcgtttcact

SEQ ID NO: 15722 - DNA, 25 bp, Artificial sequence  Forward Primer
  Primer
agtccatgtgctttcagtatacatt

SEQ ID NO: 15723 - DNA, 24 bp, Artificial sequence  Forward Primer
  Primer
aattactagttgtccctgttgagg

SEQ ID NO: 15724 - DNA, 28 bp, Artificial sequence  Forward Primer
  Primer
atagcaaggaagatattacaacatatca

SEQ ID NO: 15725 - DNA, 20 bp, Artificial sequence  Forward Primer
  Primer
aatccgagtccatcactcac

SEQ ID NO: 15726 - DNA, 20 bp, Artificial sequence  Forward Primer
  Primer
ataaaaggcacatgtgggtg

SEQ ID NO: 15727 - DNA, 21 bp, Artificial sequence  Forward Primer
  Primer
aagggaagaattcacagatcg

SEQ ID NO: 15728 - DNA, 23 bp, Artificial sequence  Forward Primer
  Primer
ttttctttctcccttgatgtctt

SEQ ID NO: 15729 - DNA, 19 bp, Artificial sequence  Forward Primer
  Primer
cttgggtgaagygtggtac

SEQ ID NO: 15730 - DNA, 18 bp, Artificial sequence  Forward Primer
  Primer
agccgacctggttcacac

SEQ ID NO: 15731 - DNA, 18 bp, Artificial sequence  Forward Primer
  Primer
aggctctgcacctggact

SEQ ID NO: 15732 - DNA, 19 bp, Artificial sequence  Forward Primer
  Primer
ttccagaggaggcagaaat

SEQ ID NO: 15733 - DNA, 18 bp, Artificial sequence  Forward Primer
  Primer
gggactgacgcaccctta

SEQ ID NO: 15734 - DNA, 27 bp, Artificial sequence  Forward Primer
  Primer
attagaaacactcaacacaaagaaatc

SEQ ID NO: 15735 - DNA, 18 bp, Artificial sequence  Forward Primer
  Primer
tggtctggccctgtgcat

SEQ ID NO: 15736 - DNA, 29 bp, Artificial sequence  Forward Primer
  Primer
aatactatgtccctagaaaatataaacgc

SEQ ID NO: 15737 - DNA, 22 bp, Artificial sequence  Forward Primer
  Primer
aaaattctgtgctgttccttcc

SEQ ID NO: 15738 - DNA, 27 bp, Artificial sequence  Forward Primer
  Primer
ttacagagctttctatacacagacagg

SEQ ID NO: 15739 - DNA, 18 bp, Artificial sequence  Forward Primer
  Primer
tctgggtgcagagacccg

SEQ ID NO: 15740 - DNA, 21 bp, Artificial sequence  Forward Primer
  Primer
ttctcacatgaggaactttgc

SEQ ID NO: 15741 - DNA, 25 bp, Artificial sequence  Forward Primer
  Primer
tgatcttgaaagtacataccctgtt

SEQ ID NO: 15742 - DNA, 25 bp, Artificial sequence  Forward Primer
  Primer
ttattggacctgagttgtaagatca

SEQ ID NO: 15743 - DNA, 18 bp, Artificial sequence  Forward Primer
  Primer
tccacagggcaaggctag

SEQ ID NO: 15744 - DNA, 25 bp, Artificial sequence  Forward Primer
  Primer
atttttcttgactcaacagactctc

SEQ ID NO: 15745 - DNA, 28 bp, Artificial sequence  Forward Primer
  Primer
atgtctttctaatacttgctaagtgagg

SEQ ID NO: 15746 - DNA, 18 bp, Artificial sequence  Forward Primer
  Primer
ctctcctggctcgccttg

SEQ ID NO: 15747 - DNA, 18 bp, Artificial sequence  Forward Primer
  Primer
ttgggtgctggggttgcc

SEQ ID NO: 15748 - DNA, 18 bp, Artificial sequence  Forward Primer
  Primer
ttgcctggtttcatggct

SEQ ID NO: 15749 - DNA, 30 bp, Artificial sequence  Forward Primer
  Primer
ataaaaatacattataaagtggttgagaga

SEQ ID NO: 15750 - DNA, 20 bp, Artificial sequence  Forward Primer
  Primer
taggagctgtgggaaaactg

SEQ ID NO: 15751 - DNA, 18 bp, Artificial sequence  Forward Primer
  Primer
aaccygcactccctgcat

SEQ ID NO: 15752 - DNA, 25 bp, Artificial sequence  Forward Primer
  Primer
tcttgttgtatgtcttaaccactgg

SEQ ID NO: 15753 - DNA, 20 bp, Artificial sequence  Forward Primer
  Primer
ttgaaattctgctttgcctc

SEQ ID NO: 15754 - DNA, 20 bp, Artificial sequence  Forward Primer
  Primer
acacatgtctcctcacagct

SEQ ID NO: 15755 - DNA, 18 bp, Artificial sequence  Forward Primer
  Primer
gcttggggtggattcagt

SEQ ID NO: 15756 - DNA, 26 bp, Artificial sequence  Forward Primer
  Primer
tttaaagtatagctgaaaccctacca

SEQ ID NO: 15757 - DNA, 18 bp, Artificial sequence  Forward Primer
  Primer
agttcgggcagctcaccg

SEQ ID NO: 15758 - DNA, 20 bp, Artificial sequence  Forward Primer
  Primer
tctgtgatggaccactgagc

SEQ ID NO: 15759 - DNA, 21 bp, Artificial sequence  Forward Primer
  Primer
tagttctgttttctgggcctt

SEQ ID NO: 15760 - DNA, 22 bp, Artificial sequence  Forward Primer
  Primer
agaaacacaagggtctgtatgc

SEQ ID NO: 15761 - DNA, 18 bp, Artificial sequence  Forward Primer
  Primer
actcagggacccgactgg

SEQ ID NO: 15762 - DNA, 30 bp, Artificial sequence  Forward Primer
  Primer
aaataatatactaaacagacawacagcacc

SEQ ID NO: 15763 - DNA, 23 bp, Artificial sequence  Forward Primer
  Primer
tttctataatagcyttggtccca

SEQ ID NO: 15764 - DNA, 20 bp, Artificial sequence  Forward Primer
  Primer
tcatccatgaaagaggaagg

SEQ ID NO: 15765 - DNA, 18 bp, Artificial sequence  Forward Primer
  Primer
gtggggggcagttccaag

SEQ ID NO: 15766 - DNA, 27 bp, Artificial sequence  Forward Primer
  Primer
atatattaggagtggagaatcagaatg

SEQ ID NO: 15767 - DNA, 18 bp, Artificial sequence  Forward Primer
  Primer
acgaacacggtcatacgc

SEQ ID NO: 15768 - DNA, 25 bp, Artificial sequence  Forward Primer
  Primer
ataatccaagttacatcatccttcc

SEQ ID NO: 15769 - DNA, 22 bp, Artificial sequence  Forward Primer
  Primer
tttcaatttatgaacgatctct

SEQ ID NO: 15770 - DNA, 19 bp, Artificial sequence  Forward Primer
  Primer
atttcaccattgcttcctg

SEQ ID NO: 15771 - DNA, 22 bp, Artificial sequence  Forward Primer
  Primer
aaaaaatacagcccactctgtg

SEQ ID NO: 15772 - DNA, 22 bp, Artificial sequence  Forward Primer
  Primer
caagtctccagctcactttctc

SEQ ID NO: 15773 - DNA, 18 bp, Artificial sequence  Forward Primer
  Primer
accgtgcatttccagtgc

SEQ ID NO: 15774 - DNA, 23 bp, Artificial sequence  Forward Primer
  Primer
tttgatgacaatccattcaactt

SEQ ID NO: 15775 - DNA, 18 bp, Artificial sequence  Forward Primer
  Primer
agcctctcctgcaattcc

SEQ ID NO: 15776 - DNA, 23 bp, Artificial sequence  Forward Primer
  Primer
aacaacttctgcctgtaattcct

SEQ ID NO: 15777 - DNA, 20 bp, Artificial sequence  Forward Primer
  Primer
tgttctgaggcccagatatg

SEQ ID NO: 15778 - DNA, 24 bp, Artificial sequence  Forward Primer
  Primer
aaaragtattcaaatcagtccagg

SEQ ID NO: 15779 - DNA, 18 bp, Artificial sequence  Forward Primer
  Primer
agcccctgatggcccttc

SEQ ID NO: 15780 - DNA, 25 bp, Artificial sequence  Forward Primer
  Primer
atgctcctcttaaaaaatmattgaa

SEQ ID NO: 15781 - DNA, 25 bp, Artificial sequence  Forward Primer
  Primer
cacttttctcttactgctttcaaga

SEQ ID NO: 15782 - DNA, 19 bp, Artificial sequence  Forward Primer
  Primer
aaaaccacacacacgcatt

SEQ ID NO: 15783 - DNA, 27 bp, Artificial sequence  Forward Primer
  Primer
atatttgtctttgtgactttctctctc

SEQ ID NO: 15784 - DNA, 20 bp, Artificial sequence  Forward Primer
  Primer
acacaggagaaaatgtccca

SEQ ID NO: 15785 - DNA, 24 bp, Artificial sequence  Forward Primer
  Primer
agaagcaaataattcatttccagt

SEQ ID NO: 15786 - DNA, 21 bp, Artificial sequence  Forward Primer
  Primer
agtttctaccagtggttacgt

SEQ ID NO: 15787 - DNA, 20 bp, Artificial sequence  Forward Primer
  Primer
tttgcagaagcctaaggagt

SEQ ID NO: 15788 - DNA, 21 bp, Artificial sequence  Forward Primer
  Primer
cggtcagaagctcttaagtcg

SEQ ID NO: 15789 - DNA, 21 bp, Artificial sequence  Forward Primer
  Primer
ttatagggtctttcccctgaa

SEQ ID NO: 15790 - DNA, 19 bp, Artificial sequence  Forward Primer
  Primer
ccaataagcaactcaggag

SEQ ID NO: 15791 - DNA, 21 bp, Artificial sequence  Forward Primer
  Primer
ttttctgggtcttctctgtcc

SEQ ID NO: 15792 - DNA, 23 bp, Artificial sequence  Forward Primer
  Primer
ttcagaaagctgaaactcacatt

SEQ ID NO: 15793 - DNA, 21 bp, Artificial sequence  Forward Primer
  Primer
ttcagactcaaatgctaagcc

SEQ ID NO: 15794 - DNA, 20 bp, Artificial sequence  Forward Primer
  Primer
gagctaggagaggaggaaga

SEQ ID NO: 15795 - DNA, 22 bp, Artificial sequence  Forward Primer
  Primer
agcccctagtacccactaatct

SEQ ID NO: 15796 - DNA, 18 bp, Artificial sequence  Forward Primer
  Primer
atccagggagtgtcggcc

SEQ ID NO: 15797 - DNA, 22 bp, Artificial sequence  Forward Primer
  Primer
taaagtcagagtagacacgggc

SEQ ID NO: 15798 - DNA, 25 bp, Artificial sequence  Forward Primer
  Primer
ataaattttaaaaaaccctccaagc

SEQ ID NO: 15799 - DNA, 20 bp, Artificial sequence  Forward Primer
  Primer
aaatttcagccaagcctaca

SEQ ID NO: 15800 - DNA, 29 bp, Artificial sequence  Forward Primer
  Primer
atacaacttatcaactagacaacaacaac

SEQ ID NO: 15801 - DNA, 23 bp, Artificial sequence  Forward Primer
  Primer
tgcattcctaagtgatgaatacc

SEQ ID NO: 15802 - DNA, 20 bp, Artificial sequence  Forward Primer
  Primer
gaaataagtcaggtgtgtgg

SEQ ID NO: 15803 - DNA, 29 bp, Artificial sequence  Forward Primer
  Primer
ccaaagacaataaagtaaatgaatatctg

SEQ ID NO: 15804 - DNA, 20 bp, Artificial sequence  Forward Primer
  Primer
atttccaaatccatgctcct

SEQ ID NO: 15805 - DNA, 18 bp, Artificial sequence  Forward Primer
  Primer
agcctaaggtggggaaca

SEQ ID NO: 15806 - DNA, 21 bp, Artificial sequence  Forward Primer
  Primer
atttgagcatttgaggattcc

SEQ ID NO: 15807 - DNA, 24 bp, Artificial sequence  Forward Primer
  Primer
cttggctgtattatactcaagcag

SEQ ID NO: 15808 - DNA, 24 bp, Artificial sequence  Forward Primer
  Primer
attttctatttgcttgactttttg

SEQ ID NO: 15809 - DNA, 24 bp, Artificial sequence  Forward Primer
  Primer
tttattgacaaaagccaaatatgg

SEQ ID NO: 15810 - DNA, 23 bp, Artificial sequence  Forward Primer
  Primer
ttaaaaagttgcttagatgcagc

SEQ ID NO: 15811 - DNA, 28 bp, Artificial sequence  Forward Primer
  Primer
tattaattgtggacagtttttaattgag

SEQ ID NO: 15812 - DNA, 28 bp, Artificial sequence  Forward Primer
  Primer
aaacgtaaaaatatctatcattgactga

SEQ ID NO: 15813 - DNA, 26 bp, Artificial sequence  Forward Primer
  Primer
cttcctaacatcaagttacctagagg

SEQ ID NO: 15814 - DNA, 20 bp, Artificial sequence  Forward Primer
  Primer
acaacacatcttgtggttgg

SEQ ID NO: 15815 - DNA, 20 bp, Artificial sequence  Forward Primer
  Primer
aaaaacaagtcctcacgctt

SEQ ID NO: 15816 - DNA, 30 bp, Artificial sequence  Forward Primer
  Primer
ggttattgttaattagttttacttttccta

SEQ ID NO: 15817 - DNA, 20 bp, Artificial sequence  Forward Primer
  Primer
tggttaatggcttctctgca

SEQ ID NO: 15818 - DNA, 30 bp, Artificial sequence  Forward Primer
  Primer
attattcaagatactataagaagcagttct

SEQ ID NO: 15819 - DNA, 28 bp, Artificial sequence  Forward Primer
  Primer
tgattagcagtaatgaaaagtttatagc

SEQ ID NO: 15820 - DNA, 30 bp, Artificial sequence  Forward Primer
  Primer
agaataatagtgttactgaataaaacaaga

SEQ ID NO: 15821 - DNA, 21 bp, Artificial sequence  Forward Primer
  Primer
cggtttttcagtactttgctc

SEQ ID NO: 15822 - DNA, 25 bp, Artificial sequence  Forward Primer
  Primer
attatcttggaacgaggtagtatgg

SEQ ID NO: 15823 - DNA, 25 bp, Artificial sequence  Forward Primer
  Primer
agtttacaaagtgcttttaattggg

SEQ ID NO: 15824 - DNA, 19 bp, Artificial sequence  Forward Primer
  Primer
attgggggaaatgaaggtt

SEQ ID NO: 15825 - DNA, 20 bp, Artificial sequence  Forward Primer
  Primer
atttctctccttcacccacg

SEQ ID NO: 15826 - DNA, 22 bp, Artificial sequence  Forward Primer
  Primer
taaagccctatttctggacttg

SEQ ID NO: 15827 - DNA, 19 bp, Artificial sequence  Forward Primer
  Primer
aaaattcctgctctgccac

SEQ ID NO: 15828 - DNA, 20 bp, Artificial sequence  Forward Primer
  Primer
ttgggctgattcaaacctag

SEQ ID NO: 15829 - DNA, 20 bp, Artificial sequence  Forward Primer
  Primer
ggtggaaagtgcatgattat

SEQ ID NO: 15830 - DNA, 28 bp, Artificial sequence  Forward Primer
  Primer
aatatgagctccagttctaaactttatg

SEQ ID NO: 15831 - DNA, 19 bp, Artificial sequence  Forward Primer
  Primer
ctctgcctcttttgacgtg

SEQ ID NO: 15832 - DNA, 23 bp, Artificial sequence  Forward Primer
  Primer
atgagatgccattgtctaaaatc

SEQ ID NO: 15833 - DNA, 30 bp, Artificial sequence  Forward Primer
  Primer
atttggtatacagcaatagataattaacac

SEQ ID NO: 15834 - DNA, 24 bp, Artificial sequence  Forward Primer
  Primer
aaagcacactgcaatgtataaatg

SEQ ID NO: 15835 - DNA, 22 bp, Artificial sequence  Forward Primer
  Primer
aaggtgtggtgatatccacagt

SEQ ID NO: 15836 - DNA, 26 bp, Artificial sequence  Forward Primer
  Primer
atgagttagctctcttgtcaaaattc

SEQ ID NO: 15837 - DNA, 20 bp, Artificial sequence  Forward Primer
  Primer
tgggacattctcaacctagc

SEQ ID NO: 15838 - DNA, 23 bp, Artificial sequence  Forward Primer
  Primer
attcatcagtagctttggtgaca

SEQ ID NO: 15839 - DNA, 22 bp, Artificial sequence  Forward Primer
  Primer
atgatgtatctgaaactgccct

SEQ ID NO: 15840 - DNA, 18 bp, Artificial sequence  Forward Primer
  Primer
gaaaacctgccctaccca

SEQ ID NO: 15841 - DNA, 24 bp, Artificial sequence  Forward Primer
  Primer
ttttaatgcaggtttgacatctta

SEQ ID NO: 15842 - DNA, 27 bp, Artificial sequence  Forward Primer
  Primer
aatttctgtaacacagtaactacaccc

SEQ ID NO: 15843 - DNA, 20 bp, Artificial sequence  Forward Primer
  Primer
tgtttctcgaattcagtctc

SEQ ID NO: 15844 - DNA, 23 bp, Artificial sequence  Forward Primer
  Primer
acagagtccctgtttctgtttag

SEQ ID NO: 15845 - DNA, 28 bp, Artificial sequence  Forward Primer
  Primer
ttggtaagcttaaataatcttaggatct

SEQ ID NO: 15846 - DNA, 27 bp, Artificial sequence  Forward Primer
  Primer
gctatttcaagctaacaaaaatctaca

SEQ ID NO: 15847 - DNA, 30 bp, Artificial sequence  Forward Primer
  Primer
tagttaccaatttgctactactgtattaaa

SEQ ID NO: 15848 - DNA, 26 bp, Artificial sequence  Forward Primer
  Primer
atatgaggatgattgtaatcacttgg

SEQ ID NO: 15849 - DNA, 21 bp, Artificial sequence  Forward Primer
  Primer
aaaatgtctgggatctatgcc

SEQ ID NO: 15850 - DNA, 26 bp, Artificial sequence  Forward Primer
  Primer
taatacttgtagcttcaggaaattga

SEQ ID NO: 15851 - DNA, 25 bp, Artificial sequence  Forward Primer
  Primer
tatttgtgaagaaataccaacctca

SEQ ID NO: 15852 - DNA, 24 bp, Artificial sequence  Forward Primer
  Primer
tacaaataccaattcatgctttcc

SEQ ID NO: 15853 - DNA, 21 bp, Artificial sequence  Forward Primer
  Primer
tatgtgaccttacrtggcaaa

SEQ ID NO: 15854 - DNA, 29 bp, Artificial sequence  Forward Primer
  Primer
tttgagacttaaatgatattagtttcctc

SEQ ID NO: 15855 - DNA, 27 bp, Artificial sequence  Forward Primer
  Primer
taacagaaggatgaggtaagtataagg

SEQ ID NO: 15856 - DNA, 26 bp, Artificial sequence  Forward Primer
  Primer
atacatttagctgattcactttgttg

SEQ ID NO: 15857 - DNA, 28 bp, Artificial sequence  Forward Primer
  Primer
tataacaatttaatgtttaacctttccc

SEQ ID NO: 15858 - DNA, 25 bp, Artificial sequence  Forward Primer
  Primer
aatgagacatttgaaactatctgga

SEQ ID NO: 15859 - DNA, 20 bp, Artificial sequence  Forward Primer
  Primer
atgattaacatcgcaatccc

SEQ ID NO: 15860 - DNA, 18 bp, Artificial sequence  Forward Primer
  Primer
tcaccccagctactgctg

SEQ ID NO: 15861 - DNA, 23 bp, Artificial sequence  Forward Primer
  Primer
atcccagaataagtttggacagt

SEQ ID NO: 15862 - DNA, 25 bp, Artificial sequence  Forward Primer
  Primer
aatcagactcagagcaagtagactc

SEQ ID NO: 15863 - DNA, 18 bp, Artificial sequence  Forward Primer
  Primer
tgggaaagccatcaaccc

SEQ ID NO: 15864 - DNA, 18 bp, Artificial sequence  Forward Primer
  Primer
aaaggcccgtctctgctc

SEQ ID NO: 15865 - DNA, 24 bp, Artificial sequence  Forward Primer
  Primer
aagagaggaagtgcttatctcatg

SEQ ID NO: 15866 - DNA, 26 bp, Artificial sequence  Forward Primer
  Primer
aaacagataatgagagagtgggatat

SEQ ID NO: 15867 - DNA, 24 bp, Artificial sequence  Forward Primer
  Primer
ctttccactcaagtgtgtcataaa

SEQ ID NO: 15868 - DNA, 24 bp, Artificial sequence  Forward Primer
  Primer
ttcagtatgagaatcgtactggtg

SEQ ID NO: 15869 - DNA, 23 bp, Artificial sequence  Forward Primer
  Primer
atactttggggatttttatggtg

SEQ ID NO: 15870 - DNA, 20 bp, Artificial sequence  Forward Primer
  Primer
tctacaatgattgggatgga

SEQ ID NO: 15871 - DNA, 24 bp, Artificial sequence  Forward Primer
  Primer
agaaatgaaagagtcatccttgat

SEQ ID NO: 15872 - DNA, 20 bp, Artificial sequence  Forward Primer
  Primer
aatgtcgagtttatgccgag

SEQ ID NO: 15873 - DNA, 23 bp, Artificial sequence  Forward Primer
  Primer
ttttattagcaatcaactctgcc

SEQ ID NO: 15874 - DNA, 25 bp, Artificial sequence  Forward Primer
  Primer
tactcagtccactatctgctttttt

SEQ ID NO: 15875 - DNA, 25 bp, Artificial sequence  Forward Primer
  Primer
aagaggaacactcacacatgttatt

SEQ ID NO: 15876 - DNA, 21 bp, Artificial sequence  Forward Primer
  Primer
tttaaatgcaaattccatcca

SEQ ID NO: 15877 - DNA, 19 bp, Artificial sequence  Forward Primer
  Primer
ataagaagtcattgcccgc

SEQ ID NO: 15878 - DNA, 21 bp, Artificial sequence  Forward Primer
  Primer
agtgaagggcttgckaactaa

SEQ ID NO: 15879 - DNA, 20 bp, Artificial sequence  Forward Primer
  Primer
ttcagatccgagaccaaaag

SEQ ID NO: 15880 - DNA, 25 bp, Artificial sequence  Forward Primer
  Primer
aaaatggtatgaagtgcttagatca

SEQ ID NO: 15881 - DNA, 22 bp, Artificial sequence  Forward Primer
  Primer
aagttctcaaacagtcctgagc

SEQ ID NO: 15882 - DNA, 21 bp, Artificial sequence  Forward Primer
  Primer
tatactgttggagcccagaaa

SEQ ID NO: 15883 - DNA, 20 bp, Artificial sequence  Forward Primer
  Primer
cagaactggatttgaaccca

SEQ ID NO: 15884 - DNA, 22 bp, Artificial sequence  Forward Primer
  Primer
tattgataaaatgcagacaggg

SEQ ID NO: 15885 - DNA, 25 bp, Artificial sequence  Forward Primer
  Primer
aacttaccttcttgagtttcttggt

SEQ ID NO: 15886 - DNA, 19 bp, Artificial sequence  Forward Primer
  Primer
tgagtgttcctgtggaagg

SEQ ID NO: 15887 - DNA, 19 bp, Artificial sequence  Forward Primer
  Primer
tcactcaggcttgaccatg

SEQ ID NO: 15888 - DNA, 19 bp, Artificial sequence  Forward Primer
  Primer
cctgcaagaggaagaaata

SEQ ID NO: 15889 - DNA, 18 bp, Artificial sequence  Forward Primer
  Primer
acctctgcagggccttcc

SEQ ID NO: 15890 - DNA, 18 bp, Artificial sequence  Forward Primer
  Primer
aacccagccaagggcaga

SEQ ID NO: 15891 - DNA, 18 bp, Artificial sequence  Forward Primer
  Primer
atgggcaggagtgagggg

SEQ ID NO: 15892 - DNA, 19 bp, Artificial sequence  Forward Primer
  Primer
gactgtgggtaaacacgca

SEQ ID NO: 15893 - DNA, 21 bp, Artificial sequence  Forward Primer
  Primer
tagggagctcttgtcctaaga

SEQ ID NO: 15894 - DNA, 18 bp, Artificial sequence  Forward Primer
  Primer
ctcccagacctctgatgg

SEQ ID NO: 15895 - DNA, 22 bp, Artificial sequence  Forward Primer
  Primer
attagtgtcagcatggaagctg

SEQ ID NO: 15896 - DNA, 18 bp, Artificial sequence  Forward Primer
  Primer
gctggctcctaacctcca

SEQ ID NO: 15897 - DNA, 28 bp, Artificial sequence  Forward Primer
  Primer
tttagagaccaaaataacatataaacca

SEQ ID NO: 15898 - DNA, 30 bp, Artificial sequence  Forward Primer
  Primer
cacagttttataggttaacacaatgtaata

SEQ ID NO: 15899 - DNA, 25 bp, Artificial sequence  Forward Primer
  Primer
tttcctgaagctcataaagttaaca

SEQ ID NO: 15900 - DNA, 29 bp, Artificial sequence  Forward Primer
  Primer
ataacactgttctctttatttcacttagc

SEQ ID NO: 15901 - DNA, 22 bp, Artificial sequence  Forward Primer
  Primer
taattgaatgttttgccgtttt

SEQ ID NO: 15902 - DNA, 28 bp, Artificial sequence  Forward Primer
  Primer
taaatacatgtaaccaaatcacttttct

SEQ ID NO: 15903 - DNA, 29 bp, Artificial sequence  Forward Primer
  Primer
tggagtaagattaataaatccttkaaagt

SEQ ID NO: 15904 - DNA, 22 bp, Artificial sequence  Forward Primer
  Primer
aggagtgacaaaactgctcttc

SEQ ID NO: 15905 - DNA, 23 bp, Artificial sequence  Forward Primer
  Primer
caactagctgcagaaaaacaagt

SEQ ID NO: 15906 - DNA, 30 bp, Artificial sequence  Forward Primer
  Primer
ttaccctcatatattatgtctttatatttc

SEQ ID NO: 15907 - DNA, 25 bp, Artificial sequence  Forward Primer
  Primer
aaacctgtactttgattactgatgg

SEQ ID NO: 15908 - DNA, 19 bp, Artificial sequence  Forward Primer
  Primer
ttggaagtcactgcctttg

SEQ ID NO: 15909 - DNA, 22 bp, Artificial sequence  Forward Primer
  Primer
agtgatgtcatccaaccatctc

SEQ ID NO: 15910 - DNA, 18 bp, Artificial sequence  Forward Primer
  Primer
atgaatcagatgccgcaa

SEQ ID NO: 15911 - DNA, 19 bp, Artificial sequence  Forward Primer
  Primer
aagcggtatctgaaggctg

SEQ ID NO: 15912 - DNA, 21 bp, Artificial sequence  Forward Primer
  Primer
aaacacacgagcagatttctc

SEQ ID NO: 15913 - DNA, 25 bp, Artificial sequence  Forward Primer
  Primer
ggtaagcagacagaaagataaacag

SEQ ID NO: 15914 - DNA, 30 bp, Artificial sequence  Forward Primer
  Primer
ctgttagttaatttatttctgttttagtca

SEQ ID NO: 15915 - DNA, 24 bp, Artificial sequence  Forward Primer
  Primer
attaaaatgtgttactggtttcaa

SEQ ID NO: 15916 - DNA, 22 bp, Artificial sequence  Forward Primer
  Primer
aaaggtaagaggggtcaaagtt

SEQ ID NO: 15917 - DNA, 22 bp, Artificial sequence  Forward Primer
  Primer
ggcctcaggacatttagaattt

SEQ ID NO: 15918 - DNA, 24 bp, Artificial sequence  Forward Primer
  Primer
tggatttttcttttcttttctttg

SEQ ID NO: 15919 - DNA, 30 bp, Artificial sequence  Forward Primer
  Primer
taatttacactgaataagaatacaagttac

SEQ ID NO: 15920 - DNA, 18 bp, Artificial sequence  Forward Primer
  Primer
attgtcagccacgctcag

SEQ ID NO: 15921 - DNA, 23 bp, Artificial sequence  Forward Primer
  Primer
tttaacacagaagctcagcagtt

SEQ ID NO: 15922 - DNA, 27 bp, Artificial sequence  Forward Primer
  Primer
tttttagccaggtttttatacagtaga

SEQ ID NO: 15923 - DNA, 25 bp, Artificial sequence  Forward Primer
  Primer
ttaaactttttttcccctattcact

SEQ ID NO: 15924 - DNA, 28 bp, Artificial sequence  Forward Primer
  Primer
catctatattttgttatcatcttcaacc

SEQ ID NO: 15925 - DNA, 18 bp, Artificial sequence  Forward Primer
  Primer
atggcttgtgtgaggctc

SEQ ID NO: 15926 - DNA, 25 bp, Artificial sequence  Forward Primer
  Primer
tttaaatggtctaagtgccttaaca

SEQ ID NO: 15927 - DNA, 22 bp, Artificial sequence  Forward Primer
  Primer
tcaagaccactgacttaaacaa

SEQ ID NO: 15928 - DNA, 25 bp, Artificial sequence  Forward Primer
  Primer
atatgactcaaagaaaatgctacct

SEQ ID NO: 15929 - DNA, 19 bp, Artificial sequence  Forward Primer
  Primer
ttccrgatgacaagttggg

SEQ ID NO: 15930 - DNA, 19 bp, Artificial sequence  Forward Primer
  Primer
agaggagagacgtggctga

SEQ ID NO: 15931 - DNA, 19 bp, Artificial sequence  Forward Primer
  Primer
accccattgagaatgagga

SEQ ID NO: 15932 - DNA, 19 bp, Artificial sequence  Forward Primer
  Primer
ttctccaaggcatccttct

SEQ ID NO: 15933 - DNA, 18 bp, Artificial sequence  Forward Primer
  Primer
tgattccctggcaggcag

SEQ ID NO: 15934 - DNA, 22 bp, Artificial sequence  Forward Primer
  Primer
ttamgtgtggggaagagttaca

SEQ ID NO: 15935 - DNA, 20 bp, Artificial sequence  Forward Primer
  Primer
tggagaaaccagaatccaag

SEQ ID NO: 15936 - DNA, 18 bp, Artificial sequence  Forward Primer
  Primer
tttgactgtggcctgagc

SEQ ID NO: 15937 - DNA, 22 bp, Artificial sequence  Forward Primer
  Primer
agagagattgagtggaaagagc

SEQ ID NO: 15938 - DNA, 18 bp, Artificial sequence  Forward Primer
  Primer
tagcaaagggggccatac

SEQ ID NO: 15939 - DNA, 18 bp, Artificial sequence  Forward Primer
  Primer
tgagcagattgccttccg

SEQ ID NO: 15940 - DNA, 27 bp, Artificial sequence  Forward Primer
  Primer
ataattagagcatcattcctcataatg

SEQ ID NO: 15941 - DNA, 22 bp, Artificial sequence  Forward Primer
  Primer
ttgacggaagagttttgtcata

SEQ ID NO: 15942 - DNA, 24 bp, Artificial sequence  Forward Primer
  Primer
actttactaccaactcagcatctg

SEQ ID NO: 15943 - DNA, 23 bp, Artificial sequence  Forward Primer
  Primer
agggcatgttatatgcttatagg

SEQ ID NO: 15944 - DNA, 20 bp, Artificial sequence  Forward Primer
  Primer
tacctcccttttccaactgc

SEQ ID NO: 15945 - DNA, 28 bp, Artificial sequence  Forward Primer
  Primer
tgcagattgtgaataactataaactttt

SEQ ID NO: 15946 - DNA, 18 bp, Artificial sequence  Forward Primer
  Primer
tttgggatcagcttccct

SEQ ID NO: 15947 - DNA, 27 bp, Artificial sequence  Forward Primer
  Primer
attgtctcaactttaagtaccactctt

SEQ ID NO: 15948 - DNA, 22 bp, Artificial sequence  Forward Primer
  Primer
attgtagtgtgcaccatttttg

SEQ ID NO: 15949 - DNA, 24 bp, Artificial sequence  Forward Primer
  Primer
tgttttatctccagaacaagatat

SEQ ID NO: 15950 - DNA, 25 bp, Artificial sequence  Forward Primer
  Primer
ttttaaattaaagcacaacagatgg

SEQ ID NO: 15951 - DNA, 27 bp, Artificial sequence  Forward Primer
  Primer
ttcagttattaagattaagctctgctc

SEQ ID NO: 15952 - DNA, 25 bp, Artificial sequence  Forward Primer
  Primer
ttaragaggatggtaggatattaaa

SEQ ID NO: 15953 - DNA, 25 bp, Artificial sequence  Forward Primer
  Primer
aggtggatatatgaaaatttgaaca

SEQ ID NO: 15954 - DNA, 25 bp, Artificial sequence  Forward Primer
  Primer
taacttctgttttgtaatttcctgg

SEQ ID NO: 15955 - DNA, 30 bp, Artificial sequence  Forward Primer
  Primer
aataatagttctttccctactaatagacat

SEQ ID NO: 15956 - DNA, 23 bp, Artificial sequence  Forward Primer
  Primer
tgctctctccatcaatttctaac

SEQ ID NO: 15957 - DNA, 21 bp, Artificial sequence  Forward Primer
  Primer
ctgcaaaacttttaccggtct

SEQ ID NO: 15958 - DNA, 24 bp, Artificial sequence  Forward Primer
  Primer
aaaatcagtgaaggtgatgttatg

SEQ ID NO: 15959 - DNA, 18 bp, Artificial sequence  Forward Primer
  Primer
ttgtcactccaggaccca

SEQ ID NO: 15960 - DNA, 30 bp, Artificial sequence  Forward Primer
  Primer
atcttattagagagctcactagctagaata

SEQ ID NO: 15961 - DNA, 20 bp, Artificial sequence  Forward Primer
  Primer
tgattccgaggtctctcaga

SEQ ID NO: 15962 - DNA, 19 bp, Artificial sequence  Forward Primer
  Primer
ctgatgggcagagtaggtc

SEQ ID NO: 15963 - DNA, 25 bp, Artificial sequence  Forward Primer
  Primer
actggttgacctctaagactacttc

SEQ ID NO: 15964 - DNA, 22 bp, Artificial sequence  Forward Primer
  Primer
actgtacatgtgttggtactga

SEQ ID NO: 15965 - DNA, 22 bp, Artificial sequence  Forward Primer
  Primer
attagtagggacctccctgttc

SEQ ID NO: 15966 - DNA, 23 bp, Artificial sequence  Forward Primer
  Primer
aaattaatggaaacacagagagg

SEQ ID NO: 15967 - DNA, 27 bp, Artificial sequence  Forward Primer
  Primer
attatggatcaacgtatgtaaggataa

SEQ ID NO: 15968 - DNA, 20 bp, Artificial sequence  Forward Primer
  Primer
tcaggagtcaacatgaccac

SEQ ID NO: 15969 - DNA, 19 bp, Artificial sequence  Forward Primer
  Primer
ttgaggatgctctgtttca

SEQ ID NO: 15970 - DNA, 20 bp, Artificial sequence  Forward Primer
  Primer
ttttctgcaagccacatagc

SEQ ID NO: 15971 - DNA, 19 bp, Artificial sequence  Forward Primer
  Primer
actcagtgaaggttggctg

SEQ ID NO: 15972 - DNA, 23 bp, Artificial sequence  Forward Primer
  Primer
aacagtaaaagcttcatcagctc

SEQ ID NO: 15973 - DNA, 24 bp, Artificial sequence  Forward Primer
  Primer
aatgaagaattatccagcaaaaat

SEQ ID NO: 15974 - DNA, 25 bp, Artificial sequence  Forward Primer
  Primer
aacttgtaaatggccaaagtataca

SEQ ID NO: 15975 - DNA, 27 bp, Artificial sequence  Forward Primer
  Primer
aatgattgtaaaagaaagaacacagtt

SEQ ID NO: 15976 - DNA, 25 bp, Artificial sequence  Forward Primer
  Primer
ttatttagtccctaagttgtctcca

SEQ ID NO: 15977 - DNA, 23 bp, Artificial sequence  Forward Primer
  Primer
actttgagtaagcagagcacact

SEQ ID NO: 15978 - DNA, 18 bp, Artificial sequence  Forward Primer
  Primer
acctgtcccaagttgcca

SEQ ID NO: 15979 - DNA, 24 bp, Artificial sequence  Forward Primer
  Primer
ttctaataccacagacaacccttc

SEQ ID NO: 15980 - DNA, 23 bp, Artificial sequence  Forward Primer
  Primer
tgaaaaagacacacttcatcaag

SEQ ID NO: 15981 - DNA, 18 bp, Artificial sequence  Forward Primer
  Primer
aaagttgtgcagagggcc

SEQ ID NO: 15982 - DNA, 18 bp, Artificial sequence  Forward Primer
  Primer
cgagacaaggagcgagag

SEQ ID NO: 15983 - DNA, 22 bp, Artificial sequence  Forward Primer
  Primer
aatgatcttataattctggcgg

SEQ ID NO: 15984 - DNA, 27 bp, Artificial sequence  Forward Primer
  Primer
agaaaattccctaaaactgactttaaa

SEQ ID NO: 15985 - DNA, 27 bp, Artificial sequence  Forward Primer
  Primer
tttcaatattcccattttatagatcag

SEQ ID NO: 15986 - DNA, 25 bp, Artificial sequence  Forward Primer
  Primer
aaataaactgcatttaaaacctgag

SEQ ID NO: 15987 - DNA, 20 bp, Artificial sequence  Forward Primer
  Primer
ataactcgttagaggctggg

SEQ ID NO: 15988 - DNA, 18 bp, Artificial sequence  Forward Primer
  Primer
ttcaagccagaccaggtg

SEQ ID NO: 15989 - DNA, 18 bp, Artificial sequence  Forward Primer
  Primer
gtcacagacacggtgccc

SEQ ID NO: 15990 - DNA, 23 bp, Artificial sequence  Forward Primer
  Primer
aagtgagtgatggctataatgga

SEQ ID NO: 15991 - DNA, 22 bp, Artificial sequence  Forward Primer
  Primer
ccctctggtctgtcttcttaga

SEQ ID NO: 15992 - DNA, 19 bp, Artificial sequence  Forward Primer
  Primer
tagatctccgttgctgtgc

SEQ ID NO: 15993 - DNA, 28 bp, Artificial sequence  Forward Primer
  Primer
aactatatcatgttcttggactgtaaga

SEQ ID NO: 15994 - DNA, 20 bp, Artificial sequence  Forward Primer
  Primer
aatccctgacagactttgaa

SEQ ID NO: 15995 - DNA, 29 bp, Artificial sequence  Forward Primer
  Primer
agtatttccatgtatgtgtgtaaatatga

SEQ ID NO: 15996 - DNA, 19 bp, Artificial sequence  Forward Primer
  Primer
ttttccttgtcacggaggt

SEQ ID NO: 15997 - DNA, 30 bp, Artificial sequence  Forward Primer
  Primer
tacttagtctcactaatgagtttgaaattt

SEQ ID NO: 15998 - DNA, 26 bp, Artificial sequence  Forward Primer
  Primer
tgcagataagagaatttcatgtaaaa

SEQ ID NO: 15999 - DNA, 18 bp, Artificial sequence  Forward Primer
  Primer
ctgctgacatgctggcag

SEQ ID NO: 16000 - DNA, 25 bp, Artificial sequence  Forward Primer
  Primer
aaagaatggctgtaattaccatatc

SEQ ID NO: 16001 - DNA, 20 bp, Artificial sequence  Forward Primer
  Primer
tttcttcccagcttgtgtgt

SEQ ID NO: 16002 - DNA, 19 bp, Artificial sequence  Forward Primer
  Primer
caccccatcctttccttaa

SEQ ID NO: 16003 - DNA, 18 bp, Artificial sequence  Forward Primer
  Primer
actaccgactgggggaaa

SEQ ID NO: 16004 - DNA, 18 bp, Artificial sequence  Forward Primer
  Primer
aaaatacggtgggcttgg

SEQ ID NO: 16005 - DNA, 23 bp, Artificial sequence  Forward Primer
  Primer
caggtctgatcagagaagtgatt

SEQ ID NO: 16006 - DNA, 25 bp, Artificial sequence  Forward Primer
  Primer
atatcatctggagaactttgctaca

SEQ ID NO: 16007 - DNA, 25 bp, Artificial sequence  Forward Primer
  Primer
aaatgagctctttcacagtagctag

SEQ ID NO: 16008 - DNA, 24 bp, Artificial sequence  Forward Primer
  Primer
tatttcttccattactgtggctct

SEQ ID NO: 16009 - DNA, 24 bp, Artificial sequence  Forward Primer
  Primer
aattactaatgaggggatgtctca

SEQ ID NO: 16010 - DNA, 23 bp, Artificial sequence  Forward Primer
  Primer
tgtcctagcttaatgatgagagg

SEQ ID NO: 16011 - DNA, 18 bp, Artificial sequence  Forward Primer
  Primer
attgagcctgggctgctc

SEQ ID NO: 16012 - DNA, 18 bp, Artificial sequence  Forward Primer
  Primer
acagaggtacccggcggt

SEQ ID NO: 16013 - DNA, 19 bp, Artificial sequence  Forward Primer
  Primer
tttctgtggccaaagatgc

SEQ ID NO: 16014 - DNA, 18 bp, Artificial sequence  Forward Primer
  Primer
aattctacccacccgtgg

SEQ ID NO: 16015 - DNA, 20 bp, Artificial sequence  Forward Primer
  Primer
tttgggtgatcctgagagat

SEQ ID NO: 16016 - DNA, 22 bp, Artificial sequence  Forward Primer
  Primer
tcaccgacatcaagactatttg

SEQ ID NO: 16017 - DNA, 19 bp, Artificial sequence  Forward Primer
  Primer
tggttggcattcaaacact

SEQ ID NO: 16018 - DNA, 24 bp, Artificial sequence  Forward Primer
  Primer
taacagttctcatggtttcaaatc

SEQ ID NO: 16019 - DNA, 20 bp, Artificial sequence  Forward Primer
  Primer
attctgcagtaaacggctcc

SEQ ID NO: 16020 - DNA, 18 bp, Artificial sequence  Forward Primer
  Primer
ttcctgtaggtggctccc

SEQ ID NO: 16021 - DNA, 23 bp, Artificial sequence  Forward Primer
  Primer
atttcagtcatgctttcatctga

SEQ ID NO: 16022 - DNA, 23 bp, Artificial sequence  Forward Primer
  Primer
ataaatcgcaggtacagaaaagc

SEQ ID NO: 16023 - DNA, 25 bp, Artificial sequence  Forward Primer
  Primer
ttatcagcaggatgatcactattct

SEQ ID NO: 16024 - DNA, 27 bp, Artificial sequence  Forward Primer
  Primer
aaagaaaatagacagagaatacatggg

SEQ ID NO: 16025 - DNA, 19 bp, Artificial sequence  Forward Primer
  Primer
atggcaatgcaggtagaca

SEQ ID NO: 16026 - DNA, 22 bp, Artificial sequence  Forward Primer
  Primer
aagttatccgatcttgctcttg

SEQ ID NO: 16027 - DNA, 25 bp, Artificial sequence  Forward Primer
  Primer
aaataaaataaggacctcgtaacca

SEQ ID NO: 16028 - DNA, 22 bp, Artificial sequence  Forward Primer
  Primer
tcrtctctcatttgaaaggtca

SEQ ID NO: 16029 - DNA, 23 bp, Artificial sequence  Forward Primer
  Primer
ttgtattcgactcctctcttcac

SEQ ID NO: 16030 - DNA, 20 bp, Artificial sequence  Forward Primer
  Primer
acatgaaatcctgaaaggca

SEQ ID NO: 16031 - DNA, 28 bp, Artificial sequence  Forward Primer
  Primer
cttagtaagaaaaatcaaaataacagca

SEQ ID NO: 16032 - DNA, 18 bp, Artificial sequence  Forward Primer
  Primer
tcgtgccataaggtgtgg

SEQ ID NO: 16033 - DNA, 21 bp, Artificial sequence  Forward Primer
  Primer
ggaagactcaaactggaattc

SEQ ID NO: 16034 - DNA, 18 bp, Artificial sequence  Forward Primer
  Primer
tgatacggatgtctgggc

SEQ ID NO: 16035 - DNA, 18 bp, Artificial sequence  Forward Primer
  Primer
tgacaggaggccaaccac

SEQ ID NO: 16036 - DNA, 20 bp, Artificial sequence  Forward Primer
  Primer
taacacgttccttgcactgt

SEQ ID NO: 16037 - DNA, 28 bp, Artificial sequence  Forward Primer
  Primer
ccagttctgtttttatatctgtaaatca

SEQ ID NO: 16038 - DNA, 23 bp, Artificial sequence  Forward Primer
  Primer
tgattaagtgaacaaggtgcttg

SEQ ID NO: 16039 - DNA, 19 bp, Artificial sequence  Forward Primer
  Primer
tatcccagcatgtgtcctc

SEQ ID NO: 16040 - DNA, 24 bp, Artificial sequence  Forward Primer
  Primer
ctacatgcctaagagaagacacag

SEQ ID NO: 16041 - DNA, 27 bp, Artificial sequence  Forward Primer
  Primer
tatctcttaagggggaaaataaataaa

SEQ ID NO: 16042 - DNA, 19 bp, Artificial sequence  Forward Primer
  Primer
tgggtgttccagtgtgtac

SEQ ID NO: 16043 - DNA, 25 bp, Artificial sequence  Forward Primer
  Primer
atttttaacatggaagacagctcta

SEQ ID NO: 16044 - DNA, 20 bp, Artificial sequence  Forward Primer
  Primer
gtttctctcactgcttgcca

SEQ ID NO: 16045 - DNA, 23 bp, Artificial sequence  Forward Primer
  Primer
aactctgactgcttcatcactgt

SEQ ID NO: 16046 - DNA, 24 bp, Artificial sequence  Forward Primer
  Primer
caaatgtctattcaatttttgaac

SEQ ID NO: 16047 - DNA, 29 bp, Artificial sequence  Forward Primer
  Primer
ataaataggggaagaagacttaaagtaca

SEQ ID NO: 16048 - DNA, 20 bp, Artificial sequence  Forward Primer
  Primer
gttaaacagaccaggccaca

SEQ ID NO: 16049 - DNA, 23 bp, Artificial sequence  Forward Primer
  Primer
atgcatagccataaaacattcac

SEQ ID NO: 16050 - DNA, 25 bp, Artificial sequence  Forward Primer
  Primer
tatctaccatttggggttaatacac

SEQ ID NO: 16051 - DNA, 22 bp, Artificial sequence  Forward Primer
  Primer
tttcaacttgagaggatgaaga

SEQ ID NO: 16052 - DNA, 24 bp, Artificial sequence  Forward Primer
  Primer
tagaagacatatgcttcagtagcg

SEQ ID NO: 16053 - DNA, 20 bp, Artificial sequence  Forward Primer
  Primer
tgccctctcatgtacattgc

SEQ ID NO: 16054 - DNA, 30 bp, Artificial sequence  Forward Primer
  Primer
aaaatctatataattgtcctcactttctat

SEQ ID NO: 16055 - DNA, 24 bp, Artificial sequence  Forward Primer
  Primer
accgctcaagttctgtattttaaa

SEQ ID NO: 16056 - DNA, 20 bp, Artificial sequence  Forward Primer
  Primer
gtcaaaaattcacagctgcc

SEQ ID NO: 16057 - DNA, 22 bp, Artificial sequence  Forward Primer
  Primer
aagcaattcctcatgtatggaa

SEQ ID NO: 16058 - DNA, 23 bp, Artificial sequence  Forward Primer
  Primer
aaactatctgtaggcattcggtt

SEQ ID NO: 16059 - DNA, 22 bp, Artificial sequence  Forward Primer
  Primer
atttctcacttgtttccagctg

SEQ ID NO: 16060 - DNA, 23 bp, Artificial sequence  Forward Primer
  Primer
aaaacttctttcattcagtcacc

SEQ ID NO: 16061 - DNA, 28 bp, Artificial sequence  Forward Primer
  Primer
taatagctttgatcatttctcttaacag

SEQ ID NO: 16062 - DNA, 28 bp, Artificial sequence  Forward Primer
  Primer
tgactcatatattaaccatttcaattct

SEQ ID NO: 16063 - DNA, 22 bp, Artificial sequence  Forward Primer
  Primer
ccattcctctttctaaattctt

SEQ ID NO: 16064 - DNA, 25 bp, Artificial sequence  Forward Primer
  Primer
aaaaatcctcctcagtacatatcct

SEQ ID NO: 16065 - DNA, 23 bp, Artificial sequence  Forward Primer
  Primer
atcacaacctgtcctgagttaac

SEQ ID NO: 16066 - DNA, 26 bp, Artificial sequence  Forward Primer
  Primer
attagtgtctaaatggccagagtact

SEQ ID NO: 16067 - DNA, 20 bp, Artificial sequence  Forward Primer
  Primer
accagggtaggaagattccc

SEQ ID NO: 16068 - DNA, 29 bp, Artificial sequence  Forward Primer
  Primer
gatataattgtaatgccactataaaatgc

SEQ ID NO: 16069 - DNA, 25 bp, Artificial sequence  Forward Primer
  Primer
aaattccttggtagcaaagtagaat

SEQ ID NO: 16070 - DNA, 20 bp, Artificial sequence  Forward Primer
  Primer
aataaagcaaagcacaaacg

SEQ ID NO: 16071 - DNA, 19 bp, Artificial sequence  Forward Primer
  Primer
tcactagttagccatgccg

SEQ ID NO: 16072 - DNA, 30 bp, Artificial sequence  Forward Primer
  Primer
atactatttacatagtgaaaagttaggagt

SEQ ID NO: 16073 - DNA, 28 bp, Artificial sequence  Forward Primer
  Primer
atcttacagtcaaactgaataagacaga

SEQ ID NO: 16074 - DNA, 26 bp, Artificial sequence  Forward Primer
  Primer
ttcatctctcttttctaggtcagact

SEQ ID NO: 16075 - DNA, 26 bp, Artificial sequence  Forward Primer
  Primer
tatgtaaacacaaacatcacaaatga

SEQ ID NO: 16076 - DNA, 27 bp, Artificial sequence  Forward Primer
  Primer
tatttgctacatcttattgctctacac

SEQ ID NO: 16077 - DNA, 30 bp, Artificial sequence  Forward Primer
  Primer
tcagacttcaatatattttaaagagagaag

SEQ ID NO: 16078 - DNA, 25 bp, Artificial sequence  Forward Primer
  Primer
tattccaaaaatcttagtgcagttt

SEQ ID NO: 16079 - DNA, 20 bp, Artificial sequence  Forward Primer
  Primer
cctttttgctatcccacttc

SEQ ID NO: 16080 - DNA, 29 bp, Artificial sequence  Forward Primer
  Primer
ttttatgaataagttgagtctaaagttgg

SEQ ID NO: 16081 - DNA, 20 bp, Artificial sequence  Forward Primer
  Primer
attttctggggtgtcctctg

SEQ ID NO: 16082 - DNA, 23 bp, Artificial sequence  Forward Primer
  Primer
tcctttaacattggttctgatcc

SEQ ID NO: 16083 - DNA, 20 bp, Artificial sequence  Forward Primer
  Primer
tggccattgctctaaagaac

SEQ ID NO: 16084 - DNA, 21 bp, Artificial sequence  Forward Primer
  Primer
aatgttattcggctatacccc

SEQ ID NO: 16085 - DNA, 24 bp, Artificial sequence  Forward Primer
  Primer
aaaattatttgcttctggaaatca

SEQ ID NO: 16086 - DNA, 22 bp, Artificial sequence  Forward Primer
  Primer
agaattgacggactttctgaca

SEQ ID NO: 16087 - DNA, 25 bp, Artificial sequence  Forward Primer
  Primer
aaaatggttcacagagtttaatgtg

SEQ ID NO: 16088 - DNA, 21 bp, Artificial sequence  Forward Primer
  Primer
agtcatttacaaagctgccag

SEQ ID NO: 16089 - DNA, 24 bp, Artificial sequence  Forward Primer
  Primer
ttgttcctgcctgaaatatttatc

SEQ ID NO: 16090 - DNA, 22 bp, Artificial sequence  Forward Primer
  Primer
aattcacacaaggatcctgaac

SEQ ID NO: 16091 - DNA, 27 bp, Artificial sequence  Forward Primer
  Primer
tattttkctgcctattaattttaggag

SEQ ID NO: 16092 - DNA, 24 bp, Artificial sequence  Forward Primer
  Primer
ttaaggtctatagtgggtgtgtca

SEQ ID NO: 16093 - DNA, 29 bp, Artificial sequence  Forward Primer
  Primer
ttctatctccctacctacaatcttagtta

SEQ ID NO: 16094 - DNA, 21 bp, Artificial sequence  Forward Primer
  Primer
acagagagaagcaaatgcaaa

SEQ ID NO: 16095 - DNA, 29 bp, Artificial sequence  Forward Primer
  Primer
atacagaggactaccacttagtcataaaa

SEQ ID NO: 16096 - DNA, 20 bp, Artificial sequence  Forward Primer
  Primer
aagactcacagccttctcca

SEQ ID NO: 16097 - DNA, 26 bp, Artificial sequence  Forward Primer
  Primer
tattggattatatgacaagcacttct

SEQ ID NO: 16098 - DNA, 21 bp, Artificial sequence  Forward Primer
  Primer
aatcaacttggcaagaaacaa

SEQ ID NO: 16099 - DNA, 21 bp, Artificial sequence  Forward Primer
  Primer
tgtgtatgtgtgtttccagca

SEQ ID NO: 16100 - DNA, 19 bp, Artificial sequence  Forward Primer
  Primer
aacatccatttgcctcacc

SEQ ID NO: 16101 - DNA, 24 bp, Artificial sequence  Forward Primer
  Primer
atgtcctgaagtcaaggtaagaaa

SEQ ID NO: 16102 - DNA, 18 bp, Artificial sequence  Forward Primer
  Primer
ttgtggggtctgggaagg

SEQ ID NO: 16103 - DNA, 18 bp, Artificial sequence  Forward Primer
  Primer
tcccacagagcctggatg

SEQ ID NO: 16104 - DNA, 30 bp, Artificial sequence  Forward Primer
  Primer
acatacatacatacatacataagtcactgt

SEQ ID NO: 16105 - DNA, 20 bp, Artificial sequence  Forward Primer
  Primer
tcaagcctcgtaggtagagc

SEQ ID NO: 16106 - DNA, 19 bp, Artificial sequence  Forward Primer
  Primer
ttggtagattgggctttgg

SEQ ID NO: 16107 - DNA, 26 bp, Artificial sequence  Forward Primer
  Primer
ataacacaaaatggaataggacattt

SEQ ID NO: 16108 - DNA, 21 bp, Artificial sequence  Forward Primer
  Primer
tcatggtcactgactgtcaac

SEQ ID NO: 16109 - DNA, 28 bp, Artificial sequence  Forward Primer
  Primer
cataaaaggagattattacaaagttcaa

SEQ ID NO: 16110 - DNA, 28 bp, Artificial sequence  Forward Primer
  Primer
tcaagtaaaaaattatagcagacaaaag

SEQ ID NO: 16111 - DNA, 21 bp, Artificial sequence  Forward Primer
  Primer
tgacttgtttcctgaaccatg

SEQ ID NO: 16112 - DNA, 18 bp, Artificial sequence  Forward Primer
  Primer
acaccaatccctgcccgg

SEQ ID NO: 16113 - DNA, 24 bp, Artificial sequence  Forward Primer
  Primer
acatagagagtccgaactgaagag

SEQ ID NO: 16114 - DNA, 21 bp, Artificial sequence  Forward Primer
  Primer
aagtctttggagctgaggatg

SEQ ID NO: 16115 - DNA, 24 bp, Artificial sequence  Forward Primer
  Primer
tttttctccattccaagaagtaaa

SEQ ID NO: 16116 - DNA, 26 bp, Artificial sequence  Forward Primer
  Primer
agttgtgtgtgtgtkttttttaaatc

SEQ ID NO: 16117 - DNA, 18 bp, Artificial sequence  Forward Primer
  Primer
gctggagtttagcctgca

SEQ ID NO: 16118 - DNA, 21 bp, Artificial sequence  Forward Primer
  Primer
ggaatcaaaaactcattgaaa

SEQ ID NO: 16119 - DNA, 23 bp, Artificial sequence  Forward Primer
  Primer
taatcctagctcaccttaatctc

SEQ ID NO: 16120 - DNA, 18 bp, Artificial sequence  Forward Primer
  Primer
aaaacccttggcccgaca

SEQ ID NO: 16121 - DNA, 29 bp, Artificial sequence  Forward Primer
  Primer
ttatctagtatatttgggatgattcttca

SEQ ID NO: 16122 - DNA, 20 bp, Artificial sequence  Forward Primer
  Primer
aaatgtgtagacgtcgccat

SEQ ID NO: 16123 - DNA, 28 bp, Artificial sequence  Forward Primer
  Primer
cacacatatattaatgatttgtttcaca

SEQ ID NO: 16124 - DNA, 27 bp, Artificial sequence  Forward Primer
  Primer
gatttaaagaaaataaaaagttgctcg

SEQ ID NO: 16125 - DNA, 23 bp, Artificial sequence  Forward Primer
  Primer
aaataatttgctttttgaaaccc

SEQ ID NO: 16126 - DNA, 28 bp, Artificial sequence  Forward Primer
  Primer
atagataagtctgtatcagagatggaat

SEQ ID NO: 16127 - DNA, 29 bp, Artificial sequence  Forward Primer
  Primer
ttagtgaataatattaaaagtggtgtgtg

SEQ ID NO: 16128 - DNA, 25 bp, Artificial sequence  Forward Primer
  Primer
taactattgggtttaggtactggag

SEQ ID NO: 16129 - DNA, 28 bp, Artificial sequence  Forward Primer
  Primer
accagcttcaataaataaagattctatg

SEQ ID NO: 16130 - DNA, 21 bp, Artificial sequence  Forward Primer
  Primer
tgtaaaaaaagccaatggaac

SEQ ID NO: 16131 - DNA, 25 bp, Artificial sequence  Forward Primer
  Primer
attgttcagtgccttaatataccaa

SEQ ID NO: 16132 - DNA, 22 bp, Artificial sequence  Forward Primer
  Primer
attgtctacccagctgaagttc

SEQ ID NO: 16133 - DNA, 20 bp, Artificial sequence  Forward Primer
  Primer
aaatgctgcttttgacttgc

SEQ ID NO: 16134 - DNA, 24 bp, Artificial sequence  Forward Primer
  Primer
aatgaatattgttagaactgtcac

SEQ ID NO: 16135 - DNA, 26 bp, Artificial sequence  Forward Primer
  Primer
aaaattgtagaaggaaaataaaccag

SEQ ID NO: 16136 - DNA, 20 bp, Artificial sequence  Forward Primer
  Primer
atcctgggcataattcacaa

SEQ ID NO: 16137 - DNA, 22 bp, Artificial sequence  Forward Primer
  Primer
ctttccttcagagccttacttc

SEQ ID NO: 16138 - DNA, 20 bp, Artificial sequence  Forward Primer
  Primer
acagattcatgtccgttgga

SEQ ID NO: 16139 - DNA, 19 bp, Artificial sequence  Forward Primer
  Primer
agaggagtcctggatgcat

SEQ ID NO: 16140 - DNA, 24 bp, Artificial sequence  Forward Primer
  Primer
tttcatatttaaatccattccctt

SEQ ID NO: 16141 - DNA, 30 bp, Artificial sequence  Forward Primer
  Primer
agttgaaaaaagttagaaagtatgtctaat

SEQ ID NO: 16142 - DNA, 22 bp, Artificial sequence  Forward Primer
  Primer
ttctgaagttgagaactgctgc

SEQ ID NO: 16143 - DNA, 21 bp, Artificial sequence  Forward Primer
  Primer
taaccctcagatggaagaaag

SEQ ID NO: 16144 - DNA, 24 bp, Artificial sequence  Forward Primer
  Primer
attatatctattttggggccattt

SEQ ID NO: 16145 - DNA, 19 bp, Artificial sequence  Forward Primer
  Primer
aggctgtcattgattggct

SEQ ID NO: 16146 - DNA, 26 bp, Artificial sequence  Forward Primer
  Primer
ttatttaaatagggaacagcaatttc

SEQ ID NO: 16147 - DNA, 19 bp, Artificial sequence  Forward Primer
  Primer
agcatcctgtggagaaaag

SEQ ID NO: 16148 - DNA, 22 bp, Artificial sequence  Forward Primer
  Primer
tgaaaaagagtggaaagagagg

SEQ ID NO: 16149 - DNA, 19 bp, Artificial sequence  Forward Primer
  Primer
ttgggctgtctttcaaacc

SEQ ID NO: 16150 - DNA, 19 bp, Artificial sequence  Forward Primer
  Primer
taagtcccggaactcaaga

SEQ ID NO: 16151 - DNA, 24 bp, Artificial sequence  Forward Primer
  Primer
agaatgggaataaaatttcaaaca

SEQ ID NO: 16152 - DNA, 20 bp, Artificial sequence  Forward Primer
  Primer
tgcaactccctttacagaaa

SEQ ID NO: 16153 - DNA, 22 bp, Artificial sequence  Forward Primer
  Primer
actgaacaacagcagaagatgt

SEQ ID NO: 16154 - DNA, 19 bp, Artificial sequence  Forward Primer
  Primer
aaaacccagcctctatggg

SEQ ID NO: 16155 - DNA, 28 bp, Artificial sequence  Forward Primer
  Primer
tattttacttaaccagatacatscaaaa

SEQ ID NO: 16156 - DNA, 26 bp, Artificial sequence  Forward Primer
  Primer
attgatagaaccattttctagttctg

SEQ ID NO: 16157 - DNA, 24 bp, Artificial sequence  Forward Primer
  Primer
tatgatctgaagattacttggtgc

SEQ ID NO: 16158 - DNA, 23 bp, Artificial sequence  Forward Primer
  Primer
ttataagaattcagctggcaaag

SEQ ID NO: 16159 - DNA, 28 bp, Artificial sequence  Forward Primer
  Primer
tcagattctgatttattatcaacaattg

SEQ ID NO: 16160 - DNA, 20 bp, Artificial sequence  Forward Primer
  Primer
ggaaggaagaaagacaggag

SEQ ID NO: 16161 - DNA, 27 bp, Artificial sequence  Forward Primer
  Primer
gactctattccaaatgcttaagtaaaa

SEQ ID NO: 16162 - DNA, 21 bp, Artificial sequence  Forward Primer
  Primer
aagatgtaaaggggtatcggc

SEQ ID NO: 16163 - DNA, 20 bp, Artificial sequence  Forward Primer
  Primer
tgctgtaattcttggcacag

SEQ ID NO: 16164 - DNA, 22 bp, Artificial sequence  Forward Primer
  Primer
ccaactgacatctgttttctga

SEQ ID NO: 16165 - DNA, 21 bp, Artificial sequence  Forward Primer
  Primer
gaagagaaaggctttccaagg

SEQ ID NO: 16166 - DNA, 24 bp, Artificial sequence  Forward Primer
  Primer
atttttagtactttattacgcggg

SEQ ID NO: 16167 - DNA, 19 bp, Artificial sequence  Forward Primer
  Primer
acaggagcgagcagtcatt

SEQ ID NO: 16168 - DNA, 22 bp, Artificial sequence  Forward Primer
  Primer
tttgtagtggcaagtgagttga

SEQ ID NO: 16169 - DNA, 20 bp, Artificial sequence  Forward Primer
  Primer
tttctggcgtgcctactatg

SEQ ID NO: 16170 - DNA, 19 bp, Artificial sequence  Forward Primer
  Primer
ccagagctgaatgaaaacc

SEQ ID NO: 16171 - DNA, 19 bp, Artificial sequence  Forward Primer
  Primer
acagcatctagggagcagc

SEQ ID NO: 16172 - DNA, 19 bp, Artificial sequence  Forward Primer
  Primer
tgcaagcagattctttgct

SEQ ID NO: 16173 - DNA, 24 bp, Artificial sequence  Forward Primer
  Primer
accgtaaagacaatttgaagaatc

SEQ ID NO: 16174 - DNA, 20 bp, Artificial sequence  Forward Primer
  Primer
aggccttcacctcgtatttg

SEQ ID NO: 16175 - DNA, 20 bp, Artificial sequence  Forward Primer
  Primer
tgtcacttgggttctccatc

SEQ ID NO: 16176 - DNA, 26 bp, Artificial sequence  Forward Primer
  Primer
taataatgtgaaaaaatacatcgagg

SEQ ID NO: 16177 - DNA, 26 bp, Artificial sequence  Forward Primer
  Primer
attttatctctcatccaggataggta

SEQ ID NO: 16178 - DNA, 21 bp, Artificial sequence  Forward Primer
  Primer
ctggcacataacactgggtag

SEQ ID NO: 16179 - DNA, 24 bp, Artificial sequence  Forward Primer
  Primer
aaatcacagaaattctactttgcc

SEQ ID NO: 16180 - DNA, 20 bp, Artificial sequence  Forward Primer
  Primer
aagccaaaactgattcacca

SEQ ID NO: 16181 - DNA, 20 bp, Artificial sequence  Forward Primer
  Primer
aggagttctcctgtgagatt

SEQ ID NO: 16182 - DNA, 21 bp, Artificial sequence  Forward Primer
  Primer
tggttcttgtcttcttgtttt

SEQ ID NO: 16183 - DNA, 21 bp, Artificial sequence  Forward Primer
  Primer
atgtgtggaacaggaaacaga

SEQ ID NO: 16184 - DNA, 18 bp, Artificial sequence  Forward Primer
  Primer
aagcgtcgtttgtgaccc

SEQ ID NO: 16185 - DNA, 21 bp, Artificial sequence  Forward Primer
  Primer
gattctgccaaaaaagacaca

SEQ ID NO: 16186 - DNA, 19 bp, Artificial sequence  Forward Primer
  Primer
aacagtttctggggctgac

SEQ ID NO: 16187 - DNA, 28 bp, Artificial sequence  Forward Primer
  Primer
ataatccatagtaggtaaggtacacaca

SEQ ID NO: 16188 - DNA, 19 bp, Artificial sequence  Forward Primer
  Primer
tttcccttccgtctacagg

SEQ ID NO: 16189 - DNA, 21 bp, Artificial sequence  Forward Primer
  Primer
agcagaatcagttaagggtgg

SEQ ID NO: 16190 - DNA, 20 bp, Artificial sequence  Forward Primer
  Primer
ctcaaagctcggtaaagtgg

SEQ ID NO: 16191 - DNA, 23 bp, Artificial sequence  Forward Primer
  Primer
tatgcagattcgtcattttatca

SEQ ID NO: 16192 - DNA, 24 bp, Artificial sequence  Forward Primer
  Primer
aaaaacctaaagaccatcattttc

SEQ ID NO: 16193 - DNA, 19 bp, Artificial sequence  Forward Primer
  Primer
tggcaagtkgtctcctctc

SEQ ID NO: 16194 - DNA, 23 bp, Artificial sequence  Forward Primer
  Primer
ctgtgagaatagctgatagccag

SEQ ID NO: 16195 - DNA, 23 bp, Artificial sequence  Forward Primer
  Primer
atcatacagtgtgttggcttctt

SEQ ID NO: 16196 - DNA, 20 bp, Artificial sequence  Forward Primer
  Primer
acaatctcagagacctgggc

SEQ ID NO: 16197 - DNA, 30 bp, Artificial sequence  Forward Primer
  Primer
gtttgatagtaatttgtaaaagttatctgc

SEQ ID NO: 16198 - DNA, 19 bp, Artificial sequence  Forward Primer
  Primer
atcagtgctgaatttccgg

SEQ ID NO: 16199 - DNA, 23 bp, Artificial sequence  Forward Primer
  Primer
ttttattagtcttggcctcagtg

SEQ ID NO: 16200 - DNA, 20 bp, Artificial sequence  Forward Primer
  Primer
ttaatcacagcatgcaatgg

SEQ ID NO: 16201 - DNA, 19 bp, Artificial sequence  Forward Primer
  Primer
agcacttggaggcgtttat

SEQ ID NO: 16202 - DNA, 18 bp, Artificial sequence  Forward Primer
  Primer
acttaaacccccgcccct

SEQ ID NO: 16203 - DNA, 22 bp, Artificial sequence  Forward Primer
  Primer
ctgtactggtttctggtagcaa

SEQ ID NO: 16204 - DNA, 26 bp, Artificial sequence  Forward Primer
  Primer
tatagagaacattcaattctcagcaa

SEQ ID NO: 16205 - DNA, 28 bp, Artificial sequence  Forward Primer
  Primer
agagagagatatagtctcttatcccaag

SEQ ID NO: 16206 - DNA, 24 bp, Artificial sequence  Forward Primer
  Primer
ctatctcttcctgggatttcataa

SEQ ID NO: 16207 - DNA, 27 bp, Artificial sequence  Forward Primer
  Primer
tattctaggagctgactatctctgatt

SEQ ID NO: 16208 - DNA, 21 bp, Artificial sequence  Forward Primer
  Primer
gcaccaaatgttcacygttaa

SEQ ID NO: 16209 - DNA, 19 bp, Artificial sequence  Forward Primer
  Primer
tcagacaccacttactggc

SEQ ID NO: 16210 - DNA, 21 bp, Artificial sequence  Forward Primer
  Primer
cccctaagttagaaaatgttg

SEQ ID NO: 16211 - DNA, 30 bp, Artificial sequence  Forward Primer
  Primer
tatggaattttaagacatagagtaggtaag

SEQ ID NO: 16212 - DNA, 23 bp, Artificial sequence  Forward Primer
  Primer
taaagcttcagctcttctgatgt

SEQ ID NO: 16213 - DNA, 25 bp, Artificial sequence  Forward Primer
  Primer
cattcctgagtagagttggaattta

SEQ ID NO: 16214 - DNA, 28 bp, Artificial sequence  Forward Primer
  Primer
atgttttatgagtgtatttctatttgca

SEQ ID NO: 16215 - DNA, 29 bp, Artificial sequence  Forward Primer
  Primer
tcttagattagcgataacatttgtatagg

SEQ ID NO: 16216 - DNA, 25 bp, Artificial sequence  Forward Primer
  Primer
ttaggtctaaattgaaagtaacacc

SEQ ID NO: 16217 - DNA, 24 bp, Artificial sequence  Forward Primer
  Primer
aaatccctgmaggtgatataaaat

SEQ ID NO: 16218 - DNA, 28 bp, Artificial sequence  Forward Primer
  Primer
taatatcaattcaaytccacacttagac

SEQ ID NO: 16219 - DNA, 25 bp, Artificial sequence  Forward Primer
  Primer
acatacatgcatataacagatggag

SEQ ID NO: 16220 - DNA, 28 bp, Artificial sequence  Forward Primer
  Primer
aaagtaaatgaatatctgtgtttgaatg

SEQ ID NO: 16221 - DNA, 20 bp, Artificial sequence  Forward Primer
  Primer
attcagaggactgcttacgg

SEQ ID NO: 16222 - DNA, 26 bp, Artificial sequence  Forward Primer
  Primer
aaatagaagatgaaggcaaataacat

SEQ ID NO: 16223 - DNA, 18 bp, Artificial sequence  Forward Primer
  Primer
atccccatgcagtttggt

SEQ ID NO: 16224 - DNA, 22 bp, Artificial sequence  Forward Primer
  Primer
atttaaaatacgaaccgcaaaa

SEQ ID NO: 16225 - DNA, 18 bp, Artificial sequence  Forward Primer
  Primer
tgttgttttccctccacc

SEQ ID NO: 16226 - DNA, 24 bp, Artificial sequence  Forward Primer
  Primer
ttttgtcactaaggggactttatg

SEQ ID NO: 16227 - DNA, 28 bp, Artificial sequence  Forward Primer
  Primer
acaaggggactatagcctatattttata

SEQ ID NO: 16228 - DNA, 21 bp, Artificial sequence  Forward Primer
  Primer
aggtctcgcctcttgatagac

SEQ ID NO: 16229 - DNA, 30 bp, Artificial sequence  Forward Primer
  Primer
ttatatcacttatatttcccagtgtaactt

SEQ ID NO: 16230 - DNA, 24 bp, Artificial sequence  Forward Primer
  Primer
gaaatagtggaagacagaggaacc

SEQ ID NO: 16231 - DNA, 24 bp, Artificial sequence  Forward Primer
  Primer
aaaggtctctgtacaaaaatcaca

SEQ ID NO: 16232 - DNA, 26 bp, Artificial sequence  Forward Primer
  Primer
taaaattacagagctgtacaaccatg

SEQ ID NO: 16233 - DNA, 25 bp, Artificial sequence  Forward Primer
  Primer
tattaccaatcaatttgggaatatg

SEQ ID NO: 16234 - DNA, 27 bp, Artificial sequence  Forward Primer
  Primer
attctttatttctcctcaaaaactagg

SEQ ID NO: 16235 - DNA, 26 bp, Artificial sequence  Forward Primer
  Primer
tatttacagagcggaaatagacatag

SEQ ID NO: 16236 - DNA, 30 bp, Artificial sequence  Forward Primer
  Primer
attctgaaacgagttagaatagtacattaa

SEQ ID NO: 16237 - DNA, 25 bp, Artificial sequence  Forward Primer
  Primer
aaattattttgaaatctcagggatc

SEQ ID NO: 16238 - DNA, 22 bp, Artificial sequence  Forward Primer
  Primer
aatatacccatgtggctgactc

SEQ ID NO: 16239 - DNA, 24 bp, Artificial sequence  Forward Primer
  Primer
aaaataccaaaattcaaggcatag

SEQ ID NO: 16240 - DNA, 22 bp, Artificial sequence  Forward Primer
  Primer
attaacttgggaggaagagatg

SEQ ID NO: 16241 - DNA, 20 bp, Artificial sequence  Forward Primer
  Primer
cttctttgccactggacttg

SEQ ID NO: 16242 - DNA, 20 bp, Artificial sequence  Forward Primer
  Primer
aatgccttcagcrtaaagga

SEQ ID NO: 16243 - DNA, 30 bp, Artificial sequence  Forward Primer
  Primer
ttacatgtagtacggaagaartaagactac

SEQ ID NO: 16244 - DNA, 24 bp, Artificial sequence  Forward Primer
  Primer
cctaaatgttccagcctttaaata

SEQ ID NO: 16245 - DNA, 23 bp, Artificial sequence  Forward Primer
  Primer
aaaaatgcttacattctcaaggc

SEQ ID NO: 16246 - DNA, 25 bp, Artificial sequence  Forward Primer
  Primer
aaaactataaggagctgtttgttgc

SEQ ID NO: 16247 - DNA, 25 bp, Artificial sequence  Forward Primer
  Primer
aataataacaggtcacctcttcagg

SEQ ID NO: 16248 - DNA, 21 bp, Artificial sequence  Forward Primer
  Primer
aaatagccaccacaaggaaaa

SEQ ID NO: 16249 - DNA, 23 bp, Artificial sequence  Forward Primer
  Primer
aaatcagtagagaaacagccagc

SEQ ID NO: 16250 - DNA, 18 bp, Artificial sequence  Forward Primer
  Primer
ctccggaccgattgccac

SEQ ID NO: 16251 - DNA, 30 bp, Artificial sequence  Forward Primer
  Primer
agagttcattayacaacttattgtcattat

SEQ ID NO: 16252 - DNA, 24 bp, Artificial sequence  Forward Primer
  Primer
aaagacctccataatcaakcattt

SEQ ID NO: 16253 - DNA, 19 bp, Artificial sequence  Forward Primer
  Primer
atccaccaccatttccaac

SEQ ID NO: 16254 - DNA, 20 bp, Artificial sequence  Forward Primer
  Primer
tgtgggtcaygtagagcatt

SEQ ID NO: 16255 - DNA, 26 bp, Artificial sequence  Forward Primer
  Primer
tattctgctgatgctttaagttctac

SEQ ID NO: 16256 - DNA, 24 bp, Artificial sequence  Forward Primer
  Primer
tatacattttcatgccatgtgttt

SEQ ID NO: 16257 - DNA, 22 bp, Artificial sequence  Forward Primer
  Primer
aaagataacactggcatcttgc

SEQ ID NO: 16258 - DNA, 18 bp, Artificial sequence  Forward Primer
  Primer
accctckctctttctggc

SEQ ID NO: 16259 - DNA, 24 bp, Artificial sequence  Forward Primer
  Primer
aaggtcttaacaagcaattctcaa

SEQ ID NO: 16260 - DNA, 18 bp, Artificial sequence  Forward Primer
  Primer
tgagcgggtatgtggagg

SEQ ID NO: 16261 - DNA, 19 bp, Artificial sequence  Forward Primer
  Primer
ttcctttcactgccctttt

SEQ ID NO: 16262 - DNA, 24 bp, Artificial sequence  Forward Primer
  Primer
aatgttttgggttaacacttcaat

SEQ ID NO: 16263 - DNA, 30 bp, Artificial sequence  Forward Primer
  Primer
aacaggttttttatacttacatatctatca

SEQ ID NO: 16264 - DNA, 25 bp, Artificial sequence  Forward Primer
  Primer
gcttactagagactcttcaaactat

SEQ ID NO: 16265 - DNA, 22 bp, Artificial sequence  Forward Primer
  Primer
aaaattaaccttggtgtggaca

SEQ ID NO: 16266 - DNA, 22 bp, Artificial sequence  Forward Primer
  Primer
gcttctaggagtaccagctatt

SEQ ID NO: 16267 - DNA, 24 bp, Artificial sequence  Forward Primer
  Primer
ccctcataatagtgatgacaatca

SEQ ID NO: 16268 - DNA, 23 bp, Artificial sequence  Forward Primer
  Primer
ttgaacaaaacatatgttgcaag

SEQ ID NO: 16269 - DNA, 23 bp, Artificial sequence  Forward Primer
  Primer
aagactcaatgcagcaaaataaa

SEQ ID NO: 16270 - DNA, 24 bp, Artificial sequence  Forward Primer
  Primer
agatgggataccaactaacagatg

SEQ ID NO: 16271 - DNA, 26 bp, Artificial sequence  Forward Primer
  Primer
cctgtactttagactttttcttctcc

SEQ ID NO: 16272 - DNA, 23 bp, Artificial sequence  Forward Primer
  Primer
tgcaaatcagtaactgtaaccaa

SEQ ID NO: 16273 - DNA, 29 bp, Artificial sequence  Forward Primer
  Primer
agtataaaggataaaactgtgaaaaaagg

SEQ ID NO: 16274 - DNA, 23 bp, Artificial sequence  Forward Primer
  Primer
tttctggtgaaatccaaagtatc

SEQ ID NO: 16275 - DNA, 20 bp, Artificial sequence  Forward Primer
  Primer
aacataggaagggtgattgc

SEQ ID NO: 16276 - DNA, 24 bp, Artificial sequence  Forward Primer
  Primer
ttatacaagaaacagctggattat

SEQ ID NO: 16277 - DNA, 24 bp, Artificial sequence  Forward Primer
  Primer
ttctccactttcttatgcacaata

SEQ ID NO: 16278 - DNA, 29 bp, Artificial sequence  Forward Primer
  Primer
taattactagaaatatgaaatgaaggctc

SEQ ID NO: 16279 - DNA, 25 bp, Artificial sequence  Forward Primer
  Primer
ttaaaagcttccacagtttcaatat

SEQ ID NO: 16280 - DNA, 20 bp, Artificial sequence  Forward Primer
  Primer
tatagtgggaggaggtaggg

SEQ ID NO: 16281 - DNA, 24 bp, Artificial sequence  Forward Primer
  Primer
taatatgggtctggattagacagg

SEQ ID NO: 16282 - DNA, 25 bp, Artificial sequence  Forward Primer
  Primer
ttggctcatttaactaaacaaagtg

SEQ ID NO: 16283 - DNA, 19 bp, Artificial sequence  Forward Primer
  Primer
taggggccaagaagattta

SEQ ID NO: 16284 - DNA, 20 bp, Artificial sequence  Forward Primer
  Primer
atttagggcctaacagggat

SEQ ID NO: 16285 - DNA, 27 bp, Artificial sequence  Forward Primer
  Primer
atttagggatacagtcataaaaacagc

SEQ ID NO: 16286 - DNA, 23 bp, Artificial sequence  Forward Primer
  Primer
aactgattcaaggtaacccactt

SEQ ID NO: 16287 - DNA, 19 bp, Artificial sequence  Forward Primer
  Primer
gagaaaagcacagattccg

SEQ ID NO: 16288 - DNA, 28 bp, Artificial sequence  Forward Primer
  Primer
tcctaatatgtacaaatcaaaaactgtt

SEQ ID NO: 16289 - DNA, 24 bp, Artificial sequence  Forward Primer
  Primer
ttctatctttcttctggracacac

SEQ ID NO: 16290 - DNA, 18 bp, Artificial sequence  Forward Primer
  Primer
aagtggcaacgtgtcccc

SEQ ID NO: 16291 - DNA, 18 bp, Artificial sequence  Forward Primer
  Primer
agcagttcctggaggcca

SEQ ID NO: 16292 - DNA, 18 bp, Artificial sequence  Forward Primer
  Primer
tcacggagcaggctcagg

SEQ ID NO: 16293 - DNA, 18 bp, Artificial sequence  Forward Primer
  Primer
acatggactccagcgcct

SEQ ID NO: 16294 - DNA, 19 bp, Artificial sequence  Forward Primer
  Primer
atagctcggaagcaagcag

SEQ ID NO: 16295 - DNA, 19 bp, Artificial sequence  Forward Primer
  Primer
taaaaccagaatggaccgc

SEQ ID NO: 16296 - DNA, 26 bp, Artificial sequence  Forward Primer
  Primer
atagaattggtgtttatggctcttac

SEQ ID NO: 16297 - DNA, 28 bp, Artificial sequence  Forward Primer
  Primer
ataaacacacaaagaagtaaataagcac

SEQ ID NO: 16298 - DNA, 20 bp, Artificial sequence  Forward Primer
  Primer
ttcaaagctctgctagtccc

SEQ ID NO: 16299 - DNA, 22 bp, Artificial sequence  Forward Primer
  Primer
aatgaatgcaggagagaagagt

SEQ ID NO: 16300 - DNA, 30 bp, Artificial sequence  Forward Primer
  Primer
cacactaaataagcaaaatatataatgtgt

SEQ ID NO: 16301 - DNA, 26 bp, Artificial sequence  Forward Primer
  Primer
aactaaaatcattgtactaacagggc

SEQ ID NO: 16302 - DNA, 22 bp, Artificial sequence  Forward Primer
  Primer
tatgtggtatggctttgttttg

SEQ ID NO: 16303 - DNA, 23 bp, Artificial sequence  Forward Primer
  Primer
gagggaaaaatgaagagatgaag

SEQ ID NO: 16304 - DNA, 23 bp, Artificial sequence  Forward Primer
  Primer
tttagattmtgcgattccataag

SEQ ID NO: 16305 - DNA, 19 bp, Artificial sequence  Forward Primer
  Primer
tgagtctccagcagctgtg

SEQ ID NO: 16306 - DNA, 23 bp, Artificial sequence  Forward Primer
  Primer
actgaagaacctaaagaagctgg

SEQ ID NO: 16307 - DNA, 23 bp, Artificial sequence  Forward Primer
  Primer
actcaaccttccttttgtctctc

SEQ ID NO: 16308 - DNA, 23 bp, Artificial sequence  Forward Primer
  Primer
aagttttccatcagactcatcct

SEQ ID NO: 16309 - DNA, 20 bp, Artificial sequence  Forward Primer
  Primer
gtcccacttgtatgatcaat

SEQ ID NO: 16310 - DNA, 21 bp, Artificial sequence  Forward Primer
  Primer
agtggtccctattttccagaa

SEQ ID NO: 16311 - DNA, 28 bp, Artificial sequence  Forward Primer
  Primer
gcatttcataaattatgtattctcatgt

SEQ ID NO: 16312 - DNA, 22 bp, Artificial sequence  Forward Primer
  Primer
ttgtcttctcaggaaattgagg

SEQ ID NO: 16313 - DNA, 27 bp, Artificial sequence  Forward Primer
  Primer
acagatgatagccacaataaaaataga

SEQ ID NO: 16314 - DNA, 24 bp, Artificial sequence  Forward Primer
  Primer
aataygaattttcctcatactgca

SEQ ID NO: 16315 - DNA, 21 bp, Artificial sequence  Forward Primer
  Primer
aacycttgaaagccatttgat

SEQ ID NO: 16316 - DNA, 22 bp, Artificial sequence  Forward Primer
  Primer
aagatttcatttctgatgttca

SEQ ID NO: 16317 - DNA, 26 bp, Artificial sequence  Forward Primer
  Primer
catttggattattaatacacagtgga

SEQ ID NO: 16318 - DNA, 30 bp, Artificial sequence  Forward Primer
  Primer
atttgtaattctattgttaaagagacttct

SEQ ID NO: 16319 - DNA, 25 bp, Artificial sequence  Forward Primer
  Primer
ttaatctgagamgtcctacaggttt

SEQ ID NO: 16320 - DNA, 20 bp, Artificial sequence  Forward Primer
  Primer
taattaattaactggccgcc

SEQ ID NO: 16321 - DNA, 29 bp, Artificial sequence  Forward Primer
  Primer
ttatatgcatatgtttatgctagtaacca

SEQ ID NO: 16322 - DNA, 18 bp, Artificial sequence  Forward Primer
  Primer
ctccatgatgaagccgtg

SEQ ID NO: 16323 - DNA, 23 bp, Artificial sequence  Forward Primer
  Primer
ttggmtacaacttagcaactgaa

SEQ ID NO: 16324 - DNA, 26 bp, Artificial sequence  Forward Primer
  Primer
tcatctagaaacttgtgagaaacatg

SEQ ID NO: 16325 - DNA, 27 bp, Artificial sequence  Forward Primer
  Primer
tcctagtaacctacttcacttttacca

SEQ ID NO: 16326 - DNA, 18 bp, Artificial sequence  Forward Primer
  Primer
tactgtgcacaagggctg

SEQ ID NO: 16327 - DNA, 27 bp, Artificial sequence  Forward Primer
  Primer
attaaaactagggaaagaagacacatc

SEQ ID NO: 16328 - DNA, 18 bp, Artificial sequence  Forward Primer
  Primer
tcagccaagccaccagac

SEQ ID NO: 16329 - DNA, 24 bp, Artificial sequence  Forward Primer
  Primer
aagaccaaataggaaactacagca

SEQ ID NO: 16330 - DNA, 29 bp, Artificial sequence  Forward Primer
  Primer
tatgtgacttgatacaaatacmgaataac

SEQ ID NO: 16331 - DNA, 27 bp, Artificial sequence  Forward Primer
  Primer
tttataattgaaggtttgtacctttca

SEQ ID NO: 16332 - DNA, 21 bp, Artificial sequence  Forward Primer
  Primer
atagtcacaaatgcctccacc

SEQ ID NO: 16333 - DNA, 19 bp, Artificial sequence  Forward Primer
  Primer
tagttcattctgcgggttg

SEQ ID NO: 16334 - DNA, 22 bp, Artificial sequence  Forward Primer
  Primer
acactttgtccattactcaggc

SEQ ID NO: 16335 - DNA, 19 bp, Artificial sequence  Forward Primer
  Primer
atgatgtgtgcagccttca

SEQ ID NO: 16336 - DNA, 29 bp, Artificial sequence  Forward Primer
  Primer
atagatacacagaggattagagaaagtga

SEQ ID NO: 16337 - DNA, 21 bp, Artificial sequence  Forward Primer
  Primer
ttaaccctcactctttggctg

SEQ ID NO: 16338 - DNA, 18 bp, Artificial sequence  Forward Primer
  Primer
cttgcaaggtggcaccgg

SEQ ID NO: 16339 - DNA, 21 bp, Artificial sequence  Forward Primer
  Primer
ttggttttcagtaggcttcac

SEQ ID NO: 16340 - DNA, 19 bp, Artificial sequence  Forward Primer
  Primer
aaawtaccagagggcctgg

SEQ ID NO: 16341 - DNA, 19 bp, Artificial sequence  Forward Primer
  Primer
tcttgtgctcttccaaccc

SEQ ID NO: 16342 - DNA, 23 bp, Artificial sequence  Forward Primer
  Primer
tattttcttgggtttcattcacc

SEQ ID NO: 16343 - DNA, 24 bp, Artificial sequence  Forward Primer
  Primer
aatatcttggatcctttgagaagg

SEQ ID NO: 16344 - DNA, 21 bp, Artificial sequence  Forward Primer
  Primer
aattgaggtgacrtttcagct

SEQ ID NO: 16345 - DNA, 19 bp, Artificial sequence  Forward Primer
  Primer
tgatctggccactgcttta

SEQ ID NO: 16346 - DNA, 20 bp, Artificial sequence  Forward Primer
  Primer
acccctctcaccatctgtct

SEQ ID NO: 16347 - DNA, 22 bp, Artificial sequence  Forward Primer
  Primer
taagagtgaccttggagatcca

SEQ ID NO: 16348 - DNA, 19 bp, Artificial sequence  Forward Primer
  Primer
aggaagattccccaggaaa

SEQ ID NO: 16349 - DNA, 23 bp, Artificial sequence  Forward Primer
  Primer
ttttcagctgcttattctgtgtc

SEQ ID NO: 16350 - DNA, 18 bp, Artificial sequence  Forward Primer
  Primer
aaagatgcggcccccgtg

SEQ ID NO: 16351 - DNA, 25 bp, Artificial sequence  Forward Primer
  Primer
taaatgagcactacagctaaaatga

SEQ ID NO: 16352 - DNA, 21 bp, Artificial sequence  Forward Primer
  Primer
aatcaactctgccaccttctg

SEQ ID NO: 16353 - DNA, 18 bp, Artificial sequence  Forward Primer
  Primer
acattgtcscctgcacag

SEQ ID NO: 16354 - DNA, 23 bp, Artificial sequence  Forward Primer
  Primer
tagaaacttgtgagaaacatggc

SEQ ID NO: 16355 - DNA, 18 bp, Artificial sequence  Forward Primer
  Primer
agcgccttccactgcagc

SEQ ID NO: 16356 - DNA, 26 bp, Artificial sequence  Forward Primer
  Primer
ttaactgaagttgatatttgactgtg

SEQ ID NO: 16357 - DNA, 22 bp, Artificial sequence  Forward Primer
  Primer
tttgttatttcaggcctcagtc

SEQ ID NO: 16358 - DNA, 23 bp, Artificial sequence  Forward Primer
  Primer
acatctgttcctcatgactagca

SEQ ID NO: 16359 - DNA, 21 bp, Artificial sequence  Forward Primer
  Primer
taatgtgccacgtctgtatga

SEQ ID NO: 16360 - DNA, 23 bp, Artificial sequence  Forward Primer
  Primer
aaacactacgtctaakgcacagc

SEQ ID NO: 16361 - DNA, 20 bp, Artificial sequence  Forward Primer
  Primer
tcatgaggagaagagatggc

SEQ ID NO: 16362 - DNA, 26 bp, Artificial sequence  Forward Primer
  Primer
agaatctttggttgaaacttttctaa

SEQ ID NO: 16363 - DNA, 28 bp, Artificial sequence  Forward Primer
  Primer
gaagttttgtttacagtgtatcctttta

SEQ ID NO: 16364 - DNA, 28 bp, Artificial sequence  Forward Primer
  Primer
tactggtttattacaccatttagtcaga

SEQ ID NO: 16365 - DNA, 27 bp, Artificial sequence  Forward Primer
  Primer
tcattgtaactcaatagcattttaaga

SEQ ID NO: 16366 - DNA, 24 bp, Artificial sequence  Forward Primer
  Primer
aacctgaatctttaagtgtctcca

SEQ ID NO: 16367 - DNA, 20 bp, Artificial sequence  Forward Primer
  Primer
atgccattctgatcatttgg

SEQ ID NO: 16368 - DNA, 23 bp, Artificial sequence  Forward Primer
  Primer
tgaagagtgatattctgaaggga

SEQ ID NO: 16369 - DNA, 23 bp, Artificial sequence  Forward Primer
  Primer
ttttatttcacatttggaggtga

SEQ ID NO: 16370 - DNA, 19 bp, Artificial sequence  Forward Primer
  Primer
agaattgaagcatcagcgc

SEQ ID NO: 16371 - DNA, 19 bp, Artificial sequence  Forward Primer
  Primer
agtctcacacagctggctc

SEQ ID NO: 16372 - DNA, 28 bp, Artificial sequence  Forward Primer
  Primer
tattaattttcatccagtcaagtaattc

SEQ ID NO: 16373 - DNA, 29 bp, Artificial sequence  Forward Primer
  Primer
tactgataatcaaagagagaaaataatcc

SEQ ID NO: 16374 - DNA, 24 bp, Artificial sequence  Forward Primer
  Primer
aaacgcractgtgtttaatgttac

SEQ ID NO: 16375 - DNA, 28 bp, Artificial sequence  Forward Primer
  Primer
ttcaagataagagtaatctagarcaggt

SEQ ID NO: 16376 - DNA, 23 bp, Artificial sequence  Forward Primer
  Primer
ttttaatgtgttmttccactccc

SEQ ID NO: 16377 - DNA, 24 bp, Artificial sequence  Forward Primer
  Primer
tgactctttaattgatttttgctt

SEQ ID NO: 16378 - DNA, 23 bp, Artificial sequence  Forward Primer
  Primer
aactagtctggaagcatgtacac

SEQ ID NO: 16379 - DNA, 19 bp, Artificial sequence  Forward Primer
  Primer
agaaagttccctctggtct

SEQ ID NO: 16380 - DNA, 25 bp, Artificial sequence  Forward Primer
  Primer
ctctttttgcttaatgttctctgat

SEQ ID NO: 16381 - DNA, 25 bp, Artificial sequence  Forward Primer
  Primer
attgtatgacctactctctggattg

SEQ ID NO: 16382 - DNA, 23 bp, Artificial sequence  Forward Primer
  Primer
tttaggtaagtccctaccctttc

SEQ ID NO: 16383 - DNA, 24 bp, Artificial sequence  Forward Primer
  Primer
aaattttaaaactcccaacaaaca

SEQ ID NO: 16384 - DNA, 26 bp, Artificial sequence  Forward Primer
  Primer
attgagtgttattcactttaaatgca

SEQ ID NO: 16385 - DNA, 28 bp, Artificial sequence  Forward Primer
  Primer
taaaaactaaatatagccacaaactcaa

SEQ ID NO: 16386 - DNA, 19 bp, Artificial sequence  Forward Primer
  Primer
atggccaagtacagtctgg

SEQ ID NO: 16387 - DNA, 30 bp, Artificial sequence  Forward Primer
  Primer
ttatagatagtgattctcctaaaataaatg

SEQ ID NO: 16388 - DNA, 28 bp, Artificial sequence  Forward Primer
  Primer
ccaatattagcgtttttattctagttaa

SEQ ID NO: 16389 - DNA, 25 bp, Artificial sequence  Forward Primer
  Primer
ttcatacatatacatttccaccata

SEQ ID NO: 16390 - DNA, 26 bp, Artificial sequence  Forward Primer
  Primer
ataagcaagtgtataattatctcccc

SEQ ID NO: 16391 - DNA, 24 bp, Artificial sequence  Forward Primer
  Primer
caagaggaattcagaaaagagaaa

SEQ ID NO: 16392 - DNA, 25 bp, Artificial sequence  Forward Primer
  Primer
ttattgcttagtgggtacagtttca

SEQ ID NO: 16393 - DNA, 22 bp, Artificial sequence  Forward Primer
  Primer
atttattcagggccatactgtg

SEQ ID NO: 16394 - DNA, 24 bp, Artificial sequence  Forward Primer
  Primer
tttagaaatcatatcccctggtat

SEQ ID NO: 16395 - DNA, 27 bp, Artificial sequence  Forward Primer
  Primer
tttacacaatgaccttagaatacactg

SEQ ID NO: 16396 - DNA, 30 bp, Artificial sequence  Forward Primer
  Primer
aaaaaaactaactacacatgtaatacacat

SEQ ID NO: 16397 - DNA, 19 bp, Artificial sequence  Forward Primer
  Primer
ctgtctctgagcctgctct

SEQ ID NO: 16398 - DNA, 26 bp, Artificial sequence  Forward Primer
  Primer
taaaccactatgtgaaagttgatagg

SEQ ID NO: 16399 - DNA, 24 bp, Artificial sequence  Forward Primer
  Primer
tttttctgtaaaccaaaatgttcc

SEQ ID NO: 16400 - DNA, 25 bp, Artificial sequence  Forward Primer
  Primer
tttaagcactaatgtttttcattgc

SEQ ID NO: 16401 - DNA, 19 bp, Artificial sequence  Forward Primer
  Primer
aaaatttggggaaattgcc

SEQ ID NO: 16402 - DNA, 28 bp, Artificial sequence  Forward Primer
  Primer
ttatcmttwttctctagtctctttccat

SEQ ID NO: 16403 - DNA, 28 bp, Artificial sequence  Forward Primer
  Primer
gataaaaatgcttgctcttatttatctt

SEQ ID NO: 16404 - DNA, 22 bp, Artificial sequence  Forward Primer
  Primer
atggggaaagagtacaggtttt

SEQ ID NO: 16405 - DNA, 26 bp, Artificial sequence  Forward Primer
  Primer
attctgtgagcttcaataattcatta

SEQ ID NO: 16406 - DNA, 20 bp, Artificial sequence  Forward Primer
  Primer
aggatcatcacagagcaggt

SEQ ID NO: 16407 - DNA, 22 bp, Artificial sequence  Forward Primer
  Primer
aaatcaaaaacaaacctgcaga

SEQ ID NO: 16408 - DNA, 28 bp, Artificial sequence  Forward Primer
  Primer
acatttctcatcagttccttaataaatc

SEQ ID NO: 16409 - DNA, 23 bp, Artificial sequence  Forward Primer
  Primer
taaatcttcattctccccttctc

SEQ ID NO: 16410 - DNA, 23 bp, Artificial sequence  Forward Primer
  Primer
agctcttgtcctaagagagtgtt

SEQ ID NO: 16411 - DNA, 25 bp, Artificial sequence  Forward Primer
  Primer
agataccctcatcccttttataatg

SEQ ID NO: 16412 - DNA, 23 bp, Artificial sequence  Forward Primer
  Primer
aaagagatggacatgactgaagg

SEQ ID NO: 16413 - DNA, 21 bp, Artificial sequence  Forward Primer
  Primer
acatgaaaagtgaatttcgcc

SEQ ID NO: 16414 - DNA, 23 bp, Artificial sequence  Forward Primer
  Primer
aataaagtcactgagtcagcagg

SEQ ID NO: 16415 - DNA, 18 bp, Artificial sequence  Forward Primer
  Primer
tctcaccaagtgggcaga

SEQ ID NO: 16416 - DNA, 20 bp, Artificial sequence  Forward Primer
  Primer
caggatttcagtggaggttg

SEQ ID NO: 16417 - DNA, 19 bp, Artificial sequence  Forward Primer
  Primer
gatatcaacctggggcaag

SEQ ID NO: 16418 - DNA, 20 bp, Artificial sequence  Forward Primer
  Primer
aaagaacgtttggtgagcaa

SEQ ID NO: 16419 - DNA, 20 bp, Artificial sequence  Forward Primer
  Primer
ttccctttttgatttgtgca

SEQ ID NO: 16420 - DNA, 19 bp, Artificial sequence  Forward Primer
  Primer
ttcacatcccctaacaagc

SEQ ID NO: 16421 - DNA, 25 bp, Artificial sequence  Forward Primer
  Primer
ttcagtaaatacctatccaagacca

SEQ ID NO: 16422 - DNA, 18 bp, Artificial sequence  Forward Primer
  Primer
acgtgccaggatgaacca

SEQ ID NO: 16423 - DNA, 28 bp, Artificial sequence  Forward Primer
  Primer
atatatacatgcttttatttacaggcaa

SEQ ID NO: 16424 - DNA, 19 bp, Artificial sequence  Forward Primer
  Primer
tagaaagaggcgtgtgtgc

SEQ ID NO: 16425 - DNA, 26 bp, Artificial sequence  Forward Primer
  Primer
tatttttattagccytttcactttcc

SEQ ID NO: 16426 - DNA, 23 bp, Artificial sequence  Forward Primer
  Primer
aaaagaaatgggttaagaccaca

SEQ ID NO: 16427 - DNA, 27 bp, Artificial sequence  Forward Primer
  Primer
tatatttcttcctttactctgatccaa

SEQ ID NO: 16428 - DNA, 22 bp, Artificial sequence  Forward Primer
  Primer
actgaacgatgtctggaagaga

SEQ ID NO: 16429 - DNA, 26 bp, Artificial sequence  Forward Primer
  Primer
aagactcagtagcaaagyrctagaag

SEQ ID NO: 16430 - DNA, 18 bp, Artificial sequence  Forward Primer
  Primer
ttgggacagtcgggctta

SEQ ID NO: 16431 - DNA, 18 bp, Artificial sequence  Forward Primer
  Primer
aaactgaggcagygagca

SEQ ID NO: 16432 - DNA, 20 bp, Artificial sequence  Forward Primer
  Primer
gccatgccatgtagcttatg

SEQ ID NO: 16433 - DNA, 25 bp, Artificial sequence  Forward Primer
  Primer
aacggtaataggaagaagatctgtt

SEQ ID NO: 16434 - DNA, 19 bp, Artificial sequence  Forward Primer
  Primer
tcatgcccctatagcatgc

SEQ ID NO: 16435 - DNA, 18 bp, Artificial sequence  Forward Primer
  Primer
gtgtttgcccagcgcctg

SEQ ID NO: 16436 - DNA, 18 bp, Artificial sequence  Forward Primer
  Primer
ttgcaacccctgggaggt

SEQ ID NO: 16437 - DNA, 24 bp, Artificial sequence  Forward Primer
  Primer
taaatacctatccaagaccaccat

SEQ ID NO: 16438 - DNA, 19 bp, Artificial sequence  Forward Primer
  Primer
cagyacctgtggctttctg

SEQ ID NO: 16439 - DNA, 18 bp, Artificial sequence  Forward Primer
  Primer
ccagtccttcatggggtc

SEQ ID NO: 16440 - DNA, 21 bp, Artificial sequence  Forward Primer
  Primer
tcttacaagatggaggtgagg

SEQ ID NO: 16441 - DNA, 19 bp, Artificial sequence  Forward Primer
  Primer
agtcctgccccaagtacag

SEQ ID NO: 16442 - DNA, 20 bp, Artificial sequence  Forward Primer
  Primer
tgttggctaaaacgactcca

SEQ ID NO: 16443 - DNA, 18 bp, Artificial sequence  Forward Primer
  Primer
ggaattcgggaattcagg

SEQ ID NO: 16444 - DNA, 20 bp, Artificial sequence  Forward Primer
  Primer
tttggttcagaaaggtctgc

SEQ ID NO: 16445 - DNA, 28 bp, Artificial sequence  Forward Primer
  Primer
ttaattttctgttgatttctaagctcta

SEQ ID NO: 16446 - DNA, 18 bp, Artificial sequence  Forward Primer
  Primer
tgagttcccgagacagca

SEQ ID NO: 16447 - DNA, 18 bp, Artificial sequence  Forward Primer
  Primer
tgttgctcggactgtctg

SEQ ID NO: 16448 - DNA, 20 bp, Artificial sequence  Forward Primer
  Primer
ataatgatgccaggcagaga

SEQ ID NO: 16449 - DNA, 18 bp, Artificial sequence  Forward Primer
  Primer
tcccaggctgagagcact

SEQ ID NO: 16450 - DNA, 19 bp, Artificial sequence  Forward Primer
  Primer
ctgcgatactgccagtctg

SEQ ID NO: 16451 - DNA, 19 bp, Artificial sequence  Forward Primer
  Primer
aggagcacctgaaacctcc

SEQ ID NO: 16452 - DNA, 30 bp, Artificial sequence  Forward Primer
  Primer
ttattgaatttatagtgtagaaagaaaggc

SEQ ID NO: 16453 - DNA, 23 bp, Artificial sequence  Forward Primer
  Primer
aatgaaagcaactacatccttgg

SEQ ID NO: 16454 - DNA, 19 bp, Artificial sequence  Forward Primer
  Primer
ttagggggtggagatgtca

SEQ ID NO: 16455 - DNA, 21 bp, Artificial sequence  Forward Primer
  Primer
aggaggaattaggaacatgca

SEQ ID NO: 16456 - DNA, 18 bp, Artificial sequence  Forward Primer
  Primer
aaggcggattttctggaa

SEQ ID NO: 16457 - DNA, 19 bp, Artificial sequence  Forward Primer
  Primer
agaaggcatgtgtgcttcc

SEQ ID NO: 16458 - DNA, 23 bp, Artificial sequence  Forward Primer
  Primer
tttgcttaagaycttgctaagga

SEQ ID NO: 16459 - DNA, 24 bp, Artificial sequence  Forward Primer
  Primer
attttaaggattttgtcctgaaag

SEQ ID NO: 16460 - DNA, 27 bp, Artificial sequence  Forward Primer
  Primer
tatattgctgaaaaatgtaaagttgtg

SEQ ID NO: 16461 - DNA, 22 bp, Artificial sequence  Forward Primer
  Primer
gtagcctcagctcagcatagtc

SEQ ID NO: 16462 - DNA, 23 bp, Artificial sequence  Forward Primer
  Primer
ttcttctttttgttctcgaagag

SEQ ID NO: 16463 - DNA, 19 bp, Artificial sequence  Forward Primer
  Primer
acaccaatgtcttggaccc

SEQ ID NO: 16464 - DNA, 24 bp, Artificial sequence  Forward Primer
  Primer
atatttccaaacagcacaccttat

SEQ ID NO: 16465 - DNA, 22 bp, Artificial sequence  Forward Primer
  Primer
aaattcatcttggtgatttcca

SEQ ID NO: 16466 - DNA, 24 bp, Artificial sequence  Forward Primer
  Primer
ttattttcatgttcttaggggaga

SEQ ID NO: 16467 - DNA, 21 bp, Artificial sequence  Forward Primer
  Primer
taaatgctgagatgtggatgc

SEQ ID NO: 16468 - DNA, 24 bp, Artificial sequence  Forward Primer
  Primer
tttctgtaaatatctggggaaaag

SEQ ID NO: 16469 - DNA, 19 bp, Artificial sequence  Forward Primer
  Primer
gacactcraggctgagatg

SEQ ID NO: 16470 - DNA, 20 bp, Artificial sequence  Forward Primer
  Primer
ttaaaagcatmccattcctg

SEQ ID NO: 16471 - DNA, 28 bp, Artificial sequence  Forward Primer
  Primer
gcatcttcttatttagactttctgaatt

SEQ ID NO: 16472 - DNA, 20 bp, Artificial sequence  Forward Primer
  Primer
cactttgacaacttttgcca

SEQ ID NO: 16473 - DNA, 26 bp, Artificial sequence  Forward Primer
  Primer
gttcaaattgatatcattcaaaacag

SEQ ID NO: 16474 - DNA, 26 bp, Artificial sequence  Forward Primer
  Primer
ccacaatccttttaaatttttaactc

SEQ ID NO: 16475 - DNA, 23 bp, Artificial sequence  Forward Primer
  Primer
aaacagcatgaatgactgtagta

SEQ ID NO: 16476 - DNA, 19 bp, Artificial sequence  Forward Primer
  Primer
atacagttcggtggcctca

SEQ ID NO: 16477 - DNA, 25 bp, Artificial sequence  Forward Primer
  Primer
tctggtagtggatacagactctagg

SEQ ID NO: 16478 - DNA, 27 bp, Artificial sequence  Forward Primer
  Primer
ttatttttagagagcacataaaggaat

SEQ ID NO: 16479 - DNA, 26 bp, Artificial sequence  Forward Primer
  Primer
tttttcagtaatgctgtttatgaact

SEQ ID NO: 16480 - DNA, 26 bp, Artificial sequence  Forward Primer
  Primer
atatgtatacctatagctgattgact

SEQ ID NO: 16481 - DNA, 22 bp, Artificial sequence  Forward Primer
  Primer
catgaataagggaacacatcac

SEQ ID NO: 16482 - DNA, 23 bp, Artificial sequence  Forward Primer
  Primer
tttttgctgtacatttttctcca

SEQ ID NO: 16483 - DNA, 22 bp, Artificial sequence  Forward Primer
  Primer
caaatgagtttttagggtctgg

SEQ ID NO: 16484 - DNA, 23 bp, Artificial sequence  Forward Primer
  Primer
tctgaggaaaggctaaaagagtt

SEQ ID NO: 16485 - DNA, 23 bp, Artificial sequence  Forward Primer
  Primer
accacttttattttaccccatgt

SEQ ID NO: 16486 - DNA, 20 bp, Artificial sequence  Forward Primer
  Primer
agattgtctagggcaactga

SEQ ID NO: 16487 - DNA, 23 bp, Artificial sequence  Forward Primer
  Primer
gcagtgtctggcacttagttagt

SEQ ID NO: 16488 - DNA, 28 bp, Artificial sequence  Forward Primer
  Primer
ctcatcattgatttaattaacatatcca

SEQ ID NO: 16489 - DNA, 29 bp, Artificial sequence  Forward Primer
  Primer
attaatatgatctgtgcctattatatgct

SEQ ID NO: 16490 - DNA, 21 bp, Artificial sequence  Forward Primer
  Primer
tggattttgtgtaatggcaat

SEQ ID NO: 16491 - DNA, 25 bp, Artificial sequence  Forward Primer
  Primer
tttgctttctcaatttcttctctaa

SEQ ID NO: 16492 - DNA, 24 bp, Artificial sequence  Forward Primer
  Primer
tgcaaaaatgctgattatmacata

SEQ ID NO: 16493 - DNA, 24 bp, Artificial sequence  Forward Primer
  Primer
cacacaaactcaagccatattaat

SEQ ID NO: 16494 - DNA, 25 bp, Artificial sequence  Forward Primer
  Primer
ttttatcatgaaaatgttcctctct

SEQ ID NO: 16495 - DNA, 27 bp, Artificial sequence  Forward Primer
  Primer
ttcttaagagatgtaattgaaaacacc

SEQ ID NO: 16496 - DNA, 26 bp, Artificial sequence  Forward Primer
  Primer
tacaagagcaataattcctacagtga

SEQ ID NO: 16497 - DNA, 24 bp, Artificial sequence  Forward Primer
  Primer
attgttcaggtaagataactggga

SEQ ID NO: 16498 - DNA, 27 bp, Artificial sequence  Forward Primer
  Primer
taaaaggtcaaagagcaataattaaga

SEQ ID NO: 16499 - DNA, 29 bp, Artificial sequence  Forward Primer
  Primer
acacgtaaagtatataagcaaaayaaaca

SEQ ID NO: 16500 - DNA, 28 bp, Artificial sequence  Forward Primer
  Primer
ataaccaggaaaaagtcataagatatgt

SEQ ID NO: 16501 - DNA, 24 bp, Artificial sequence  Forward Primer
  Primer
ctcatgataagcaaaagactatgg

SEQ ID NO: 16502 - DNA, 30 bp, Artificial sequence  Forward Primer
  Primer
atactataagaagcagttctaagctatttg

SEQ ID NO: 16503 - DNA, 28 bp, Artificial sequence  Forward Primer
  Primer
tcttgatggtaattttgttttagtaatg

SEQ ID NO: 16504 - DNA, 23 bp, Artificial sequence  Forward Primer
  Primer
atctatcttgatgtgggaactcc

SEQ ID NO: 16505 - DNA, 24 bp, Artificial sequence  Forward Primer
  Primer
atttttcattaaggcaacttgttt

SEQ ID NO: 16506 - DNA, 28 bp, Artificial sequence  Forward Primer
  Primer
aattctacaagtcataaataacactcaa

SEQ ID NO: 16507 - DNA, 18 bp, Artificial sequence  Forward Primer
  Primer
ttagaaggagggagggca

SEQ ID NO: 16508 - DNA, 28 bp, Artificial sequence  Forward Primer
  Primer
agataccatctttaagttgtttcatttt

SEQ ID NO: 16509 - DNA, 20 bp, Artificial sequence  Forward Primer
  Primer
ggaattctgaatctgggctt

SEQ ID NO: 16510 - DNA, 21 bp, Artificial sequence  Forward Primer
  Primer
ttctcaaaaatggacaggaca

SEQ ID NO: 16511 - DNA, 22 bp, Artificial sequence  Forward Primer
  Primer
atgggaaagaaggaaataatgg

SEQ ID NO: 16512 - DNA, 18 bp, Artificial sequence  Forward Primer
  Primer
taggaggctggtagctgc

SEQ ID NO: 16513 - DNA, 26 bp, Artificial sequence  Forward Primer
  Primer
gtagcttaataaaccacatcaaaagc

SEQ ID NO: 16514 - DNA, 23 bp, Artificial sequence  Forward Primer
  Primer
aaaaggtttcgatttttagtggt

SEQ ID NO: 16515 - DNA, 28 bp, Artificial sequence  Forward Primer
  Primer
atatatacatgcttttatttacaggcaa

SEQ ID NO: 16516 - DNA, 18 bp, Artificial sequence  Forward Primer
  Primer
catgagagaggacgggag

SEQ ID NO: 16517 - DNA, 22 bp, Artificial sequence  Forward Primer
  Primer
ttgcagacagcttcttaaatcc

SEQ ID NO: 16518 - DNA, 22 bp, Artificial sequence  Forward Primer
  Primer
tttgtccattgagatgactgat

SEQ ID NO: 16519 - DNA, 20 bp, Artificial sequence  Forward Primer
  Primer
actctcggatcttgcctttg

SEQ ID NO: 16520 - DNA, 22 bp, Artificial sequence  Forward Primer
  Primer
tcacagaagaagagatgcacaa

SEQ ID NO: 16521 - DNA, 24 bp, Artificial sequence  Forward Primer
  Primer
ttaaacacatcaagtgacctttcc

SEQ ID NO: 16522 - DNA, 21 bp, Artificial sequence  Forward Primer
  Primer
atccatgaaagaggaaggagg

SEQ ID NO: 16523 - DNA, 23 bp, Artificial sequence  Forward Primer
  Primer
agagtgcattttgtagacatgga

SEQ ID NO: 16524 - DNA, 25 bp, Artificial sequence  Forward Primer
  Primer
agartctgtatgatgagagatgtgc

SEQ ID NO: 16525 - DNA, 22 bp, Artificial sequence  Forward Primer
  Primer
agatcgtttgtttgtaggctga

SEQ ID NO: 16526 - DNA, 18 bp, Artificial sequence  Forward Primer
  Primer
aattttgcatccacgcaa

SEQ ID NO: 16527 - DNA, 18 bp, Artificial sequence  Forward Primer
  Primer
aaggacagctgccactcc

SEQ ID NO: 16528 - DNA, 21 bp, Artificial sequence  Forward Primer
  Primer
aggcacrgtctagagtggatc

SEQ ID NO: 16529 - DNA, 19 bp, Artificial sequence  Forward Primer
  Primer
gccaaaaccatgataactg

SEQ ID NO: 16530 - DNA, 21 bp, Artificial sequence  Forward Primer
  Primer
ctggtactcctgctcgttagc

SEQ ID NO: 16531 - DNA, 18 bp, Artificial sequence  Forward Primer
  Primer
tatccaggccaaaagcag

SEQ ID NO: 16532 - DNA, 24 bp, Artificial sequence  Forward Primer
  Primer
atctttgttcctattctttggacc

SEQ ID NO: 16533 - DNA, 27 bp, Artificial sequence  Forward Primer
  Primer
tttattactaagatgcaagtgaatgtc

SEQ ID NO: 16534 - DNA, 29 bp, Artificial sequence  Forward Primer
  Primer
tasttatcacagtctagatgactgcatat

SEQ ID NO: 16535 - DNA, 22 bp, Artificial sequence  Forward Primer
  Primer
acttgtgctgcttgtgtaggta

SEQ ID NO: 16536 - DNA, 25 bp, Artificial sequence  Forward Primer
  Primer
ctaaaaaattgtgggtcctatcttc

SEQ ID NO: 16537 - DNA, 25 bp, Artificial sequence  Forward Primer
  Primer
gagagattattactgaaatcctggg

SEQ ID NO: 16538 - DNA, 18 bp, Artificial sequence  Forward Primer
  Primer
tacaggtgccccgaagtc

SEQ ID NO: 16539 - DNA, 18 bp, Artificial sequence  Forward Primer
  Primer
atagggcttggcaaggtc

SEQ ID NO: 16540 - DNA, 18 bp, Artificial sequence  Forward Primer
  Primer
atgaaggagctgctggct

SEQ ID NO: 16541 - DNA, 19 bp, Artificial sequence  Forward Primer
  Primer
aatgaaattctctgccccc

SEQ ID NO: 16542 - DNA, 23 bp, Artificial sequence  Forward Primer
  Primer
agcagagtaaggrcagatctttg

SEQ ID NO: 16543 - DNA, 23 bp, Artificial sequence  Forward Primer
  Primer
atggtgtatctgaggcattatcc

SEQ ID NO: 16544 - DNA, 26 bp, Artificial sequence  Forward Primer
  Primer
tatctgaagagaattgaatagttgcc

SEQ ID NO: 16545 - DNA, 22 bp, Artificial sequence  Forward Primer
  Primer
agaacaaaaggagaagcaaaca

SEQ ID NO: 16546 - DNA, 22 bp, Artificial sequence  Forward Primer
  Primer
taaatggacatcagacmccttc

SEQ ID NO: 16547 - DNA, 22 bp, Artificial sequence  Forward Primer
  Primer
atcgagagtttagtttcaggca

SEQ ID NO: 16548 - DNA, 24 bp, Artificial sequence  Forward Primer
  Primer
atttcagaaaagtaagacagccag

SEQ ID NO: 16549 - DNA, 19 bp, Artificial sequence  Forward Primer
  Primer
ttttccactctcctcccac

SEQ ID NO: 16550 - DNA, 23 bp, Artificial sequence  Forward Primer
  Primer
atggttgtaaaggtgaaagaaca

SEQ ID NO: 16551 - DNA, 18 bp, Artificial sequence  Forward Primer
  Primer
agctgggcttctccccgt

SEQ ID NO: 16552 - DNA, 19 bp, Artificial sequence  Forward Primer
  Primer
tggaaagcacactgagtgg

SEQ ID NO: 16553 - DNA, 18 bp, Artificial sequence  Forward Primer
  Primer
aactgctgaagcccacga

SEQ ID NO: 16554 - DNA, 18 bp, Artificial sequence  Forward Primer
  Primer
aggttgttggggaaccag

SEQ ID NO: 16555 - DNA, 21 bp, Artificial sequence  Forward Primer
  Primer
taaagaatccacgtgaaaatg

SEQ ID NO: 16556 - DNA, 27 bp, Artificial sequence  Forward Primer
  Primer
agaaaagtccttagaactcyatcactt

SEQ ID NO: 16557 - DNA, 22 bp, Artificial sequence  Forward Primer
  Primer
tggacaagtcacctagyctctc

SEQ ID NO: 16558 - DNA, 21 bp, Artificial sequence  Forward Primer
  Primer
ttcttgcaacatgtgttcttg

SEQ ID NO: 16559 - DNA, 23 bp, Artificial sequence  Forward Primer
  Primer
tttaaaaaggtcgtgttgttgtt

SEQ ID NO: 16560 - DNA, 29 bp, Artificial sequence  Forward Primer
  Primer
atkctrtgcatatagataatgtctaagag

SEQ ID NO: 16561 - DNA, 22 bp, Artificial sequence  Forward Primer
  Primer
aatctccccttagttttatggc

SEQ ID NO: 16562 - DNA, 23 bp, Artificial sequence  Forward Primer
  Primer
tatgatgactttcattttcatgg

SEQ ID NO: 16563 - DNA, 27 bp, Artificial sequence  Forward Primer
  Primer
tttaaacagaccagcttcatataattt

SEQ ID NO: 16564 - DNA, 26 bp, Artificial sequence  Forward Primer
  Primer
aaagagaatctctgaaccttacatgt

SEQ ID NO: 16565 - DNA, 19 bp, Artificial sequence  Forward Primer
  Primer
tggtgtcccttttcttcag

SEQ ID NO: 16566 - DNA, 19 bp, Artificial sequence  Forward Primer
  Primer
gggtgggcattcagtagac

SEQ ID NO: 16567 - DNA, 29 bp, Artificial sequence  Forward Primer
  Primer
taacatattatcagtacaaaagacttccc

SEQ ID NO: 16568 - DNA, 26 bp, Artificial sequence  Forward Primer
  Primer
ttttaaaacgatgttaagtgtgtttc

SEQ ID NO: 16569 - DNA, 23 bp, Artificial sequence  Forward Primer
  Primer
atattgggcaaaaagaaatatgc

SEQ ID NO: 16570 - DNA, 23 bp, Artificial sequence  Forward Primer
  Primer
aaacccctctgaatagtatttat

SEQ ID NO: 16571 - DNA, 25 bp, Artificial sequence  Forward Primer
  Primer
attatataattttgtgtgctgctag

SEQ ID NO: 16572 - DNA, 26 bp, Artificial sequence  Forward Primer
  Primer
aatatcccatttcattatttcaagtc

SEQ ID NO: 16573 - DNA, 19 bp, Artificial sequence  Forward Primer
  Primer
gcttggtgaccaaacaaca

SEQ ID NO: 16574 - DNA, 27 bp, Artificial sequence  Forward Primer
  Primer
aaattaattctgttatttcacgaacac

SEQ ID NO: 16575 - DNA, 19 bp, Artificial sequence  Forward Primer
  Primer
aaaggcagacagggggcta

SEQ ID NO: 16576 - DNA, 22 bp, Artificial sequence  Forward Primer
  Primer
aacctaatggcctctcctagag

SEQ ID NO: 16577 - DNA, 24 bp, Artificial sequence  Forward Primer
  Primer
gatagattttgctcactctgaatg

SEQ ID NO: 16578 - DNA, 26 bp, Artificial sequence  Forward Primer
  Primer
attacaagtatagaatgctgggaaac

SEQ ID NO: 16579 - DNA, 26 bp, Artificial sequence  Forward Primer
  Primer
tttattgtggtttatcaagtggttac

SEQ ID NO: 16580 - DNA, 21 bp, Artificial sequence  Forward Primer
  Primer
cccagccacacttatgtttta

SEQ ID NO: 16581 - DNA, 25 bp, Artificial sequence  Forward Primer
  Primer
ggaataaagcaacaattcataatgt

SEQ ID NO: 16582 - DNA, 28 bp, Artificial sequence  Forward Primer
  Primer
gctttattttcttatttttagagagcac

SEQ ID NO: 16583 - DNA, 23 bp, Artificial sequence  Forward Primer
  Primer
taagtttgctgaagagattctgg

SEQ ID NO: 16584 - DNA, 20 bp, Artificial sequence  Forward Primer
  Primer
agaattattgcactgccatg

SEQ ID NO: 16585 - DNA, 20 bp, Artificial sequence  Forward Primer
  Primer
ttccttgaaggcagaaactg

SEQ ID NO: 16586 - DNA, 25 bp, Artificial sequence  Forward Primer
  Primer
aagatggyatctttgttcctattct

SEQ ID NO: 16587 - DNA, 27 bp, Artificial sequence  Forward Primer
  Primer
aaatcagtaactgtaaccaaaggaata

SEQ ID NO: 16588 - DNA, 28 bp, Artificial sequence  Forward Primer
  Primer
agttaagaaatagttgaacataatttgc

SEQ ID NO: 16589 - DNA, 25 bp, Artificial sequence  Forward Primer
  Primer
ttttcttccaatagttkgcttagtt

SEQ ID NO: 16590 - DNA, 20 bp, Artificial sequence  Forward Primer
  Primer
aaaggtagggatttgcttcc

SEQ ID NO: 16591 - DNA, 20 bp, Artificial sequence  Forward Primer
  Primer
ttgggcagctaacattactt

SEQ ID NO: 16592 - DNA, 23 bp, Artificial sequence  Forward Primer
  Primer
aagaaaatagttcctcctgaagg

SEQ ID NO: 16593 - DNA, 24 bp, Artificial sequence  Forward Primer
  Primer
tttttctgtaaaccaaaatgttcc

SEQ ID NO: 16594 - DNA, 18 bp, Artificial sequence  Forward Primer
  Primer
ccagcccaggaagcaata

SEQ ID NO: 16595 - DNA, 27 bp, Artificial sequence  Forward Primer
  Primer
aaaaactattccacctgtacttctaca

SEQ ID NO: 16596 - DNA, 20 bp, Artificial sequence  Forward Primer
  Primer
tcccaagagaccttgtgaag

SEQ ID NO: 16597 - DNA, 26 bp, Artificial sequence  Forward Primer
  Primer
aatttatatcatgcctttactgcttc

SEQ ID NO: 16598 - DNA, 29 bp, Artificial sequence  Forward Primer
  Primer
agcatatagtttgagataggaattaatca

SEQ ID NO: 16599 - DNA, 24 bp, Artificial sequence  Forward Primer
  Primer
aagaaagccacaaacaaaaataat

SEQ ID NO: 16600 - DNA, 19 bp, Artificial sequence  Forward Primer
  Primer
cgtctggctgtgtgtctgt

SEQ ID NO: 16601 - DNA, 26 bp, Artificial sequence  Forward Primer
  Primer
cgagtaaaatccaatgacttaattta

SEQ ID NO: 16602 - DNA, 23 bp, Artificial sequence  Forward Primer
  Primer
aatgataacagagaagagccttt

SEQ ID NO: 16603 - DNA, 25 bp, Artificial sequence  Forward Primer
  Primer
aatcattagcaatctgttgtttgtt

SEQ ID NO: 16604 - DNA, 28 bp, Artificial sequence  Forward Primer
  Primer
gaagagacaagaatatacaattgaaaaa

SEQ ID NO: 16605 - DNA, 18 bp, Artificial sequence  Forward Primer
  Primer
atggcacatggttctgcc

SEQ ID NO: 16606 - DNA, 26 bp, Artificial sequence  Forward Primer
  Primer
ccaatcctagataaaacactgaaatt

SEQ ID NO: 16607 - DNA, 29 bp, Artificial sequence  Forward Primer
  Primer
aaaaatgctgattatmacatagatctaga

SEQ ID NO: 16608 - DNA, 26 bp, Artificial sequence  Forward Primer
  Primer
attttttccayrttatttgtcacttg

SEQ ID NO: 16609 - DNA, 18 bp, Artificial sequence  Forward Primer
  Primer
atggccgccaaggtctgc

SEQ ID NO: 16610 - DNA, 18 bp, Artificial sequence  Forward Primer
  Primer
tctgttggcttgagtgca

SEQ ID NO: 16611 - DNA, 18 bp, Artificial sequence  Forward Primer
  Primer
tcatggagacccgaaaca

SEQ ID NO: 16612 - DNA, 24 bp, Artificial sequence  Forward Primer
  Primer
aaackaacttggttttcagtaggc

SEQ ID NO: 16613 - DNA, 23 bp, Artificial sequence  Forward Primer
  Primer
tcatagatagaaacgtggcaaag

SEQ ID NO: 16614 - DNA, 21 bp, Artificial sequence  Forward Primer
  Primer
atgcttgaaaactcaactggc

SEQ ID NO: 16615 - DNA, 24 bp, Artificial sequence  Forward Primer
  Primer
aaaatatgttgacacccttctctc

SEQ ID NO: 16616 - DNA, 24 bp, Artificial sequence  Forward Primer
  Primer
aatttaatgtcagagtcttctcgc

SEQ ID NO: 16617 - DNA, 24 bp, Artificial sequence  Forward Primer
  Primer
taagcaaacttacctctcacaatg

SEQ ID NO: 16618 - DNA, 23 bp, Artificial sequence  Forward Primer
  Primer
tttgtattcagaaaacygcagac

SEQ ID NO: 16619 - DNA, 24 bp, Artificial sequence  Forward Primer
  Primer
ayrtgcaaactctttagttacagc

SEQ ID NO: 16620 - DNA, 24 bp, Artificial sequence  Forward Primer
  Primer
tattcctgtaacaggcagactttt

SEQ ID NO: 16621 - DNA, 20 bp, Artificial sequence  Forward Primer
  Primer
tctgctcygtgtgtaacgtg

SEQ ID NO: 16622 - DNA, 21 bp, Artificial sequence  Forward Primer
  Primer
gagacacttaggcaggagtgc

SEQ ID NO: 16623 - DNA, 21 bp, Artificial sequence  Forward Primer
  Primer
ataaaactttggcgaatgagg

SEQ ID NO: 16624 - DNA, 25 bp, Artificial sequence  Forward Primer
  Primer
agtcgtctraagaaaagtgaagatt

SEQ ID NO: 16625 - DNA, 19 bp, Artificial sequence  Forward Primer
  Primer
aaatgaattcctggggtcc

SEQ ID NO: 16626 - DNA, 26 bp, Artificial sequence  Forward Primer
  Primer
tattcaataaccaagttctmaaacca

SEQ ID NO: 16627 - DNA, 22 bp, Artificial sequence  Forward Primer
  Primer
tttgcttccttctgagagtctg

SEQ ID NO: 16628 - DNA, 26 bp, Artificial sequence  Forward Primer
  Primer
agataaacaaaacaagcattcatagc

SEQ ID NO: 16629 - DNA, 24 bp, Artificial sequence  Forward Primer
  Primer
ttttatggatcacacaagttttca

SEQ ID NO: 16630 - DNA, 18 bp, Artificial sequence  Forward Primer
  Primer
gcgtcttttgttggaagg

SEQ ID NO: 16631 - DNA, 19 bp, Artificial sequence  Forward Primer
  Primer
taagcatactgcctgccac

SEQ ID NO: 16632 - DNA, 23 bp, Artificial sequence  Forward Primer
  Primer
atttctcagacagagaccaaagg

SEQ ID NO: 16633 - DNA, 21 bp, Artificial sequence  Forward Primer
  Primer
taatgagagtcaggacggagg

SEQ ID NO: 16634 - DNA, 20 bp, Artificial sequence  Forward Primer
  Primer
ttttttgcaaagccaaagtg

SEQ ID NO: 16635 - DNA, 22 bp, Artificial sequence  Forward Primer
  Primer
aggcttcctctctagtttcaat

SEQ ID NO: 16636 - DNA, 22 bp, Artificial sequence  Forward Primer
  Primer
actgtgtccaaacttatcgtgc

SEQ ID NO: 16637 - DNA, 22 bp, Artificial sequence  Forward Primer
  Primer
ctatctcttcctgggatttcat

SEQ ID NO: 16638 - DNA, 22 bp, Artificial sequence  Forward Primer
  Primer
aaagataacactggcatcttgc

SEQ ID NO: 16639 - DNA, 19 bp, Artificial sequence  Forward Primer
  Primer
tggttgagacaggtcaggt

SEQ ID NO: 16640 - DNA, 18 bp, Artificial sequence  Forward Primer
  Primer
ggcccagccagaaatcac

SEQ ID NO: 16641 - DNA, 19 bp, Artificial sequence  Forward Primer
  Primer
aagagtgaaggaggcaggc

SEQ ID NO: 16642 - DNA, 20 bp, Artificial sequence  Forward Primer
  Primer
tctcttggtgttgaccgtct

SEQ ID NO: 16643 - DNA, 22 bp, Artificial sequence  Forward Primer
  Primer
ttgaagtttggattttccagtt

SEQ ID NO: 16644 - DNA, 26 bp, Artificial sequence  Forward Primer
  Primer
atgttctacttcctccacgatatatg

SEQ ID NO: 16645 - DNA, 30 bp, Artificial sequence  Forward Primer
  Primer
taagacatcttatttcttttagaaactagc

SEQ ID NO: 16646 - DNA, 25 bp, Artificial sequence  Forward Primer
  Primer
attaaagaaattgcccataattctg

SEQ ID NO: 16647 - DNA, 28 bp, Artificial sequence  Forward Primer
  Primer
aaatatctcacacaaatatcaaatatgg

SEQ ID NO: 16648 - DNA, 20 bp, Artificial sequence  Forward Primer
  Primer
tttgatagcactgcttctgg

SEQ ID NO: 16649 - DNA, 20 bp, Artificial sequence  Forward Primer
  Primer
ccaatctgctatattctgct

SEQ ID NO: 16650 - DNA, 28 bp, Artificial sequence  Forward Primer
  Primer
tataaaaataaaacatgtactgcagttg

SEQ ID NO: 16651 - DNA, 26 bp, Artificial sequence  Forward Primer
  Primer
ggtgaaaaggtgagartaaaataatg

SEQ ID NO: 16652 - DNA, 20 bp, Artificial sequence  Forward Primer
  Primer
aattcttcctggaaaagccc

SEQ ID NO: 16653 - DNA, 18 bp, Artificial sequence  Forward Primer
  Primer
acaagaccaggatggctg

SEQ ID NO: 16654 - DNA, 24 bp, Artificial sequence  Forward Primer
  Primer
tgagtttagtgagcatctttacga

SEQ ID NO: 16655 - DNA, 22 bp, Artificial sequence  Forward Primer
  Primer
aaaagcatggtatagcagaaag

SEQ ID NO: 16656 - DNA, 26 bp, Artificial sequence  Forward Primer
  Primer
ttctaaaatatggtattcgactcctg

SEQ ID NO: 16657 - DNA, 19 bp, Artificial sequence  Forward Primer
  Primer
attgagcacagcgtctgac

SEQ ID NO: 16658 - DNA, 25 bp, Artificial sequence  Forward Primer
  Primer
ttaatttccttcttgtraaatatgc

SEQ ID NO: 16659 - DNA, 27 bp, Artificial sequence  Forward Primer
  Primer
aatagtcaccttgagcagtagagtatg

SEQ ID NO: 16660 - DNA, 25 bp, Artificial sequence  Forward Primer
  Primer
attaccatcatcaccatcaagatac

SEQ ID NO: 16661 - DNA, 26 bp, Artificial sequence  Forward Primer
  Primer
aaagatgacaacaataacagaactga

SEQ ID NO: 16662 - DNA, 22 bp, Artificial sequence  Forward Primer
  Primer
ttgcgaatcaggtagttagctt

SEQ ID NO: 16663 - DNA, 24 bp, Artificial sequence  Forward Primer
  Primer
taagggcatatggagtagaaaatg

SEQ ID NO: 16664 - DNA, 28 bp, Artificial sequence  Forward Primer
  Primer
ttgaatagaatttacaagttaaaggaca

SEQ ID NO: 16665 - DNA, 24 bp, Artificial sequence  Forward Primer
  Primer
taagggcatatggagtagaaaatg

SEQ ID NO: 16666 - DNA, 20 bp, Artificial sequence  Forward Primer
  Primer
attccagaacctgtcccttc

SEQ ID NO: 16667 - DNA, 25 bp, Artificial sequence  Forward Primer
  Primer
aaaatcgacagtattgtgtgtatgg

SEQ ID NO: 16668 - DNA, 19 bp, Artificial sequence  Forward Primer
  Primer
taatggccctgttccctaa

SEQ ID NO: 16669 - DNA, 21 bp, Artificial sequence  Forward Primer
  Primer
tttttagaatgaccgcacatg

SEQ ID NO: 16670 - DNA, 23 bp, Artificial sequence  Forward Primer
  Primer
atgaagtgtcatgactgctaatt

SEQ ID NO: 16671 - DNA, 30 bp, Artificial sequence  Forward Primer
  Primer
aaatatgtatgtctctctgttctatgctag

SEQ ID NO: 16672 - DNA, 24 bp, Artificial sequence  Forward Primer
  Primer
agaaagctccattcagatctacag

SEQ ID NO: 16673 - DNA, 28 bp, Artificial sequence  Forward Primer
  Primer
aatatggttttatttctcattgtattcc

SEQ ID NO: 16674 - DNA, 25 bp, Artificial sequence  Forward Primer
  Primer
atttcactttatggagatgatttga

SEQ ID NO: 16675 - DNA, 20 bp, Artificial sequence  Forward Primer
  Primer
ggcatccacaaaataaagat

SEQ ID NO: 16676 - DNA, 29 bp, Artificial sequence  Forward Primer
  Primer
attttctctgaataggtatcatttttacc

SEQ ID NO: 16677 - DNA, 24 bp, Artificial sequence  Forward Primer
  Primer
aacaaaatgagagtgttcatgagc

SEQ ID NO: 16678 - DNA, 26 bp, Artificial sequence  Forward Primer
  Primer
tgtttttaaattaaggtggatcatac

SEQ ID NO: 16679 - DNA, 25 bp, Artificial sequence  Forward Primer
  Primer
ttatagccaattagcaatgttgttc

SEQ ID NO: 16680 - DNA, 26 bp, Artificial sequence  Forward Primer
  Primer
ataagagatttagcatttcctcagac

SEQ ID NO: 16681 - DNA, 22 bp, Artificial sequence  Forward Primer
  Primer
aaaggagaaagaaaaaagcctt

SEQ ID NO: 16682 - DNA, 30 bp, Artificial sequence  Forward Primer
  Primer
gtcactgattatctatgttatatgacaatt

SEQ ID NO: 16683 - DNA, 21 bp, Artificial sequence  Forward Primer
  Primer
tttcttttgaaatttccccaa

SEQ ID NO: 16684 - DNA, 18 bp, Artificial sequence  Forward Primer
  Primer
catttgcgggctccttcg

SEQ ID NO: 16685 - DNA, 23 bp, Artificial sequence  Forward Primer
  Primer
aacagtgataaatggcagatcag

SEQ ID NO: 16686 - DNA, 19 bp, Artificial sequence  Forward Primer
  Primer
tggaattcagggctggtat

SEQ ID NO: 16687 - DNA, 23 bp, Artificial sequence  Forward Primer
  Primer
aatcaggaactaccgtaatgacc

SEQ ID NO: 16688 - DNA, 23 bp, Artificial sequence  Forward Primer
  Primer
tcagagggtgttagaggtagtga

SEQ ID NO: 16689 - DNA, 25 bp, Artificial sequence  Forward Primer
  Primer
ataaagaggacaaaggaaagaaaga

SEQ ID NO: 16690 - DNA, 30 bp, Artificial sequence  Forward Primer
  Primer
aggagatagacataaatagatacagatata

SEQ ID NO: 16691 - DNA, 23 bp, Artificial sequence  Forward Primer
  Primer
tttgaaccactttaagatgacca

SEQ ID NO: 16692 - DNA, 20 bp, Artificial sequence  Forward Primer
  Primer
attcagcatgtttgctttaa

SEQ ID NO: 16693 - DNA, 24 bp, Artificial sequence  Forward Primer
  Primer
catataataaaactagtggtccca

SEQ ID NO: 16694 - DNA, 26 bp, Artificial sequence  Forward Primer
  Primer
agctgatacamtgtrctatcacatct

SEQ ID NO: 16695 - DNA, 18 bp, Artificial sequence  Forward Primer
  Primer
gttcccctggcagtcaac

SEQ ID NO: 16696 - DNA, 26 bp, Artificial sequence  Forward Primer
  Primer
aagaaacattagcttgcagtattttt

SEQ ID NO: 16697 - DNA, 20 bp, Artificial sequence  Forward Primer
  Primer
agcctgtgaacctgaaatga

SEQ ID NO: 16698 - DNA, 27 bp, Artificial sequence  Forward Primer
  Primer
aatagtcaccttgagcagtagagtatg

SEQ ID NO: 16699 - DNA, 18 bp, Artificial sequence  Forward Primer
  Primer
aattcccaccaaaccagg

SEQ ID NO: 16700 - DNA, 23 bp, Artificial sequence  Forward Primer
  Primer
ttttatattggattcaatcggag

SEQ ID NO: 16701 - DNA, 25 bp, Artificial sequence  Forward Primer
  Primer
ttttaatgatggtggaattaactgt

SEQ ID NO: 16702 - DNA, 24 bp, Artificial sequence  Forward Primer
  Primer
catctctgcatgacatttagtgtt

SEQ ID NO: 16703 - DNA, 25 bp, Artificial sequence  Forward Primer
  Primer
tttatattttctggttgaggacagt

SEQ ID NO: 16704 - DNA, 18 bp, Artificial sequence  Forward Primer
  Primer
gactcgggttcagggtct

SEQ ID NO: 16705 - DNA, 18 bp, Artificial sequence  Forward Primer
  Primer
ggcatagccagcctgtcc

SEQ ID NO: 16706 - DNA, 19 bp, Artificial sequence  Forward Primer
  Primer
taaacagaccacrgagggg

SEQ ID NO: 16707 - DNA, 19 bp, Artificial sequence  Forward Primer
  Primer
tggtttacgcttcacacca

SEQ ID NO: 16708 - DNA, 18 bp, Artificial sequence  Forward Primer
  Primer
tctggaaccctcctgtgc

SEQ ID NO: 16709 - DNA, 18 bp, Artificial sequence  Forward Primer
  Primer
tgggagtttgggatgagc

SEQ ID NO: 16710 - DNA, 26 bp, Artificial sequence  Forward Primer
  Primer
atgtttttacaagcgctctatatttt

SEQ ID NO: 16711 - DNA, 24 bp, Artificial sequence  Forward Primer
  Primer
ccatcttttattttctcacctacc

SEQ ID NO: 16712 - DNA, 25 bp, Artificial sequence  Forward Primer
  Primer
aagaaatttcacaactccctaattc

SEQ ID NO: 16713 - DNA, 22 bp, Artificial sequence  Forward Primer
  Primer
tcagagaggccaagtaatcatc

SEQ ID NO: 16714 - DNA, 20 bp, Artificial sequence  Forward Primer
  Primer
tactgcaaagacagagcctt

SEQ ID NO: 16715 - DNA, 22 bp, Artificial sequence  Forward Primer
  Primer
ttccgtctacaggaaagtgagt

SEQ ID NO: 16716 - DNA, 25 bp, Artificial sequence  Forward Primer
  Primer
tatgacacagtgaactgtctagctc

SEQ ID NO: 16717 - DNA, 18 bp, Artificial sequence  Forward Primer
  Primer
aaacacggcagctcagga

SEQ ID NO: 16718 - DNA, 19 bp, Artificial sequence  Forward Primer
  Primer
tggagtgaagtttgcatgc

SEQ ID NO: 16719 - DNA, 29 bp, Artificial sequence  Forward Primer
  Primer
aagtatttatttatttcactgtgttggtc

SEQ ID NO: 16720 - DNA, 24 bp, Artificial sequence  Forward Primer
  Primer
ataatagggactcataatagtggt

SEQ ID NO: 16721 - DNA, 23 bp, Artificial sequence  Forward Primer
  Primer
agcagagtaaggrcagatctttg

SEQ ID NO: 16722 - DNA, 19 bp, Artificial sequence  Forward Primer
  Primer
cagcaatgggctcagtacc

SEQ ID NO: 16723 - DNA, 21 bp, Artificial sequence  Forward Primer
  Primer
atgaggaaagctaagagccag

SEQ ID NO: 16724 - DNA, 22 bp, Artificial sequence  Forward Primer
  Primer
tctttgcttccttctgagagtc

SEQ ID NO: 16725 - DNA, 22 bp, Artificial sequence  Forward Primer
  Primer
atgccttcttccattgtaaatg

SEQ ID NO: 16726 - DNA, 24 bp, Artificial sequence  Forward Primer
  Primer
taaaccaaggcatatttagaaagg

SEQ ID NO: 16727 - DNA, 18 bp, Artificial sequence  Forward Primer
  Primer
atactggtcctgggtggc

SEQ ID NO: 16728 - DNA, 18 bp, Artificial sequence  Forward Primer
  Primer
atctgtgggtgggtgtcc

SEQ ID NO: 16729 - DNA, 20 bp, Artificial sequence  Forward Primer
  Primer
tgctattgctggatttttcc

SEQ ID NO: 16730 - DNA, 27 bp, Artificial sequence  Forward Primer
  Primer
tcatcagtctagaacatttattaagca

SEQ ID NO: 16731 - DNA, 21 bp, Artificial sequence  Forward Primer
  Primer
agcagtgacctcagtgatcag

SEQ ID NO: 16732 - DNA, 18 bp, Artificial sequence  Forward Primer
  Primer
tcccggaactgcacagaa

SEQ ID NO: 16733 - DNA, 19 bp, Artificial sequence  Forward Primer
  Primer
tttcaagcactgctttccc

SEQ ID NO: 16734 - DNA, 20 bp, Artificial sequence  Forward Primer
  Primer
aygygtgttctgcacatctg

SEQ ID NO: 16735 - DNA, 22 bp, Artificial sequence  Forward Primer
  Primer
atatttctcctttcccatgaag

SEQ ID NO: 16736 - DNA, 20 bp, Artificial sequence  Forward Primer
  Primer
aggtgagtctgggtttgagg

SEQ ID NO: 16737 - DNA, 21 bp, Artificial sequence  Forward Primer
  Primer
tataaaaggcgtcagagggag

SEQ ID NO: 16738 - DNA, 18 bp, Artificial sequence  Forward Primer
  Primer
tgtctgcaccaccaggtt

SEQ ID NO: 16739 - DNA, 22 bp, Artificial sequence  Forward Primer
  Primer
attcatctgcaatttctatcgc

SEQ ID NO: 16740 - DNA, 28 bp, Artificial sequence  Forward Primer
  Primer
aactaagtaatctaagctaaaggcacat

SEQ ID NO: 16741 - DNA, 24 bp, Artificial sequence  Forward Primer
  Primer
tttggcaagtctttacttacagtg

SEQ ID NO: 16742 - DNA, 24 bp, Artificial sequence  Forward Primer
  Primer
aaaatagatacttgtccccacaaa

SEQ ID NO: 16743 - DNA, 28 bp, Artificial sequence  Forward Primer
  Primer
ttattatctgttcttagatcctaatgca

SEQ ID NO: 16744 - DNA, 23 bp, Artificial sequence  Forward Primer
  Primer
aaatttcaaggaattgctttgtc

SEQ ID NO: 16745 - DNA, 23 bp, Artificial sequence  Forward Primer
  Primer
acaagcaaaagcttcataccttt

SEQ ID NO: 16746 - DNA, 24 bp, Artificial sequence  Forward Primer
  Primer
caaatttgggaggttcttatattg

SEQ ID NO: 16747 - DNA, 28 bp, Artificial sequence  Forward Primer
  Primer
tttctaaattcttcattatgatctcttc

SEQ ID NO: 16748 - DNA, 24 bp, Artificial sequence  Forward Primer
  Primer
attaaagtacctcccttttccaac

SEQ ID NO: 16749 - DNA, 28 bp, Artificial sequence  Forward Primer
  Primer
ataaacctctaaatttctgatttcattc

SEQ ID NO: 16750 - DNA, 23 bp, Artificial sequence  Forward Primer
  Primer
ttttgacagggagtaagttgaaa

SEQ ID NO: 16751 - DNA, 30 bp, Artificial sequence  Forward Primer
  Primer
aatcatttactgttttattagtctacagca

SEQ ID NO: 16752 - DNA, 28 bp, Artificial sequence  Forward Primer
  Primer
aatgattattttctagaataggaggaaa

SEQ ID NO: 16753 - DNA, 21 bp, Artificial sequence  Forward Primer
  Primer
gtccatttgtgaatctttatg

SEQ ID NO: 16754 - DNA, 23 bp, Artificial sequence  Forward Primer
  Primer
ctcaaataaatatacgggaggat

SEQ ID NO: 16755 - DNA, 24 bp, Artificial sequence  Forward Primer
  Primer
aaaatacagacatgatcaaggatg

SEQ ID NO: 16756 - DNA, 24 bp, Artificial sequence  Forward Primer
  Primer
tattttaaggccaggtaaaaccta

SEQ ID NO: 16757 - DNA, 18 bp, Artificial sequence  Forward Primer
  Primer
cattcagtgttcgccagg

SEQ ID NO: 16758 - DNA, 25 bp, Artificial sequence  Forward Primer
  Primer
ttttctgcccaatatgtttactaat

SEQ ID NO: 16759 - DNA, 28 bp, Artificial sequence  Forward Primer
  Primer
gtatcaattgaaaatatcaaaatctctc

SEQ ID NO: 16760 - DNA, 27 bp, Artificial sequence  Forward Primer
  Primer
aggtatgattcagctaccttttaattt

SEQ ID NO: 16761 - DNA, 25 bp, Artificial sequence  Forward Primer
  Primer
tttacaaaatcatytgccaaagtat

SEQ ID NO: 16762 - DNA, 18 bp, Artificial sequence  Forward Primer
  Primer
gcctcmaaacaacaggct

SEQ ID NO: 16763 - DNA, 23 bp, Artificial sequence  Forward Primer
  Primer
aggacccatgaagatgaaaatat

SEQ ID NO: 16764 - DNA, 23 bp, Artificial sequence  Forward Primer
  Primer
ataatgggaggattatggaaatg

SEQ ID NO: 16765 - DNA, 27 bp, Artificial sequence  Forward Primer
  Primer
aattaaaaccaaattctacattcaagg

SEQ ID NO: 16766 - DNA, 24 bp, Artificial sequence  Forward Primer
  Primer
aattatgaaggcagatgtgatatg

SEQ ID NO: 16767 - DNA, 22 bp, Artificial sequence  Forward Primer
  Primer
tttgtggagtaaatgggaatca

SEQ ID NO: 16768 - DNA, 23 bp, Artificial sequence  Forward Primer
  Primer
ttaaatctaaccatcttcctggg

SEQ ID NO: 16769 - DNA, 20 bp, Artificial sequence  Forward Primer
  Primer
ttgaccaagccttgaacagt

SEQ ID NO: 16770 - DNA, 24 bp, Artificial sequence  Forward Primer
  Primer
aggtatctgttgacragactcaga

SEQ ID NO: 16771 - DNA, 24 bp, Artificial sequence  Forward Primer
  Primer
atttcggattgttgtgtattactc

SEQ ID NO: 16772 - DNA, 20 bp, Artificial sequence  Forward Primer
  Primer
atggttcctctcttgcaatg

SEQ ID NO: 16773 - DNA, 24 bp, Artificial sequence  Forward Primer
  Primer
aatctggacttaacagattccatc

SEQ ID NO: 16774 - DNA, 22 bp, Artificial sequence  Forward Primer
  Primer
tctttccctgaaatcctttttt

SEQ ID NO: 16775 - DNA, 21 bp, Artificial sequence  Forward Primer
  Primer
agaacactaagagtgggcaca

SEQ ID NO: 16776 - DNA, 18 bp, Artificial sequence  Forward Primer
  Primer
aacgggctgggaccctgt

SEQ ID NO: 16777 - DNA, 19 bp, Artificial sequence  Forward Primer
  Primer
agccacccttaaccctacc

SEQ ID NO: 16778 - DNA, 24 bp, Artificial sequence  Forward Primer
  Primer
aaccagaagttatcacagaagagc

SEQ ID NO: 16779 - DNA, 30 bp, Artificial sequence  Forward Primer
  Primer
tggtataatacactgataatctgatacttc

SEQ ID NO: 16780 - DNA, 20 bp, Artificial sequence  Forward Primer
  Primer
catctgaggaaggaaatttg

SEQ ID NO: 16781 - DNA, 18 bp, Artificial sequence  Forward Primer
  Primer
aacccccactgggacttc

SEQ ID NO: 16782 - DNA, 20 bp, Artificial sequence  Forward Primer
  Primer
aagctcgtgcagagatttcc

SEQ ID NO: 16783 - DNA, 24 bp, Artificial sequence  Forward Primer
  Primer
tgccctttttattatgaattttct

SEQ ID NO: 16784 - DNA, 23 bp, Artificial sequence  Forward Primer
  Primer
attcatctcttttgcagtgtctc

SEQ ID NO: 16785 - DNA, 26 bp, Artificial sequence  Forward Primer
  Primer
ttgaacagtatcaacagtaagagtgt

SEQ ID NO: 16786 - DNA, 28 bp, Artificial sequence  Forward Primer
  Primer
gttaggaggtaataagcaaagttatgat

SEQ ID NO: 16787 - DNA, 24 bp, Artificial sequence  Forward Primer
  Primer
acttcatactctttgttttcatta

SEQ ID NO: 16788 - DNA, 20 bp, Artificial sequence  Forward Primer
  Primer
aacccaggaaagaagaaagt

SEQ ID NO: 16789 - DNA, 27 bp, Artificial sequence  Forward Primer
  Primer
ttaaagtatgtctcattcatttcagaa

SEQ ID NO: 16790 - DNA, 18 bp, Artificial sequence  Forward Primer
  Primer
acgctgctgccaagccca

SEQ ID NO: 16791 - DNA, 30 bp, Artificial sequence  Forward Primer
  Primer
aataattaatatacaaagtctagaaacttc

SEQ ID NO: 16792 - DNA, 20 bp, Artificial sequence  Forward Primer
  Primer
tactgacttagcgatttgcc

SEQ ID NO: 16793 - DNA, 20 bp, Artificial sequence  Forward Primer
  Primer
tcatgacaactctgcctcct

SEQ ID NO: 16794 - DNA, 25 bp, Artificial sequence  Forward Primer
  Primer
tctaaaatgtgtatatccattaggt

SEQ ID NO: 16795 - DNA, 24 bp, Artificial sequence  Forward Primer
  Primer
aattaagtagatgccatgttctgc

SEQ ID NO: 16796 - DNA, 28 bp, Artificial sequence  Forward Primer
  Primer
tttttctagagaataactaatccaggag

SEQ ID NO: 16797 - DNA, 26 bp, Artificial sequence  Forward Primer
  Primer
catcttcacaaacttcattttatttg

SEQ ID NO: 16798 - DNA, 26 bp, Artificial sequence  Forward Primer
  Primer
atgatggttaggaagattaaatgagt

SEQ ID NO: 16799 - DNA, 22 bp, Artificial sequence  Forward Primer
  Primer
tgyacatttcttggttcatgat

SEQ ID NO: 16800 - DNA, 24 bp, Artificial sequence  Forward Primer
  Primer
acctaaaaattttacaaggaagaa

SEQ ID NO: 16801 - DNA, 19 bp, Artificial sequence  Forward Primer
  Primer
atactggccttaggactga

SEQ ID NO: 16802 - DNA, 18 bp, Artificial sequence  Forward Primer
  Primer
tgaaaccgatgcaagctg

SEQ ID NO: 16803 - DNA, 21 bp, Artificial sequence  Forward Primer
  Primer
agtgaggtgcttggtttataa

SEQ ID NO: 16804 - DNA, 24 bp, Artificial sequence  Forward Primer
  Primer
taatttttaacaagatgcatagcc

SEQ ID NO: 16805 - DNA, 28 bp, Artificial sequence  Forward Primer
  Primer
tagtatgttatttttagtacattcaggt

SEQ ID NO: 16806 - DNA, 20 bp, Artificial sequence  Forward Primer
  Primer
tttctgtttgggctgagtct

SEQ ID NO: 16807 - DNA, 22 bp, Artificial sequence  Forward Primer
  Primer
ttgagagcagaagatgtcagaa

SEQ ID NO: 16808 - DNA, 27 bp, Artificial sequence  Forward Primer
  Primer
tgcttcactttttaaatcttgtaattc

SEQ ID NO: 16809 - DNA, 27 bp, Artificial sequence  Forward Primer
  Primer
atatacatgtacattgtgaacatcgtt

SEQ ID NO: 16810 - DNA, 19 bp, Artificial sequence  Forward Primer
  Primer
tcagggtgggtttaagtgc

SEQ ID NO: 16811 - DNA, 23 bp, Artificial sequence  Forward Primer
  Primer
aagatgcttggataaacactgaa

SEQ ID NO: 16812 - DNA, 28 bp, Artificial sequence  Forward Primer
  Primer
taaagcatatatttctctcaatatttcc

SEQ ID NO: 16813 - DNA, 27 bp, Artificial sequence  Forward Primer
  Primer
taggattagcagaagtcattgttattt

SEQ ID NO: 16814 - DNA, 27 bp, Artificial sequence  Forward Primer
  Primer
aaaaaattcagtagtatctctggtttc

SEQ ID NO: 16815 - DNA, 27 bp, Artificial sequence  Forward Primer
  Primer
tgagatacttcacctgattataaatct

SEQ ID NO: 16816 - DNA, 19 bp, Artificial sequence  Forward Primer
  Primer
catatccttttgtggccta

SEQ ID NO: 16817 - DNA, 27 bp, Artificial sequence  Forward Primer
  Primer
tgttaaggcagtatttctaaaactata

SEQ ID NO: 16818 - DNA, 27 bp, Artificial sequence  Forward Primer
  Primer
tattctgagttctgaaccaaagatatt

SEQ ID NO: 16819 - DNA, 28 bp, Artificial sequence  Forward Primer
  Primer
taattccaagtcacttatttcattacat

SEQ ID NO: 16820 - DNA, 24 bp, Artificial sequence  Forward Primer
  Primer
attttttccaagtctcctatcttt

SEQ ID NO: 16821 - DNA, 19 bp, Artificial sequence  Forward Primer
  Primer
cttccacgagggaaaaaca

SEQ ID NO: 16822 - DNA, 28 bp, Artificial sequence  Forward Primer
  Primer
ttacagggctttaaacctattttataat

SEQ ID NO: 16823 - DNA, 25 bp, Artificial sequence  Forward Primer
  Primer
ttacataatcattcattttgctcct

SEQ ID NO: 16824 - DNA, 25 bp, Artificial sequence  Forward Primer
  Primer
aataatgagagatgaatctggaaaa

SEQ ID NO: 16825 - DNA, 23 bp, Artificial sequence  Forward Primer
  Primer
ttctcaccatcagatttatttgc

SEQ ID NO: 16826 - DNA, 24 bp, Artificial sequence  Forward Primer
  Primer
aagcagtaacatgaaggtattcac

SEQ ID NO: 16827 - DNA, 18 bp, Artificial sequence  Forward Primer
  Primer
tttgggcaccgaggaaat

SEQ ID NO: 16828 - DNA, 25 bp, Artificial sequence  Forward Primer
  Primer
agtagaaactgtaagtggccaataa

SEQ ID NO: 16829 - DNA, 20 bp, Artificial sequence  Forward Primer
  Primer
atgrtggaatctcaggatgg

SEQ ID NO: 16830 - DNA, 20 bp, Artificial sequence  Forward Primer
  Primer
tccrgtgactctcctcactg

SEQ ID NO: 16831 - DNA, 18 bp, Artificial sequence  Forward Primer
  Primer
taagcgctgaccctctcc

SEQ ID NO: 16832 - DNA, 25 bp, Artificial sequence  Forward Primer
  Primer
agttaaataccatgaacaagacagg

SEQ ID NO: 16833 - DNA, 19 bp, Artificial sequence  Forward Primer
  Primer
tccatctgactgtgctctc

SEQ ID NO: 16834 - DNA, 23 bp, Artificial sequence  Forward Primer
  Primer
attttgacaamtcatttgctgac

SEQ ID NO: 16835 - DNA, 27 bp, Artificial sequence  Forward Primer
  Primer
ataagtaaattgtttctgagtgtgaca

SEQ ID NO: 16836 - DNA, 23 bp, Artificial sequence  Forward Primer
  Primer
tcattctgtgagcttcaataatt

SEQ ID NO: 16837 - DNA, 28 bp, Artificial sequence  Forward Primer
  Primer
ttgagtaaaaagaaatcaaagatacatg

SEQ ID NO: 16838 - DNA, 18 bp, Artificial sequence  Forward Primer
  Primer
cttcccaatcctacccca

SEQ ID NO: 16839 - DNA, 19 bp, Artificial sequence  Forward Primer
  Primer
tttttcctccgttttcacc

SEQ ID NO: 16840 - DNA, 19 bp, Artificial sequence  Forward Primer
  Primer
ttgtcctgcaacaaagacc

SEQ ID NO: 16841 - DNA, 22 bp, Artificial sequence  Forward Primer
  Primer
atttgacgctataagcttccag

SEQ ID NO: 16842 - DNA, 21 bp, Artificial sequence  Forward Primer
  Primer
ttttcatacaaytggcttgga

SEQ ID NO: 16843 - DNA, 18 bp, Artificial sequence  Forward Primer
  Primer
ttcagccagtttcccctc

SEQ ID NO: 16844 - DNA, 25 bp, Artificial sequence  Forward Primer
  Primer
taacacagaaatcttcacaaacagg

SEQ ID NO: 16845 - DNA, 21 bp, Artificial sequence  Forward Primer
  Primer
yctcagcatgaacttggtttc

SEQ ID NO: 16846 - DNA, 30 bp, Artificial sequence  Forward Primer
  Primer
tatrccttatgtatatcactctatttttgc

SEQ ID NO: 16847 - DNA, 27 bp, Artificial sequence  Forward Primer
  Primer
cccaatacaaagtaaaagtttaaaaac

SEQ ID NO: 16848 - DNA, 23 bp, Artificial sequence  Forward Primer
  Primer
ttctctgttcgcatctacttagg

SEQ ID NO: 16849 - DNA, 19 bp, Artificial sequence  Forward Primer
  Primer
atttcgacacagctttgca

SEQ ID NO: 16850 - DNA, 24 bp, Artificial sequence  Forward Primer
  Primer
ggctctaggactcaataataccaa

SEQ ID NO: 16851 - DNA, 22 bp, Artificial sequence  Forward Primer
  Primer
tttattwwtttttttccagccc

SEQ ID NO: 16852 - DNA, 24 bp, Artificial sequence  Forward Primer
  Primer
agcatcatgacacagcaaatatac

SEQ ID NO: 16853 - DNA, 22 bp, Artificial sequence  Forward Primer
  Primer
ttcagaaattttggaagtggac

SEQ ID NO: 16854 - DNA, 25 bp, Artificial sequence  Forward Primer
  Primer
tccagaacctgacaaatctacttac

SEQ ID NO: 16855 - DNA, 24 bp, Artificial sequence  Forward Primer
  Primer
tcttaaaaaggctgycacttagtt

SEQ ID NO: 16856 - DNA, 19 bp, Artificial sequence  Forward Primer
  Primer
ctcctcctgagacctgagt

SEQ ID NO: 16857 - DNA, 26 bp, Artificial sequence  Forward Primer
  Primer
gcaaaagaaagcttttaagcatatat

SEQ ID NO: 16858 - DNA, 22 bp, Artificial sequence  Forward Primer
  Primer
aaatcctgaggttcagatttga

SEQ ID NO: 16859 - DNA, 24 bp, Artificial sequence  Forward Primer
  Primer
ccatttttcacagcttattttttt

SEQ ID NO: 16860 - DNA, 26 bp, Artificial sequence  Forward Primer
  Primer
atttttaaaagctgttttaggttcac

SEQ ID NO: 16861 - DNA, 23 bp, Artificial sequence  Forward Primer
  Primer
tattaggctgttattgcctgttg

SEQ ID NO: 16862 - DNA, 25 bp, Artificial sequence  Forward Primer
  Primer
tgcttatattacccaaatagaggat

SEQ ID NO: 16863 - DNA, 26 bp, Artificial sequence  Forward Primer
  Primer
ttatttttaatctgcaaaacgtaagc

SEQ ID NO: 16864 - DNA, 24 bp, Artificial sequence  Forward Primer
  Primer
ttcagtgtttattcataacctttt

SEQ ID NO: 16865 - DNA, 26 bp, Artificial sequence  Forward Primer
  Primer
agtgattcatacaaattaagtgcttg

SEQ ID NO: 16866 - DNA, 23 bp, Artificial sequence  Forward Primer
  Primer
caaattgaaagtcagcttcaaga

SEQ ID NO: 16867 - DNA, 18 bp, Artificial sequence  Forward Primer
  Primer
ctctcctggctacctggc

SEQ ID NO: 16868 - DNA, 26 bp, Artificial sequence  Forward Primer
  Primer
tccaatataatcatttttttctcctc

SEQ ID NO: 16869 - DNA, 19 bp, Artificial sequence  Forward Primer
  Primer
tgcasacacaaaagaacat

SEQ ID NO: 16870 - DNA, 18 bp, Artificial sequence  Forward Primer
  Primer
atggagaggggccagaag

SEQ ID NO: 16871 - DNA, 23 bp, Artificial sequence  Forward Primer
  Primer
taatgcttagaacatcatgtgga

SEQ ID NO: 16872 - DNA, 28 bp, Artificial sequence  Forward Primer
  Primer
gtttacaaagcaacattaaaaagttatg

SEQ ID NO: 16873 - DNA, 24 bp, Artificial sequence  Forward Primer
  Primer
aattttaaaagtcaacattgtgca

SEQ ID NO: 16874 - DNA, 21 bp, Artificial sequence  Forward Primer
  Primer
tttccagagcacaatctttga

SEQ ID NO: 16875 - DNA, 25 bp, Artificial sequence  Forward Primer
  Primer
agtcagtataccatgtttggcttat

SEQ ID NO: 16876 - DNA, 28 bp, Artificial sequence  Forward Primer
  Primer
ccacgatttattgactaaataacaatac

SEQ ID NO: 16877 - DNA, 26 bp, Artificial sequence  Forward Primer
  Primer
tatgtagaagttaaaactttggatga

SEQ ID NO: 16878 - DNA, 20 bp, Artificial sequence  Forward Primer
  Primer
tcatgaagctggacctagga

SEQ ID NO: 16879 - DNA, 30 bp, Artificial sequence  Forward Primer
  Primer
tagaaagtactggaactagacttttatctc

SEQ ID NO: 16880 - DNA, 22 bp, Artificial sequence  Forward Primer
  Primer
aaggttacaaggctctgagaca

SEQ ID NO: 16881 - DNA, 22 bp, Artificial sequence  Forward Primer
  Primer
tgattgagcccaagtctcttat

SEQ ID NO: 16882 - DNA, 25 bp, Artificial sequence  Forward Primer
  Primer
taaaacaagcttatacaaatgctcc

SEQ ID NO: 16883 - DNA, 27 bp, Artificial sequence  Forward Primer
  Primer
cctttggaaacatactttactgaataa

SEQ ID NO: 16884 - DNA, 23 bp, Artificial sequence  Forward Primer
  Primer
ttttcttttacagagccaacaac

SEQ ID NO: 16885 - DNA, 22 bp, Artificial sequence  Forward Primer
  Primer
atagtagccgatgttaactgac

SEQ ID NO: 16886 - DNA, 18 bp, Artificial sequence  Forward Primer
  Primer
tttggcgatgctgggagc

SEQ ID NO: 16887 - DNA, 22 bp, Artificial sequence  Forward Primer
  Primer
gctcaaagttaaaacaattcag

SEQ ID NO: 16888 - DNA, 20 bp, Artificial sequence  Forward Primer
  Primer
aattgctctgtgccagagat

SEQ ID NO: 16889 - DNA, 24 bp, Artificial sequence  Forward Primer
  Primer
ttaattttaagaaaacctccagga

SEQ ID NO: 16890 - DNA, 28 bp, Artificial sequence  Forward Primer
  Primer
tttgataaatacattctgagaaaacatc

SEQ ID NO: 16891 - DNA, 26 bp, Artificial sequence  Forward Primer
  Primer
aaactggaaaataagtacctgaacac

SEQ ID NO: 16892 - DNA, 26 bp, Artificial sequence  Forward Primer
  Primer
ctgattttaatgtttatctgttcatc

SEQ ID NO: 16893 - DNA, 21 bp, Artificial sequence  Forward Primer
  Primer
tcataaccatacaaatgaccg

SEQ ID NO: 16894 - DNA, 22 bp, Artificial sequence  Forward Primer
  Primer
taatacaacatgccaagctcag

SEQ ID NO: 16895 - DNA, 21 bp, Artificial sequence  Forward Primer
  Primer
gttggaaataggcatcagtgg

SEQ ID NO: 16896 - DNA, 26 bp, Artificial sequence  Forward Primer
  Primer
attaatactgagcagagttccatatg

SEQ ID NO: 16897 - DNA, 23 bp, Artificial sequence  Forward Primer
  Primer
aaaactccaaattttattttgcc

SEQ ID NO: 16898 - DNA, 26 bp, Artificial sequence  Forward Primer
  Primer
tatctcaatctacagaggtcataacc

SEQ ID NO: 16899 - DNA, 22 bp, Artificial sequence  Forward Primer
  Primer
tgtctaaggaccaaccctagtg

SEQ ID NO: 16900 - DNA, 30 bp, Artificial sequence  Forward Primer
  Primer
attatagtttccatatctataaacaaagct

SEQ ID NO: 16901 - DNA, 18 bp, Artificial sequence  Forward Primer
  Primer
ggccatcacccccacact

SEQ ID NO: 16902 - DNA, 25 bp, Artificial sequence  Forward Primer
  Primer
ttaaaacacrtttaaaatcagtgca

SEQ ID NO: 16903 - DNA, 26 bp, Artificial sequence  Forward Primer
  Primer
atgaaggatagaatgggtaatactct

SEQ ID NO: 16904 - DNA, 24 bp, Artificial sequence  Forward Primer
  Primer
tttgtagttttatcttttttgcgg

SEQ ID NO: 16905 - DNA, 24 bp, Artificial sequence  Forward Primer
  Primer
aagtaactatgaggttgtctagct

SEQ ID NO: 16906 - DNA, 27 bp, Artificial sequence  Forward Primer
  Primer
aacagactagtaagtacaagaggtttt

SEQ ID NO: 16907 - DNA, 18 bp, Artificial sequence  Forward Primer
  Primer
agaaaggccgggaacagg

SEQ ID NO: 16908 - DNA, 26 bp, Artificial sequence  Forward Primer
  Primer
tatatttacctggcaatatgttcttg

SEQ ID NO: 16909 - DNA, 19 bp, Artificial sequence  Forward Primer
  Primer
aaaaggtttgccatccatg

SEQ ID NO: 16910 - DNA, 19 bp, Artificial sequence  Forward Primer
  Primer
tgttcctctctcccttcga

SEQ ID NO: 16911 - DNA, 23 bp, Artificial sequence  Forward Primer
  Primer
ttactgcagaatgaatcttcaca

SEQ ID NO: 16912 - DNA, 23 bp, Artificial sequence  Forward Primer
  Primer
gatgagaaatgttgaaataaaca

SEQ ID NO: 16913 - DNA, 28 bp, Artificial sequence  Forward Primer
  Primer
tacgttaattatacttcaatgaaactgt

SEQ ID NO: 16914 - DNA, 26 bp, Artificial sequence  Forward Primer
  Primer
aattaaaaatctctttctgggtatcc

SEQ ID NO: 16915 - DNA, 20 bp, Artificial sequence  Forward Primer
  Primer
agtgggtggagagaaaataa

SEQ ID NO: 16916 - DNA, 24 bp, Artificial sequence  Forward Primer
  Primer
cattgatctaataagaccatccca

SEQ ID NO: 16917 - DNA, 19 bp, Artificial sequence  Forward Primer
  Primer
ctaagcagaaatcatgggt

SEQ ID NO: 16918 - DNA, 22 bp, Artificial sequence  Forward Primer
  Primer
atcaactaatgacatgaaggaa

SEQ ID NO: 16919 - DNA, 28 bp, Artificial sequence  Forward Primer
  Primer
ttctcgatagtgattagttcaataaaat

SEQ ID NO: 16920 - DNA, 22 bp, Artificial sequence  Forward Primer
  Primer
attaaacacaggcaagtctcca

SEQ ID NO: 16921 - DNA, 22 bp, Artificial sequence  Forward Primer
  Primer
ttaaaattcttcacatgtgcca

SEQ ID NO: 16922 - DNA, 22 bp, Artificial sequence  Forward Primer
  Primer
tcctttcctgagtctacctgag

SEQ ID NO: 16923 - DNA, 28 bp, Artificial sequence  Forward Primer
  Primer
ttaaggaaattagaggatattagacagc

SEQ ID NO: 16924 - DNA, 19 bp, Artificial sequence  Forward Primer
  Primer
aagtccgtcaaagctcctg

SEQ ID NO: 16925 - DNA, 27 bp, Artificial sequence  Forward Primer
  Primer
aagatttaacttctctgaacatccttt

SEQ ID NO: 16926 - DNA, 23 bp, Artificial sequence  Forward Primer
  Primer
tccttatgaggcatctatacagc

SEQ ID NO: 16927 - DNA, 20 bp, Artificial sequence  Forward Primer
  Primer
aagatcaagtttcacccaaa

SEQ ID NO: 16928 - DNA, 19 bp, Artificial sequence  Forward Primer
  Primer
tggcagagcagctaagtga

SEQ ID NO: 16929 - DNA, 21 bp, Artificial sequence  Forward Primer
  Primer
tgtaactgaagtttccttgtc

SEQ ID NO: 16930 - DNA, 28 bp, Artificial sequence  Forward Primer
  Primer
taaatggtagagttcagtagttgtagca

SEQ ID NO: 16931 - DNA, 28 bp, Artificial sequence  Forward Primer
  Primer
aataaaaatgtttaacacagagatgaga

SEQ ID NO: 16932 - DNA, 21 bp, Artificial sequence  Forward Primer
  Primer
agaacagaggaaaagggaaca

SEQ ID NO: 16933 - DNA, 27 bp, Artificial sequence  Forward Primer
  Primer
ttcacatagaaaagcaatcacttataa

SEQ ID NO: 16934 - DNA, 22 bp, Artificial sequence  Forward Primer
  Primer
aaaagattgcaacagaagcatc

SEQ ID NO: 16935 - DNA, 19 bp, Artificial sequence  Forward Primer
  Primer
atagaaggcacgctccact

SEQ ID NO: 16936 - DNA, 21 bp, Artificial sequence  Forward Primer
  Primer
ggataacgtgtcaacagtcga

SEQ ID NO: 16937 - DNA, 26 bp, Artificial sequence  Forward Primer
  Primer
agagtactcttaaggctcaaatcaag

SEQ ID NO: 16938 - DNA, 23 bp, Artificial sequence  Forward Primer
  Primer
tctagtagagggcaagagaaagg

SEQ ID NO: 16939 - DNA, 23 bp, Artificial sequence  Forward Primer
  Primer
atacagtctgtctgactggacca

SEQ ID NO: 16940 - DNA, 20 bp, Artificial sequence  Forward Primer
  Primer
agaagcagcaaagagtcttg

SEQ ID NO: 16941 - DNA, 30 bp, Artificial sequence  Forward Primer
  Primer
tgtagtgacacttcatttattacttttctt

SEQ ID NO: 16942 - DNA, 24 bp, Artificial sequence  Forward Primer
  Primer
agtggatgaagtaaatttcttgga

SEQ ID NO: 16943 - DNA, 21 bp, Artificial sequence  Forward Primer
  Primer
agatctctgctccattcttgg

SEQ ID NO: 16944 - DNA, 24 bp, Artificial sequence  Forward Primer
  Primer
cagcatcttgtgggtatttaataa

SEQ ID NO: 16945 - DNA, 24 bp, Artificial sequence  Forward Primer
  Primer
attttaaaaattattggcagttgc

SEQ ID NO: 16946 - DNA, 18 bp, Artificial sequence  Forward Primer
  Primer
tgcctcctgctcagacag

SEQ ID NO: 16947 - DNA, 24 bp, Artificial sequence  Forward Primer
  Primer
attttatttttcatgccaatagga

SEQ ID NO: 16948 - DNA, 28 bp, Artificial sequence  Forward Primer
  Primer
attagaaactttctgtccaaataaatca

SEQ ID NO: 16949 - DNA, 22 bp, Artificial sequence  Forward Primer
  Primer
aatttcatttycttgcaatgag

SEQ ID NO: 16950 - DNA, 22 bp, Artificial sequence  Forward Primer
  Primer
ttagttttgaagrttccaccag

SEQ ID NO: 16951 - DNA, 24 bp, Artificial sequence  Forward Primer
  Primer
aaaataatgaaactgccttcagaa

SEQ ID NO: 16952 - DNA, 26 bp, Artificial sequence  Forward Primer
  Primer
tacttcttttaatccccttttgtaga

SEQ ID NO: 16953 - DNA, 23 bp, Artificial sequence  Forward Primer
  Primer
aaactctggtaaacctcctgaaa

SEQ ID NO: 16954 - DNA, 22 bp, Artificial sequence  Forward Primer
  Primer
ttggttgaaaccattctaagag

SEQ ID NO: 16955 - DNA, 23 bp, Artificial sequence  Forward Primer
  Primer
ttatttagccccatgagctattt

SEQ ID NO: 16956 - DNA, 20 bp, Artificial sequence  Forward Primer
  Primer
ttagcaatgtycttctccca

SEQ ID NO: 16957 - DNA, 23 bp, Artificial sequence  Forward Primer
  Primer
ttcrgtcagaaaagaaccttaag

SEQ ID NO: 16958 - DNA, 23 bp, Artificial sequence  Forward Primer
  Primer
ataaagtgccccaatatgataca

SEQ ID NO: 16959 - DNA, 29 bp, Artificial sequence  Forward Primer
  Primer
tttatgtcattcagttctactaagatcaa

SEQ ID NO: 16960 - DNA, 24 bp, Artificial sequence  Forward Primer
  Primer
aagataaaattacaaaatcagctc

SEQ ID NO: 16961 - DNA, 28 bp, Artificial sequence  Forward Primer
  Primer
ataaatccaacttttctagatgaaattc

SEQ ID NO: 16962 - DNA, 26 bp, Artificial sequence  Forward Primer
  Primer
tttagtgtataagaaaaacgtggtgt

SEQ ID NO: 16963 - DNA, 19 bp, Artificial sequence  Forward Primer
  Primer
aaaagtcgaattggtttca

SEQ ID NO: 16964 - DNA, 18 bp, Artificial sequence  Forward Primer
  Primer
agtcttgaaatcagccgg

SEQ ID NO: 16965 - DNA, 18 bp, Artificial sequence  Forward Primer
  Primer
tggarcattcgtgcttca

SEQ ID NO: 16966 - DNA, 24 bp, Artificial sequence  Forward Primer
  Primer
gcccttattataaaatgcatcatt

SEQ ID NO: 16967 - DNA, 27 bp, Artificial sequence  Forward Primer
  Primer
atggagactttttttaaagtgctatag

SEQ ID NO: 16968 - DNA, 23 bp, Artificial sequence  Forward Primer
  Primer
caccaaaggaatgaatttcttaa

SEQ ID NO: 16969 - DNA, 26 bp, Artificial sequence  Forward Primer
  Primer
ttatttttttctgagtaatcctttcc

SEQ ID NO: 16970 - DNA, 22 bp, Artificial sequence  Forward Primer
  Primer
ttkaaatcagtcatttttggca

SEQ ID NO: 16971 - DNA, 28 bp, Artificial sequence  Forward Primer
  Primer
gtggtatgacagtttstctaaaatttaa

SEQ ID NO: 16972 - DNA, 25 bp, Artificial sequence  Forward Primer
  Primer
aagataattagcaatgtycttctcc

SEQ ID NO: 16973 - DNA, 24 bp, Artificial sequence  Forward Primer
  Primer
atytggaaatacagagtggaaaga

SEQ ID NO: 16974 - DNA, 28 bp, Artificial sequence  Forward Primer
  Primer
attgagagcttaccattatataaaaatg

SEQ ID NO: 16975 - DNA, 26 bp, Artificial sequence  Forward Primer
  Primer
aacactcaattttcctagcttttata

SEQ ID NO: 16976 - DNA, 25 bp, Artificial sequence  Forward Primer
  Primer
aattcactttcaattaatgtggttc

SEQ ID NO: 16977 - DNA, 19 bp, Artificial sequence  Forward Primer
  Primer
aagcagagatgggatggag

SEQ ID NO: 16978 - DNA, 19 bp, Artificial sequence  Forward Primer
  Primer
tcaccctcacctgtcctta

SEQ ID NO: 16979 - DNA, 28 bp, Artificial sequence  Forward Primer
  Primer
tatatttaacaggagaatagttgctcaa

SEQ ID NO: 16980 - DNA, 22 bp, Artificial sequence  Forward Primer
  Primer
ttacttttgaagcagttccctc

SEQ ID NO: 16981 - DNA, 18 bp, Artificial sequence  Forward Primer
  Primer
tttggcagggctgggtgt

SEQ ID NO: 16982 - DNA, 20 bp, Artificial sequence  Forward Primer
  Primer
ttttgtttttctttcccaag

SEQ ID NO: 16983 - DNA, 24 bp, Artificial sequence  Forward Primer
  Primer
aaaccatttatctttacaaaccga

SEQ ID NO: 16984 - DNA, 19 bp, Artificial sequence  Forward Primer
  Primer
caggtggacagacagacaa

SEQ ID NO: 16985 - DNA, 24 bp, Artificial sequence  Forward Primer
  Primer
aagtcaaatgtttatcataggtta

SEQ ID NO: 16986 - DNA, 23 bp, Artificial sequence  Forward Primer
  Primer
catctctataatgaggaagctgc

SEQ ID NO: 16987 - DNA, 26 bp, Artificial sequence  Forward Primer
  Primer
ttgtcaacagctctagtaagtgtgta

SEQ ID NO: 16988 - DNA, 18 bp, Artificial sequence  Forward Primer
  Primer
tacttccaggactcgggg

SEQ ID NO: 16989 - DNA, 20 bp, Artificial sequence  Forward Primer
  Primer
tcctggctatctcaagctcc

SEQ ID NO: 16990 - DNA, 23 bp, Artificial sequence  Forward Primer
  Primer
agggaatctttaattcacctgaa

SEQ ID NO: 16991 - DNA, 22 bp, Artificial sequence  Forward Primer
  Primer
ttagttacctcttggcttctcc

SEQ ID NO: 16992 - DNA, 28 bp, Artificial sequence  Forward Primer
  Primer
cagaatacccactaagtgacaatattaa

SEQ ID NO: 16993 - DNA, 20 bp, Artificial sequence  Forward Primer
  Primer
actgagatggggtttaggga

SEQ ID NO: 16994 - DNA, 22 bp, Artificial sequence  Forward Primer
  Primer
atgacaaaggagtcaggattaa

SEQ ID NO: 16995 - DNA, 20 bp, Artificial sequence  Forward Primer
  Primer
tcatgaaacatacgcaggtc

SEQ ID NO: 16996 - DNA, 25 bp, Artificial sequence  Forward Primer
  Primer
aaacttttcaatgaccaaattaagg

SEQ ID NO: 16997 - DNA, 18 bp, Artificial sequence  Forward Primer
  Primer
tgcttgcctgaagaagga

SEQ ID NO: 16998 - DNA, 20 bp, Artificial sequence  Forward Primer
  Primer
ttgattctgtgctcaggacc

SEQ ID NO: 16999 - DNA, 18 bp, Artificial sequence  Forward Primer
  Primer
tgygtgaccagaggctga

SEQ ID NO: 17000 - DNA, 25 bp, Artificial sequence  Forward Primer
  Primer
aaataaaaactaacactcttgcagc

SEQ ID NO: 17001 - DNA, 22 bp, Artificial sequence  Forward Primer
  Primer
tacaagtctttcccactttccc

SEQ ID NO: 17002 - DNA, 23 bp, Artificial sequence  Forward Primer
  Primer
ttatttatggaggtaggtacgcc

SEQ ID NO: 17003 - DNA, 25 bp, Artificial sequence  Forward Primer
  Primer
ttctgtttcatctctggatatacta

SEQ ID NO: 17004 - DNA, 23 bp, Artificial sequence  Forward Primer
  Primer
gaaaggcttataccaccactttc

SEQ ID NO: 17005 - DNA, 28 bp, Artificial sequence  Forward Primer
  Primer
ggataacagaaaaactttgaaaaatagt

SEQ ID NO: 17006 - DNA, 23 bp, Artificial sequence  Forward Primer
  Primer
aatttacttttgcgattaatgga

SEQ ID NO: 17007 - DNA, 21 bp, Artificial sequence  Forward Primer
  Primer
aatttatccccttgtggaatg

SEQ ID NO: 17008 - DNA, 22 bp, Artificial sequence  Forward Primer
  Primer
aagaaacttgaaacgtgtcctt

SEQ ID NO: 17009 - DNA, 23 bp, Artificial sequence  Forward Primer
  Primer
aaaatattcacagtgtaccaggg

SEQ ID NO: 17010 - DNA, 20 bp, Artificial sequence  Forward Primer
  Primer
ataatgtggatttggcacca

SEQ ID NO: 17011 - DNA, 29 bp, Artificial sequence  Forward Primer
  Primer
aaggatactagcatacagaagatacaatt

SEQ ID NO: 17012 - DNA, 23 bp, Artificial sequence  Forward Primer
  Primer
agatgcagttatttgtatgtgtg

SEQ ID NO: 17013 - DNA, 26 bp, Artificial sequence  Forward Primer
  Primer
atatattcctgaagacattcaaaagg

SEQ ID NO: 17014 - DNA, 23 bp, Artificial sequence  Forward Primer
  Primer
atgcaatttgtagaacaccctta

SEQ ID NO: 17015 - DNA, 26 bp, Artificial sequence  Forward Primer
  Primer
aaagtctttcattttacctaggaagt

SEQ ID NO: 17016 - DNA, 19 bp, Artificial sequence  Forward Primer
  Primer
tatggctcttccttcgtaa

SEQ ID NO: 17017 - DNA, 18 bp, Artificial sequence  Forward Primer
  Primer
tgtagcacagccccagct

SEQ ID NO: 17018 - DNA, 20 bp, Artificial sequence  Forward Primer
  Primer
aaatctgtacccccatgaca

SEQ ID NO: 17019 - DNA, 24 bp, Artificial sequence  Forward Primer
  Primer
aaaccatttatctttacaaaccga

SEQ ID NO: 17020 - DNA, 22 bp, Artificial sequence  Forward Primer
  Primer
cacttgagcaatgttgattgtt

SEQ ID NO: 17021 - DNA, 29 bp, Artificial sequence  Forward Primer
  Primer
ttgtctaataaatttccatatagacttgg

SEQ ID NO: 17022 - DNA, 30 bp, Artificial sequence  Forward Primer
  Primer
atacgtagagttaatactaagttataggag

SEQ ID NO: 17023 - DNA, 18 bp, Artificial sequence  Forward Primer
  Primer
agttcagaggccagtggg

SEQ ID NO: 17024 - DNA, 20 bp, Artificial sequence  Forward Primer
  Primer
aatgcatttttctagtcagg

SEQ ID NO: 17025 - DNA, 19 bp, Artificial sequence  Forward Primer
  Primer
acattgcagtagcagcaaa

SEQ ID NO: 17026 - DNA, 25 bp, Artificial sequence  Forward Primer
  Primer
aaaagctactatacagagctcctcc

SEQ ID NO: 17027 - DNA, 20 bp, Artificial sequence  Forward Primer
  Primer
tttactggaaagcctggaaa

SEQ ID NO: 17028 - DNA, 23 bp, Artificial sequence  Forward Primer
  Primer
tcatcactctggtggaaagttac

SEQ ID NO: 17029 - DNA, 22 bp, Artificial sequence  Forward Primer
  Primer
ttttcagagtttttccctttta

SEQ ID NO: 17030 - DNA, 19 bp, Artificial sequence  Forward Primer
  Primer
ggctgggacatggaataat

SEQ ID NO: 17031 - DNA, 20 bp, Artificial sequence  Forward Primer
  Primer
ggagaagagcctgtttgttc

SEQ ID NO: 17032 - DNA, 21 bp, Artificial sequence  Forward Primer
  Primer
ttgaggaaactctgaccttgg

SEQ ID NO: 17033 - DNA, 19 bp, Artificial sequence  Forward Primer
  Primer
ttcctgttgcatcacatca

SEQ ID NO: 17034 - DNA, 21 bp, Artificial sequence  Forward Primer
  Primer
tgttggtgtttctggattttg

SEQ ID NO: 17035 - DNA, 21 bp, Artificial sequence  Forward Primer
  Primer
aatgcatcagaggatttaggg

SEQ ID NO: 17036 - DNA, 22 bp, Artificial sequence  Forward Primer
  Primer
atttaggggttccaggragtat

SEQ ID NO: 17037 - DNA, 19 bp, Artificial sequence  Forward Primer
  Primer
atgtgccaagaatgctcct

SEQ ID NO: 17038 - DNA, 26 bp, Artificial sequence  Forward Primer
  Primer
acactttgctttatattttccttttc

SEQ ID NO: 17039 - DNA, 23 bp, Artificial sequence  Forward Primer
  Primer
acttgtcaaggatagyagtgcaa

SEQ ID NO: 17040 - DNA, 21 bp, Artificial sequence  Forward Primer
  Primer
ataccctaaagcctgyagtgg

SEQ ID NO: 17041 - DNA, 27 bp, Artificial sequence  Forward Primer
  Primer
aaaacatgtgttagaattaagtcgatc

SEQ ID NO: 17042 - DNA, 27 bp, Artificial sequence  Forward Primer
  Primer
caagagtgctgtattcactacactaga

SEQ ID NO: 17043 - DNA, 25 bp, Artificial sequence  Forward Primer
  Primer
atgttatgcatcatacaaaggaagt

SEQ ID NO: 17044 - DNA, 20 bp, Artificial sequence  Forward Primer
  Primer
agaggttacataagttgccc

SEQ ID NO: 17045 - DNA, 19 bp, Artificial sequence  Forward Primer
  Primer
ttgccagtgcatcctactt

SEQ ID NO: 17046 - DNA, 19 bp, Artificial sequence  Forward Primer
  Primer
cccggacagctttgattat

SEQ ID NO: 17047 - DNA, 21 bp, Artificial sequence  Forward Primer
  Primer
atggaatccacatctaataca

SEQ ID NO: 17048 - DNA, 18 bp, Artificial sequence  Forward Primer
  Primer
gagccctgcactgatccc

SEQ ID NO: 17049 - DNA, 26 bp, Artificial sequence  Forward Primer
  Primer
attattttccacattcaaattagagc

SEQ ID NO: 17050 - DNA, 19 bp, Artificial sequence  Forward Primer
  Primer
aggtcaggtggcttgaaaa

SEQ ID NO: 17051 - DNA, 19 bp, Artificial sequence  Forward Primer
  Primer
ttccagtgtgaaggaagcc

SEQ ID NO: 17052 - DNA, 20 bp, Artificial sequence  Forward Primer
  Primer
gtacagaggaacacagagga

SEQ ID NO: 17053 - DNA, 26 bp, Artificial sequence  Forward Primer
  Primer
tttcatttgatcttacacatttaagg

SEQ ID NO: 17054 - DNA, 20 bp, Artificial sequence  Forward Primer
  Primer
tttgtgcttgaattcatggg

SEQ ID NO: 17055 - DNA, 27 bp, Artificial sequence  Forward Primer
  Primer
ttaacaataaatcctactgaacaggag

SEQ ID NO: 17056 - DNA, 24 bp, Artificial sequence  Forward Primer
  Primer
aatgcattataaactgcaaagtca

SEQ ID NO: 17057 - DNA, 21 bp, Artificial sequence  Forward Primer
  Primer
tcccaactctttgctctattt

SEQ ID NO: 17058 - DNA, 28 bp, Artificial sequence  Forward Primer
  Primer
tctttgctcataaaactttagtattgat

SEQ ID NO: 17059 - DNA, 23 bp, Artificial sequence  Forward Primer
  Primer
aatttaatgacgagttcatgtgg

SEQ ID NO: 17060 - DNA, 24 bp, Artificial sequence  Forward Primer
  Primer
atgagtmcaatgaaggttagagga

SEQ ID NO: 17061 - DNA, 26 bp, Artificial sequence  Forward Primer
  Primer
aggtgtaagaatttcctatcatctat

SEQ ID NO: 17062 - DNA, 22 bp, Artificial sequence  Forward Primer
  Primer
attaatttggcacaaatggaca

SEQ ID NO: 17063 - DNA, 21 bp, Artificial sequence  Forward Primer
  Primer
tttctttttaggttttgggca

SEQ ID NO: 17064 - DNA, 20 bp, Artificial sequence  Forward Primer
  Primer
ttccttacctcttgagggct

SEQ ID NO: 17065 - DNA, 25 bp, Artificial sequence  Forward Primer
  Primer
attgccatttycctatatgtaatgt

SEQ ID NO: 17066 - DNA, 20 bp, Artificial sequence  Forward Primer
  Primer
catgtccctctctttcattt

SEQ ID NO: 17067 - DNA, 26 bp, Artificial sequence  Forward Primer
  Primer
taatacactggtgaattayttaggta

SEQ ID NO: 17068 - DNA, 19 bp, Artificial sequence  Forward Primer
  Primer
tatgctggcattttagctt

SEQ ID NO: 17069 - DNA, 23 bp, Artificial sequence  Forward Primer
  Primer
tgtcacaacagtcctagtatcct

SEQ ID NO: 17070 - DNA, 26 bp, Artificial sequence  Forward Primer
  Primer
aagtctcagaggaaaagttaaaaaca

SEQ ID NO: 17071 - DNA, 25 bp, Artificial sequence  Forward Primer
  Primer
agttgctgcataaaatgaggtatat

SEQ ID NO: 17072 - DNA, 24 bp, Artificial sequence  Forward Primer
  Primer
taatagcctaaagggaaaagaaat

SEQ ID NO: 17073 - DNA, 19 bp, Artificial sequence  Forward Primer
  Primer
acttttggaaatgcagttt

SEQ ID NO: 17074 - DNA, 20 bp, Artificial sequence  Forward Primer
  Primer
acggtacagctgtagttttc

SEQ ID NO: 17075 - DNA, 28 bp, Artificial sequence  Forward Primer
  Primer
tatatatcatgtattgtctttctctccc

SEQ ID NO: 17076 - DNA, 21 bp, Artificial sequence  Forward Primer
  Primer
tgatgacttttagaagtgggg

SEQ ID NO: 17077 - DNA, 19 bp, Artificial sequence  Forward Primer
  Primer
acctgcagccttctgtgtt

SEQ ID NO: 17078 - DNA, 19 bp, Artificial sequence  Forward Primer
  Primer
ccctgaaacctgactctgg

SEQ ID NO: 17079 - DNA, 30 bp, Artificial sequence  Forward Primer
  Primer
ttcataggaatacatatttctcatagaaca

SEQ ID NO: 17080 - DNA, 25 bp, Artificial sequence  Forward Primer
  Primer
cttacgtgtggatttttaaattttc

SEQ ID NO: 17081 - DNA, 25 bp, Artificial sequence  Forward Primer
  Primer
aataaatcacatttcgagttcagtg

SEQ ID NO: 17082 - DNA, 23 bp, Artificial sequence  Forward Primer
  Primer
aaggttttctgagcaagtaagtt

SEQ ID NO: 17083 - DNA, 19 bp, Artificial sequence  Forward Primer
  Primer
atggaccatgattgatgcc

SEQ ID NO: 17084 - DNA, 21 bp, Artificial sequence  Forward Primer
  Primer
gacagtgatcagaggtggaca

SEQ ID NO: 17085 - DNA, 23 bp, Artificial sequence  Forward Primer
  Primer
tttcatttccatgagagatgttg

SEQ ID NO: 17086 - DNA, 27 bp, Artificial sequence  Forward Primer
  Primer
attgtgcaaaatactgtgtataaatga

SEQ ID NO: 17087 - DNA, 29 bp, Artificial sequence  Forward Primer
  Primer
atttaagacctagtctcttagcaactttt

SEQ ID NO: 17088 - DNA, 21 bp, Artificial sequence  Forward Primer
  Primer
tgtgttacctgaagcctgaag

SEQ ID NO: 17089 - DNA, 19 bp, Artificial sequence  Forward Primer
  Primer
aaaaagattcccacccaac

SEQ ID NO: 17090 - DNA, 21 bp, Artificial sequence  Forward Primer
  Primer
atgagatacccacagagcagc

SEQ ID NO: 17091 - DNA, 24 bp, Artificial sequence  Forward Primer
  Primer
aattaggaaactaggaggttgaca

SEQ ID NO: 17092 - DNA, 24 bp, Artificial sequence  Forward Primer
  Primer
agagcaaggaaaaaactgtaaatt

SEQ ID NO: 17093 - DNA, 29 bp, Artificial sequence  Forward Primer
  Primer
ttaagattatacagtggaagacactaagc

SEQ ID NO: 17094 - DNA, 22 bp, Artificial sequence  Forward Primer
  Primer
attatgaaagagatttgaggtg

SEQ ID NO: 17095 - DNA, 21 bp, Artificial sequence  Forward Primer
  Primer
atggttattctatgtggcaag

SEQ ID NO: 17096 - DNA, 20 bp, Artificial sequence  Forward Primer
  Primer
ttttgccccaatctttcttt

SEQ ID NO: 17097 - DNA, 22 bp, Artificial sequence  Forward Primer
  Primer
ggctgcaaattattccaattaa

SEQ ID NO: 17098 - DNA, 27 bp, Artificial sequence  Forward Primer
  Primer
ttcttatgcttttatttctgtcagttt

SEQ ID NO: 17099 - DNA, 26 bp, Artificial sequence  Forward Primer
  Primer
ccaattccccatgatatatataaaaa

SEQ ID NO: 17100 - DNA, 20 bp, Artificial sequence  Forward Primer
  Primer
agtcaggcaagggatttttc

SEQ ID NO: 17101 - DNA, 20 bp, Artificial sequence  Forward Primer
  Primer
attctgacagcctgagctga

SEQ ID NO: 17102 - DNA, 19 bp, Artificial sequence  Forward Primer
  Primer
gcaaggagtctcagcctct

SEQ ID NO: 17103 - DNA, 18 bp, Artificial sequence  Forward Primer
  Primer
accccaccttccttcaaa

SEQ ID NO: 17104 - DNA, 29 bp, Artificial sequence  Forward Primer
  Primer
ataatttgctatataagaaagctctttgg

SEQ ID NO: 17105 - DNA, 22 bp, Artificial sequence  Forward Primer
  Primer
ctgatatttcctaaatcaggtc

SEQ ID NO: 17106 - DNA, 19 bp, Artificial sequence  Forward Primer
  Primer
ctaccttgtcccaaaggat

SEQ ID NO: 17107 - DNA, 30 bp, Artificial sequence  Forward Primer
  Primer
taaatgtaagagctacagttatgaaattct

SEQ ID NO: 17108 - DNA, 20 bp, Artificial sequence  Forward Primer
  Primer
atattgtcccttccttcctg

SEQ ID NO: 17109 - DNA, 21 bp, Artificial sequence  Forward Primer
  Primer
aatatggtagaaggccaatgc

SEQ ID NO: 17110 - DNA, 25 bp, Artificial sequence  Forward Primer
  Primer
attgctagttgtgaattttaggtct

SEQ ID NO: 17111 - DNA, 25 bp, Artificial sequence  Forward Primer
  Primer
agatgactggctcataagattaaaa

SEQ ID NO: 17112 - DNA, 21 bp, Artificial sequence  Forward Primer
  Primer
aagcaaagtgctaccatgtca

SEQ ID NO: 17113 - DNA, 20 bp, Artificial sequence  Forward Primer
  Primer
aaaggtgaaggtgtgacgat

SEQ ID NO: 17114 - DNA, 18 bp, Artificial sequence  Forward Primer
  Primer
tcaggcacccaggtaggt

SEQ ID NO: 17115 - DNA, 23 bp, Artificial sequence  Forward Primer
  Primer
tgaattttaaggatgaggtatag

SEQ ID NO: 17116 - DNA, 27 bp, Artificial sequence  Forward Primer
  Primer
aattaataatttaatacccagaaggca

SEQ ID NO: 17117 - DNA, 26 bp, Artificial sequence  Forward Primer
  Primer
aaaaaagagtctggaaagaaatatgt

SEQ ID NO: 17118 - DNA, 20 bp, Artificial sequence  Forward Primer
  Primer
tagatagccttggggagatc

SEQ ID NO: 17119 - DNA, 25 bp, Artificial sequence  Forward Primer
  Primer
caagtaagctataaacaggcgttat

SEQ ID NO: 17120 - DNA, 24 bp, Artificial sequence  Forward Primer
  Primer
gcaaaattctaaggaaaattacaa

SEQ ID NO: 17121 - DNA, 25 bp, Artificial sequence  Forward Primer
  Primer
aaccaagaataagaaaaactaactg

SEQ ID NO: 17122 - DNA, 20 bp, Artificial sequence  Forward Primer
  Primer
ttggaagagtttgctttgga

SEQ ID NO: 17123 - DNA, 19 bp, Artificial sequence  Forward Primer
  Primer
tgattttagggggtacact

SEQ ID NO: 17124 - DNA, 29 bp, Artificial sequence  Forward Primer
  Primer
taggtaacctgagttactttagttcttag

SEQ ID NO: 17125 - DNA, 22 bp, Artificial sequence  Forward Primer
  Primer
tttttaagcctccagaagatgt

SEQ ID NO: 17126 - DNA, 27 bp, Artificial sequence  Forward Primer
  Primer
agactatttccagaattagagctctct

SEQ ID NO: 17127 - DNA, 27 bp, Artificial sequence  Forward Primer
  Primer
attgttgctgagaaatttaatactgtt

SEQ ID NO: 17128 - DNA, 28 bp, Artificial sequence  Forward Primer
  Primer
gctgatgatcattttacatatatgattt

SEQ ID NO: 17129 - DNA, 19 bp, Artificial sequence  Forward Primer
  Primer
agcaaagaaggcagcagag

SEQ ID NO: 17130 - DNA, 26 bp, Artificial sequence  Forward Primer
  Primer
attcctagcttatttgtttatgcaat

SEQ ID NO: 17131 - DNA, 30 bp, Artificial sequence  Forward Primer
  Primer
aagtgatcttcatctatttgtatttgtact

SEQ ID NO: 17132 - DNA, 27 bp, Artificial sequence  Forward Primer
  Primer
atcaaggtttgtatcttcaataggtac

SEQ ID NO: 17133 - DNA, 23 bp, Artificial sequence  Forward Primer
  Primer
acatgtcactttacttttttgcc

SEQ ID NO: 17134 - DNA, 21 bp, Artificial sequence  Forward Primer
  Primer
tttggtgggaaagaaagaaag

SEQ ID NO: 17135 - DNA, 27 bp, Artificial sequence  Forward Primer
  Primer
atatttagttcagagggagaaaaatgt

SEQ ID NO: 17136 - DNA, 24 bp, Artificial sequence  Forward Primer
  Primer
tatttttagtttggagtctaaatg

SEQ ID NO: 17137 - DNA, 20 bp, Artificial sequence  Forward Primer
  Primer
tcggtacaggagatccattg

SEQ ID NO: 17138 - DNA, 28 bp, Artificial sequence  Forward Primer
  Primer
aagctaaaacaatgacattatgtatgat

SEQ ID NO: 17139 - DNA, 18 bp, Artificial sequence  Forward Primer
  Primer
atttggggtcagctccct

SEQ ID NO: 17140 - DNA, 25 bp, Artificial sequence  Forward Primer
  Primer
taaaattaggatgagagcttctagt

SEQ ID NO: 17141 - DNA, 24 bp, Artificial sequence  Forward Primer
  Primer
aaccataccactaacctcagaaaa

SEQ ID NO: 17142 - DNA, 20 bp, Artificial sequence  Forward Primer
  Primer
tgtcaattcctcccaaagag

SEQ ID NO: 17143 - DNA, 19 bp, Artificial sequence  Forward Primer
  Primer
accgtgtcaacaaaaccat

SEQ ID NO: 17144 - DNA, 24 bp, Artificial sequence  Forward Primer
  Primer
ttaaartggagacaaaatattggc

SEQ ID NO: 17145 - DNA, 19 bp, Artificial sequence  Forward Primer
  Primer
tattttgctgctctgcctc

SEQ ID NO: 17146 - DNA, 19 bp, Artificial sequence  Forward Primer
  Primer
caggctctctaggactggg

SEQ ID NO: 17147 - DNA, 23 bp, Artificial sequence  Forward Primer
  Primer
ttagcagaaagaggctaagaagc

SEQ ID NO: 17148 - DNA, 24 bp, Artificial sequence  Forward Primer
  Primer
taagtgattttctcacgcttagtg

SEQ ID NO: 17149 - DNA, 20 bp, Artificial sequence  Forward Primer
  Primer
atgtcccagacccaggttat

SEQ ID NO: 17150 - DNA, 20 bp, Artificial sequence  Forward Primer
  Primer
aaaagtttctcgaagctgca

SEQ ID NO: 17151 - DNA, 27 bp, Artificial sequence  Forward Primer
  Primer
tctctttagtcttccctaaatattgtg

SEQ ID NO: 17152 - DNA, 30 bp, Artificial sequence  Forward Primer
  Primer
aatatattaaacagtggtaactacaatcta

SEQ ID NO: 17153 - DNA, 22 bp, Artificial sequence  Forward Primer
  Primer
ttgytggtaggcctataaattg

SEQ ID NO: 17154 - DNA, 28 bp, Artificial sequence  Forward Primer
  Primer
ccccaaataaaacataacagatataatt

SEQ ID NO: 17155 - DNA, 23 bp, Artificial sequence  Forward Primer
  Primer
aaattgaagattcatgtccaaga

SEQ ID NO: 17156 - DNA, 30 bp, Artificial sequence  Forward Primer
  Primer
tttaatacttcttagagctttctattttcc

SEQ ID NO: 17157 - DNA, 22 bp, Artificial sequence  Forward Primer
  Primer
aaatcatatccctattgtctgg

SEQ ID NO: 17158 - DNA, 24 bp, Artificial sequence  Forward Primer
  Primer
taaataactkgccttgattctgtg

SEQ ID NO: 17159 - DNA, 25 bp, Artificial sequence  Forward Primer
  Primer
aacaaagacttatgaaagaggatgg

SEQ ID NO: 17160 - DNA, 26 bp, Artificial sequence  Forward Primer
  Primer
attcacattattaaccaaaaagacct

SEQ ID NO: 17161 - DNA, 24 bp, Artificial sequence  Forward Primer
  Primer
agatctcatcctgacctagtgaat

SEQ ID NO: 17162 - DNA, 23 bp, Artificial sequence  Forward Primer
  Primer
aattaggatcactagcaaatcgg

SEQ ID NO: 17163 - DNA, 19 bp, Artificial sequence  Forward Primer
  Primer
aaattgtgctggccttgat

SEQ ID NO: 17164 - DNA, 18 bp, Artificial sequence  Forward Primer
  Primer
tttgaggtccgttcctgg

SEQ ID NO: 17165 - DNA, 29 bp, Artificial sequence  Forward Primer
  Primer
ttctactcttggttttaaatattctctca

SEQ ID NO: 17166 - DNA, 23 bp, Artificial sequence  Forward Primer
  Primer
agaagggcgttaattcctataac

SEQ ID NO: 17167 - DNA, 26 bp, Artificial sequence  Forward Primer
  Primer
gaattaaaacaagagaacatgtgaca

SEQ ID NO: 17168 - DNA, 19 bp, Artificial sequence  Forward Primer
  Primer
ttaataatgtcaggcctcc

SEQ ID NO: 17169 - DNA, 20 bp, Artificial sequence  Forward Primer
  Primer
ttaccaagacctgtctcccc

SEQ ID NO: 17170 - DNA, 21 bp, Artificial sequence  Forward Primer
  Primer
aaaatctcaatgcagaagggt

SEQ ID NO: 17171 - DNA, 22 bp, Artificial sequence  Forward Primer
  Primer
ggatgaacccatgtcattaaac

SEQ ID NO: 17172 - DNA, 18 bp, Artificial sequence  Forward Primer
  Primer
tcacaaggcccgaatttg

SEQ ID NO: 17173 - DNA, 20 bp, Artificial sequence  Forward Primer
  Primer
tttctgccatacatcaacgt

SEQ ID NO: 17174 - DNA, 23 bp, Artificial sequence  Forward Primer
  Primer
atgactaagtgaggaaatccgtc

SEQ ID NO: 17175 - DNA, 18 bp, Artificial sequence  Forward Primer
  Primer
attgcaaaagcctccgtt

SEQ ID NO: 17176 - DNA, 19 bp, Artificial sequence  Forward Primer
  Primer
ccaacaggcacttcatctt

SEQ ID NO: 17177 - DNA, 20 bp, Artificial sequence  Forward Primer
  Primer
tctctaaataagggcttgct

SEQ ID NO: 17178 - DNA, 30 bp, Artificial sequence  Forward Primer
  Primer
atgaacctagagattatcatagtaactgaa

SEQ ID NO: 17179 - DNA, 23 bp, Artificial sequence  Forward Primer
  Primer
tgacctctataaactgcaactga

SEQ ID NO: 17180 - DNA, 18 bp, Artificial sequence  Forward Primer
  Primer
atcccttcggcactaccc

SEQ ID NO: 17181 - DNA, 19 bp, Artificial sequence  Forward Primer
  Primer
ccctaagggctgcactagt

SEQ ID NO: 17182 - DNA, 26 bp, Artificial sequence  Forward Primer
  Primer
ttaaatcaggaagaaactcctacaat

SEQ ID NO: 17183 - DNA, 21 bp, Artificial sequence  Forward Primer
  Primer
gtgtccctctaagggtcaact

SEQ ID NO: 17184 - DNA, 18 bp, Artificial sequence  Forward Primer
  Primer
ttcgtcagctctgggcac

SEQ ID NO: 17185 - DNA, 20 bp, Artificial sequence  Forward Primer
  Primer
ttaagctactcctcagtggc

SEQ ID NO: 17186 - DNA, 27 bp, Artificial sequence  Forward Primer
  Primer
tgttctgtaggtatgttttagaatttt

SEQ ID NO: 17187 - DNA, 21 bp, Artificial sequence  Forward Primer
  Primer
aaaggtcttgctggatttcat

SEQ ID NO: 17188 - DNA, 24 bp, Artificial sequence  Forward Primer
  Primer
taatattgacctcatctcctgacc

SEQ ID NO: 17189 - DNA, 18 bp, Artificial sequence  Forward Primer
  Primer
gagggcagggaccacctt

SEQ ID NO: 17190 - DNA, 18 bp, Artificial sequence  Forward Primer
  Primer
tggaggtaggtacgccca

SEQ ID NO: 17191 - DNA, 18 bp, Artificial sequence  Forward Primer
  Primer
agcaccagccctgtgttc

SEQ ID NO: 17192 - DNA, 18 bp, Artificial sequence  Forward Primer
  Primer
ttccagccaggtccaaat

SEQ ID NO: 17193 - DNA, 25 bp, Artificial sequence  Forward Primer
  Primer
ttggggttcataagataaaagttaa

SEQ ID NO: 17194 - DNA, 22 bp, Artificial sequence  Forward Primer
  Primer
attaacatagggctgtcattgc

SEQ ID NO: 17195 - DNA, 24 bp, Artificial sequence  Forward Primer
  Primer
acaggaaaaagaaatctgtcagaa

SEQ ID NO: 17196 - DNA, 27 bp, Artificial sequence  Forward Primer
  Primer
aaataaatttaagatggtttctaggct

SEQ ID NO: 17197 - DNA, 28 bp, Artificial sequence  Forward Primer
  Primer
aagaaagtatatattttgaagaaaagcc

SEQ ID NO: 17198 - DNA, 24 bp, Artificial sequence  Forward Primer
  Primer
tttgttaatgaagcaacaagaaaa

SEQ ID NO: 17199 - DNA, 24 bp, Artificial sequence  Forward Primer
  Primer
ctaggcatattgtatacacacttt

SEQ ID NO: 17200 - DNA, 26 bp, Artificial sequence  Forward Primer
  Primer
aaaragatkatgtgttatctttttcc

SEQ ID NO: 17201 - DNA, 25 bp, Artificial sequence  Forward Primer
  Primer
atttctagacccaaagtaagcattc

SEQ ID NO: 17202 - DNA, 18 bp, Artificial sequence  Forward Primer
  Primer
cctcaggcatggtgacac

SEQ ID NO: 17203 - DNA, 25 bp, Artificial sequence  Forward Primer
  Primer
ttgttgaatatgaactgaaaaaagc

SEQ ID NO: 17204 - DNA, 24 bp, Artificial sequence  Forward Primer
  Primer
taaatttcattgtttccatctgtg

SEQ ID NO: 17205 - DNA, 23 bp, Artificial sequence  Forward Primer
  Primer
ttaacaaatgttggccatttaag

SEQ ID NO: 17206 - DNA, 18 bp, Artificial sequence  Forward Primer
  Primer
aggaggcagtgctggcca

SEQ ID NO: 17207 - DNA, 23 bp, Artificial sequence  Forward Primer
  Primer
aaatttttcatctccaaatgtgc

SEQ ID NO: 17208 - DNA, 21 bp, Artificial sequence  Forward Primer
  Primer
tgtaaagcaattatcctccaa

SEQ ID NO: 17209 - DNA, 21 bp, Artificial sequence  Forward Primer
  Primer
ataatgccaatgtcccagact

SEQ ID NO: 17210 - DNA, 22 bp, Artificial sequence  Forward Primer
  Primer
ggctataaatcttccaaaattg

SEQ ID NO: 17211 - DNA, 18 bp, Artificial sequence  Forward Primer
  Primer
ttctttcaaagccgcaac

SEQ ID NO: 17212 - DNA, 19 bp, Artificial sequence  Forward Primer
  Primer
aaaagaactgcctccctga

SEQ ID NO: 17213 - DNA, 21 bp, Artificial sequence  Forward Primer
  Primer
ccctctttgagttgctagaat

SEQ ID NO: 17214 - DNA, 20 bp, Artificial sequence  Forward Primer
  Primer
gcattctcattcgtctgtgt

SEQ ID NO: 17215 - DNA, 25 bp, Artificial sequence  Forward Primer
  Primer
aaaaactttgtcctttataacactc

SEQ ID NO: 17216 - DNA, 22 bp, Artificial sequence  Forward Primer
  Primer
aaagtggaacaaacatttgagg

SEQ ID NO: 17217 - DNA, 24 bp, Artificial sequence  Forward Primer
  Primer
tatgagtaagtataaaatggcctt

SEQ ID NO: 17218 - DNA, 22 bp, Artificial sequence  Forward Primer
  Primer
atttgtctggaaatagtgactt

SEQ ID NO: 17219 - DNA, 27 bp, Artificial sequence  Forward Primer
  Primer
tgaaaagtatagatctgccttaatttc

SEQ ID NO: 17220 - DNA, 23 bp, Artificial sequence  Forward Primer
  Primer
ataatctgaatttccgaacagtc

SEQ ID NO: 17221 - DNA, 22 bp, Artificial sequence  Forward Primer
  Primer
ttttatctccctaattgtgtca

SEQ ID NO: 17222 - DNA, 18 bp, Artificial sequence  Forward Primer
  Primer
aggctttgagctcctggg

SEQ ID NO: 17223 - DNA, 19 bp, Artificial sequence  Forward Primer
  Primer
agacgaccccagaatcctt

SEQ ID NO: 17224 - DNA, 18 bp, Artificial sequence  Forward Primer
  Primer
catgggagccatgaattg

SEQ ID NO: 17225 - DNA, 24 bp, Artificial sequence  Forward Primer
  Primer
tttgtaatctagactgtcaaggcc

SEQ ID NO: 17226 - DNA, 25 bp, Artificial sequence  Forward Primer
  Primer
atgtcaactcataattttactggga

SEQ ID NO: 17227 - DNA, 22 bp, Artificial sequence  Forward Primer
  Primer
atagataatttttggagggggt

SEQ ID NO: 17228 - DNA, 27 bp, Artificial sequence  Forward Primer
  Primer
aattttctgtggatttctctatttttc

SEQ ID NO: 17229 - DNA, 27 bp, Artificial sequence  Forward Primer
  Primer
taaagagataacgtaggagattcatag

SEQ ID NO: 17230 - DNA, 18 bp, Artificial sequence  Forward Primer
  Primer
atgctgcaacggctgcgt

SEQ ID NO: 17231 - DNA, 18 bp, Artificial sequence  Forward Primer
  Primer
ctccctcctgattctccc

SEQ ID NO: 17232 - DNA, 23 bp, Artificial sequence  Forward Primer
  Primer
ttctcgaaactgtttaatgagca

SEQ ID NO: 17233 - DNA, 30 bp, Artificial sequence  Forward Primer
  Primer
atacaattagcttttatgctatatatgact

SEQ ID NO: 17234 - DNA, 24 bp, Artificial sequence  Forward Primer
  Primer
ttatcaagagattatcaaagaaga

SEQ ID NO: 17235 - DNA, 26 bp, Artificial sequence  Forward Primer
  Primer
aatgagaagtttcctatgaatgaaat

SEQ ID NO: 17236 - DNA, 23 bp, Artificial sequence  Forward Primer
  Primer
ttgcttcttaagatatctctcca

SEQ ID NO: 17237 - DNA, 20 bp, Artificial sequence  Forward Primer
  Primer
ggtaaccagaaatttgcttc

SEQ ID NO: 17238 - DNA, 24 bp, Artificial sequence  Forward Primer
  Primer
atgaaatagcacaaaacagaaagg

SEQ ID NO: 17239 - DNA, 25 bp, Artificial sequence  Forward Primer
  Primer
tttcctagctcctcttattatgttt

SEQ ID NO: 17240 - DNA, 25 bp, Artificial sequence  Forward Primer
  Primer
ctgggaagaagtctttatttagaga

SEQ ID NO: 17241 - DNA, 18 bp, Artificial sequence  Forward Primer
  Primer
ccaggcagtagcaccagg

SEQ ID NO: 17242 - DNA, 19 bp, Artificial sequence  Forward Primer
  Primer
aaccggrttaccaagacct

SEQ ID NO: 17243 - DNA, 28 bp, Artificial sequence  Forward Primer
  Primer
tgaattctaagtaaatactatgtaatgg

SEQ ID NO: 17244 - DNA, 19 bp, Artificial sequence  Forward Primer
  Primer
cgactcgaaggacatgaga

SEQ ID NO: 17245 - DNA, 24 bp, Artificial sequence  Forward Primer
  Primer
aatgtactgattgagacaaaacaa

SEQ ID NO: 17246 - DNA, 26 bp, Artificial sequence  Forward Primer
  Primer
ttttcatatcctaactgcttctctct

SEQ ID NO: 17247 - DNA, 27 bp, Artificial sequence  Forward Primer
  Primer
agagttaatcagacattttatagcatt

SEQ ID NO: 17248 - DNA, 24 bp, Artificial sequence  Forward Primer
  Primer
aaaatatatgaacaagccttgagc

SEQ ID NO: 17249 - DNA, 30 bp, Artificial sequence  Forward Primer
  Primer
gtctttaaaatgtagcatgtaaatacaatg

SEQ ID NO: 17250 - DNA, 19 bp, Artificial sequence  Forward Primer
  Primer
ctgccaatcaaaatgacaa

SEQ ID NO: 17251 - DNA, 24 bp, Artificial sequence  Forward Primer
  Primer
ataaagcatttttcacacacttgc

SEQ ID NO: 17252 - DNA, 28 bp, Artificial sequence  Forward Primer
  Primer
aaatacaatagtgttgaagcaaaataca

SEQ ID NO: 17253 - DNA, 30 bp, Artificial sequence  Forward Primer
  Primer
taaatattaatataagagttaggcaagcat

SEQ ID NO: 17254 - DNA, 22 bp, Artificial sequence  Forward Primer
  Primer
tagttggttgatttgttttctt

SEQ ID NO: 17255 - DNA, 24 bp, Artificial sequence  Forward Primer
  Primer
acttattagttgccttttcacagc

SEQ ID NO: 17256 - DNA, 23 bp, Artificial sequence  Forward Primer
  Primer
ttctggcctcatatactctgaaa

SEQ ID NO: 17257 - DNA, 21 bp, Artificial sequence  Forward Primer
  Primer
aaaagggaatacggacagtgt

SEQ ID NO: 17258 - DNA, 28 bp, Artificial sequence  Forward Primer
  Primer
taaggtcttaagaagaaagaaaaaagtt

SEQ ID NO: 17259 - DNA, 28 bp, Artificial sequence  Forward Primer
  Primer
agtgttcaaacactcattttcttattaa

SEQ ID NO: 17260 - DNA, 22 bp, Artificial sequence  Forward Primer
  Primer
agtaggctcaaaaataacaatt

SEQ ID NO: 17261 - DNA, 19 bp, Artificial sequence  Forward Primer
  Primer
caaacaatgatttctccct

SEQ ID NO: 17262 - DNA, 22 bp, Artificial sequence  Forward Primer
  Primer
gacagtaacttctaatcaggct

SEQ ID NO: 17263 - DNA, 27 bp, Artificial sequence  Forward Primer
  Primer
aagatggagttttgtatytgtttctta

SEQ ID NO: 17264 - DNA, 21 bp, Artificial sequence  Forward Primer
  Primer
ttcaggtatttcttgaacctc

SEQ ID NO: 17265 - DNA, 20 bp, Artificial sequence  Forward Primer
  Primer
caaagtgcatccattaacac

SEQ ID NO: 17266 - DNA, 19 bp, Artificial sequence  Forward Primer
  Primer
aactctgaccaccttcccg

SEQ ID NO: 17267 - DNA, 19 bp, Artificial sequence  Forward Primer
  Primer
ttttctctgaagcaccaca

SEQ ID NO: 17268 - DNA, 27 bp, Artificial sequence  Forward Primer
  Primer
tttcatattacagactcacagacctag

SEQ ID NO: 17269 - DNA, 25 bp, Artificial sequence  Forward Primer
  Primer
gaaaggttatttaaatgcttttgtg

SEQ ID NO: 17270 - DNA, 19 bp, Artificial sequence  Forward Primer
  Primer
tgcccgctctgcgcataat

SEQ ID NO: 17271 - DNA, 19 bp, Artificial sequence  Forward Primer
  Primer
acacaggccttgatattga

SEQ ID NO: 17272 - DNA, 20 bp, Artificial sequence  Forward Primer
  Primer
acaaattccccaagaacatt

SEQ ID NO: 17273 - DNA, 18 bp, Artificial sequence  Forward Primer
  Primer
cgcagaatgccagcacat

SEQ ID NO: 17274 - DNA, 24 bp, Artificial sequence  Forward Primer
  Primer
aacatagggatttttagagctgtg

SEQ ID NO: 17275 - DNA, 21 bp, Artificial sequence  Forward Primer
  Primer
aatcgattcatctcacaacct

SEQ ID NO: 17276 - DNA, 28 bp, Artificial sequence  Forward Primer
  Primer
tacacaatgtaattgaaaatcttaggat

SEQ ID NO: 17277 - DNA, 23 bp, Artificial sequence  Forward Primer
  Primer
actgtagaaccaagagcaaaaga

SEQ ID NO: 17278 - DNA, 18 bp, Artificial sequence  Forward Primer
  Primer
tgctgccggaggtaggac

SEQ ID NO: 17279 - DNA, 19 bp, Artificial sequence  Forward Primer
  Primer
tcagtctggcttctcaagg

SEQ ID NO: 17280 - DNA, 18 bp, Artificial sequence  Forward Primer
  Primer
ccagtggttctggtctcg

SEQ ID NO: 17281 - DNA, 30 bp, Artificial sequence  Forward Primer
  Primer
attattctaccttaaatcttctatktagta

SEQ ID NO: 17282 - DNA, 30 bp, Artificial sequence  Forward Primer
  Primer
atttattaccactagaataatgtataatcc

SEQ ID NO: 17283 - DNA, 22 bp, Artificial sequence  Forward Primer
  Primer
atttctgatttttgacctccag

SEQ ID NO: 17284 - DNA, 26 bp, Artificial sequence  Forward Primer
  Primer
attcttctgttttaaccacttacctt

SEQ ID NO: 17285 - DNA, 26 bp, Artificial sequence  Forward Primer
  Primer
attttgtgaaattaacatccactaca

SEQ ID NO: 17286 - DNA, 28 bp, Artificial sequence  Forward Primer
  Primer
aattctacaagtcataaataacactcaa

SEQ ID NO: 17287 - DNA, 24 bp, Artificial sequence  Forward Primer
  Primer
attagcctccaattaaaataaaca

SEQ ID NO: 17288 - DNA, 21 bp, Artificial sequence  Forward Primer
  Primer
ttcttggctacaccagaaaca

SEQ ID NO: 17289 - DNA, 19 bp, Artificial sequence  Forward Primer
  Primer
tctgctaaccccaacatca

SEQ ID NO: 17290 - DNA, 30 bp, Artificial sequence  Forward Primer
  Primer
cccttatttaactaataatcatatcctttt

SEQ ID NO: 17291 - DNA, 26 bp, Artificial sequence  Forward Primer
  Primer
ataacagtttcactttatggatcagc

SEQ ID NO: 17292 - DNA, 26 bp, Artificial sequence  Forward Primer
  Primer
aaagctttgaacaataactgactctt

SEQ ID NO: 17293 - DNA, 24 bp, Artificial sequence  Forward Primer
  Primer
aaattctggtttctgtaccatttg

SEQ ID NO: 17294 - DNA, 19 bp, Artificial sequence  Forward Primer
  Primer
tgtgtttgtgatcccttgc

SEQ ID NO: 17295 - DNA, 27 bp, Artificial sequence  Forward Primer
  Primer
aatcagtagataagggaaaggtatttt

SEQ ID NO: 17296 - DNA, 29 bp, Artificial sequence  Forward Primer
  Primer
ctaaatggactagatatataagaggcttc

SEQ ID NO: 17297 - DNA, 23 bp, Artificial sequence  Forward Primer
  Primer
tttttgaggaaacttccttctct

SEQ ID NO: 17298 - DNA, 25 bp, Artificial sequence  Forward Primer
  Primer
ytgaatggctaataaattcaaagaa

SEQ ID NO: 17299 - DNA, 24 bp, Artificial sequence  Forward Primer
  Primer
taaagggaaaagaaatgaaaaaga

SEQ ID NO: 17300 - DNA, 26 bp, Artificial sequence  Forward Primer
  Primer
taagaygttaattccttggtctaaga

SEQ ID NO: 17301 - DNA, 24 bp, Artificial sequence  Forward Primer
  Primer
tttacattacacagctcagtctgg

SEQ ID NO: 17302 - DNA, 21 bp, Artificial sequence  Forward Primer
  Primer
tgataagggtggagaaaggtc

SEQ ID NO: 17303 - DNA, 27 bp, Artificial sequence  Forward Primer
  Primer
gacatgttaaataactgtcaagaaacc

SEQ ID NO: 17304 - DNA, 23 bp, Artificial sequence  Forward Primer
  Primer
ttttataccttggagaggactga

SEQ ID NO: 17305 - DNA, 21 bp, Artificial sequence  Forward Primer
  Primer
tcagcatcacagagcaaattt

SEQ ID NO: 17306 - DNA, 19 bp, Artificial sequence  Forward Primer
  Primer
tttggcaaattcctttggt

SEQ ID NO: 17307 - DNA, 19 bp, Artificial sequence  Forward Primer
  Primer
tgtggccataatttttgca

SEQ ID NO: 17308 - DNA, 24 bp, Artificial sequence  Forward Primer
  Primer
atttctttgaaaggaaaaatcaga

SEQ ID NO: 17309 - DNA, 24 bp, Artificial sequence  Forward Primer
  Primer
aaaagaaaacacaggagtttctca

SEQ ID NO: 17310 - DNA, 19 bp, Artificial sequence  Forward Primer
  Primer
atcagtggggcttctctcc

SEQ ID NO: 17311 - DNA, 27 bp, Artificial sequence  Forward Primer
  Primer
aagaataggggtagtatatagggacat

SEQ ID NO: 17312 - DNA, 26 bp, Artificial sequence  Forward Primer
  Primer
taatggtatattccaggagagtaagg

SEQ ID NO: 17313 - DNA, 26 bp, Artificial sequence  Forward Primer
  Primer
aataaacacttgttgagggaattatg

SEQ ID NO: 17314 - DNA, 22 bp, Artificial sequence  Forward Primer
  Primer
tatgcaatttccattcttttcg

SEQ ID NO: 17315 - DNA, 18 bp, Artificial sequence  Forward Primer
  Primer
tttgaggggccagccggt

SEQ ID NO: 17316 - DNA, 22 bp, Artificial sequence  Forward Primer
  Primer
tttaaaatttggccatttgaga

SEQ ID NO: 17317 - DNA, 27 bp, Artificial sequence  Forward Primer
  Primer
caaaccaaactaatttaactgctaata

SEQ ID NO: 17318 - DNA, 24 bp, Artificial sequence  Forward Primer
  Primer
tgtcataaaatcaaaaaaggaaca

SEQ ID NO: 17319 - DNA, 20 bp, Artificial sequence  Forward Primer
  Primer
tccacccacatttaaagatg

SEQ ID NO: 17320 - DNA, 21 bp, Artificial sequence  Forward Primer
  Primer
atcacaaagggtcaaaccact

SEQ ID NO: 17321 - DNA, 19 bp, Artificial sequence  Forward Primer
  Primer
accctcaaggatccgagtt

SEQ ID NO: 17322 - DNA, 24 bp, Artificial sequence  Forward Primer
  Primer
aagatatgtatcaatgctgttgtc

SEQ ID NO: 17323 - DNA, 25 bp, Artificial sequence  Forward Primer
  Primer
trcattgctcaatgatatttcataa

SEQ ID NO: 17324 - DNA, 22 bp, Artificial sequence  Forward Primer
  Primer
tacctaatgttgtttctggagc

SEQ ID NO: 17325 - DNA, 18 bp, Artificial sequence  Forward Primer
  Primer
tgccagactgaggtccag

SEQ ID NO: 17326 - DNA, 28 bp, Artificial sequence  Forward Primer
  Primer
aaataaattatgttgtaggaggattgtt

SEQ ID NO: 17327 - DNA, 21 bp, Artificial sequence  Forward Primer
  Primer
tgaattctaaagggcaaaaca

SEQ ID NO: 17328 - DNA, 27 bp, Artificial sequence  Forward Primer
  Primer
aataaaaatagsttttagttgccactt

SEQ ID NO: 17329 - DNA, 23 bp, Artificial sequence  Forward Primer
  Primer
tgaaatttttgaaaacaaccaag

SEQ ID NO: 17330 - DNA, 21 bp, Artificial sequence  Forward Primer
  Primer
aaatgcttactgagcagttgg

SEQ ID NO: 17331 - DNA, 30 bp, Artificial sequence  Forward Primer
  Primer
taactgcttataacatttttacattctaca

SEQ ID NO: 17332 - DNA, 30 bp, Artificial sequence  Forward Primer
  Primer
aaattagttcacaatactgaaaatactgag

SEQ ID NO: 17333 - DNA, 21 bp, Artificial sequence  Forward Primer
  Primer
aaataaaataccggacctggg

SEQ ID NO: 17334 - DNA, 24 bp, Artificial sequence  Forward Primer
  Primer
ctttagytcmacttttgcattttt

SEQ ID NO: 17335 - DNA, 22 bp, Artificial sequence  Forward Primer
  Primer
gcctacgtagaagcttacattt

SEQ ID NO: 17336 - DNA, 20 bp, Artificial sequence  Forward Primer
  Primer
tcttgaatgaggaattctgg

SEQ ID NO: 17337 - DNA, 27 bp, Artificial sequence  Forward Primer
  Primer
agttatgagaggtgatattttagcatc

SEQ ID NO: 17338 - DNA, 23 bp, Artificial sequence  Forward Primer
  Primer
atcttgctttatgatgatctaac

SEQ ID NO: 17339 - DNA, 28 bp, Artificial sequence  Forward Primer
  Primer
tattttatcttccacatttagaaaagtc

SEQ ID NO: 17340 - DNA, 23 bp, Artificial sequence  Forward Primer
  Primer
tgacagacatgctctgtgataca

SEQ ID NO: 17341 - DNA, 29 bp, Artificial sequence  Forward Primer
  Primer
tttaaacagtactgacttgatattcaaag

SEQ ID NO: 17342 - DNA, 24 bp, Artificial sequence  Forward Primer
  Primer
ttatttgtacatgtgcctaacgtc

SEQ ID NO: 17343 - DNA, 19 bp, Artificial sequence  Forward Primer
  Primer
attcatagacttgccaacc

SEQ ID NO: 17344 - DNA, 18 bp, Artificial sequence  Forward Primer
  Primer
aggctttgagctcctggg

SEQ ID NO: 17345 - DNA, 24 bp, Artificial sequence  Forward Primer
  Primer
tgatgacaaaggagacaaagtaag

SEQ ID NO: 17346 - DNA, 18 bp, Artificial sequence  Forward Primer
  Primer
ttcttycccgacactgtg

SEQ ID NO: 17347 - DNA, 26 bp, Artificial sequence  Forward Primer
  Primer
atttctggtagtctctgcttttagag

SEQ ID NO: 17348 - DNA, 18 bp, Artificial sequence  Forward Primer
  Primer
atgaaacccaggccctcg

SEQ ID NO: 17349 - DNA, 24 bp, Artificial sequence  Forward Primer
  Primer
aaacctgtatcctctgcaatagaa

SEQ ID NO: 17350 - DNA, 21 bp, Artificial sequence  Forward Primer
  Primer
ttgctttttgaggaaacttcc

SEQ ID NO: 17351 - DNA, 24 bp, Artificial sequence  Forward Primer
  Primer
tataattatccccaaagaaatcct

SEQ ID NO: 17352 - DNA, 20 bp, Artificial sequence  Forward Primer
  Primer
ttgagtcaggaaagaaaaag

SEQ ID NO: 17353 - DNA, 26 bp, Artificial sequence  Forward Primer
  Primer
ttagtgaatcyaggaataaaggactt

SEQ ID NO: 17354 - DNA, 30 bp, Artificial sequence  Forward Primer
  Primer
gaacagaaaataagagaatatgtagataaa

SEQ ID NO: 17355 - DNA, 19 bp, Artificial sequence  Forward Primer
  Primer
atttgacgtggcagttatg

SEQ ID NO: 17356 - DNA, 23 bp, Artificial sequence  Forward Primer
  Primer
aaactaactcccttaggcttcag

SEQ ID NO: 17357 - DNA, 26 bp, Artificial sequence  Forward Primer
  Primer
aaaagagaaagccttaagtaatgaga

SEQ ID NO: 17358 - DNA, 27 bp, Artificial sequence  Forward Primer
  Primer
acttagaagacttcattataacaatgg

SEQ ID NO: 17359 - DNA, 28 bp, Artificial sequence  Forward Primer
  Primer
taacctaagttagcattctttctagctc

SEQ ID NO: 17360 - DNA, 21 bp, Artificial sequence  Forward Primer
  Primer
tttcagcgtcattacctttga

SEQ ID NO: 17361 - DNA, 22 bp, Artificial sequence  Forward Primer
  Primer
tttgttgtcgttcttgttcagt

SEQ ID NO: 17362 - DNA, 27 bp, Artificial sequence  Forward Primer
  Primer
agactgaaataagtcagaaacagaaaa

SEQ ID NO: 17363 - DNA, 18 bp, Artificial sequence  Forward Primer
  Primer
accaaggccaagtcctga

SEQ ID NO: 17364 - DNA, 21 bp, Artificial sequence  Forward Primer
  Primer
ttatttcttcccttgatggta

SEQ ID NO: 17365 - DNA, 23 bp, Artificial sequence  Forward Primer
  Primer
tatggaagtgcagtagaggagaa

SEQ ID NO: 17366 - DNA, 18 bp, Artificial sequence  Forward Primer
  Primer
tttgactcagcctggctt

SEQ ID NO: 17367 - DNA, 18 bp, Artificial sequence  Forward Primer
  Primer
tgccctcttccttacctg

SEQ ID NO: 17368 - DNA, 29 bp, Artificial sequence  Forward Primer
  Primer
aaaacttgatagtatgtgtgtatatttgc

SEQ ID NO: 17369 - DNA, 24 bp, Artificial sequence  Forward Primer
  Primer
ttttatatcctgaagcaaaatcca

SEQ ID NO: 17370 - DNA, 21 bp, Artificial sequence  Forward Primer
  Primer
acaggaagagagaacaaggtg

SEQ ID NO: 17371 - DNA, 27 bp, Artificial sequence  Forward Primer
  Primer
aatgagtgttttatatgtactggaaaa

SEQ ID NO: 17372 - DNA, 18 bp, Artificial sequence  Forward Primer
  Primer
tcaggagatttgcccagg

SEQ ID NO: 17373 - DNA, 22 bp, Artificial sequence  Forward Primer
  Primer
tttaattgttatgagcctggga

SEQ ID NO: 17374 - DNA, 26 bp, Artificial sequence  Forward Primer
  Primer
taaatcttgctaataagcttctctgg

SEQ ID NO: 17375 - DNA, 27 bp, Artificial sequence  Forward Primer
  Primer
gaaaatgtgaaatggatatgatttatc

SEQ ID NO: 17376 - DNA, 24 bp, Artificial sequence  Forward Primer
  Primer
atgaacatctgatctgtgactctg

SEQ ID NO: 17377 - DNA, 23 bp, Artificial sequence  Forward Primer
  Primer
tgtttgagacaactcaaaaatcc

SEQ ID NO: 17378 - DNA, 18 bp, Artificial sequence  Forward Primer
  Primer
atgcctccaagactgcag

SEQ ID NO: 17379 - DNA, 23 bp, Artificial sequence  Forward Primer
  Primer
attagctttggtcaggagaaaag

SEQ ID NO: 17380 - DNA, 26 bp, Artificial sequence  Forward Primer
  Primer
aaatatcatcaacattgtctttcatc

SEQ ID NO: 17381 - DNA, 23 bp, Artificial sequence  Forward Primer
  Primer
cttaagttgctcaccattgtgtt

SEQ ID NO: 17382 - DNA, 28 bp, Artificial sequence  Forward Primer
  Primer
aatatccttttggaagattaaaactaga

SEQ ID NO: 17383 - DNA, 27 bp, Artificial sequence  Forward Primer
  Primer
catttttctgatcctcatatgtaatct

SEQ ID NO: 17384 - DNA, 24 bp, Artificial sequence  Forward Primer
  Primer
ttatactgttacrgatcatggctg

SEQ ID NO: 17385 - DNA, 25 bp, Artificial sequence  Forward Primer
  Primer
aattgtcttgtgtttctcttcaaca

SEQ ID NO: 17386 - DNA, 18 bp, Artificial sequence  Forward Primer
  Primer
aaaatgaccaaaggccgc

SEQ ID NO: 17387 - DNA, 18 bp, Artificial sequence  Forward Primer
  Primer
cgtttctgggctgattca

SEQ ID NO: 17388 - DNA, 22 bp, Artificial sequence  Forward Primer
  Primer
tgtttactgaaaggatcttggg

SEQ ID NO: 17389 - DNA, 20 bp, Artificial sequence  Forward Primer
  Primer
aattgcttgggacaatcaaa

SEQ ID NO: 17390 - DNA, 23 bp, Artificial sequence  Forward Primer
  Primer
atttcagcactgagtctcaattt

SEQ ID NO: 17391 - DNA, 18 bp, Artificial sequence  Forward Primer
  Primer
gcaaacctgacccgcaac

SEQ ID NO: 17392 - DNA, 18 bp, Artificial sequence  Forward Primer
  Primer
attacccggtggaggtga

SEQ ID NO: 17393 - DNA, 23 bp, Artificial sequence  Forward Primer
  Primer
ttcgttagtagattttgtttttc

SEQ ID NO: 17394 - DNA, 20 bp, Artificial sequence  Forward Primer
  Primer
actgtagactggggtggtgt

SEQ ID NO: 17395 - DNA, 23 bp, Artificial sequence  Forward Primer
  Primer
tataagtagaagaaagactcgca

SEQ ID NO: 17396 - DNA, 18 bp, Artificial sequence  Forward Primer
  Primer
aagtcccatgcatgacgc

SEQ ID NO: 17397 - DNA, 19 bp, Artificial sequence  Forward Primer
  Primer
atgcaacttggctggtaat

SEQ ID NO: 17398 - DNA, 27 bp, Artificial sequence  Forward Primer
  Primer
taatctcttacacatcctaccatatcc

SEQ ID NO: 17399 - DNA, 24 bp, Artificial sequence  Forward Primer
  Primer
agtgtaatgaatctcacagtatgt

SEQ ID NO: 17400 - DNA, 25 bp, Artificial sequence  Forward Primer
  Primer
ttctattaaagagawagagagagca

SEQ ID NO: 17401 - DNA, 23 bp, Artificial sequence  Forward Primer
  Primer
taaatggactaaaactgctgctc

SEQ ID NO: 17402 - DNA, 19 bp, Artificial sequence  Forward Primer
  Primer
ccccatcactgatcaaatg

SEQ ID NO: 17403 - DNA, 21 bp, Artificial sequence  Forward Primer
  Primer
gggaaaatatgtgcattttga

SEQ ID NO: 17404 - DNA, 19 bp, Artificial sequence  Forward Primer
  Primer
atgacctccttcccagagg

SEQ ID NO: 17405 - DNA, 21 bp, Artificial sequence  Forward Primer
  Primer
atacagagcagacttgggata

SEQ ID NO: 17406 - DNA, 30 bp, Artificial sequence  Forward Primer
  Primer
aataatgaatgttattctaagtatttagcc

SEQ ID NO: 17407 - DNA, 24 bp, Artificial sequence  Forward Primer
  Primer
gttaacttttgtatcattctcaaa

SEQ ID NO: 17408 - DNA, 24 bp, Artificial sequence  Forward Primer
  Primer
aataatgaaacagaatactggaat

SEQ ID NO: 17409 - DNA, 24 bp, Artificial sequence  Forward Primer
  Primer
ttttcattgttttttaaatgaggg

SEQ ID NO: 17410 - DNA, 20 bp, Artificial sequence  Forward Primer
  Primer
aaaggcatttgtgagctaaa

SEQ ID NO: 17411 - DNA, 21 bp, Artificial sequence  Forward Primer
  Primer
aaaccatgtgtcagcttctga

SEQ ID NO: 17412 - DNA, 30 bp, Artificial sequence  Forward Primer
  Primer
ttatcttttattgctaataacacttcactc

SEQ ID NO: 17413 - DNA, 20 bp, Artificial sequence  Forward Primer
  Primer
acctggttcagtgaaggtcc

SEQ ID NO: 17414 - DNA, 26 bp, Artificial sequence  Forward Primer
  Primer
taattcctacttcaaatatttcccat

SEQ ID NO: 17415 - DNA, 24 bp, Artificial sequence  Forward Primer
  Primer
tatgaggaaatggaaataaaagga

SEQ ID NO: 17416 - DNA, 27 bp, Artificial sequence  Forward Primer
  Primer
ttaatgttctttgttctgacaagataa

SEQ ID NO: 17417 - DNA, 19 bp, Artificial sequence  Forward Primer
  Primer
attggcggaaagtttcttc

SEQ ID NO: 17418 - DNA, 22 bp, Artificial sequence  Forward Primer
  Primer
agaaaatcctgcaaggtaatgt

SEQ ID NO: 17419 - DNA, 27 bp, Artificial sequence  Forward Primer
  Primer
ttaattgcattttctgttacatacaca

SEQ ID NO: 17420 - DNA, 20 bp, Artificial sequence  Forward Primer
  Primer
aacagctgcactttccaaaa

SEQ ID NO: 17421 - DNA, 24 bp, Artificial sequence  Forward Primer
  Primer
taagttataaaatggttctcttcg

SEQ ID NO: 17422 - DNA, 22 bp, Artificial sequence  Forward Primer
  Primer
ctggaaatatttggttaatgaa

SEQ ID NO: 17423 - DNA, 22 bp, Artificial sequence  Forward Primer
  Primer
ataggcccatcttaacatcttg

SEQ ID NO: 17424 - DNA, 20 bp, Artificial sequence  Forward Primer
  Primer
tatgacaaggcatatcccat

SEQ ID NO: 17425 - DNA, 18 bp, Artificial sequence  Forward Primer
  Primer
tgggcaaagaggaatcgt

SEQ ID NO: 17426 - DNA, 27 bp, Artificial sequence  Forward Primer
  Primer
tttacaatctactacttgtaagccaag

SEQ ID NO: 17427 - DNA, 30 bp, Artificial sequence  Forward Primer
  Primer
actaaagcacagtaaatagaatacggtata

SEQ ID NO: 17428 - DNA, 21 bp, Artificial sequence  Forward Primer
  Primer
aaagtcagcacaaaggaaaca

SEQ ID NO: 17429 - DNA, 24 bp, Artificial sequence  Forward Primer
  Primer
taatactgaacttggctgaagatg

SEQ ID NO: 17430 - DNA, 21 bp, Artificial sequence  Forward Primer
  Primer
taaaaagttcacagggtggac

SEQ ID NO: 17431 - DNA, 24 bp, Artificial sequence  Forward Primer
  Primer
attgtgactttttattgtttgcag

SEQ ID NO: 17432 - DNA, 18 bp, Artificial sequence  Forward Primer
  Primer
aattccgttttttgccct

SEQ ID NO: 17433 - DNA, 19 bp, Artificial sequence  Forward Primer
  Primer
tagtgggtctatgagcaca

SEQ ID NO: 17434 - DNA, 28 bp, Artificial sequence  Forward Primer
  Primer
atttctataaggttatttcttctgaggg

SEQ ID NO: 17435 - DNA, 23 bp, Artificial sequence  Forward Primer
  Primer
ttcaggacagttgaggatctaag

SEQ ID NO: 17436 - DNA, 26 bp, Artificial sequence  Forward Primer
  Primer
ccacttattttctcaataatgaaatg

SEQ ID NO: 17437 - DNA, 26 bp, Artificial sequence  Forward Primer
  Primer
acttctaggaagtagatttcatctaa

SEQ ID NO: 17438 - DNA, 26 bp, Artificial sequence  Forward Primer
  Primer
aaaaggaataatatacacaagtgcaa

SEQ ID NO: 17439 - DNA, 29 bp, Artificial sequence  Forward Primer
  Primer
attactattaaaataagtgtcttgggaca

SEQ ID NO: 17440 - DNA, 26 bp, Artificial sequence  Forward Primer
  Primer
ttttaagttacacaaaaaggtatcca

SEQ ID NO: 17441 - DNA, 18 bp, Artificial sequence  Forward Primer
  Primer
tacaaggcaccctgctcg

SEQ ID NO: 17442 - DNA, 27 bp, Artificial sequence  Forward Primer
  Primer
aagtaattctagtgattttcttttagg

SEQ ID NO: 17443 - DNA, 26 bp, Artificial sequence  Forward Primer
  Primer
acaataaataacaagcattagcagtg

SEQ ID NO: 17444 - DNA, 18 bp, Artificial sequence  Forward Primer
  Primer
tgcagattccgctcctct

SEQ ID NO: 17445 - DNA, 23 bp, Artificial sequence  Forward Primer
  Primer
tactaaatggtgactcaggcatc

SEQ ID NO: 17446 - DNA, 28 bp, Artificial sequence  Forward Primer
  Primer
attttctcctgattaaacttctaaacat

SEQ ID NO: 17447 - DNA, 22 bp, Artificial sequence  Forward Primer
  Primer
tattgatgaacccggaagtaaa

SEQ ID NO: 17448 - DNA, 24 bp, Artificial sequence  Forward Primer
  Primer
ttgcacttatcaaaagatgacttc

SEQ ID NO: 17449 - DNA, 22 bp, Artificial sequence  Forward Primer
  Primer
aaaaagtaaggtttcacgcatg

SEQ ID NO: 17450 - DNA, 25 bp, Artificial sequence  Forward Primer
  Primer
aaagattttctttttcctgcttaac

SEQ ID NO: 17451 - DNA, 23 bp, Artificial sequence  Forward Primer
  Primer
aactactttgtccgttctactgg

SEQ ID NO: 17452 - DNA, 21 bp, Artificial sequence  Forward Primer
  Primer
tggattactcacagatgtggt

SEQ ID NO: 17453 - DNA, 21 bp, Artificial sequence  Forward Primer
  Primer
ataaaatggaaggaacaggca

SEQ ID NO: 17454 - DNA, 25 bp, Artificial sequence  Forward Primer
  Primer
tcttcagaatatactaactgggtgg

SEQ ID NO: 17455 - DNA, 26 bp, Artificial sequence  Forward Primer
  Primer
acctatttgttctgttctacaattca

SEQ ID NO: 17456 - DNA, 20 bp, Artificial sequence  Forward Primer
  Primer
atgagaacaatggtgtgacc

SEQ ID NO: 17457 - DNA, 27 bp, Artificial sequence  Forward Primer
  Primer
tttctcttgctaccagtttagtatttg

SEQ ID NO: 17458 - DNA, 26 bp, Artificial sequence  Forward Primer
  Primer
tattaagttggtaacagagagaaggg

SEQ ID NO: 17459 - DNA, 22 bp, Artificial sequence  Forward Primer
  Primer
aaaagtgtgatggactcaggag

SEQ ID NO: 17460 - DNA, 28 bp, Artificial sequence  Forward Primer
  Primer
aaaatctatggcttataaaagataagca

SEQ ID NO: 17461 - DNA, 28 bp, Artificial sequence  Forward Primer
  Primer
ctagcataaaactcagaaaacaataaaa

SEQ ID NO: 17462 - DNA, 24 bp, Artificial sequence  Forward Primer
  Primer
gcttagcagatgcaaactatgata

SEQ ID NO: 17463 - DNA, 21 bp, Artificial sequence  Forward Primer
  Primer
tatcagtgaggttgctccaga

SEQ ID NO: 17464 - DNA, 19 bp, Artificial sequence  Forward Primer
  Primer
ctttaggatgggcatctca

SEQ ID NO: 17465 - DNA, 19 bp, Artificial sequence  Forward Primer
  Primer
attgcctccttttccttcc

SEQ ID NO: 17466 - DNA, 25 bp, Artificial sequence  Forward Primer
  Primer
ttcccatctgtcttatatctacaag

SEQ ID NO: 17467 - DNA, 26 bp, Artificial sequence  Forward Primer
  Primer
atattaagatcatggatgttgagagc

SEQ ID NO: 17468 - DNA, 26 bp, Artificial sequence  Forward Primer
  Primer
tcaaagaacaaaatttgaacttacag

SEQ ID NO: 17469 - DNA, 22 bp, Artificial sequence  Forward Primer
  Primer
ataaatttcagctctgtctccg

SEQ ID NO: 17470 - DNA, 19 bp, Artificial sequence  Forward Primer
  Primer
cgaagattcgcttgaaaac

SEQ ID NO: 17471 - DNA, 27 bp, Artificial sequence  Forward Primer
  Primer
aatctatcattttctgttagagtagcc

SEQ ID NO: 17472 - DNA, 25 bp, Artificial sequence  Forward Primer
  Primer
attcaattttcctatcataagcaga

SEQ ID NO: 17473 - DNA, 23 bp, Artificial sequence  Forward Primer
  Primer
ttcacagttttcctgattctttg

SEQ ID NO: 17474 - DNA, 24 bp, Artificial sequence  Forward Primer
  Primer
ttattttaaacatttctgcagggt

SEQ ID NO: 17475 - DNA, 27 bp, Artificial sequence  Forward Primer
  Primer
aaaagaaatatatatgcttctagggac

SEQ ID NO: 17476 - DNA, 21 bp, Artificial sequence  Forward Primer
  Primer
agctacacaagttttttggcg

SEQ ID NO: 17477 - DNA, 20 bp, Artificial sequence  Forward Primer
  Primer
atgctgtatggagagacccc

SEQ ID NO: 17478 - DNA, 19 bp, Artificial sequence  Forward Primer
  Primer
acrgttcagaagcagcctc

SEQ ID NO: 17479 - DNA, 22 bp, Artificial sequence  Forward Primer
  Primer
tagttaatcgtgtgggacatgg

SEQ ID NO: 17480 - DNA, 23 bp, Artificial sequence  Forward Primer
  Primer
atcagtgttagatgcaggaacag

SEQ ID NO: 17481 - DNA, 20 bp, Artificial sequence  Forward Primer
  Primer
atggcatggaaatcatgttg

SEQ ID NO: 17482 - DNA, 26 bp, Artificial sequence  Forward Primer
  Primer
taaaagaacctagtcacatgaaaagg

SEQ ID NO: 17483 - DNA, 27 bp, Artificial sequence  Forward Primer
  Primer
tataaacagggtagaaaaaatacaccc

SEQ ID NO: 17484 - DNA, 28 bp, Artificial sequence  Forward Primer
  Primer
atatatactgaaacaagctgaacaaaat

SEQ ID NO: 17485 - DNA, 25 bp, Artificial sequence  Forward Primer
  Primer
ctgtaatctactcatccctgactca

SEQ ID NO: 17486 - DNA, 22 bp, Artificial sequence  Forward Primer
  Primer
attttgcttaaacacacctggt

SEQ ID NO: 17487 - DNA, 26 bp, Artificial sequence  Forward Primer
  Primer
caagactgtttttcacttttgttact

SEQ ID NO: 17488 - DNA, 25 bp, Artificial sequence  Forward Primer
  Primer
tttaaaagttaaaagggatttgagc

SEQ ID NO: 17489 - DNA, 20 bp, Artificial sequence  Forward Primer
  Primer
tggaatgaacataaatcctc

SEQ ID NO: 17490 - DNA, 20 bp, Artificial sequence  Forward Primer
  Primer
aacctattctgaggggactt

SEQ ID NO: 17491 - DNA, 23 bp, Artificial sequence  Forward Primer
  Primer
gaaattttgaaaaggaaaagagt

SEQ ID NO: 17492 - DNA, 20 bp, Artificial sequence  Forward Primer
  Primer
tttcatttccaaccctcagt

SEQ ID NO: 17493 - DNA, 27 bp, Artificial sequence  Forward Primer
  Primer
attgaaacctctaaggaaatgttaatt

SEQ ID NO: 17494 - DNA, 26 bp, Artificial sequence  Forward Primer
  Primer
gttatgacatcagtttatttgagtgc

SEQ ID NO: 17495 - DNA, 20 bp, Artificial sequence  Forward Primer
  Primer
acggatcgagatctggtatt

SEQ ID NO: 17496 - DNA, 28 bp, Artificial sequence  Forward Primer
  Primer
caagcatcaaatttatttaatatctcag

SEQ ID NO: 17497 - DNA, 20 bp, Artificial sequence  Forward Primer
  Primer
gctgtgtgagaagtccattt

SEQ ID NO: 17498 - DNA, 23 bp, Artificial sequence  Forward Primer
  Primer
atgctgttgttcctaaattgttt

SEQ ID NO: 17499 - DNA, 30 bp, Artificial sequence  Forward Primer
  Primer
taagaaaatacatagggttacttgattaga

SEQ ID NO: 17500 - DNA, 20 bp, Artificial sequence  Forward Primer
  Primer
atgaaattttttcccgttat

SEQ ID NO: 17501 - DNA, 23 bp, Artificial sequence  Forward Primer
  Primer
aattgaaaaaagcataatgaggg

SEQ ID NO: 17502 - DNA, 28 bp, Artificial sequence  Forward Primer
  Primer
aaccacttttagaagtcaaaaataaaac

SEQ ID NO: 17503 - DNA, 24 bp, Artificial sequence  Forward Primer
  Primer
ccaatcacagtgcttagattttaa

SEQ ID NO: 17504 - DNA, 28 bp, Artificial sequence  Forward Primer
  Primer
ttatgttatgatgtattcctgttttttg

SEQ ID NO: 17505 - DNA, 20 bp, Artificial sequence  Forward Primer
  Primer
aaccacctcaatcataccat

SEQ ID NO: 17506 - DNA, 18 bp, Artificial sequence  Forward Primer
  Primer
tcccttggaacccactca

SEQ ID NO: 17507 - DNA, 24 bp, Artificial sequence  Forward Primer
  Primer
acaaaataaaaatccagacttctt

SEQ ID NO: 17508 - DNA, 22 bp, Artificial sequence  Forward Primer
  Primer
acacttttgttttttgagaagt

SEQ ID NO: 17509 - DNA, 19 bp, Artificial sequence  Forward Primer
  Primer
tgaggccagtgacctgtta

SEQ ID NO: 17510 - DNA, 27 bp, Artificial sequence  Forward Primer
  Primer
ttttcattgttcttctatttgttatgg

SEQ ID NO: 17511 - DNA, 23 bp, Artificial sequence  Forward Primer
  Primer
acgtagctacccaagaagacatc

SEQ ID NO: 17512 - DNA, 19 bp, Artificial sequence  Forward Primer
  Primer
aggtagagcatgcagaatg

SEQ ID NO: 17513 - DNA, 23 bp, Artificial sequence  Forward Primer
  Primer
tgatacttccactttaggctttt

SEQ ID NO: 17514 - DNA, 21 bp, Artificial sequence  Forward Primer
  Primer
aaatggaatttgcttgaggaa

SEQ ID NO: 17515 - DNA, 25 bp, Artificial sequence  Forward Primer
  Primer
tcaaatctctctgttcttctgtttc

SEQ ID NO: 17516 - DNA, 22 bp, Artificial sequence  Forward Primer
  Primer
gaagcgtttgttattttcatcc

SEQ ID NO: 17517 - DNA, 23 bp, Artificial sequence  Forward Primer
  Primer
aggccaactaaaagaaactgatt

SEQ ID NO: 17518 - DNA, 25 bp, Artificial sequence  Forward Primer
  Primer
taaataacaagctagacagctggtg

SEQ ID NO: 17519 - DNA, 21 bp, Artificial sequence  Forward Primer
  Primer
atctggaaagtgggattatgg

SEQ ID NO: 17520 - DNA, 20 bp, Artificial sequence  Forward Primer
  Primer
tttttcttggcagatggatg

SEQ ID NO: 17521 - DNA, 18 bp, Artificial sequence  Forward Primer
  Primer
agcttcctgccacgttct

SEQ ID NO: 17522 - DNA, 23 bp, Artificial sequence  Forward Primer
  Primer
aaatgtttccacttttcgttttt

SEQ ID NO: 17523 - DNA, 20 bp, Artificial sequence  Forward Primer
  Primer
tgtgattcttcaacaggtgc

SEQ ID NO: 17524 - DNA, 27 bp, Artificial sequence  Forward Primer
  Primer
tatttcttaccttgttcgtacattttc

SEQ ID NO: 17525 - DNA, 20 bp, Artificial sequence  Forward Primer
  Primer
atagtgactctgsgttcctg

SEQ ID NO: 17526 - DNA, 30 bp, Artificial sequence  Forward Primer
  Primer
gtatgtatcacacttcaataaaaatttacc

SEQ ID NO: 17527 - DNA, 24 bp, Artificial sequence  Forward Primer
  Primer
ttgaattttctagaaggacagaaa

SEQ ID NO: 17528 - DNA, 22 bp, Artificial sequence  Forward Primer
  Primer
atctgctaaagaccaccaagaa

SEQ ID NO: 17529 - DNA, 21 bp, Artificial sequence  Forward Primer
  Primer
tattgtgaaagctgcttcagg

SEQ ID NO: 17530 - DNA, 26 bp, Artificial sequence  Forward Primer
  Primer
aaatttatttcctgtaattacgtggt

SEQ ID NO: 17531 - DNA, 20 bp, Artificial sequence  Forward Primer
  Primer
attcccattactcagcaccc

SEQ ID NO: 17532 - DNA, 20 bp, Artificial sequence  Forward Primer
  Primer
tatactggtggcctgaacct

SEQ ID NO: 17533 - DNA, 24 bp, Artificial sequence  Forward Primer
  Primer
ggtaatttgttggtgattcttttg

SEQ ID NO: 17534 - DNA, 28 bp, Artificial sequence  Forward Primer
  Primer
ataaattgaatcagctatatggatacat

SEQ ID NO: 17535 - DNA, 25 bp, Artificial sequence  Forward Primer
  Primer
attttcaaaagttctattctccctc

SEQ ID NO: 17536 - DNA, 20 bp, Artificial sequence  Forward Primer
  Primer
tctggrgcaatttctcagag

SEQ ID NO: 17537 - DNA, 28 bp, Artificial sequence  Forward Primer
  Primer
aactaactacggataactacgttagctt

SEQ ID NO: 17538 - DNA, 28 bp, Artificial sequence  Forward Primer
  Primer
taataaaaattcatctcaatcaagacac

SEQ ID NO: 17539 - DNA, 27 bp, Artificial sequence  Forward Primer
  Primer
aattatgtgtataagaaggatgaggag

SEQ ID NO: 17540 - DNA, 19 bp, Artificial sequence  Forward Primer
  Primer
tcacaccagagaggtgaaa

SEQ ID NO: 17541 - DNA, 19 bp, Artificial sequence  Forward Primer
  Primer
acgacactactgatgagcc

SEQ ID NO: 17542 - DNA, 22 bp, Artificial sequence  Forward Primer
  Primer
taagactaaccggctasagcaa

SEQ ID NO: 17543 - DNA, 24 bp, Artificial sequence  Forward Primer
  Primer
aaaagttaatcggcttaaagtgtg

SEQ ID NO: 17544 - DNA, 20 bp, Artificial sequence  Forward Primer
  Primer
gccctactaccagattcaac

SEQ ID NO: 17545 - DNA, 28 bp, Artificial sequence  Forward Primer
  Primer
agttaattctttatacagacctttgtcg

SEQ ID NO: 17546 - DNA, 19 bp, Artificial sequence  Forward Primer
  Primer
agaccagtttgggagaaaa

SEQ ID NO: 17547 - DNA, 24 bp, Artificial sequence  Forward Primer
  Primer
accatcctatatccaggtcttctt

SEQ ID NO: 17548 - DNA, 23 bp, Artificial sequence  Forward Primer
  Primer
ttcaacaaaaacaagttcacatg

SEQ ID NO: 17549 - DNA, 20 bp, Artificial sequence  Forward Primer
  Primer
gctgaatgaggactgaagcc

SEQ ID NO: 17550 - DNA, 22 bp, Artificial sequence  Forward Primer
  Primer
ctgcattaggagctcagagtct

SEQ ID NO: 17551 - DNA, 22 bp, Artificial sequence  Forward Primer
  Primer
aaacagaactgttttcaagacc

SEQ ID NO: 17552 - DNA, 22 bp, Artificial sequence  Forward Primer
  Primer
atgattgtctctcaccttacca

SEQ ID NO: 17553 - DNA, 25 bp, Artificial sequence  Forward Primer
  Primer
aattctgtagagcaattatccttca

SEQ ID NO: 17554 - DNA, 22 bp, Artificial sequence  Forward Primer
  Primer
taaatgggatgatgagttcaac

SEQ ID NO: 17555 - DNA, 25 bp, Artificial sequence  Forward Primer
  Primer
tttcctgactctcttatatcagttt

SEQ ID NO: 17556 - DNA, 25 bp, Artificial sequence  Forward Primer
  Primer
ataaaatgtgactgtacacatgcac

SEQ ID NO: 17557 - DNA, 21 bp, Artificial sequence  Forward Primer
  Primer
aaacagaagggagacgtttca

SEQ ID NO: 17558 - DNA, 24 bp, Artificial sequence  Forward Primer
  Primer
agagactctgattttctacacact

SEQ ID NO: 17559 - DNA, 21 bp, Artificial sequence  Forward Primer
  Primer
ataatggttaccaggtttagc

SEQ ID NO: 17560 - DNA, 25 bp, Artificial sequence  Forward Primer
  Primer
aacaaacttatggttgctaaaagag

SEQ ID NO: 17561 - DNA, 29 bp, Artificial sequence  Forward Primer
  Primer
taagttctaatgtttaaggttagatagag

SEQ ID NO: 17562 - DNA, 20 bp, Artificial sequence  Forward Primer
  Primer
atcgcagttccagtttcttt

SEQ ID NO: 17563 - DNA, 23 bp, Artificial sequence  Forward Primer
  Primer
aaaagcattttacagatttttcc

SEQ ID NO: 17564 - DNA, 30 bp, Artificial sequence  Forward Primer
  Primer
atagtaagtattttagttactcttctacct

SEQ ID NO: 17565 - DNA, 29 bp, Artificial sequence  Forward Primer
  Primer
aaacctactaagtttataaacagtttcct

SEQ ID NO: 17566 - DNA, 22 bp, Artificial sequence  Forward Primer
  Primer
aaaagtatgcctcctgactaca

SEQ ID NO: 17567 - DNA, 28 bp, Artificial sequence  Forward Primer
  Primer
attattatttaatattcaccaagcaacc

SEQ ID NO: 17568 - DNA, 18 bp, Artificial sequence  Forward Primer
  Primer
aaaacaggctgactgggg

SEQ ID NO: 17569 - DNA, 19 bp, Artificial sequence  Forward Primer
  Primer
aacagacccctcagcaaag

SEQ ID NO: 17570 - DNA, 22 bp, Artificial sequence  Forward Primer
  Primer
tgcagctaagcagtaaagatga

SEQ ID NO: 17571 - DNA, 19 bp, Artificial sequence  Forward Primer
  Primer
atttataaacaggccccca

SEQ ID NO: 17572 - DNA, 22 bp, Artificial sequence  Forward Primer
  Primer
aaatgtgggcagtaactgtttc

SEQ ID NO: 17573 - DNA, 21 bp, Artificial sequence  Forward Primer
  Primer
ttttgtagttccacgccataa

SEQ ID NO: 17574 - DNA, 21 bp, Artificial sequence  Forward Primer
  Primer
aaaaagaaaaggcaggttgaa

SEQ ID NO: 17575 - DNA, 24 bp, Artificial sequence  Forward Primer
  Primer
tcaaaataaagtgagaatgtaaag

SEQ ID NO: 17576 - DNA, 27 bp, Artificial sequence  Forward Primer
  Primer
tatctacccaaagaaaaaaatgagtaa

SEQ ID NO: 17577 - DNA, 30 bp, Artificial sequence  Forward Primer
  Primer
tttaacacctattacttcaaaatacactaa

SEQ ID NO: 17578 - DNA, 30 bp, Artificial sequence  Forward Primer
  Primer
tctgtacagtatatrcttgtagcttattta

SEQ ID NO: 17579 - DNA, 23 bp, Artificial sequence  Forward Primer
  Primer
tagataacactgaaactcagcag

SEQ ID NO: 17580 - DNA, 20 bp, Artificial sequence  Forward Primer
  Primer
agcatggaatcaataaatgt

SEQ ID NO: 17581 - DNA, 27 bp, Artificial sequence  Forward Primer
  Primer
cagtagtttaactatacagactgcttt

SEQ ID NO: 17582 - DNA, 19 bp, Artificial sequence  Forward Primer
  Primer
tggctggggacttaagatc

SEQ ID NO: 17583 - DNA, 23 bp, Artificial sequence  Forward Primer
  Primer
taaatgcttaatscaagtctcca

SEQ ID NO: 17584 - DNA, 29 bp, Artificial sequence  Forward Primer
  Primer
atcttaaaccagttaagtatcaaaggtaa

SEQ ID NO: 17585 - DNA, 29 bp, Artificial sequence  Forward Primer
  Primer
ttaccaacatatacaagtgtaagtttcat

SEQ ID NO: 17586 - DNA, 27 bp, Artificial sequence  Forward Primer
  Primer
tttctctatcctacaatgacattaaaa

SEQ ID NO: 17587 - DNA, 22 bp, Artificial sequence  Forward Primer
  Primer
atttcacagcctcttgatcaga

SEQ ID NO: 17588 - DNA, 26 bp, Artificial sequence  Forward Primer
  Primer
tattttctcyagattcttagcacctt

SEQ ID NO: 17589 - DNA, 20 bp, Artificial sequence  Forward Primer
  Primer
aaaggaatgatttcagggag

SEQ ID NO: 17590 - DNA, 19 bp, Artificial sequence  Forward Primer
  Primer
tgaccacctgaagggaaat

SEQ ID NO: 17591 - DNA, 20 bp, Artificial sequence  Forward Primer
  Primer
tgaatctgggaaggtggtta

SEQ ID NO: 17592 - DNA, 22 bp, Artificial sequence  Forward Primer
  Primer
aaaacagatacagtgyggatgc

SEQ ID NO: 17593 - DNA, 27 bp, Artificial sequence  Forward Primer
  Primer
cccttactttgattgtatttttcttta

SEQ ID NO: 17594 - DNA, 21 bp, Artificial sequence  Forward Primer
  Primer
acaggctggtgttcagtaaac

SEQ ID NO: 17595 - DNA, 18 bp, Artificial sequence  Forward Primer
  Primer
atcccctccagcctccta

SEQ ID NO: 17596 - DNA, 30 bp, Artificial sequence  Forward Primer
  Primer
aaataatcactgctttatgtaatcaagtac

SEQ ID NO: 17597 - DNA, 24 bp, Artificial sequence  Forward Primer
  Primer
tgttaatttcaggcttaagaaaaa

SEQ ID NO: 17598 - DNA, 19 bp, Artificial sequence  Forward Primer
  Primer
aactgctstcctctgtgtc

SEQ ID NO: 17599 - DNA, 26 bp, Artificial sequence  Forward Primer
  Primer
ctgtttcttatttcagttctaaaaga

SEQ ID NO: 17600 - DNA, 23 bp, Artificial sequence  Forward Primer
  Primer
aatataagcagatggctgtgatg

SEQ ID NO: 17601 - DNA, 23 bp, Artificial sequence  Forward Primer
  Primer
attttatacgacttccccatcat

SEQ ID NO: 17602 - DNA, 28 bp, Artificial sequence  Forward Primer
  Primer
gtttaaacatttttctcctcttagaaaa

SEQ ID NO: 17603 - DNA, 22 bp, Artificial sequence  Forward Primer
  Primer
ttgattaagtttcattgcatgc

SEQ ID NO: 17604 - DNA, 26 bp, Artificial sequence  Forward Primer
  Primer
atttaataaaccaactctgtgatgtg

SEQ ID NO: 17605 - DNA, 24 bp, Artificial sequence  Forward Primer
  Primer
ttataaaacctggtctcaaggtct

SEQ ID NO: 17606 - DNA, 25 bp, Artificial sequence  Forward Primer
  Primer
aagccttatctcrtaggtatttaaa

SEQ ID NO: 17607 - DNA, 30 bp, Artificial sequence  Forward Primer
  Primer
agtatgtataaaatatagctattgcacaga

SEQ ID NO: 17608 - DNA, 21 bp, Artificial sequence  Forward Primer
  Primer
aaatagtgtggagagtggggt

SEQ ID NO: 17609 - DNA, 25 bp, Artificial sequence  Forward Primer
  Primer
tgtcatattcaaagcatcttaattg

SEQ ID NO: 17610 - DNA, 24 bp, Artificial sequence  Forward Primer
  Primer
ttcaccagagcatattaagatcat

SEQ ID NO: 17611 - DNA, 18 bp, Artificial sequence  Forward Primer
  Primer
acggatgaaggcaggtct

SEQ ID NO: 17612 - DNA, 20 bp, Artificial sequence  Forward Primer
  Primer
aaagtggagcaaagagcagg

SEQ ID NO: 17613 - DNA, 30 bp, Artificial sequence  Forward Primer
  Primer
aagagttagttctagttagcattctttttc

SEQ ID NO: 17614 - DNA, 25 bp, Artificial sequence  Forward Primer
  Primer
tattaaagagawagagagagcagaa

SEQ ID NO: 17615 - DNA, 23 bp, Artificial sequence  Forward Primer
  Primer
ataattcccaccatgtaacatca

SEQ ID NO: 17616 - DNA, 21 bp, Artificial sequence  Forward Primer
  Primer
tttctgagaggcaggaatagg

SEQ ID NO: 17617 - DNA, 22 bp, Artificial sequence  Forward Primer
  Primer
acttagctccatgaaaactgtg

SEQ ID NO: 17618 - DNA, 20 bp, Artificial sequence  Forward Primer
  Primer
aaaaacacatcttgcccaga

SEQ ID NO: 17619 - DNA, 18 bp, Artificial sequence  Forward Primer
  Primer
tttggacgtgctactgcc

SEQ ID NO: 17620 - DNA, 20 bp, Artificial sequence  Forward Primer
  Primer
aaggcacatttccttaagca

SEQ ID NO: 17621 - DNA, 25 bp, Artificial sequence  Forward Primer
  Primer
aagtatgactcagaatggactgaga

SEQ ID NO: 17622 - DNA, 18 bp, Artificial sequence  Forward Primer
  Primer
aagtgcccactggatgcc

SEQ ID NO: 17623 - DNA, 20 bp, Artificial sequence  Forward Primer
  Primer
tctcctggttttgaccagtc

SEQ ID NO: 17624 - DNA, 27 bp, Artificial sequence  Forward Primer
  Primer
aacatatttacattaaatgtgaggctc

SEQ ID NO: 17625 - DNA, 18 bp, Artificial sequence  Forward Primer
  Primer
atgcctcckacattggca

SEQ ID NO: 17626 - DNA, 18 bp, Artificial sequence  Forward Primer
  Primer
taactttgccccagggac

SEQ ID NO: 17627 - DNA, 23 bp, Artificial sequence  Forward Primer
  Primer
atacttccactttaggcttttgc

SEQ ID NO: 17628 - DNA, 19 bp, Artificial sequence  Forward Primer
  Primer
catgagatccatgagacct

SEQ ID NO: 17629 - DNA, 22 bp, Artificial sequence  Forward Primer
  Primer
tggaaggatagagagaagcaaa

SEQ ID NO: 17630 - DNA, 19 bp, Artificial sequence  Forward Primer
  Primer
agaggagtcagcagaagcg

SEQ ID NO: 17631 - DNA, 22 bp, Artificial sequence  Forward Primer
  Primer
gaaataaaccactttgtcccct

SEQ ID NO: 17632 - DNA, 23 bp, Artificial sequence  Forward Primer
  Primer
ttcatgatcattgaatcaaattg

SEQ ID NO: 17633 - DNA, 20 bp, Artificial sequence  Forward Primer
  Primer
tggttaatggggaacgttta

SEQ ID NO: 17634 - DNA, 20 bp, Artificial sequence  Forward Primer
  Primer
cgtaccacatgatgctgaca

SEQ ID NO: 17635 - DNA, 23 bp, Artificial sequence  Forward Primer
  Primer
tcagtttggttcgttattagact

SEQ ID NO: 17636 - DNA, 29 bp, Artificial sequence  Forward Primer
  Primer
tatagtcagtcaacaagttaagcactaag

SEQ ID NO: 17637 - DNA, 24 bp, Artificial sequence  Forward Primer
  Primer
aatacaaccctgattcatgctaat

SEQ ID NO: 17638 - DNA, 19 bp, Artificial sequence  Forward Primer
  Primer
tgaatgtggatcaatggca

SEQ ID NO: 17639 - DNA, 18 bp, Artificial sequence  Forward Primer
  Primer
aaccaaccgtccaggggc

SEQ ID NO: 17640 - DNA, 25 bp, Artificial sequence  Forward Primer
  Primer
aattatttgtgggtattgacagatt

SEQ ID NO: 17641 - DNA, 25 bp, Artificial sequence  Forward Primer
  Primer
aattcctagtaaactttaagcctgg

SEQ ID NO: 17642 - DNA, 23 bp, Artificial sequence  Forward Primer
  Primer
ataaggttttaagactgaaatgg

SEQ ID NO: 17643 - DNA, 24 bp, Artificial sequence  Forward Primer
  Primer
atttcacggatatgacagtaaaag

SEQ ID NO: 17644 - DNA, 29 bp, Artificial sequence  Forward Primer
  Primer
agtttatrtagattacctaagatgctaaa

SEQ ID NO: 17645 - DNA, 19 bp, Artificial sequence  Forward Primer
  Primer
tgagaagacccaggaaccc

SEQ ID NO: 17646 - DNA, 30 bp, Artificial sequence  Forward Primer
  Primer
ccaataatatgagaatgactaataatacta

SEQ ID NO: 17647 - DNA, 23 bp, Artificial sequence  Forward Primer
  Primer
ttaaagagctgaatcttcttggg

SEQ ID NO: 17648 - DNA, 20 bp, Artificial sequence  Forward Primer
  Primer
tcagagtgcaaacaccttcc

SEQ ID NO: 17649 - DNA, 19 bp, Artificial sequence  Forward Primer
  Primer
cagagtggagagaagcagg

SEQ ID NO: 17650 - DNA, 23 bp, Artificial sequence  Forward Primer
  Primer
cagaagaattttcagagaaacta

SEQ ID NO: 17651 - DNA, 25 bp, Artificial sequence  Forward Primer
  Primer
aatcttgaaaacactgctatgaaag

SEQ ID NO: 17652 - DNA, 20 bp, Artificial sequence  Forward Primer
  Primer
ttgttcattcatgcatccaa

SEQ ID NO: 17653 - DNA, 27 bp, Artificial sequence  Forward Primer
  Primer
ataagccacaactaattatcttaacca

SEQ ID NO: 17654 - DNA, 21 bp, Artificial sequence  Forward Primer
  Primer
aaaatcccacatcccagtaaa

SEQ ID NO: 17655 - DNA, 27 bp, Artificial sequence  Forward Primer
  Primer
attgacttaccatctcttagagttctg

SEQ ID NO: 17656 - DNA, 19 bp, Artificial sequence  Forward Primer
  Primer
atgacaccactgagctccg

SEQ ID NO: 17657 - DNA, 22 bp, Artificial sequence  Forward Primer
  Primer
aactgagatcccagaagctaca

SEQ ID NO: 17658 - DNA, 28 bp, Artificial sequence  Forward Primer
  Primer
aaaacatccagagactatttaatttagg

SEQ ID NO: 17659 - DNA, 19 bp, Artificial sequence  Forward Primer
  Primer
aagaaattcccagagggga

SEQ ID NO: 17660 - DNA, 21 bp, Artificial sequence  Forward Primer
  Primer
tttcgtttattcgctgagacc

SEQ ID NO: 17661 - DNA, 26 bp, Artificial sequence  Forward Primer
  Primer
attaaactgttccaaaagctattttg

SEQ ID NO: 17662 - DNA, 21 bp, Artificial sequence  Forward Primer
  Primer
tttgattctgcctcacaaaac

SEQ ID NO: 17663 - DNA, 21 bp, Artificial sequence  Forward Primer
  Primer
aagtttctaacagcagggcat

SEQ ID NO: 17664 - DNA, 20 bp, Artificial sequence  Forward Primer
  Primer
gagaagatagccacctacaa

SEQ ID NO: 17665 - DNA, 23 bp, Artificial sequence  Forward Primer
  Primer
tttaggtttctccaccattgtta

SEQ ID NO: 17666 - DNA, 25 bp, Artificial sequence  Forward Primer
  Primer
taaaacatgttatctcatgcactga

SEQ ID NO: 17667 - DNA, 23 bp, Artificial sequence  Forward Primer
  Primer
agattcagagttgcctcaaattt

SEQ ID NO: 17668 - DNA, 19 bp, Artificial sequence  Forward Primer
  Primer
aagctagggccttctcagc

SEQ ID NO: 17669 - DNA, 25 bp, Artificial sequence  Forward Primer
  Primer
agaattctttctgaactaatttagc

SEQ ID NO: 17670 - DNA, 25 bp, Artificial sequence  Forward Primer
  Primer
tatttttggttctggattatttgac

SEQ ID NO: 17671 - DNA, 29 bp, Artificial sequence  Forward Primer
  Primer
ttccagatcttagtaactgtaagaaagtc

SEQ ID NO: 17672 - DNA, 19 bp, Artificial sequence  Forward Primer
  Primer
atgtgcaaacacagacagg

SEQ ID NO: 17673 - DNA, 29 bp, Artificial sequence  Forward Primer
  Primer
acatatgaaagaaatacactcttaaaagg

SEQ ID NO: 17674 - DNA, 24 bp, Artificial sequence  Forward Primer
  Primer
taagtttcatcatggaaagagtca

SEQ ID NO: 17675 - DNA, 18 bp, Artificial sequence  Forward Primer
  Primer
ggagccctgtgagcaagc

SEQ ID NO: 17676 - DNA, 20 bp, Artificial sequence  Forward Primer
  Primer
atgcagaaaacaaacagctc

SEQ ID NO: 17677 - DNA, 23 bp, Artificial sequence  Forward Primer
  Primer
atctgaaattctcagaatggagc

SEQ ID NO: 17678 - DNA, 18 bp, Artificial sequence  Forward Primer
  Primer
gctctggagcgtaggacg

SEQ ID NO: 17679 - DNA, 24 bp, Artificial sequence  Forward Primer
  Primer
ttatgaagtctatgtgctcctgag

SEQ ID NO: 17680 - DNA, 21 bp, Artificial sequence  Forward Primer
  Primer
acatgtctgactccaaactgg

SEQ ID NO: 17681 - DNA, 27 bp, Artificial sequence  Forward Primer
  Primer
ctctaattaatgattttttggaacttg

SEQ ID NO: 17682 - DNA, 18 bp, Artificial sequence  Forward Primer
  Primer
ttcttgaaagcgcctgca

SEQ ID NO: 17683 - DNA, 22 bp, Artificial sequence  Forward Primer
  Primer
aacaatggamcttttgcctaac

SEQ ID NO: 17684 - DNA, 26 bp, Artificial sequence  Forward Primer
  Primer
tttaagatcttatttccaaaatcagg

SEQ ID NO: 17685 - DNA, 30 bp, Artificial sequence  Forward Primer
  Primer
atattcactattgtaaggtatacmaaacta

SEQ ID NO: 17686 - DNA, 20 bp, Artificial sequence  Forward Primer
  Primer
tacacctcaccctgtctcac

SEQ ID NO: 17687 - DNA, 21 bp, Artificial sequence  Forward Primer
  Primer
taaatgatggaaactgggatg

SEQ ID NO: 17688 - DNA, 23 bp, Artificial sequence  Forward Primer
  Primer
agtgtacacacagacctcacctg

SEQ ID NO: 17689 - DNA, 23 bp, Artificial sequence  Forward Primer
  Primer
aaacattagcctgagaaccattt

SEQ ID NO: 17690 - DNA, 20 bp, Artificial sequence  Forward Primer
  Primer
agtttcccctactttcggaa

SEQ ID NO: 17691 - DNA, 24 bp, Artificial sequence  Forward Primer
  Primer
aactgttttctcaaaaggaatctg

SEQ ID NO: 17692 - DNA, 18 bp, Artificial sequence  Forward Primer
  Primer
attgggacagaggcggcg

SEQ ID NO: 17693 - DNA, 26 bp, Artificial sequence  Forward Primer
  Primer
attatggttctccatatctttattct

SEQ ID NO: 17694 - DNA, 27 bp, Artificial sequence  Forward Primer
  Primer
attaaagctgttatccttagaggaact

SEQ ID NO: 17695 - DNA, 25 bp, Artificial sequence  Forward Primer
  Primer
attacctttgagatcagatttgcta

SEQ ID NO: 17696 - DNA, 21 bp, Artificial sequence  Forward Primer
  Primer
cgcttaatttctctgggtctt

SEQ ID NO: 17697 - DNA, 20 bp, Artificial sequence  Forward Primer
  Primer
aagtggatgaagtgttcggt

SEQ ID NO: 17698 - DNA, 28 bp, Artificial sequence  Forward Primer
  Primer
agacactgaaatgtctttttcttttatt

SEQ ID NO: 17699 - DNA, 23 bp, Artificial sequence  Forward Primer
  Primer
tcctggtgcctactcagtaaata

SEQ ID NO: 17700 - DNA, 21 bp, Artificial sequence  Forward Primer
  Primer
atcgctttgttgtacagctga

SEQ ID NO: 17701 - DNA, 18 bp, Artificial sequence  Forward Primer
  Primer
tggacgacgagctggagg

SEQ ID NO: 17702 - DNA, 27 bp, Artificial sequence  Forward Primer
  Primer
agattttaaaagtctctatggaacacc

SEQ ID NO: 17703 - DNA, 18 bp, Artificial sequence  Forward Primer
  Primer
cctttgctgcttcggaaa

SEQ ID NO: 17704 - DNA, 19 bp, Artificial sequence  Forward Primer
  Primer
ccgacacgctatttcttac

SEQ ID NO: 17705 - DNA, 26 bp, Artificial sequence  Forward Primer
  Primer
aataattttgatcaactttagcaagc

SEQ ID NO: 17706 - DNA, 22 bp, Artificial sequence  Forward Primer
  Primer
ccatctgttatgaactaccaag

SEQ ID NO: 17707 - DNA, 28 bp, Artificial sequence  Forward Primer
  Primer
ttatgcctatagtgttactgctttaatt

SEQ ID NO: 17708 - DNA, 21 bp, Artificial sequence  Forward Primer
  Primer
tcttgaatggggaagagaaga

SEQ ID NO: 17709 - DNA, 25 bp, Artificial sequence  Forward Primer
  Primer
taatcctctcactgatgtttcaatc

SEQ ID NO: 17710 - DNA, 25 bp, Artificial sequence  Forward Primer
  Primer
tttgcttcacttctcttcaattatt

SEQ ID NO: 17711 - DNA, 25 bp, Artificial sequence  Forward Primer
  Primer
attgacgtattcagggtaaagttaa

SEQ ID NO: 17712 - DNA, 21 bp, Artificial sequence  Forward Primer
  Primer
atgcatgacaaaaaagtcagg

SEQ ID NO: 17713 - DNA, 23 bp, Artificial sequence  Forward Primer
  Primer
tgtcctttcaggtttgtaaaaga

SEQ ID NO: 17714 - DNA, 24 bp, Artificial sequence  Forward Primer
  Primer
catctgatggttaatgacattctc

SEQ ID NO: 17715 - DNA, 23 bp, Artificial sequence  Forward Primer
  Primer
tttttttgatgctctcagttttc

SEQ ID NO: 17716 - DNA, 18 bp, Artificial sequence  Forward Primer
  Primer
ctgaggagtgggaacacc

SEQ ID NO: 17717 - DNA, 28 bp, Artificial sequence  Forward Primer
  Primer
taggaattatgtattatgaaaagtttcg

SEQ ID NO: 17718 - DNA, 24 bp, Artificial sequence  Forward Primer
  Primer
tgagtcaagatgaaaacagagtgt

SEQ ID NO: 17719 - DNA, 18 bp, Artificial sequence  Forward Primer
  Primer
ttaagaggggcctctgct

SEQ ID NO: 17720 - DNA, 24 bp, Artificial sequence  Forward Primer
  Primer
aagggacaactgtactagtatctc

SEQ ID NO: 17721 - DNA, 24 bp, Artificial sequence  Forward Primer
  Primer
aatatggctatttacgtctcctgt

SEQ ID NO: 17722 - DNA, 18 bp, Artificial sequence  Forward Primer
  Primer
tggtcttctctgggatcg

SEQ ID NO: 17723 - DNA, 30 bp, Artificial sequence  Forward Primer
  Primer
taaaattgctaagagagctagagataaata

SEQ ID NO: 17724 - DNA, 26 bp, Artificial sequence  Forward Primer
  Primer
tatgtttgtaacaacacaaaatgagg

SEQ ID NO: 17725 - DNA, 25 bp, Artificial sequence  Forward Primer
  Primer
ttttccctattacgtaccatgtaac

SEQ ID NO: 17726 - DNA, 23 bp, Artificial sequence  Forward Primer
  Primer
acagagaagcagcatctgataac

SEQ ID NO: 17727 - DNA, 18 bp, Artificial sequence  Forward Primer
  Primer
acgcctcacagaccacaa

SEQ ID NO: 17728 - DNA, 19 bp, Artificial sequence  Forward Primer
  Primer
ttgggggagccccggctta

SEQ ID NO: 17729 - DNA, 23 bp, Artificial sequence  Forward Primer
  Primer
aaatacaaaacctctcaccatga

SEQ ID NO: 17730 - DNA, 30 bp, Artificial sequence  Forward Primer
  Primer
ttcagatgttagtayatatcaaataagtgt

SEQ ID NO: 17731 - DNA, 23 bp, Artificial sequence  Forward Primer
  Primer
cctccattaaataatcttcatca

SEQ ID NO: 17732 - DNA, 19 bp, Artificial sequence  Forward Primer
  Primer
tggaaaatgttggagctgg

SEQ ID NO: 17733 - DNA, 19 bp, Artificial sequence  Forward Primer
  Primer
aaaatgacatggcagcctt

SEQ ID NO: 17734 - DNA, 30 bp, Artificial sequence  Forward Primer
  Primer
aattctcatttcttagtatgacaaatacag

SEQ ID NO: 17735 - DNA, 26 bp, Artificial sequence  Forward Primer
  Primer
taaaacaaacctaaatatgcctagtg

SEQ ID NO: 17736 - DNA, 20 bp, Artificial sequence  Forward Primer
  Primer
aagaacatggtgctttccat

SEQ ID NO: 17737 - DNA, 19 bp, Artificial sequence  Forward Primer
  Primer
ctgccccatgatctagaga

SEQ ID NO: 17738 - DNA, 24 bp, Artificial sequence  Forward Primer
  Primer
tgttattcatcccaaatctttttt

SEQ ID NO: 17739 - DNA, 24 bp, Artificial sequence  Forward Primer
  Primer
aagttaggtgggaaagaaaaattt

SEQ ID NO: 17740 - DNA, 26 bp, Artificial sequence  Forward Primer
  Primer
attaaatgctttctcagattttatgg

SEQ ID NO: 17741 - DNA, 21 bp, Artificial sequence  Forward Primer
  Primer
atttggcagaggatcaaaagt

SEQ ID NO: 17742 - DNA, 24 bp, Artificial sequence  Forward Primer
  Primer
aaattactctgtgtgrtcttggaa

SEQ ID NO: 17743 - DNA, 19 bp, Artificial sequence  Forward Primer
  Primer
acagggaytaggtcgtgcc

SEQ ID NO: 17744 - DNA, 19 bp, Artificial sequence  Forward Primer
  Primer
ttcaggttgctatgctatg

SEQ ID NO: 17745 - DNA, 21 bp, Artificial sequence  Forward Primer
  Primer
actggcagatctttgaggatg

SEQ ID NO: 17746 - DNA, 27 bp, Artificial sequence  Forward Primer
  Primer
ctggtaataaaatcttcattctgtttt

SEQ ID NO: 17747 - DNA, 21 bp, Artificial sequence  Forward Primer
  Primer
taggggtgagtctggagtagg

SEQ ID NO: 17748 - DNA, 18 bp, Artificial sequence  Forward Primer
  Primer
ctggcggtcaatgaggtg

SEQ ID NO: 17749 - DNA, 18 bp, Artificial sequence  Forward Primer
  Primer
acgtacgcgacgccttaa

SEQ ID NO: 17750 - DNA, 18 bp, Artificial sequence  Forward Primer
  Primer
gaacacagccttgagccc

SEQ ID NO: 17751 - DNA, 19 bp, Artificial sequence  Forward Primer
  Primer
gtcctggagtgtcagagag

SEQ ID NO: 17752 - DNA, 23 bp, Artificial sequence  Forward Primer
  Primer
aaataacagtttgagggcagagt

SEQ ID NO: 17753 - DNA, 30 bp, Artificial sequence  Forward Primer
  Primer
ttgtattgaagagttgacataaattatagc

SEQ ID NO: 17754 - DNA, 22 bp, Artificial sequence  Forward Primer
  Primer
gcaaatatgacctagagagctt

SEQ ID NO: 17755 - DNA, 27 bp, Artificial sequence  Forward Primer
  Primer
atatatccagtaatgtttatccaacca

SEQ ID NO: 17756 - DNA, 29 bp, Artificial sequence  Forward Primer
  Primer
tagtttggcttagagatatttttttaacc

SEQ ID NO: 17757 - DNA, 25 bp, Artificial sequence  Forward Primer
  Primer
tttcctactgttccttgtattgaac

SEQ ID NO: 17758 - DNA, 24 bp, Artificial sequence  Forward Primer
  Primer
tatttctttaatttgaggggaaat

SEQ ID NO: 17759 - DNA, 27 bp, Artificial sequence  Forward Primer
  Primer
ttaaactgtagacaaaacacaagaatg

SEQ ID NO: 17760 - DNA, 22 bp, Artificial sequence  Forward Primer
  Primer
ctttaactacgtccaaagattt

SEQ ID NO: 17761 - DNA, 19 bp, Artificial sequence  Forward Primer
  Primer
tgagtggacactcaccttg

SEQ ID NO: 17762 - DNA, 26 bp, Artificial sequence  Forward Primer
  Primer
tattaatcaatttttcctactcccat

SEQ ID NO: 17763 - DNA, 24 bp, Artificial sequence  Forward Primer
  Primer
tttaacaaaatgccacagactagg

SEQ ID NO: 17764 - DNA, 25 bp, Artificial sequence  Forward Primer
  Primer
atgaagagatagacatgagacaggt

SEQ ID NO: 17765 - DNA, 26 bp, Artificial sequence  Forward Primer
  Primer
aatctttataagtactagggacatct

SEQ ID NO: 17766 - DNA, 23 bp, Artificial sequence  Forward Primer
  Primer
aaaatgagtctcagagtggtgaa

SEQ ID NO: 17767 - DNA, 19 bp, Artificial sequence  Forward Primer
  Primer
caattctctctcccctcac

SEQ ID NO: 17768 - DNA, 27 bp, Artificial sequence  Forward Primer
  Primer
agaaaactgaatagcaacaaacaatat

SEQ ID NO: 17769 - DNA, 26 bp, Artificial sequence  Forward Primer
  Primer
agtggaaaatggtaagatattattac

SEQ ID NO: 17770 - DNA, 19 bp, Artificial sequence  Forward Primer
  Primer
aggttgtcaagcagaggct

SEQ ID NO: 17771 - DNA, 24 bp, Artificial sequence  Forward Primer
  Primer
taatattagccccgttttacagat

SEQ ID NO: 17772 - DNA, 27 bp, Artificial sequence  Forward Primer
  Primer
aaaaagacaaattttacacctatgtcc

SEQ ID NO: 17773 - DNA, 25 bp, Artificial sequence  Forward Primer
  Primer
atttccaagtgaaggtaggtattct

SEQ ID NO: 17774 - DNA, 23 bp, Artificial sequence  Forward Primer
  Primer
actggatacaatttcctgtaact

SEQ ID NO: 17775 - DNA, 19 bp, Artificial sequence  Forward Primer
  Primer
ttccattgtgaacgcaagt

SEQ ID NO: 17776 - DNA, 26 bp, Artificial sequence  Forward Primer
  Primer
atgaggatttgataaacctgtaattt

SEQ ID NO: 17777 - DNA, 26 bp, Artificial sequence  Forward Primer
  Primer
aatatcatttgtaaatgtgtccagtt

SEQ ID NO: 17778 - DNA, 20 bp, Artificial sequence  Forward Primer
  Primer
acgtgctcaaattaacaaat

SEQ ID NO: 17779 - DNA, 28 bp, Artificial sequence  Forward Primer
  Primer
aatggaatataaatattcagtcagaagg

SEQ ID NO: 17780 - DNA, 20 bp, Artificial sequence  Forward Primer
  Primer
ttggctacaagtagggtagg

SEQ ID NO: 17781 - DNA, 24 bp, Artificial sequence  Forward Primer
  Primer
cttcatttgataatctctaaacac

SEQ ID NO: 17782 - DNA, 21 bp, Artificial sequence  Forward Primer
  Primer
aacctttggctctcttattgc

SEQ ID NO: 17783 - DNA, 19 bp, Artificial sequence  Forward Primer
  Primer
atgccttctgcagtggtag

SEQ ID NO: 17784 - DNA, 24 bp, Artificial sequence  Forward Primer
  Primer
tgtgaatacaagtgttggaatttt

SEQ ID NO: 17785 - DNA, 22 bp, Artificial sequence  Forward Primer
  Primer
tgaattaagcaatgatgctcag

SEQ ID NO: 17786 - DNA, 23 bp, Artificial sequence  Forward Primer
  Primer
tttcackttcaccatttatgagg

SEQ ID NO: 17787 - DNA, 22 bp, Artificial sequence  Forward Primer
  Primer
tgatatgtgtacgcagttctta

SEQ ID NO: 17788 - DNA, 24 bp, Artificial sequence  Forward Primer
  Primer
tttatttttctttattgcacttgc

SEQ ID NO: 17789 - DNA, 19 bp, Artificial sequence  Forward Primer
  Primer
tgcattaaagccccttagg

SEQ ID NO: 17790 - DNA, 21 bp, Artificial sequence  Forward Primer
  Primer
aaatttctgtccccttccttt

SEQ ID NO: 17791 - DNA, 19 bp, Artificial sequence  Forward Primer
  Primer
accacaccaccctgtttta

SEQ ID NO: 17792 - DNA, 24 bp, Artificial sequence  Forward Primer
  Primer
aaaaacaataaaccaaaaaagcac

SEQ ID NO: 17793 - DNA, 25 bp, Artificial sequence  Forward Primer
  Primer
atagtgaagcaaagagagaatgaga

SEQ ID NO: 17794 - DNA, 27 bp, Artificial sequence  Forward Primer
  Primer
gggaaaaaatcagaagaataatatttg

SEQ ID NO: 17795 - DNA, 28 bp, Artificial sequence  Forward Primer
  Primer
agtgaattgagttggtatcatagtacag

SEQ ID NO: 17796 - DNA, 21 bp, Artificial sequence  Forward Primer
  Primer
aaggaagagatgtcctcttaa

SEQ ID NO: 17797 - DNA, 24 bp, Artificial sequence  Forward Primer
  Primer
aaatttgctttaatccaattcttc

SEQ ID NO: 17798 - DNA, 22 bp, Artificial sequence  Forward Primer
  Primer
aattctttctgtgctatcactg

SEQ ID NO: 17799 - DNA, 25 bp, Artificial sequence  Forward Primer
  Primer
ttacgttcaaacttagcattacagt

SEQ ID NO: 17800 - DNA, 18 bp, Artificial sequence  Forward Primer
  Primer
agcaccaggcacatagga

SEQ ID NO: 17801 - DNA, 18 bp, Artificial sequence  Forward Primer
  Primer
agggtctcgatcacgtgg

SEQ ID NO: 17802 - DNA, 27 bp, Artificial sequence  Forward Primer
  Primer
acagtgaaataaaacatatagcttaac

SEQ ID NO: 17803 - DNA, 26 bp, Artificial sequence  Forward Primer
  Primer
tattttataagtgaggaaatggtgac

SEQ ID NO: 17804 - DNA, 25 bp, Artificial sequence  Forward Primer
  Primer
cctatttaacaaacaatagggatat

SEQ ID NO: 17805 - DNA, 20 bp, Artificial sequence  Forward Primer
  Primer
acagaggaggtcaaggaatt

SEQ ID NO: 17806 - DNA, 20 bp, Artificial sequence  Forward Primer
  Primer
atcaactacccaactgtccc

SEQ ID NO: 17807 - DNA, 22 bp, Artificial sequence  Forward Primer
  Primer
aaaattggaatgagctgtgaag

SEQ ID NO: 17808 - DNA, 23 bp, Artificial sequence  Forward Primer
  Primer
ttgtttattacagcagcaacaga

SEQ ID NO: 17809 - DNA, 20 bp, Artificial sequence  Forward Primer
  Primer
taattgaaaaggattggcca

SEQ ID NO: 17810 - DNA, 18 bp, Artificial sequence  Forward Primer
  Primer
agggaattgggggcttgg

SEQ ID NO: 17811 - DNA, 20 bp, Artificial sequence  Forward Primer
  Primer
tcatgatgaggtcgatgacc

SEQ ID NO: 17812 - DNA, 22 bp, Artificial sequence  Forward Primer
  Primer
tgccaaatgctaaggataactt

SEQ ID NO: 17813 - DNA, 23 bp, Artificial sequence  Forward Primer
  Primer
tttaggtgtggctcttgttttaa

SEQ ID NO: 17814 - DNA, 25 bp, Artificial sequence  Forward Primer
  Primer
agttatatttatggtggcacattca

SEQ ID NO: 17815 - DNA, 25 bp, Artificial sequence  Forward Primer
  Primer
tcactgaaatggagtaccatactct

SEQ ID NO: 17816 - DNA, 24 bp, Artificial sequence  Forward Primer
  Primer
ttaatcactcaggcttgatgtaaa

SEQ ID NO: 17817 - DNA, 18 bp, Artificial sequence  Forward Primer
  Primer
tgagatgcaaaggcagca

SEQ ID NO: 17818 - DNA, 19 bp, Artificial sequence  Forward Primer
  Primer
tgtaagggcacagtaacgg

SEQ ID NO: 17819 - DNA, 28 bp, Artificial sequence  Forward Primer
  Primer
gttgrtattaaaaaaccaattacagatg

SEQ ID NO: 17820 - DNA, 18 bp, Artificial sequence  Forward Primer
  Primer
tgggcatagccagcctgt

SEQ ID NO: 17821 - DNA, 29 bp, Artificial sequence  Forward Primer
  Primer
aaaaagtgagacttgtcaaagtaattatc

SEQ ID NO: 17822 - DNA, 19 bp, Artificial sequence  Forward Primer
  Primer
aaacggaggcacagagagt

SEQ ID NO: 17823 - DNA, 23 bp, Artificial sequence  Forward Primer
  Primer
atacataattcattgccaaatgg

SEQ ID NO: 17824 - DNA, 21 bp, Artificial sequence  Forward Primer
  Primer
atgtgtgagatgggtctgaac

SEQ ID NO: 17825 - DNA, 27 bp, Artificial sequence  Forward Primer
  Primer
taaataacaacatgcacataaaaagtg

SEQ ID NO: 17826 - DNA, 19 bp, Artificial sequence  Forward Primer
  Primer
aaacccctggactagcacc

SEQ ID NO: 17827 - DNA, 24 bp, Artificial sequence  Forward Primer
  Primer
tttaactctggtggttggttagtt

SEQ ID NO: 17828 - DNA, 28 bp, Artificial sequence  Forward Primer
  Primer
atagacaaaatctcttttgtatctttcc

SEQ ID NO: 17829 - DNA, 25 bp, Artificial sequence  Forward Primer
  Primer
aatgagggggactgtattattagtt

SEQ ID NO: 17830 - DNA, 20 bp, Artificial sequence  Forward Primer
  Primer
acaatgcttctgtgtccctc

SEQ ID NO: 17831 - DNA, 26 bp, Artificial sequence  Forward Primer
  Primer
ttaataatgtatttctttgccactcg

SEQ ID NO: 17832 - DNA, 28 bp, Artificial sequence  Forward Primer
  Primer
attctatattggaagttaatgaaagtca

SEQ ID NO: 17833 - DNA, 22 bp, Artificial sequence  Forward Primer
  Primer
tgcaaccttgattgtgaataca

SEQ ID NO: 17834 - DNA, 26 bp, Artificial sequence  Forward Primer
  Primer
tattttatcagagataaatgtgccaa

SEQ ID NO: 17835 - DNA, 28 bp, Artificial sequence  Forward Primer
  Primer
gagatggactaaaataagtcactctctt

SEQ ID NO: 17836 - DNA, 21 bp, Artificial sequence  Forward Primer
  Primer
attttcacagaccctgacctc

SEQ ID NO: 17837 - DNA, 23 bp, Artificial sequence  Forward Primer
  Primer
aggaggctatcattatatttgcc

SEQ ID NO: 17838 - DNA, 24 bp, Artificial sequence  Forward Primer
  Primer
ttgggttatgatttcttaatttgc

SEQ ID NO: 17839 - DNA, 29 bp, Artificial sequence  Forward Primer
  Primer
tacacgataaatagaactcagatttatga

SEQ ID NO: 17840 - DNA, 30 bp, Artificial sequence  Forward Primer
  Primer
gtatttatcaggtttctatttttcagtaca

SEQ ID NO: 17841 - DNA, 23 bp, Artificial sequence  Forward Primer
  Primer
taaaaagttaaatgccttgcaga

SEQ ID NO: 17842 - DNA, 23 bp, Artificial sequence  Forward Primer
  Primer
attgtggctttcttttgtttctt

SEQ ID NO: 17843 - DNA, 20 bp, Artificial sequence  Forward Primer
  Primer
tctacaaatctcccatggca

SEQ ID NO: 17844 - DNA, 20 bp, Artificial sequence  Forward Primer
  Primer
agggttaaaaycatcgtagc

SEQ ID NO: 17845 - DNA, 22 bp, Artificial sequence  Forward Primer
  Primer
atttgtgtgtcttggaaagctg

SEQ ID NO: 17846 - DNA, 18 bp, Artificial sequence  Forward Primer
  Primer
tatggccctttggcatga

SEQ ID NO: 17847 - DNA, 22 bp, Artificial sequence  Forward Primer
  Primer
aaccacagtcatgaagaagagg

SEQ ID NO: 17848 - DNA, 27 bp, Artificial sequence  Forward Primer
  Primer
attaatttgttacaggagcataaccta

SEQ ID NO: 17849 - DNA, 22 bp, Artificial sequence  Forward Primer
  Primer
aagaactggaatctgtgttcca

SEQ ID NO: 17850 - DNA, 27 bp, Artificial sequence  Forward Primer
  Primer
aatgaaacagaaataagtcatgttttg

SEQ ID NO: 17851 - DNA, 19 bp, Artificial sequence  Forward Primer
  Primer
tgccccgatgaagataatc

SEQ ID NO: 17852 - DNA, 18 bp, Artificial sequence  Forward Primer
  Primer
tttgcaaccccattgact

SEQ ID NO: 17853 - DNA, 24 bp, Artificial sequence  Forward Primer
  Primer
ttgctatttattgatcctactgca

SEQ ID NO: 17854 - DNA, 24 bp, Artificial sequence  Forward Primer
  Primer
tttcttgagtcttccaaggtatct

SEQ ID NO: 17855 - DNA, 18 bp, Artificial sequence  Forward Primer
  Primer
atggttcctgccatccag

SEQ ID NO: 17856 - DNA, 26 bp, Artificial sequence  Forward Primer
  Primer
attctaacatgagaactaagggtagg

SEQ ID NO: 17857 - DNA, 19 bp, Artificial sequence  Forward Primer
  Primer
agtttggcaggcaaaaatt

SEQ ID NO: 17858 - DNA, 30 bp, Artificial sequence  Forward Primer
  Primer
aagtggttcattagtacatacttrgactac

SEQ ID NO: 17859 - DNA, 19 bp, Artificial sequence  Forward Primer
  Primer
gcaggaaaaaggaagtgag

SEQ ID NO: 17860 - DNA, 23 bp, Artificial sequence  Forward Primer
  Primer
tctctgaaagaaaacacacacaa

SEQ ID NO: 17861 - DNA, 18 bp, Artificial sequence  Forward Primer
  Primer
tgcagacttggcaaccat

SEQ ID NO: 17862 - DNA, 23 bp, Artificial sequence  Forward Primer
  Primer
aaccttgtagttacatttctggt

SEQ ID NO: 17863 - DNA, 18 bp, Artificial sequence  Forward Primer
  Primer
aggacgcagatgacgaaa

SEQ ID NO: 17864 - DNA, 22 bp, Artificial sequence  Forward Primer
  Primer
atcttccctgatctgatttcac

SEQ ID NO: 17865 - DNA, 21 bp, Artificial sequence  Forward Primer
  Primer
atgcaggttgtaaaacccttt

SEQ ID NO: 17866 - DNA, 21 bp, Artificial sequence  Forward Primer
  Primer
tttatcaaagaaaccctccca

SEQ ID NO: 17867 - DNA, 26 bp, Artificial sequence  Forward Primer
  Primer
aagatcatatcctaaagatgaagctg

SEQ ID NO: 17868 - DNA, 21 bp, Artificial sequence  Forward Primer
  Primer
aagttatctcccacaggcttc

SEQ ID NO: 17869 - DNA, 21 bp, Artificial sequence  Forward Primer
  Primer
aagatcaacaggatgcagagg

SEQ ID NO: 17870 - DNA, 19 bp, Artificial sequence  Forward Primer
  Primer
aagacttggggccaataac

SEQ ID NO: 17871 - DNA, 19 bp, Artificial sequence  Forward Primer
  Primer
aagcaggtctagaaggcga

SEQ ID NO: 17872 - DNA, 20 bp, Artificial sequence  Forward Primer
  Primer
ttgacactcctaagccatga

SEQ ID NO: 17873 - DNA, 23 bp, Artificial sequence  Forward Primer
  Primer
tagaagacaggtgacaaaggaaa

SEQ ID NO: 17874 - DNA, 28 bp, Artificial sequence  Forward Primer
  Primer
tgatggaaaatatacttcaaaataagag

SEQ ID NO: 17875 - DNA, 18 bp, Artificial sequence  Forward Primer
  Primer
actcctgccgtgttccca

SEQ ID NO: 17876 - DNA, 22 bp, Artificial sequence  Forward Primer
  Primer
atggaaaaggagtgagttttaa

SEQ ID NO: 17877 - DNA, 27 bp, Artificial sequence  Forward Primer
  Primer
atttatgtccttcacatacaaagaaat

SEQ ID NO: 17878 - DNA, 24 bp, Artificial sequence  Forward Primer
  Primer
attttctactcccaaattccttct

SEQ ID NO: 17879 - DNA, 27 bp, Artificial sequence  Forward Primer
  Primer
atgttaactgacctttgtagatgaatt

SEQ ID NO: 17880 - DNA, 27 bp, Artificial sequence  Forward Primer
  Primer
aaatatttagtttgacgaaatacagtc

SEQ ID NO: 17881 - DNA, 23 bp, Artificial sequence  Forward Primer
  Primer
ataatcctgtgtgaaaccagaca

SEQ ID NO: 17882 - DNA, 30 bp, Artificial sequence  Forward Primer
  Primer
aattatattcacattgtaagatctatgtag

SEQ ID NO: 17883 - DNA, 23 bp, Artificial sequence  Forward Primer
  Primer
attggatttttaaatacaagggc

SEQ ID NO: 17884 - DNA, 18 bp, Artificial sequence  Forward Primer
  Primer
aggatgcccaggtgggag

SEQ ID NO: 17885 - DNA, 20 bp, Artificial sequence  Forward Primer
  Primer
ttcttgccacggttttatca

SEQ ID NO: 17886 - DNA, 24 bp, Artificial sequence  Forward Primer
  Primer
agtttgcattagagttttactgac

SEQ ID NO: 17887 - DNA, 21 bp, Artificial sequence  Forward Primer
  Primer
taattgtgcctgcttcatagg

SEQ ID NO: 17888 - DNA, 18 bp, Artificial sequence  Forward Primer
  Primer
agggcggcttgtcttggg

SEQ ID NO: 17889 - DNA, 22 bp, Artificial sequence  Forward Primer
  Primer
accttttaatcccctaagtcta

SEQ ID NO: 17890 - DNA, 25 bp, Artificial sequence  Forward Primer
  Primer
ttaccgataaacagtgtatttcttt

SEQ ID NO: 17891 - DNA, 20 bp, Artificial sequence  Forward Primer
  Primer
tgtggtagtggcagaaaagg

SEQ ID NO: 17892 - DNA, 18 bp, Artificial sequence  Forward Primer
  Primer
gtcacgtggggtcagaaa

SEQ ID NO: 17893 - DNA, 28 bp, Artificial sequence  Forward Primer
  Primer
aagtcagtctaaaagttgattgttatga

SEQ ID NO: 17894 - DNA, 18 bp, Artificial sequence  Forward Primer
  Primer
ccccactcccttctggtt

SEQ ID NO: 17895 - DNA, 22 bp, Artificial sequence  Forward Primer
  Primer
tatttctccgggtttaagttca

SEQ ID NO: 17896 - DNA, 24 bp, Artificial sequence  Forward Primer
  Primer
aattgctttttatgaatccttttg

SEQ ID NO: 17897 - DNA, 25 bp, Artificial sequence  Forward Primer
  Primer
ttggttgactctcaaaatcatattt

SEQ ID NO: 17898 - DNA, 26 bp, Artificial sequence  Forward Primer
  Primer
taatgtcctctcagtgtgtttaaaat

SEQ ID NO: 17899 - DNA, 25 bp, Artificial sequence  Forward Primer
  Primer
atttgtaatttgttcgtctaagctg

SEQ ID NO: 17900 - DNA, 26 bp, Artificial sequence  Forward Primer
  Primer
tattaaaaaaccaattacagatgcac

SEQ ID NO: 17901 - DNA, 30 bp, Artificial sequence  Forward Primer
  Primer
atagatgatagtctaatcagatttactctt

SEQ ID NO: 17902 - DNA, 20 bp, Artificial sequence  Forward Primer
  Primer
ttcttttttggcattgcttt

SEQ ID NO: 17903 - DNA, 28 bp, Artificial sequence  Forward Primer
  Primer
tttctgttttctttctaattattgctag

SEQ ID NO: 17904 - DNA, 23 bp, Artificial sequence  Forward Primer
  Primer
gaactgcattgcattttaagtgt

SEQ ID NO: 17905 - DNA, 18 bp, Artificial sequence  Forward Primer
  Primer
ttgggcagagcaacaggc

SEQ ID NO: 17906 - DNA, 21 bp, Artificial sequence  Forward Primer
  Primer
aaaagtccagaattttagccc

SEQ ID NO: 17907 - DNA, 27 bp, Artificial sequence  Forward Primer
  Primer
tacttctgatgaaatgtctaagctctt

SEQ ID NO: 17908 - DNA, 25 bp, Artificial sequence  Forward Primer
  Primer
taacaagaaccttttttgtttttcc

SEQ ID NO: 17909 - DNA, 18 bp, Artificial sequence  Forward Primer
  Primer
tccaaacgaccttggttc

SEQ ID NO: 17910 - DNA, 24 bp, Artificial sequence  Forward Primer
  Primer
atttctgattgagattgttacaag

SEQ ID NO: 17911 - DNA, 28 bp, Artificial sequence  Forward Primer
  Primer
tttcatatagttcataaaaagcactgat

SEQ ID NO: 17912 - DNA, 26 bp, Artificial sequence  Forward Primer
  Primer
atttatttcaaaatgtactgagatgc

SEQ ID NO: 17913 - DNA, 23 bp, Artificial sequence  Forward Primer
  Primer
agaacagagcagtgagaagatcc

SEQ ID NO: 17914 - DNA, 27 bp, Artificial sequence  Forward Primer
  Primer
ttttatcttaacatggaaataaaccac

SEQ ID NO: 17915 - DNA, 25 bp, Artificial sequence  Forward Primer
  Primer
tgtgtgtgtgtkttttttaaatcta

SEQ ID NO: 17916 - DNA, 23 bp, Artificial sequence  Forward Primer
  Primer
tcattttgtttgaataaggtcca

SEQ ID NO: 17917 - DNA, 20 bp, Artificial sequence  Forward Primer
  Primer
aaatggaaatcttccacagg

SEQ ID NO: 17918 - DNA, 19 bp, Artificial sequence  Forward Primer
  Primer
agggtgacatcgctttacc

SEQ ID NO: 17919 - DNA, 21 bp, Artificial sequence  Forward Primer
  Primer
tgcagtatagcacggagatag

SEQ ID NO: 17920 - DNA, 19 bp, Artificial sequence  Forward Primer
  Primer
cagtgatacctgagaggga

SEQ ID NO: 17921 - DNA, 23 bp, Artificial sequence  Forward Primer
  Primer
ccaaatattcatatttcaacagt

SEQ ID NO: 17922 - DNA, 28 bp, Artificial sequence  Forward Primer
  Primer
tccacaagaagcttttatataatatcag

SEQ ID NO: 17923 - DNA, 21 bp, Artificial sequence  Forward Primer
  Primer
tgtgaactcaaaccactatgc

SEQ ID NO: 17924 - DNA, 20 bp, Artificial sequence  Forward Primer
  Primer
agaaaggagatggggaacat

SEQ ID NO: 17925 - DNA, 18 bp, Artificial sequence  Forward Primer
  Primer
attcatggctccgttttg

SEQ ID NO: 17926 - DNA, 20 bp, Artificial sequence  Forward Primer
  Primer
agaaggtcaaagagtcatgg

SEQ ID NO: 17927 - DNA, 23 bp, Artificial sequence  Forward Primer
  Primer
attgcctctctcattttgtgtac

SEQ ID NO: 17928 - DNA, 24 bp, Artificial sequence  Forward Primer
  Primer
tggttgacctctaagactacttcc

SEQ ID NO: 17929 - DNA, 25 bp, Artificial sequence  Forward Primer
  Primer
atgcaacttttttctaaaaactagg

SEQ ID NO: 17930 - DNA, 23 bp, Artificial sequence  Forward Primer
  Primer
agtaaatactaaagagacgcctg

SEQ ID NO: 17931 - DNA, 24 bp, Artificial sequence  Forward Primer
  Primer
tttagtgtaaatcctgacagtgga

SEQ ID NO: 17932 - DNA, 20 bp, Artificial sequence  Forward Primer
  Primer
ttgtttggctggtatcatta

SEQ ID NO: 17933 - DNA, 18 bp, Artificial sequence  Forward Primer
  Primer
taccatgcagcttgcagg

SEQ ID NO: 17934 - DNA, 21 bp, Artificial sequence  Forward Primer
  Primer
tttgtgcttaggtatgcacgt

SEQ ID NO: 17935 - DNA, 19 bp, Artificial sequence  Forward Primer
  Primer
gtgggggtggtctccgcat

SEQ ID NO: 17936 - DNA, 28 bp, Artificial sequence  Forward Primer
  Primer
acatatagaaggtgaagaaaggtttaaa

SEQ ID NO: 17937 - DNA, 21 bp, Artificial sequence  Forward Primer
  Primer
gcttattatgtgctaaatcca

SEQ ID NO: 17938 - DNA, 29 bp, Artificial sequence  Forward Primer
  Primer
tttcatcaatattacttactgtgaacttg

SEQ ID NO: 17939 - DNA, 18 bp, Artificial sequence  Forward Primer
  Primer
aagcttgccctctggttt

SEQ ID NO: 17940 - DNA, 22 bp, Artificial sequence  Forward Primer
  Primer
attgggatgtttttagtggaga

SEQ ID NO: 17941 - DNA, 27 bp, Artificial sequence  Forward Primer
  Primer
tttaatcttcctaaaacatatccctac

SEQ ID NO: 17942 - DNA, 23 bp, Artificial sequence  Forward Primer
  Primer
tgagcctctatcattttctttaa

SEQ ID NO: 17943 - DNA, 26 bp, Artificial sequence  Forward Primer
  Primer
tttccaataataataccttgaaaagc

SEQ ID NO: 17944 - DNA, 20 bp, Artificial sequence  Forward Primer
  Primer
tagcactcatgcagagctcc

SEQ ID NO: 17945 - DNA, 18 bp, Artificial sequence  Forward Primer
  Primer
tcacttgggactccatgg

SEQ ID NO: 17946 - DNA, 25 bp, Artificial sequence  Forward Primer
  Primer
atatggcagaactctgtaaatttcc

SEQ ID NO: 17947 - DNA, 30 bp, Artificial sequence  Forward Primer
  Primer
atgtgatacacagttaatgytaactataaa

SEQ ID NO: 17948 - DNA, 21 bp, Artificial sequence  Forward Primer
  Primer
aaaaactctagagccactgaa

SEQ ID NO: 17949 - DNA, 20 bp, Artificial sequence  Forward Primer
  Primer
attggcacagacctctaaag

SEQ ID NO: 17950 - DNA, 22 bp, Artificial sequence  Forward Primer
  Primer
tacatgactaaccaaggagtct

SEQ ID NO: 17951 - DNA, 20 bp, Artificial sequence  Forward Primer
  Primer
tccctttaccttcagaagcc

SEQ ID NO: 17952 - DNA, 18 bp, Artificial sequence  Forward Primer
  Primer
tttgctggtggtccaatg

SEQ ID NO: 17953 - DNA, 22 bp, Artificial sequence  Forward Primer
  Primer
taaaaaatgttgagcacgttca

SEQ ID NO: 17954 - DNA, 28 bp, Artificial sequence  Forward Primer
  Primer
ataaagtagtgtcacttataatgccttg

SEQ ID NO: 17955 - DNA, 23 bp, Artificial sequence  Forward Primer
  Primer
attggttttcttaacacacagca

SEQ ID NO: 17956 - DNA, 25 bp, Artificial sequence  Forward Primer
  Primer
taataaaaacacgagagctttatgg

SEQ ID NO: 17957 - DNA, 23 bp, Artificial sequence  Forward Primer
  Primer
attcagtgattggtgtccttatg

SEQ ID NO: 17958 - DNA, 23 bp, Artificial sequence  Forward Primer
  Primer
atatgacatgaggtaagtgttgg

SEQ ID NO: 17959 - DNA, 18 bp, Artificial sequence  Forward Primer
  Primer
agctaaatgtcgggggag

SEQ ID NO: 17960 - DNA, 20 bp, Artificial sequence  Forward Primer
  Primer
aaacatccagtcctctgtgg

SEQ ID NO: 17961 - DNA, 18 bp, Artificial sequence  Forward Primer
  Primer
taatgagccccgctgttt

SEQ ID NO: 17962 - DNA, 27 bp, Artificial sequence  Forward Primer
  Primer
aaatattttagagaagaaaggtctggt

SEQ ID NO: 17963 - DNA, 24 bp, Artificial sequence  Forward Primer
  Primer
taaattatagcaagggtccacatt

SEQ ID NO: 17964 - DNA, 22 bp, Artificial sequence  Forward Primer
  Primer
tggttatcatcacatactcccc

SEQ ID NO: 17965 - DNA, 27 bp, Artificial sequence  Forward Primer
  Primer
aacatagtttcactgtgaatagttcaa

SEQ ID NO: 17966 - DNA, 25 bp, Artificial sequence  Forward Primer
  Primer
attggatggactaagtacagtgaac

SEQ ID NO: 17967 - DNA, 23 bp, Artificial sequence  Forward Primer
  Primer
aggaatggaaaacaggagtaaga

SEQ ID NO: 17968 - DNA, 20 bp, Artificial sequence  Forward Primer
  Primer
atgagaggaacaggcagagc

SEQ ID NO: 17969 - DNA, 28 bp, Artificial sequence  Forward Primer
  Primer
aactgaataacattttcactttacaaca

SEQ ID NO: 17970 - DNA, 19 bp, Artificial sequence  Forward Primer
  Primer
atgcttgggaattgacacc

SEQ ID NO: 17971 - DNA, 20 bp, Artificial sequence  Forward Primer
  Primer
gagagggagtagatggtggg

SEQ ID NO: 17972 - DNA, 25 bp, Artificial sequence  Forward Primer
  Primer
tgaaaaggataaagataactggaca

SEQ ID NO: 17973 - DNA, 26 bp, Artificial sequence  Forward Primer
  Primer
tactgatttcttaattatgccagtgt

SEQ ID NO: 17974 - DNA, 30 bp, Artificial sequence  Forward Primer
  Primer
tttaaatgaagcttagtaagtaatcctaca

SEQ ID NO: 17975 - DNA, 28 bp, Artificial sequence  Forward Primer
  Primer
tttaatcasaactcaactcttactcaac

SEQ ID NO: 17976 - DNA, 28 bp, Artificial sequence  Forward Primer
  Primer
taaatgtctgataatgattttaaacagc

SEQ ID NO: 17977 - DNA, 23 bp, Artificial sequence  Forward Primer
  Primer
aggctaaaagaacaaaaccaatt

SEQ ID NO: 17978 - DNA, 26 bp, Artificial sequence  Forward Primer
  Primer
ctgtttttaattgtgtttttttctcc

SEQ ID NO: 17979 - DNA, 20 bp, Artificial sequence  Forward Primer
  Primer
aactaagtctgagcgccaca

SEQ ID NO: 17980 - DNA, 19 bp, Artificial sequence  Forward Primer
  Primer
tcagatgcgtcacttcgtt

SEQ ID NO: 17981 - DNA, 28 bp, Artificial sequence  Forward Primer
  Primer
gagtgttttaggctttattttttaaaca

SEQ ID NO: 17982 - DNA, 21 bp, Artificial sequence  Forward Primer
  Primer
taagacagaaccaggagtggc

SEQ ID NO: 17983 - DNA, 20 bp, Artificial sequence  Forward Primer
  Primer
atgacagaggatcctggtgg

SEQ ID NO: 17984 - DNA, 21 bp, Artificial sequence  Forward Primer
  Primer
tggttttccctcactgagttt

SEQ ID NO: 17985 - DNA, 30 bp, Artificial sequence  Forward Primer
  Primer
taatrtagaaatatatctccttacattggg

SEQ ID NO: 17986 - DNA, 18 bp, Artificial sequence  Forward Primer
  Primer
actggccctcaggtgacc

SEQ ID NO: 17987 - DNA, 19 bp, Artificial sequence  Forward Primer
  Primer
tggaagtggtttcaggagc

SEQ ID NO: 17988 - DNA, 21 bp, Artificial sequence  Forward Primer
  Primer
tttctttaggttgctgctcct

SEQ ID NO: 17989 - DNA, 27 bp, Artificial sequence  Forward Primer
  Primer
acagtgaaataaaacatatagcttaac

SEQ ID NO: 17990 - DNA, 18 bp, Artificial sequence  Forward Primer
  Primer
tcacacctgagccctggg

SEQ ID NO: 17991 - DNA, 19 bp, Artificial sequence  Forward Primer
  Primer
tacggcaagagctgattga

SEQ ID NO: 17992 - DNA, 18 bp, Artificial sequence  Forward Primer
  Primer
agggattgggattggatg

SEQ ID NO: 17993 - DNA, 26 bp, Artificial sequence  Forward Primer
  Primer
aaagtaaaagtaaaacttgacactgc

SEQ ID NO: 17994 - DNA, 27 bp, Artificial sequence  Forward Primer
  Primer
atttataagaaggaagcataaaggaag

SEQ ID NO: 17995 - DNA, 22 bp, Artificial sequence  Forward Primer
  Primer
gttggcaaatgatagttgatgc

SEQ ID NO: 17996 - DNA, 22 bp, Artificial sequence  Forward Primer
  Primer
tttggtcaggagaaaagattcc

SEQ ID NO: 17997 - DNA, 22 bp, Artificial sequence  Forward Primer
  Primer
taggctggtaagaaagggattt

SEQ ID NO: 17998 - DNA, 30 bp, Artificial sequence  Forward Primer
  Primer
ttgtatttactgagagaaatcattgtaata

SEQ ID NO: 17999 - DNA, 19 bp, Artificial sequence  Forward Primer
  Primer
aggtcaagcaatggggata

SEQ ID NO: 18000 - DNA, 29 bp, Artificial sequence  Forward Primer
  Primer
tttaatattagaggagcaaaaactacaag

SEQ ID NO: 18001 - DNA, 22 bp, Artificial sequence  Forward Primer
  Primer
agcagagttttttgtctaggca

SEQ ID NO: 18002 - DNA, 22 bp, Artificial sequence  Forward Primer
  Primer
tgcattttatcttgtccaggta

SEQ ID NO: 18003 - DNA, 18 bp, Artificial sequence  Forward Primer
  Primer
agcctgaggatggaggtg

SEQ ID NO: 18004 - DNA, 26 bp, Artificial sequence  Forward Primer
  Primer
ttattctgtctcctcttctactttgc

SEQ ID NO: 18005 - DNA, 22 bp, Artificial sequence  Forward Primer
  Primer
actttgaggggtaagtcaagat

SEQ ID NO: 18006 - DNA, 20 bp, Artificial sequence  Forward Primer
  Primer
acaagaacccaaaacatggc

SEQ ID NO: 18007 - DNA, 20 bp, Artificial sequence  Forward Primer
  Primer
aggtgagctccttaagggaa

SEQ ID NO: 18008 - DNA, 20 bp, Artificial sequence  Forward Primer
  Primer
ttgtaatctcgttcggcatc

SEQ ID NO: 18009 - DNA, 25 bp, Artificial sequence  Forward Primer
  Primer
aaaaacactggcttttaaaataagg

SEQ ID NO: 18010 - DNA, 22 bp, Artificial sequence  Forward Primer
  Primer
atttcagtgaggccttagacaa

SEQ ID NO: 18011 - DNA, 22 bp, Artificial sequence  Forward Primer
  Primer
taagatcatgcaagtcttgtgg

SEQ ID NO: 18012 - DNA, 18 bp, Artificial sequence  Forward Primer
  Primer
aaagtgctcagccagggc

SEQ ID NO: 18013 - DNA, 26 bp, Artificial sequence  Forward Primer
  Primer
ataaggataggtgaaagaacttcaag

SEQ ID NO: 18014 - DNA, 24 bp, Artificial sequence  Forward Primer
  Primer
aggccttagtaataatgacctgtc

SEQ ID NO: 18015 - DNA, 20 bp, Artificial sequence  Forward Primer
  Primer
ttaagttacacatgggcctg

SEQ ID NO: 18016 - DNA, 29 bp, Artificial sequence  Forward Primer
  Primer
actctttatcaaactgattaaaataccag

SEQ ID NO: 18017 - DNA, 27 bp, Artificial sequence  Forward Primer
  Primer
aaatcataacattatggacttcagttg

SEQ ID NO: 18018 - DNA, 18 bp, Artificial sequence  Forward Primer
  Primer
agaaagttgggctctggc

SEQ ID NO: 18019 - DNA, 19 bp, Artificial sequence  Forward Primer
  Primer
tcacagcaccagtcaggac

SEQ ID NO: 18020 - DNA, 25 bp, Artificial sequence  Forward Primer
  Primer
accatcaacaaattttaagtaccac

SEQ ID NO: 18021 - DNA, 22 bp, Artificial sequence  Forward Primer
  Primer
aagacagcagatgtaaaaagct

SEQ ID NO: 18022 - DNA, 18 bp, Artificial sequence  Forward Primer
  Primer
agatgtgcctggaccatg

SEQ ID NO: 18023 - DNA, 28 bp, Artificial sequence  Forward Primer
  Primer
ggtttagaagatagttttacaaatgttt

SEQ ID NO: 18024 - DNA, 18 bp, Artificial sequence  Forward Primer
  Primer
gctctgtttgggggtacc

SEQ ID NO: 18025 - DNA, 18 bp, Artificial sequence  Forward Primer
  Primer
tcacccccaggacgcaga

SEQ ID NO: 18026 - DNA, 23 bp, Artificial sequence  Forward Primer
  Primer
taacgtacaggagaaaacgagat

SEQ ID NO: 18027 - DNA, 25 bp, Artificial sequence  Forward Primer
  Primer
caagtcttataatttcatcacctta

SEQ ID NO: 18028 - DNA, 20 bp, Artificial sequence  Forward Primer
  Primer
aggtgaccagaagttacacg

SEQ ID NO: 18029 - DNA, 30 bp, Artificial sequence  Forward Primer
  Primer
ctaactagattttaccatcagaatttattt

SEQ ID NO: 18030 - DNA, 27 bp, Artificial sequence  Forward Primer
  Primer
ttatcatatttcagaatgtggagtagg

SEQ ID NO: 18031 - DNA, 23 bp, Artificial sequence  Forward Primer
  Primer
tatgtacctgctcctttttgtga

SEQ ID NO: 18032 - DNA, 22 bp, Artificial sequence  Forward Primer
  Primer
ttttttggtttcttgtcctctg

SEQ ID NO: 18033 - DNA, 21 bp, Artificial sequence  Forward Primer
  Primer
atggcttcttggagttacaca

SEQ ID NO: 18034 - DNA, 26 bp, Artificial sequence  Forward Primer
  Primer
taatacctaaactcaatttacatcca

SEQ ID NO: 18035 - DNA, 19 bp, Artificial sequence  Forward Primer
  Primer
tggatttcagagagacggg

SEQ ID NO: 18036 - DNA, 19 bp, Artificial sequence  Forward Primer
  Primer
tgcatctgtgagyactcct

SEQ ID NO: 18037 - DNA, 26 bp, Artificial sequence  Forward Primer
  Primer
actccttgtcatatttctttccatac

SEQ ID NO: 18038 - DNA, 22 bp, Artificial sequence  Forward Primer
  Primer
caaactcagtaagaggtccagc

SEQ ID NO: 18039 - DNA, 28 bp, Artificial sequence  Forward Primer
  Primer
ctttatatattttggatataagttcctc

SEQ ID NO: 18040 - DNA, 19 bp, Artificial sequence  Forward Primer
  Primer
aagagtttggcagacccag

SEQ ID NO: 18041 - DNA, 27 bp, Artificial sequence  Forward Primer
  Primer
gaaagataygtcatgaaataatcacaa

SEQ ID NO: 18042 - DNA, 27 bp, Artificial sequence  Forward Primer
  Primer
tctcagttctcctatggacttaaataa

SEQ ID NO: 18043 - DNA, 24 bp, Artificial sequence  Forward Primer
  Primer
gctactactcactcaagtctcaaa

SEQ ID NO: 18044 - DNA, 22 bp, Artificial sequence  Forward Primer
  Primer
atactgtctttacaaggctggg

SEQ ID NO: 18045 - DNA, 26 bp, Artificial sequence  Forward Primer
  Primer
aatatttatgcaaatagtctcccact

SEQ ID NO: 18046 - DNA, 20 bp, Artificial sequence  Forward Primer
  Primer
aacttgatggctccagtctg

SEQ ID NO: 18047 - DNA, 24 bp, Artificial sequence  Forward Primer
  Primer
ttctagttgttgaggtttttgagg

SEQ ID NO: 18048 - DNA, 22 bp, Artificial sequence  Forward Primer
  Primer
attccaagaagaaacgagacaa

SEQ ID NO: 18049 - DNA, 18 bp, Artificial sequence  Forward Primer
  Primer
tccatgggggctctggag

SEQ ID NO: 18050 - DNA, 25 bp, Artificial sequence  Forward Primer
  Primer
ataatggatataacctgtctgcaaa

SEQ ID NO: 18051 - DNA, 19 bp, Artificial sequence  Forward Primer
  Primer
agcttgtcacctggctagc

SEQ ID NO: 18052 - DNA, 25 bp, Artificial sequence  Forward Primer
  Primer
tttacataaatgacaaacttggctt

SEQ ID NO: 18053 - DNA, 30 bp, Artificial sequence  Forward Primer
  Primer
aatattcttctagacatctcttcctatatg

SEQ ID NO: 18054 - DNA, 18 bp, Artificial sequence  Forward Primer
  Primer
gccagagcctgtgacaga

SEQ ID NO: 18055 - DNA, 19 bp, Artificial sequence  Forward Primer
  Primer
tatttccctccaaaaggca

SEQ ID NO: 18056 - DNA, 26 bp, Artificial sequence  Forward Primer
  Primer
atacaattggtcgtattagtgctcta

SEQ ID NO: 18057 - DNA, 26 bp, Artificial sequence  Forward Primer
  Primer
attttaaattgctatttcccactcta

SEQ ID NO: 18058 - DNA, 23 bp, Artificial sequence  Forward Primer
  Primer
ttaattacaggtttagggggagt

SEQ ID NO: 18059 - DNA, 24 bp, Artificial sequence  Forward Primer
  Primer
ttaagattatgcagcaaaaacaac

SEQ ID NO: 18060 - DNA, 19 bp, Artificial sequence  Forward Primer
  Primer
tttgaggacacacacagca

SEQ ID NO: 18061 - DNA, 29 bp, Artificial sequence  Forward Primer
  Primer
tggaaagagtagagctgtatattctagat

SEQ ID NO: 18062 - DNA, 30 bp, Artificial sequence  Forward Primer
  Primer
ctagatataaayaagatcactgaataaaca

SEQ ID NO: 18063 - DNA, 21 bp, Artificial sequence  Forward Primer
  Primer
tagaagcagagccttcatctc

SEQ ID NO: 18064 - DNA, 22 bp, Artificial sequence  Forward Primer
  Primer
aagtgaagcttctagtcccaca

SEQ ID NO: 18065 - DNA, 23 bp, Artificial sequence  Forward Primer
  Primer
taaatcgaggagcctgtatacct

SEQ ID NO: 18066 - DNA, 22 bp, Artificial sequence  Forward Primer
  Primer
agaagcagagtcattttccctt

SEQ ID NO: 18067 - DNA, 20 bp, Artificial sequence  Forward Primer
  Primer
tcctgccagctataaacagg

SEQ ID NO: 18068 - DNA, 28 bp, Artificial sequence  Forward Primer
  Primer
actagggaaagaaaaattatgtgaatag

SEQ ID NO: 18069 - DNA, 19 bp, Artificial sequence  Forward Primer
  Primer
tgtgcagccttgtttctga

SEQ ID NO: 18070 - DNA, 20 bp, Artificial sequence  Forward Primer
  Primer
atcagtcgtctggactaggc

SEQ ID NO: 18071 - DNA, 23 bp, Artificial sequence  Forward Primer
  Primer
taatgtcagcttaacccagaaag

SEQ ID NO: 18072 - DNA, 26 bp, Artificial sequence  Forward Primer
  Primer
tagctaatggctttccataaagtaat

SEQ ID NO: 18073 - DNA, 23 bp, Artificial sequence  Forward Primer
  Primer
aaacaagcataggagtgagacct

SEQ ID NO: 18074 - DNA, 19 bp, Artificial sequence  Forward Primer
  Primer
cccaccacagaaggaaaag

SEQ ID NO: 18075 - DNA, 26 bp, Artificial sequence  Forward Primer
  Primer
tttcacaataaatgagatagcacata

SEQ ID NO: 18076 - DNA, 30 bp, Artificial sequence  Forward Primer
  Primer
tggacaaacttagagactattacatagaat

SEQ ID NO: 18077 - DNA, 19 bp, Artificial sequence  Forward Primer
  Primer
aaaagcacaggtcctcagc

SEQ ID NO: 18078 - DNA, 24 bp, Artificial sequence  Forward Primer
  Primer
aggttttgttcttcataattaatg

SEQ ID NO: 18079 - DNA, 29 bp, Artificial sequence  Forward Primer
  Primer
agctagataccctagttctcatttatttt

SEQ ID NO: 18080 - DNA, 20 bp, Artificial sequence  Forward Primer
  Primer
aaaggatgctgccataaaag

SEQ ID NO: 18081 - DNA, 23 bp, Artificial sequence  Forward Primer
  Primer
tttcaaaacagaactaaaatctg

SEQ ID NO: 18082 - DNA, 20 bp, Artificial sequence  Forward Primer
  Primer
ttgtccattgttcaaaacag

SEQ ID NO: 18083 - DNA, 22 bp, Artificial sequence  Forward Primer
  Primer
agattcttgaactctgcatgag

SEQ ID NO: 18084 - DNA, 18 bp, Artificial sequence  Forward Primer
  Primer
aaaagtcacagcagccca

SEQ ID NO: 18085 - DNA, 27 bp, Artificial sequence  Forward Primer
  Primer
tttcaaaagtttaagagaatagcaatg

SEQ ID NO: 18086 - DNA, 23 bp, Artificial sequence  Forward Primer
  Primer
aaaataacctcttaggccaaaaa

SEQ ID NO: 18087 - DNA, 25 bp, Artificial sequence  Forward Primer
  Primer
gccatatggtgttgaatataggtaa

SEQ ID NO: 18088 - DNA, 26 bp, Artificial sequence  Forward Primer
  Primer
tgtaagaactaggaagtttcaaataa

SEQ ID NO: 18089 - DNA, 21 bp, Artificial sequence  Forward Primer
  Primer
caatcttatgcagcaataaag

SEQ ID NO: 18090 - DNA, 20 bp, Artificial sequence  Forward Primer
  Primer
gctatccgtgtagcatctct

SEQ ID NO: 18091 - DNA, 22 bp, Artificial sequence  Forward Primer
  Primer
atgaaagcctataacaccagca

SEQ ID NO: 18092 - DNA, 18 bp, Artificial sequence  Forward Primer
  Primer
catgcatgtgtgggagtg

SEQ ID NO: 18093 - DNA, 25 bp, Artificial sequence  Forward Primer
  Primer
agttttaagaacgctgttatagcaa

SEQ ID NO: 18094 - DNA, 24 bp, Artificial sequence  Forward Primer
  Primer
aattaatttccacttgaactaagc

SEQ ID NO: 18095 - DNA, 26 bp, Artificial sequence  Forward Primer
  Primer
ttttgtattttcttcctactcaggtc

SEQ ID NO: 18096 - DNA, 28 bp, Artificial sequence  Forward Primer
  Primer
acataaaccaaatatttcatacttgtga

SEQ ID NO: 18097 - DNA, 28 bp, Artificial sequence  Forward Primer
  Primer
attctgaaagtaatccctctaagaatac

SEQ ID NO: 18098 - DNA, 26 bp, Artificial sequence  Forward Primer
  Primer
atttggagagaatatctagtttaatg

SEQ ID NO: 18099 - DNA, 26 bp, Artificial sequence  Forward Primer
  Primer
acacctctctgagtataggcttagaa

SEQ ID NO: 18100 - DNA, 26 bp, Artificial sequence  Forward Primer
  Primer
ttttagttacatttacttcaagctgc

SEQ ID NO: 18101 - DNA, 21 bp, Artificial sequence  Forward Primer
  Primer
atcctggaaccattttttatt

SEQ ID NO: 18102 - DNA, 20 bp, Artificial sequence  Forward Primer
  Primer
ttaaaggcccaaggtcactt

SEQ ID NO: 18103 - DNA, 19 bp, Artificial sequence  Forward Primer
  Primer
agtctctgggtctctgctg

SEQ ID NO: 18104 - DNA, 22 bp, Artificial sequence  Forward Primer
  Primer
ataaacgaggaacttcaacgtg

SEQ ID NO: 18105 - DNA, 24 bp, Artificial sequence  Forward Primer
  Primer
aaacaaagtctgtcaacacaatct

SEQ ID NO: 18106 - DNA, 25 bp, Artificial sequence  Forward Primer
  Primer
atttggaactaagcttcctttaatc

SEQ ID NO: 18107 - DNA, 25 bp, Artificial sequence  Forward Primer
  Primer
ataatttgttcattctcctgtgaaa

SEQ ID NO: 18108 - DNA, 21 bp, Artificial sequence  Forward Primer
  Primer
atttcccctatcaagcaactg

SEQ ID NO: 18109 - DNA, 19 bp, Artificial sequence  Forward Primer
  Primer
ctcagcaccttgtattcga

SEQ ID NO: 18110 - DNA, 19 bp, Artificial sequence  Forward Primer
  Primer
tgattgccatcttctcagg

SEQ ID NO: 18111 - DNA, 26 bp, Artificial sequence  Forward Primer
  Primer
tttatgttaccttactctcaccttca

SEQ ID NO: 18112 - DNA, 18 bp, Artificial sequence  Forward Primer
  Primer
tggagcagtgactggcac

SEQ ID NO: 18113 - DNA, 24 bp, Artificial sequence  Forward Primer
  Primer
atttgaatcagttctaatgaggca

SEQ ID NO: 18114 - DNA, 19 bp, Artificial sequence  Forward Primer
  Primer
tccctcaagacatcctgct

SEQ ID NO: 18115 - DNA, 20 bp, Artificial sequence  Forward Primer
  Primer
tcaagattgctcttgtcgtg

SEQ ID NO: 18116 - DNA, 23 bp, Artificial sequence  Forward Primer
  Primer
tacctgacaagctttattgaaaa

SEQ ID NO: 18117 - DNA, 20 bp, Artificial sequence  Forward Primer
  Primer
atgagatcctcctgcctttt

SEQ ID NO: 18118 - DNA, 20 bp, Artificial sequence  Forward Primer
  Primer
ttggggggtaatttttgttt

SEQ ID NO: 18119 - DNA, 25 bp, Artificial sequence  Forward Primer
  Primer
ttttttcctcaatggtatatgtctt

SEQ ID NO: 18120 - DNA, 21 bp, Artificial sequence  Forward Primer
  Primer
aaaacctaacagccactgagg

SEQ ID NO: 18121 - DNA, 30 bp, Artificial sequence  Forward Primer
  Primer
taattcttttctgttctattagaattagat

SEQ ID NO: 18122 - DNA, 28 bp, Artificial sequence  Forward Primer
  Primer
taaatgatctagttgattgtctctactg

SEQ ID NO: 18123 - DNA, 24 bp, Artificial sequence  Forward Primer
  Primer
aagttcacgaacttctacagacag

SEQ ID NO: 18124 - DNA, 20 bp, Artificial sequence  Forward Primer
  Primer
acacrccrctcacttgattt

SEQ ID NO: 18125 - DNA, 19 bp, Artificial sequence  Forward Primer
  Primer
ctggtatttacaacagggg

SEQ ID NO: 18126 - DNA, 24 bp, Artificial sequence  Forward Primer
  Primer
ttttttggatacaactcctgtttt

SEQ ID NO: 18127 - DNA, 30 bp, Artificial sequence  Forward Primer
  Primer
tttttcattactttatcccttttagtactc

SEQ ID NO: 18128 - DNA, 25 bp, Artificial sequence  Forward Primer
  Primer
acagcgtctaatgttgttagaaaag

SEQ ID NO: 18129 - DNA, 30 bp, Artificial sequence  Forward Primer
  Primer
atttatagaatatctactatgcacaataag

SEQ ID NO: 18130 - DNA, 23 bp, Artificial sequence  Forward Primer
  Primer
attttggcaagaaaatctaacca

SEQ ID NO: 18131 - DNA, 25 bp, Artificial sequence  Forward Primer
  Primer
tgcttattagaagatgactgactag

SEQ ID NO: 18132 - DNA, 26 bp, Artificial sequence  Forward Primer
  Primer
tatctcttgacttcatttctcagagg

SEQ ID NO: 18133 - DNA, 24 bp, Artificial sequence  Forward Primer
  Primer
aattttactcaaagattattgtgg

SEQ ID NO: 18134 - DNA, 20 bp, Artificial sequence  Forward Primer
  Primer
agcagaatttctgggaatga

SEQ ID NO: 18135 - DNA, 22 bp, Artificial sequence  Forward Primer
  Primer
atctgggagaggaacagtctct

SEQ ID NO: 18136 - DNA, 30 bp, Artificial sequence  Forward Primer
  Primer
aaatgtctgtatagttttaagtaaaatggc

SEQ ID NO: 18137 - DNA, 22 bp, Artificial sequence  Forward Primer
  Primer
gaaatcctctttttaaaagtca

SEQ ID NO: 18138 - DNA, 18 bp, Artificial sequence  Forward Primer
  Primer
atgctgttcccgaggcat

SEQ ID NO: 18139 - DNA, 21 bp, Artificial sequence  Forward Primer
  Primer
cagagttcgttaggctcagag

SEQ ID NO: 18140 - DNA, 25 bp, Artificial sequence  Forward Primer
  Primer
tctggtactcttgacataaaaggtt

SEQ ID NO: 18141 - DNA, 23 bp, Artificial sequence  Forward Primer
  Primer
ttagttaactccacccaagcttt

SEQ ID NO: 18142 - DNA, 25 bp, Artificial sequence  Forward Primer
  Primer
tgaagcagatatagtgtaaacctcg

SEQ ID NO: 18143 - DNA, 18 bp, Artificial sequence  Forward Primer
  Primer
tcctctggagccctgctt

SEQ ID NO: 18144 - DNA, 21 bp, Artificial sequence  Forward Primer
  Primer
atgtgctaaagtgaatgtcac

SEQ ID NO: 18145 - DNA, 22 bp, Artificial sequence  Forward Primer
  Primer
aatctctctgaagaggcaaaag

SEQ ID NO: 18146 - DNA, 23 bp, Artificial sequence  Forward Primer
  Primer
ttaatcccatcttaccatcttgc

SEQ ID NO: 18147 - DNA, 28 bp, Artificial sequence  Forward Primer
  Primer
atctataacactgactaaatgttgtttt

SEQ ID NO: 18148 - DNA, 26 bp, Artificial sequence  Forward Primer
  Primer
tattttaaccttgaacagtctgtcag

SEQ ID NO: 18149 - DNA, 27 bp, Artificial sequence  Forward Primer
  Primer
taaagaaatagacatgggctatagaca

SEQ ID NO: 18150 - DNA, 22 bp, Artificial sequence  Forward Primer
  Primer
cctcatttaatccagacacaat

SEQ ID NO: 18151 - DNA, 23 bp, Artificial sequence  Forward Primer
  Primer
aaagttctatcctccagcatgtt

SEQ ID NO: 18152 - DNA, 23 bp, Artificial sequence  Forward Primer
  Primer
ttatgtatttgtttggctgtgtg

SEQ ID NO: 18153 - DNA, 20 bp, Artificial sequence  Forward Primer
  Primer
tttctcactccccacctctt

SEQ ID NO: 18154 - DNA, 18 bp, Artificial sequence  Forward Primer
  Primer
tgtccctgagctgggatg

SEQ ID NO: 18155 - DNA, 21 bp, Artificial sequence  Forward Primer
  Primer
tamcacgaaggttttccaaag

SEQ ID NO: 18156 - DNA, 22 bp, Artificial sequence  Forward Primer
  Primer
agccattttataagcactctga

SEQ ID NO: 18157 - DNA, 26 bp, Artificial sequence  Forward Primer
  Primer
aatcttcctgaaagttttacatgttt

SEQ ID NO: 18158 - DNA, 28 bp, Artificial sequence  Forward Primer
  Primer
gagatgttttgaaatagaactcatttaa

SEQ ID NO: 18159 - DNA, 30 bp, Artificial sequence  Forward Primer
  Primer
tttcttattagagtggttttaggatatata

SEQ ID NO: 18160 - DNA, 23 bp, Artificial sequence  Forward Primer
  Primer
ttaattgctttttgattcttgtg

SEQ ID NO: 18161 - DNA, 20 bp, Artificial sequence  Forward Primer
  Primer
tgacagggacaagttcagtc

SEQ ID NO: 18162 - DNA, 27 bp, Artificial sequence  Forward Primer
  Primer
tacaatgagactcaagtacagagctag

SEQ ID NO: 18163 - DNA, 24 bp, Artificial sequence  Forward Primer
  Primer
atgaaaactgaatgaaaaactcag

SEQ ID NO: 18164 - DNA, 20 bp, Artificial sequence  Forward Primer
  Primer
ttgctttcaatggtggatac

SEQ ID NO: 18165 - DNA, 25 bp, Artificial sequence  Forward Primer
  Primer
tgataaataaaggagataaatggca

SEQ ID NO: 18166 - DNA, 25 bp, Artificial sequence  Forward Primer
  Primer
ataaaatattcagctaaactggctg

SEQ ID NO: 18167 - DNA, 23 bp, Artificial sequence  Forward Primer
  Primer
tgccaacatttattttttcctaa

SEQ ID NO: 18168 - DNA, 22 bp, Artificial sequence  Forward Primer
  Primer
agaaagagagaacagccctctt

SEQ ID NO: 18169 - DNA, 20 bp, Artificial sequence  Forward Primer
  Primer
tttagctggcactttggagt

SEQ ID NO: 18170 - DNA, 22 bp, Artificial sequence  Forward Primer
  Primer
tatgtgtaaggagtggaggtgg

SEQ ID NO: 18171 - DNA, 22 bp, Artificial sequence  Forward Primer
  Primer
aattacccgaaccgttttaagt

SEQ ID NO: 18172 - DNA, 18 bp, Artificial sequence  Forward Primer
  Primer
ccagagatactggggcct

SEQ ID NO: 18173 - DNA, 22 bp, Artificial sequence  Forward Primer
  Primer
tttgaatactggtgcacttacg

SEQ ID NO: 18174 - DNA, 19 bp, Artificial sequence  Forward Primer
  Primer
atttccagattctttgcgc

SEQ ID NO: 18175 - DNA, 18 bp, Artificial sequence  Forward Primer
  Primer
tctgccaatagccgcatt

SEQ ID NO: 18176 - DNA, 23 bp, Artificial sequence  Forward Primer
  Primer
taaatggaataatgcacgtaaag

SEQ ID NO: 18177 - DNA, 22 bp, Artificial sequence  Forward Primer
  Primer
tgaattcaggatagaccactgg

SEQ ID NO: 18178 - DNA, 27 bp, Artificial sequence  Forward Primer
  Primer
cttttacaaaagatgactctttaaact

SEQ ID NO: 18179 - DNA, 23 bp, Artificial sequence  Forward Primer
  Primer
aatcataggtgaatgcaaaacaa

SEQ ID NO: 18180 - DNA, 22 bp, Artificial sequence  Forward Primer
  Primer
tgccaatcctaacaacatattg

SEQ ID NO: 18181 - DNA, 29 bp, Artificial sequence  Forward Primer
  Primer
aaagagtcctcatttgttaaactatgtac

SEQ ID NO: 18182 - DNA, 27 bp, Artificial sequence  Forward Primer
  Primer
aaaaaagaagctacaaaagtgataaca

SEQ ID NO: 18183 - DNA, 18 bp, Artificial sequence  Forward Primer
  Primer
ggcaggggtttctttccc

SEQ ID NO: 18184 - DNA, 24 bp, Artificial sequence  Forward Primer
  Primer
aaagtcttccagraaaaaagtcag

SEQ ID NO: 18185 - DNA, 26 bp, Artificial sequence  Forward Primer
  Primer
tagtgaataaataaacgttgtttgca

SEQ ID NO: 18186 - DNA, 20 bp, Artificial sequence  Forward Primer
  Primer
aatgccagccaatctaaatt

SEQ ID NO: 18187 - DNA, 19 bp, Artificial sequence  Forward Primer
  Primer
tcctcagtgtttgcggtat

SEQ ID NO: 18188 - DNA, 29 bp, Artificial sequence  Forward Primer
  Primer
taaaaaggagctatttatttatacctgtg

SEQ ID NO: 18189 - DNA, 27 bp, Artificial sequence  Forward Primer
  Primer
aactaacttttgaaaagaaagaaaagc

SEQ ID NO: 18190 - DNA, 27 bp, Artificial sequence  Forward Primer
  Primer
aatatctaaagaacaagyagagtttca

SEQ ID NO: 18191 - DNA, 23 bp, Artificial sequence  Forward Primer
  Primer
tgcttcttaaacctgtcagacat

SEQ ID NO: 18192 - DNA, 21 bp, Artificial sequence  Forward Primer
  Primer
tatgagatgttcacacgtgga

SEQ ID NO: 18193 - DNA, 23 bp, Artificial sequence  Forward Primer
  Primer
attcattcaggtgggtttatctc

SEQ ID NO: 18194 - DNA, 20 bp, Artificial sequence  Forward Primer
  Primer
ccaattgttgctcaaactgg

SEQ ID NO: 18195 - DNA, 23 bp, Artificial sequence  Forward Primer
  Primer
atctaagcagtgacgtgaactca

SEQ ID NO: 18196 - DNA, 19 bp, Artificial sequence  Forward Primer
  Primer
agcagtacttcctgggcat

SEQ ID NO: 18197 - DNA, 21 bp, Artificial sequence  Forward Primer
  Primer
gcaaattctaaacacctgcag

SEQ ID NO: 18198 - DNA, 24 bp, Artificial sequence  Forward Primer
  Primer
taactagaaatcttggcaccatct

SEQ ID NO: 18199 - DNA, 24 bp, Artificial sequence  Forward Primer
  Primer
tacctttaattccacacctcactt

SEQ ID NO: 18200 - DNA, 30 bp, Artificial sequence  Forward Primer
  Primer
tcagcttgtattctatttagcattaatata

SEQ ID NO: 18201 - DNA, 25 bp, Artificial sequence  Forward Primer
  Primer
tctgatctcttcttataatggcact

SEQ ID NO: 18202 - DNA, 26 bp, Artificial sequence  Forward Primer
  Primer
aaagaggcagtatctatttgaacata

SEQ ID NO: 18203 - DNA, 19 bp, Artificial sequence  Forward Primer
  Primer
ttcaagccatgctcaaatt

SEQ ID NO: 18204 - DNA, 24 bp, Artificial sequence  Forward Primer
  Primer
aaaacaccaaaraactgaatctca

SEQ ID NO: 18205 - DNA, 21 bp, Artificial sequence  Forward Primer
  Primer
atgatgagaatcaccctcctt

SEQ ID NO: 18206 - DNA, 24 bp, Artificial sequence  Forward Primer
  Primer
gaaaaacaaaacaaaatagaatgc

SEQ ID NO: 18207 - DNA, 22 bp, Artificial sequence  Forward Primer
  Primer
ttcttagcaatatgctacctgt

SEQ ID NO: 18208 - DNA, 25 bp, Artificial sequence  Forward Primer
  Primer
tatttgaaagttgagattaggttgc

SEQ ID NO: 18209 - DNA, 26 bp, Artificial sequence  Forward Primer
  Primer
wgtggtgtacatgtttgtttaaaact

SEQ ID NO: 18210 - DNA, 21 bp, Artificial sequence  Forward Primer
  Primer
taatagcaccactcaagcagc

SEQ ID NO: 18211 - DNA, 21 bp, Artificial sequence  Forward Primer
  Primer
tggaccccagaatctttaaaa

SEQ ID NO: 18212 - DNA, 24 bp, Artificial sequence  Forward Primer
  Primer
taactaggtgaatggattaaagaa

SEQ ID NO: 18213 - DNA, 19 bp, Artificial sequence  Forward Primer
  Primer
agacccagatgggactcct

SEQ ID NO: 18214 - DNA, 29 bp, Artificial sequence  Forward Primer
  Primer
acccataatgtctaacttaatgattagta

SEQ ID NO: 18215 - DNA, 19 bp, Artificial sequence  Forward Primer
  Primer
cagagatctcgtcaccacg

SEQ ID NO: 18216 - DNA, 19 bp, Artificial sequence  Forward Primer
  Primer
agagatctcgtcaccacgt

SEQ ID NO: 18217 - DNA, 20 bp, Artificial sequence  Forward Primer
  Primer
cctgtccttaggcaattcaa

SEQ ID NO: 18218 - DNA, 19 bp, Artificial sequence  Forward Primer
  Primer
gtgaatgctttggctctcc

SEQ ID NO: 18219 - DNA, 27 bp, Artificial sequence  Forward Primer
  Primer
ttaataaatttcatgcattatctcagg

SEQ ID NO: 18220 - DNA, 30 bp, Artificial sequence  Forward Primer
  Primer
aattacttacatttcttatctatactttgt

SEQ ID NO: 18221 - DNA, 20 bp, Artificial sequence  Forward Primer
  Primer
tgctccattgtatgcttctt

SEQ ID NO: 18222 - DNA, 20 bp, Artificial sequence  Forward Primer
  Primer
tgaaagaccccaaatcacac

SEQ ID NO: 18223 - DNA, 28 bp, Artificial sequence  Forward Primer
  Primer
aaatatatagaacacccagctaaagaaa

SEQ ID NO: 18224 - DNA, 22 bp, Artificial sequence  Forward Primer
  Primer
tttacattgccatcckaaaatc

SEQ ID NO: 18225 - DNA, 18 bp, Artificial sequence  Forward Primer
  Primer
caccagctccctccaaga

SEQ ID NO: 18226 - DNA, 27 bp, Artificial sequence  Forward Primer
  Primer
attgtattatcytcttcctctgaactc

SEQ ID NO: 18227 - DNA, 28 bp, Artificial sequence  Forward Primer
  Primer
ttatcttttaagcatcttatcacttgtc

SEQ ID NO: 18228 - DNA, 28 bp, Artificial sequence  Forward Primer
  Primer
ttatcttttaagcatcttatcacttgtc

SEQ ID NO: 18229 - DNA, 25 bp, Artificial sequence  Forward Primer
  Primer
atttgatgacacttgatgttatctg

SEQ ID NO: 18230 - DNA, 21 bp, Artificial sequence  Forward Primer
  Primer
agttctccaagtgaaagacgg

SEQ ID NO: 18231 - DNA, 20 bp, Artificial sequence  Forward Primer
  Primer
tgcttttcacacgtctcatg

SEQ ID NO: 18232 - DNA, 20 bp, Artificial sequence  Forward Primer
  Primer
aacttgatggctccagtctg

SEQ ID NO: 18233 - DNA, 22 bp, Artificial sequence  Forward Primer
  Primer
aattctctttaagggcctgaga

SEQ ID NO: 18234 - DNA, 18 bp, Artificial sequence  Forward Primer
  Primer
gactggcccctcctttgt

SEQ ID NO: 18235 - DNA, 25 bp, Artificial sequence  Forward Primer
  Primer
tttactgctaactggaaaaaagatg

SEQ ID NO: 18236 - DNA, 19 bp, Artificial sequence  Forward Primer
  Primer
tctggagaagctcctaagg

SEQ ID NO: 18237 - DNA, 20 bp, Artificial sequence  Forward Primer
  Primer
aggggaaactctgggagata

SEQ ID NO: 18238 - DNA, 30 bp, Artificial sequence  Forward Primer
  Primer
atagtgaatgtattgaaatatactctttcc

SEQ ID NO: 18239 - DNA, 27 bp, Artificial sequence  Forward Primer
  Primer
agagattcagataactcayscaaagtc

SEQ ID NO: 18240 - DNA, 18 bp, Artificial sequence  Forward Primer
  Primer
ccaggagccccacagaca

SEQ ID NO: 18241 - DNA, 21 bp, Artificial sequence  Forward Primer
  Primer
tctgcataaattctttgacat

SEQ ID NO: 18242 - DNA, 19 bp, Artificial sequence  Forward Primer
  Primer
tagaccgtcaaccactgcc

SEQ ID NO: 18243 - DNA, 21 bp, Artificial sequence  Forward Primer
  Primer
tcattagtcttcagggtggtt

SEQ ID NO: 18244 - DNA, 19 bp, Artificial sequence  Forward Primer
  Primer
agcacaatgccccagatat

SEQ ID NO: 18245 - DNA, 21 bp, Artificial sequence  Forward Primer
  Primer
tggtgaagaaaggacaaaacc

SEQ ID NO: 18246 - DNA, 20 bp, Artificial sequence  Forward Primer
  Primer
tagttagatccggtttgggg

SEQ ID NO: 18247 - DNA, 25 bp, Artificial sequence  Forward Primer
  Primer
ttttgaacacactatttcctttctc

SEQ ID NO: 18248 - DNA, 18 bp, Artificial sequence  Forward Primer
  Primer
ccttacttcagcccaacg

SEQ ID NO: 18249 - DNA, 21 bp, Artificial sequence  Forward Primer
  Primer
ttgtctttctgacatcccatc

SEQ ID NO: 18250 - DNA, 27 bp, Artificial sequence  Forward Primer
  Primer
aatatgaagacatatttgacacagtcc

SEQ ID NO: 18251 - DNA, 23 bp, Artificial sequence  Forward Primer
  Primer
atcattacaaaccaccaaaaagc

SEQ ID NO: 18252 - DNA, 22 bp, Artificial sequence  Forward Primer
  Primer
ttatcagcaattaccctcctga

SEQ ID NO: 18253 - DNA, 22 bp, Artificial sequence  Forward Primer
  Primer
tgtacracaaagatcaaagaac

SEQ ID NO: 18254 - DNA, 23 bp, Artificial sequence  Forward Primer
  Primer
taggtcaaaaaccactatgccta

SEQ ID NO: 18255 - DNA, 27 bp, Artificial sequence  Forward Primer
  Primer
agagccatgatgagaattaaataataa

SEQ ID NO: 18256 - DNA, 22 bp, Artificial sequence  Forward Primer
  Primer
atttggagaccactttacatcc

SEQ ID NO: 18257 - DNA, 25 bp, Artificial sequence  Forward Primer
  Primer
atcacacatagaaataggtgtcagc

SEQ ID NO: 18258 - DNA, 19 bp, Artificial sequence  Forward Primer
  Primer
cagagttcccagagccatg

SEQ ID NO: 18259 - DNA, 18 bp, Artificial sequence  Forward Primer
  Primer
cagctcagcagcctgaaa

SEQ ID NO: 18260 - DNA, 19 bp, Artificial sequence  Forward Primer
  Primer
acactttccctgcacagct

SEQ ID NO: 18261 - DNA, 23 bp, Artificial sequence  Forward Primer
  Primer
aattgaaagtgagtgaaatctta

SEQ ID NO: 18262 - DNA, 18 bp, Artificial sequence  Forward Primer
  Primer
ttggaaccatggaccctc

SEQ ID NO: 18263 - DNA, 24 bp, Artificial sequence  Forward Primer
  Primer
actgttgtggtttcttttttgttc

SEQ ID NO: 18264 - DNA, 18 bp, Artificial sequence  Forward Primer
  Primer
tatggaatcacggggctt

SEQ ID NO: 18265 - DNA, 22 bp, Artificial sequence  Forward Primer
  Primer
aaaaggggatttgctttagatg

SEQ ID NO: 18266 - DNA, 18 bp, Artificial sequence  Forward Primer
  Primer
acagcatagctttcccgg

SEQ ID NO: 18267 - DNA, 26 bp, Artificial sequence  Forward Primer
  Primer
ttaaaatcctgtgctttagagctatt

SEQ ID NO: 18268 - DNA, 21 bp, Artificial sequence  Forward Primer
  Primer
gaaacatacggctgtaagtaa

SEQ ID NO: 18269 - DNA, 21 bp, Artificial sequence  Forward Primer
  Primer
gcttaatttcctcatctggca

SEQ ID NO: 18270 - DNA, 20 bp, Artificial sequence  Forward Primer
  Primer
tatctaacacagcctggcaa

SEQ ID NO: 18271 - DNA, 19 bp, Artificial sequence  Forward Primer
  Primer
aaagaggcagtttccatgg

SEQ ID NO: 18272 - DNA, 28 bp, Artificial sequence  Forward Primer
  Primer
aagtttataatacctgcttcatagattt

SEQ ID NO: 18273 - DNA, 23 bp, Artificial sequence  Forward Primer
  Primer
ttctttttgcattcttcattttg

SEQ ID NO: 18274 - DNA, 21 bp, Artificial sequence  Forward Primer
  Primer
aaaaaagaatttgcatcagcc

SEQ ID NO: 18275 - DNA, 27 bp, Artificial sequence  Forward Primer
  Primer
atcataaattgtatcatcaccaactct

SEQ ID NO: 18276 - DNA, 26 bp, Artificial sequence  Forward Primer
  Primer
atggggttatatgtgactttattttt

SEQ ID NO: 18277 - DNA, 24 bp, Artificial sequence  Forward Primer
  Primer
ataaaaagtcaaacgtgattgaac

SEQ ID NO: 18278 - DNA, 18 bp, Artificial sequence  Forward Primer
  Primer
ttgccattcctgtctcca

SEQ ID NO: 18279 - DNA, 30 bp, Artificial sequence  Forward Primer
  Primer
tatctatttatcatacaaatattctaggtc

SEQ ID NO: 18280 - DNA, 24 bp, Artificial sequence  Forward Primer
  Primer
agagctcttatttatgacactttg

SEQ ID NO: 18281 - DNA, 23 bp, Artificial sequence  Forward Primer
  Primer
tacctttttgttcaaaggaatga

SEQ ID NO: 18282 - DNA, 27 bp, Artificial sequence  Forward Primer
  Primer
aaattgctgttagtagatttaaggaaa

SEQ ID NO: 18283 - DNA, 28 bp, Artificial sequence  Forward Primer
  Primer
attttatccaaagtcatgtatatgaaag

SEQ ID NO: 18284 - DNA, 30 bp, Artificial sequence  Forward Primer
  Primer
agtatatacattgtgatttaacacttctgt

SEQ ID NO: 18285 - DNA, 18 bp, Artificial sequence  Forward Primer
  Primer
ttgaccttcagcccagag

SEQ ID NO: 18286 - DNA, 19 bp, Artificial sequence  Forward Primer
  Primer
actcatgataacttggggg

SEQ ID NO: 18287 - DNA, 19 bp, Artificial sequence  Forward Primer
  Primer
atagacctccctgtcgtgg

SEQ ID NO: 18288 - DNA, 23 bp, Artificial sequence  Forward Primer
  Primer
ttgacatgccatagtgtctactg

SEQ ID NO: 18289 - DNA, 28 bp, Artificial sequence  Forward Primer
  Primer
ttctctgttaatgaatatttcttatgga

SEQ ID NO: 18290 - DNA, 20 bp, Artificial sequence  Forward Primer
  Primer
agatggaaagggtcaagctt

SEQ ID NO: 18291 - DNA, 24 bp, Artificial sequence  Forward Primer
  Primer
tacaacaaattgaacatctaaaac

SEQ ID NO: 18292 - DNA, 19 bp, Artificial sequence  Forward Primer
  Primer
attgagtagccctggggtt

SEQ ID NO: 18293 - DNA, 25 bp, Artificial sequence  Forward Primer
  Primer
tataactatttctcactccaccagg

SEQ ID NO: 18294 - DNA, 26 bp, Artificial sequence  Forward Primer
  Primer
aaaaaattactcccagaactcagtaa

SEQ ID NO: 18295 - DNA, 18 bp, Artificial sequence  Forward Primer
  Primer
actgcaggaggagaccgc

SEQ ID NO: 18296 - DNA, 18 bp, Artificial sequence  Forward Primer
  Primer
gggcactgggatgagctg

SEQ ID NO: 18297 - DNA, 21 bp, Artificial sequence  Forward Primer
  Primer
ttaagggaactgagttgtcat

SEQ ID NO: 18298 - DNA, 18 bp, Artificial sequence  Forward Primer
  Primer
atcaggaagccaagaccc

SEQ ID NO: 18299 - DNA, 28 bp, Artificial sequence  Forward Primer
  Primer
ataattaaagtaggaaatgtacatgcaa

SEQ ID NO: 18300 - DNA, 18 bp, Artificial sequence  Forward Primer
  Primer
aagtcccctctcccttcc

SEQ ID NO: 18301 - DNA, 25 bp, Artificial sequence  Forward Primer
  Primer
atatcagtgattgtactgaccacaa

SEQ ID NO: 18302 - DNA, 19 bp, Artificial sequence  Forward Primer
  Primer
tctgggaggagtgagacat

SEQ ID NO: 18303 - DNA, 22 bp, Artificial sequence  Forward Primer
  Primer
caggacattaccttaaactctg

SEQ ID NO: 18304 - DNA, 24 bp, Artificial sequence  Forward Primer
  Primer
agttactttgtakagctatcatgc

SEQ ID NO: 18305 - DNA, 19 bp, Artificial sequence  Forward Primer
  Primer
aggtgatcacagaggaggt

SEQ ID NO: 18306 - DNA, 23 bp, Artificial sequence  Forward Primer
  Primer
tatgtgacccaayaaatctcctc

SEQ ID NO: 18307 - DNA, 20 bp, Artificial sequence  Forward Primer
  Primer
atctccccagcctactgagt

SEQ ID NO: 18308 - DNA, 19 bp, Artificial sequence  Forward Primer
  Primer
taatttcgcatggctctga

SEQ ID NO: 18309 - DNA, 22 bp, Artificial sequence  Forward Primer
  Primer
attatgtgggcattttcttgtt

SEQ ID NO: 18310 - DNA, 21 bp, Artificial sequence  Forward Primer
  Primer
tcagtcgctaagcactgtctt

SEQ ID NO: 18311 - DNA, 27 bp, Artificial sequence  Forward Primer
  Primer
tatccagtaaattagtctctagcactc

SEQ ID NO: 18312 - DNA, 27 bp, Artificial sequence  Forward Primer
  Primer
atatttaaagcttttaagaggtcttcc

SEQ ID NO: 18313 - DNA, 18 bp, Artificial sequence  Forward Primer
  Primer
ttgcagaagtgctcccag

SEQ ID NO: 18314 - DNA, 21 bp, Artificial sequence  Forward Primer
  Primer
aaatgcaaaaargctgtgatg

SEQ ID NO: 18315 - DNA, 25 bp, Artificial sequence  Forward Primer
  Primer
tgtctcaattaatgtgatatctctg

SEQ ID NO: 18316 - DNA, 21 bp, Artificial sequence  Forward Primer
  Primer
tttcattcactcagcatcaca

SEQ ID NO: 18317 - DNA, 20 bp, Artificial sequence  Forward Primer
  Primer
tctactggctggtttttaac

SEQ ID NO: 18318 - DNA, 23 bp, Artificial sequence  Forward Primer
  Primer
taaccctaagtctcagttccagc

SEQ ID NO: 18319 - DNA, 25 bp, Artificial sequence  Forward Primer
  Primer
aatgaataaggacaactcttcaaca

SEQ ID NO: 18320 - DNA, 21 bp, Artificial sequence  Forward Primer
  Primer
ccaggcagaattagrtcaaaa

SEQ ID NO: 18321 - DNA, 19 bp, Artificial sequence  Forward Primer
  Primer
gagactggggcaaagattt

SEQ ID NO: 18322 - DNA, 18 bp, Artificial sequence  Forward Primer
  Primer
gaccaccagggaggtacc

SEQ ID NO: 18323 - DNA, 23 bp, Artificial sequence  Forward Primer
  Primer
aataaattagtcttcccagctgc

SEQ ID NO: 18324 - DNA, 19 bp, Artificial sequence  Forward Primer
  Primer
gttgctggaggaactccaa

SEQ ID NO: 18325 - DNA, 22 bp, Artificial sequence  Forward Primer
  Primer
aaaagtgctgtgcagtgataca

SEQ ID NO: 18326 - DNA, 27 bp, Artificial sequence  Forward Primer
  Primer
atggttattttactagattcaaccaga

SEQ ID NO: 18327 - DNA, 23 bp, Artificial sequence  Forward Primer
  Primer
aaatgcagatttgctactgttct

SEQ ID NO: 18328 - DNA, 26 bp, Artificial sequence  Forward Primer
  Primer
attttaaatattatcagccagcttca

SEQ ID NO: 18329 - DNA, 18 bp, Artificial sequence  Forward Primer
  Primer
tcactgctcaccttgcca

SEQ ID NO: 18330 - DNA, 24 bp, Artificial sequence  Forward Primer
  Primer
agatgagataatgtgaaggttggt

SEQ ID NO: 18331 - DNA, 18 bp, Artificial sequence  Forward Primer
  Primer
ccagaccaagagggctct

SEQ ID NO: 18332 - DNA, 26 bp, Artificial sequence  Forward Primer
  Primer
aaggtacaaacacttgagaataagag

SEQ ID NO: 18333 - DNA, 25 bp, Artificial sequence  Forward Primer
  Primer
attactgttgcatttacctagagct

SEQ ID NO: 18334 - DNA, 25 bp, Artificial sequence  Forward Primer
  Primer
aatactgatggagtcatagaaccag

SEQ ID NO: 18335 - DNA, 18 bp, Artificial sequence  Forward Primer
  Primer
agacaggaggccttctcc

SEQ ID NO: 18336 - DNA, 18 bp, Artificial sequence  Forward Primer
  Primer
agagggagggcaagggca

SEQ ID NO: 18337 - DNA, 22 bp, Artificial sequence  Forward Primer
  Primer
ttaaatgatggttggcattttt

SEQ ID NO: 18338 - DNA, 28 bp, Artificial sequence  Forward Primer
  Primer
cttttttcaaatgttatgataaacactc

SEQ ID NO: 18339 - DNA, 22 bp, Artificial sequence  Forward Primer
  Primer
aaaagtgaygtgtcattccaaa

SEQ ID NO: 18340 - DNA, 27 bp, Artificial sequence  Forward Primer
  Primer
acatattaccaaaattgactcaaaaac

SEQ ID NO: 18341 - DNA, 19 bp, Artificial sequence  Forward Primer
  Primer
aggtgggacctgatcatat

SEQ ID NO: 18342 - DNA, 19 bp, Artificial sequence  Forward Primer
  Primer
tgcacaagaatccttcgaa

SEQ ID NO: 18343 - DNA, 18 bp, Artificial sequence  Forward Primer
  Primer
aaatgggggaagggagtc

SEQ ID NO: 18344 - DNA, 27 bp, Artificial sequence  Forward Primer
  Primer
atatttgaaacaagggtaatatgtcag

SEQ ID NO: 18345 - DNA, 25 bp, Artificial sequence  Forward Primer
  Primer
aaagtagactaaagaaaaaatgccc

SEQ ID NO: 18346 - DNA, 19 bp, Artificial sequence  Forward Primer
  Primer
tctcatgcattggcagatg

SEQ ID NO: 18347 - DNA, 25 bp, Artificial sequence  Forward Primer
  Primer
tctacactatgatcatgaatggacc

SEQ ID NO: 18348 - DNA, 18 bp, Artificial sequence  Forward Primer
  Primer
tttccttggtttcaggcg

SEQ ID NO: 18349 - DNA, 23 bp, Artificial sequence  Forward Primer
  Primer
tttaacacacccttttagctcac

SEQ ID NO: 18350 - DNA, 26 bp, Artificial sequence  Forward Primer
  Primer
aaagtcctcaaagtagaagactaggg

SEQ ID NO: 18351 - DNA, 20 bp, Artificial sequence  Forward Primer
  Primer
tgaatgcagacggagatttt

SEQ ID NO: 18352 - DNA, 23 bp, Artificial sequence  Forward Primer
  Primer
ttttgtttaaaaactcagggctt

SEQ ID NO: 18353 - DNA, 22 bp, Artificial sequence  Forward Primer
  Primer
tatttcccctgatacctgagaa

SEQ ID NO: 18354 - DNA, 23 bp, Artificial sequence  Forward Primer
  Primer
tatatattgcaaagcaatgtgcg

SEQ ID NO: 18355 - DNA, 24 bp, Artificial sequence  Forward Primer
  Primer
ttaaaagtaaactggattcatgat

SEQ ID NO: 18356 - DNA, 19 bp, Artificial sequence  Forward Primer
  Primer
agggaagggtactsattgg

SEQ ID NO: 18357 - DNA, 27 bp, Artificial sequence  Forward Primer
  Primer
tgccttgaaacttataaaaatgttact

SEQ ID NO: 18358 - DNA, 18 bp, Artificial sequence  Forward Primer
  Primer
aaagtgggggatggaaag

SEQ ID NO: 18359 - DNA, 27 bp, Artificial sequence  Forward Primer
  Primer
tccacactcaactttctagattttaat

SEQ ID NO: 18360 - DNA, 21 bp, Artificial sequence  Forward Primer
  Primer
agctgacagaagagggatagg

SEQ ID NO: 18361 - DNA, 22 bp, Artificial sequence  Forward Primer
  Primer
ttgcttagttctaccaggaagg

SEQ ID NO: 18362 - DNA, 20 bp, Artificial sequence  Forward Primer
  Primer
aaatggtggctcagagtttg

SEQ ID NO: 18363 - DNA, 23 bp, Artificial sequence  Forward Primer
  Primer
tagaatgctacctaaagcatgca

SEQ ID NO: 18364 - DNA, 21 bp, Artificial sequence  Forward Primer
  Primer
atagaaggaggtcggtatgga

SEQ ID NO: 18365 - DNA, 21 bp, Artificial sequence  Forward Primer
  Primer
ttaggaactgagagcaggaat

SEQ ID NO: 18366 - DNA, 20 bp, Artificial sequence  Forward Primer
  Primer
accaaatgatgagtcagcta

SEQ ID NO: 18367 - DNA, 23 bp, Artificial sequence  Forward Primer
  Primer
taaaagcaagacttaccctgttg

SEQ ID NO: 18368 - DNA, 28 bp, Artificial sequence  Forward Primer
  Primer
ttttgaaattattagagattcttaggtg

SEQ ID NO: 18369 - DNA, 29 bp, Artificial sequence  Forward Primer
  Primer
tagatatcacgatgtctaaatacatagga

SEQ ID NO: 18370 - DNA, 23 bp, Artificial sequence  Forward Primer
  Primer
ggaaaaagagtcacattggattt

SEQ ID NO: 18371 - DNA, 22 bp, Artificial sequence  Forward Primer
  Primer
ctaggagtaagatcaaagcact

SEQ ID NO: 18372 - DNA, 19 bp, Artificial sequence  Forward Primer
  Primer
gtccaggcatgtggatttc

SEQ ID NO: 18373 - DNA, 18 bp, Artificial sequence  Forward Primer
  Primer
aaacctgggcttggaaaa

SEQ ID NO: 18374 - DNA, 29 bp, Artificial sequence  Forward Primer
  Primer
ttatatactcactcctgttttagtccatc

SEQ ID NO: 18375 - DNA, 20 bp, Artificial sequence  Forward Primer
  Primer
tagctgtggagggaataatc

SEQ ID NO: 18376 - DNA, 20 bp, Artificial sequence  Forward Primer
  Primer
aagcactgtctccagagtaa

SEQ ID NO: 18377 - DNA, 21 bp, Artificial sequence  Forward Primer
  Primer
ataatatcaggggctttggag

SEQ ID NO: 18378 - DNA, 22 bp, Artificial sequence  Forward Primer
  Primer
agagttcccattgctagagtat

SEQ ID NO: 18379 - DNA, 19 bp, Artificial sequence  Forward Primer
  Primer
tgatgtacttgcccaggtc

SEQ ID NO: 18380 - DNA, 20 bp, Artificial sequence  Forward Primer
  Primer
tcgacactttcattcatccc

SEQ ID NO: 18381 - DNA, 25 bp, Artificial sequence  Forward Primer
  Primer
aaaagcccacttataattgattgta

SEQ ID NO: 18382 - DNA, 22 bp, Artificial sequence  Forward Primer
  Primer
tccctattttcagaggagaact

SEQ ID NO: 18383 - DNA, 25 bp, Artificial sequence  Forward Primer
  Primer
atgattagcaaattgatagatggag

SEQ ID NO: 18384 - DNA, 18 bp, Artificial sequence  Forward Primer
  Primer
tgcggcagaggcttcaca

SEQ ID NO: 18385 - DNA, 25 bp, Artificial sequence  Forward Primer
  Primer
aggaacgatagagataaactaaaag

SEQ ID NO: 18386 - DNA, 22 bp, Artificial sequence  Forward Primer
  Primer
aaaaaatttgcagtagcctgtt

SEQ ID NO: 18387 - DNA, 20 bp, Artificial sequence  Forward Primer
  Primer
agaccttgctctcctctctg

SEQ ID NO: 18388 - DNA, 21 bp, Artificial sequence  Forward Primer
  Primer
agttctgccaggatctcactt

SEQ ID NO: 18389 - DNA, 20 bp, Artificial sequence  Forward Primer
  Primer
aaactgtacagcgaggtcca

SEQ ID NO: 18390 - DNA, 20 bp, Artificial sequence  Forward Primer
  Primer
attcctttrctgagcttggg

SEQ ID NO: 18391 - DNA, 19 bp, Artificial sequence  Forward Primer
  Primer
tccaktcgcctttcttctc

SEQ ID NO: 18392 - DNA, 18 bp, Artificial sequence  Forward Primer
  Primer
taggtttccccaggcagg

SEQ ID NO: 18393 - DNA, 28 bp, Artificial sequence  Forward Primer
  Primer
aatagatggttcttatcctaatgttctt

SEQ ID NO: 18394 - DNA, 18 bp, Artificial sequence  Forward Primer
  Primer
ttctccttggggattggt

SEQ ID NO: 18395 - DNA, 27 bp, Artificial sequence  Forward Primer
  Primer
aaactaaaactgttttctttcacattc

SEQ ID NO: 18396 - DNA, 20 bp, Artificial sequence  Forward Primer
  Primer
acaaagttcgacttgctgct

SEQ ID NO: 18397 - DNA, 28 bp, Artificial sequence  Forward Primer
  Primer
aaaacaaaagcagtacagtatagttaaa

SEQ ID NO: 18398 - DNA, 25 bp, Artificial sequence  Forward Primer
  Primer
acattcagctacaggaaaaataaaa

SEQ ID NO: 18399 - DNA, 19 bp, Artificial sequence  Forward Primer
  Primer
caaatcacactttcccctc

SEQ ID NO: 18400 - DNA, 28 bp, Artificial sequence  Forward Primer
  Primer
ctatgttagaaaagaatgaatttgaaac

SEQ ID NO: 18401 - DNA, 22 bp, Artificial sequence  Forward Primer
  Primer
cagtttcagctacacatttaaa

SEQ ID NO: 18402 - DNA, 18 bp, Artificial sequence  Forward Primer
  Primer
gtcccctccccacctttg

SEQ ID NO: 18403 - DNA, 21 bp, Artificial sequence  Forward Primer
  Primer
acagcaagcttgaatactcag

SEQ ID NO: 18404 - DNA, 24 bp, Artificial sequence  Forward Primer
  Primer
ataaatgggattaattgcatagca

SEQ ID NO: 18405 - DNA, 25 bp, Artificial sequence  Forward Primer
  Primer
tcatgagtttgcaaatttaataacg

SEQ ID NO: 18406 - DNA, 26 bp, Artificial sequence  Forward Primer
  Primer
tagagaaaaccacagctaaatgataa

SEQ ID NO: 18407 - DNA, 24 bp, Artificial sequence  Forward Primer
  Primer
aaagatccacaattgttcaagagt

SEQ ID NO: 18408 - DNA, 25 bp, Artificial sequence  Forward Primer
  Primer
ttttactaataagcagcaatcttcc

SEQ ID NO: 18409 - DNA, 18 bp, Artificial sequence  Forward Primer
  Primer
ttccagcccccactgagg

SEQ ID NO: 18410 - DNA, 22 bp, Artificial sequence  Forward Primer
  Primer
aataatcacagcctggatttcc

SEQ ID NO: 18411 - DNA, 22 bp, Artificial sequence  Forward Primer
  Primer
atactgaggaagcgcaaataga

SEQ ID NO: 18412 - DNA, 28 bp, Artificial sequence  Forward Primer
  Primer
aaatgacacatgagattctgtagataag

SEQ ID NO: 18413 - DNA, 25 bp, Artificial sequence  Forward Primer
  Primer
tatcattggatcaaggtaataaagg

SEQ ID NO: 18414 - DNA, 26 bp, Artificial sequence  Forward Primer
  Primer
aaataaaagattcttcgatgtcactt

SEQ ID NO: 18415 - DNA, 20 bp, Artificial sequence  Forward Primer
  Primer
atggactcatttgggtgttg

SEQ ID NO: 18416 - DNA, 25 bp, Artificial sequence  Forward Primer
  Primer
ttgtatactgtgtacttcatgggtg

SEQ ID NO: 18417 - DNA, 28 bp, Artificial sequence  Forward Primer
  Primer
gggataataaaccawtattatascatca

SEQ ID NO: 18418 - DNA, 28 bp, Artificial sequence  Forward Primer
  Primer
gtgtttggatactttgtcttgttatatt

SEQ ID NO: 18419 - DNA, 27 bp, Artificial sequence  Forward Primer
  Primer
taaaatcccagaggtttagttctagtt

SEQ ID NO: 18420 - DNA, 21 bp, Artificial sequence  Forward Primer
  Primer
tgatttcaggatgatgcaaat

SEQ ID NO: 18421 - DNA, 25 bp, Artificial sequence  Forward Primer
  Primer
ataaaaaatcaaccattgcatagac

SEQ ID NO: 18422 - DNA, 19 bp, Artificial sequence  Forward Primer
  Primer
aggaaggcacaaccaagaa

SEQ ID NO: 18423 - DNA, 24 bp, Artificial sequence  Forward Primer
  Primer
ttagagaaatgaaggaacttgtcc

SEQ ID NO: 18424 - DNA, 22 bp, Artificial sequence  Forward Primer
  Primer
tgatggagactgaatttaaagt

SEQ ID NO: 18425 - DNA, 26 bp, Artificial sequence  Forward Primer
  Primer
atatgccctaatctctgttactgatt

SEQ ID NO: 18426 - DNA, 30 bp, Artificial sequence  Forward Primer
  Primer
taattatctctattgtagagggctattatg

SEQ ID NO: 18427 - DNA, 23 bp, Artificial sequence  Forward Primer
  Primer
ttagataagggaatggctgaatt

SEQ ID NO: 18428 - DNA, 30 bp, Artificial sequence  Forward Primer
  Primer
tgggatactatacacctataaaatgaataa

SEQ ID NO: 18429 - DNA, 27 bp, Artificial sequence  Forward Primer
  Primer
taacatttctatcttgctaaagcatct

SEQ ID NO: 18430 - DNA, 28 bp, Artificial sequence  Forward Primer
  Primer
ataattttaaagaataagccttgaaagg

SEQ ID NO: 18431 - DNA, 22 bp, Artificial sequence  Forward Primer
  Primer
tttgagtggagactgagaactg

SEQ ID NO: 18432 - DNA, 30 bp, Artificial sequence  Forward Primer
  Primer
atattgtgatatacagatgttttctacttc

SEQ ID NO: 18433 - DNA, 18 bp, Artificial sequence  Forward Primer
  Primer
aaagtcccctgggaggtg

SEQ ID NO: 18434 - DNA, 25 bp, Artificial sequence  Forward Primer
  Primer
tgttcttgagacttcatatagaaaa

SEQ ID NO: 18435 - DNA, 30 bp, Artificial sequence  Forward Primer
  Primer
ttataatgcagtaatatttcactagtattc

SEQ ID NO: 18436 - DNA, 18 bp, Artificial sequence  Forward Primer
  Primer
tctttccagacccaggag

SEQ ID NO: 18437 - DNA, 24 bp, Artificial sequence  Forward Primer
  Primer
ataatgaatgcttccatttcaact

SEQ ID NO: 18438 - DNA, 18 bp, Artificial sequence  Forward Primer
  Primer
gtgggtgggctcccttag

SEQ ID NO: 18439 - DNA, 25 bp, Artificial sequence  Forward Primer
  Primer
ccttaagttccagctttacattttt

SEQ ID NO: 18440 - DNA, 19 bp, Artificial sequence  Forward Primer
  Primer
ttggctgaagtcctttgat

SEQ ID NO: 18441 - DNA, 20 bp, Artificial sequence  Forward Primer
  Primer
acmggaagtgttcaggtttc

SEQ ID NO: 18442 - DNA, 18 bp, Artificial sequence  Forward Primer
  Primer
agccgtggtgtyatcagg

SEQ ID NO: 18443 - DNA, 20 bp, Artificial sequence  Forward Primer
  Primer
tttgatctccttgctgtcca

SEQ ID NO: 18444 - DNA, 19 bp, Artificial sequence  Forward Primer
  Primer
tgcctttttcaggagttgc

SEQ ID NO: 18445 - DNA, 20 bp, Artificial sequence  Forward Primer
  Primer
tacacgctgatggatgatta

SEQ ID NO: 18446 - DNA, 19 bp, Artificial sequence  Forward Primer
  Primer
atgtcgcccttctattgga

SEQ ID NO: 18447 - DNA, 19 bp, Artificial sequence  Forward Primer
  Primer
attggtctccctcgtcctc

SEQ ID NO: 18448 - DNA, 23 bp, Artificial sequence  Forward Primer
  Primer
agccatcattgtcttgaaaatta

SEQ ID NO: 18449 - DNA, 23 bp, Artificial sequence  Forward Primer
  Primer
aacgtgtagaacaatttgcctag

SEQ ID NO: 18450 - DNA, 18 bp, Artificial sequence  Forward Primer
  Primer
tggaatctcaggatggca

SEQ ID NO: 18451 - DNA, 24 bp, Artificial sequence  Forward Primer
  Primer
aatggttgtaccttgtgaagaact

SEQ ID NO: 18452 - DNA, 23 bp, Artificial sequence  Forward Primer
  Primer
ttttatctccaacccaagacttt

SEQ ID NO: 18453 - DNA, 18 bp, Artificial sequence  Forward Primer
  Primer
cctcccagtggcctcttt

SEQ ID NO: 18454 - DNA, 24 bp, Artificial sequence  Forward Primer
  Primer
tatttatgcatgtgtgtgttcaaa

SEQ ID NO: 18455 - DNA, 24 bp, Artificial sequence  Forward Primer
  Primer
agcagacactttaacacacataaa

SEQ ID NO: 18456 - DNA, 19 bp, Artificial sequence  Forward Primer
  Primer
tcagcatcagagcgtttgt

SEQ ID NO: 18457 - DNA, 26 bp, Artificial sequence  Forward Primer
  Primer
acagagctattacagaattacatgca

SEQ ID NO: 18458 - DNA, 19 bp, Artificial sequence  Forward Primer
  Primer
tcctaggttcaagcgttcc

SEQ ID NO: 18459 - DNA, 23 bp, Artificial sequence  Forward Primer
  Primer
tggctaaacactaactttaacaa

SEQ ID NO: 18460 - DNA, 30 bp, Artificial sequence  Forward Primer
  Primer
agattatataggctttagaaaacaaagttc

SEQ ID NO: 18461 - DNA, 27 bp, Artificial sequence  Forward Primer
  Primer
aagcatgaaaagaataacagaaattac

SEQ ID NO: 18462 - DNA, 21 bp, Artificial sequence  Forward Primer
  Primer
ttttttgcaagcttctctcag

SEQ ID NO: 18463 - DNA, 20 bp, Artificial sequence  Forward Primer
  Primer
aggaacttggctggtttctg

SEQ ID NO: 18464 - DNA, 19 bp, Artificial sequence  Forward Primer
  Primer
tggagcagtagcatcgtca

SEQ ID NO: 18465 - DNA, 28 bp, Artificial sequence  Forward Primer
  Primer
attatcttttagctgagaatagctatca

SEQ ID NO: 18466 - DNA, 26 bp, Artificial sequence  Forward Primer
  Primer
tccctaaagaaaaacatacttttgat

SEQ ID NO: 18467 - DNA, 24 bp, Artificial sequence  Forward Primer
  Primer
agagccagggagaaatactatagg

SEQ ID NO: 18468 - DNA, 23 bp, Artificial sequence  Forward Primer
  Primer
tatatcaccagagaacctccaga

SEQ ID NO: 18469 - DNA, 24 bp, Artificial sequence  Forward Primer
  Primer
ttaaaatgtgcaagttctatggac

SEQ ID NO: 18470 - DNA, 24 bp, Artificial sequence  Forward Primer
  Primer
aaatttgtttcaagattcttttcc

SEQ ID NO: 18471 - DNA, 26 bp, Artificial sequence  Forward Primer
  Primer
aattaatttctcgcctatatgagatg

SEQ ID NO: 18472 - DNA, 24 bp, Artificial sequence  Forward Primer
  Primer
aaaaacttttgttttgaaatgtgc

SEQ ID NO: 18473 - DNA, 20 bp, Artificial sequence  Forward Primer
  Primer
taggccagactagggatctg

SEQ ID NO: 18474 - DNA, 23 bp, Artificial sequence  Forward Primer
  Primer
ttaaagaacagaaggctcctttg

SEQ ID NO: 18475 - DNA, 19 bp, Artificial sequence  Forward Primer
  Primer
aggagcaaatccaagttcc

SEQ ID NO: 18476 - DNA, 21 bp, Artificial sequence  Forward Primer
  Primer
ataatacattcctgtggccct

SEQ ID NO: 18477 - DNA, 26 bp, Artificial sequence  Forward Primer
  Primer
aaatacctgaatgcagatttaatgtt

SEQ ID NO: 18478 - DNA, 19 bp, Artificial sequence  Forward Primer
  Primer
tatgtggaagtgacaggaa

SEQ ID NO: 18479 - DNA, 19 bp, Artificial sequence  Forward Primer
  Primer
tcattggaaagtgtccagg

SEQ ID NO: 18480 - DNA, 26 bp, Artificial sequence  Forward Primer
  Primer
tatgatagcatacttcttaaacctgg

SEQ ID NO: 18481 - DNA, 22 bp, Artificial sequence  Forward Primer
  Primer
tagcraatgtaatttctctggc

SEQ ID NO: 18482 - DNA, 20 bp, Artificial sequence  Forward Primer
  Primer
tactcctgctcgttagccaa

SEQ ID NO: 18483 - DNA, 26 bp, Artificial sequence  Forward Primer
  Primer
ttaacagaaattatcagcatcctatc

SEQ ID NO: 18484 - DNA, 26 bp, Artificial sequence  Forward Primer
  Primer
ccatatgaataatactatttgttcca

SEQ ID NO: 18485 - DNA, 18 bp, Artificial sequence  Forward Primer
  Primer
ccggagaagagcgtcctt

SEQ ID NO: 18486 - DNA, 19 bp, Artificial sequence  Forward Primer
  Primer
aagaattgaaagggcttct

SEQ ID NO: 18487 - DNA, 28 bp, Artificial sequence  Forward Primer
  Primer
attcctgagtagagttggaatttattaa

SEQ ID NO: 18488 - DNA, 30 bp, Artificial sequence  Forward Primer
  Primer
aaagtttaattatacactaaatggtaacca

SEQ ID NO: 18489 - DNA, 19 bp, Artificial sequence  Forward Primer
  Primer
taaggcagtgacaggcaga

SEQ ID NO: 18490 - DNA, 24 bp, Artificial sequence  Forward Primer
  Primer
ttatttcatgccctaagtatggat

SEQ ID NO: 18491 - DNA, 26 bp, Artificial sequence  Forward Primer
  Primer
aattgcaaagctataaccataatgta

SEQ ID NO: 18492 - DNA, 21 bp, Artificial sequence  Forward Primer
  Primer
atatacggccagaccaaaaca

SEQ ID NO: 18493 - DNA, 30 bp, Artificial sequence  Forward Primer
  Primer
ataaataaagttctattgaaacacagtcac

SEQ ID NO: 18494 - DNA, 21 bp, Artificial sequence  Forward Primer
  Primer
ttgatttttctgtttcgctgt

SEQ ID NO: 18495 - DNA, 20 bp, Artificial sequence  Forward Primer
  Primer
agtagcacccctgttcattc

SEQ ID NO: 18496 - DNA, 24 bp, Artificial sequence  Forward Primer
  Primer
atttaacagagggcgttactaatg

SEQ ID NO: 18497 - DNA, 25 bp, Artificial sequence  Forward Primer
  Primer
aaacaaggagcacagtttaaagata

SEQ ID NO: 18498 - DNA, 26 bp, Artificial sequence  Forward Primer
  Primer
atcagtattaggaatatgggttttga

SEQ ID NO: 18499 - DNA, 24 bp, Artificial sequence  Forward Primer
  Primer
atatcattgtcgtttcagagtgtg

SEQ ID NO: 18500 - DNA, 19 bp, Artificial sequence  Forward Primer
  Primer
tactcatggaagctggcag

SEQ ID NO: 18501 - DNA, 24 bp, Artificial sequence  Forward Primer
  Primer
ataggtaggtgatggatactgctt

SEQ ID NO: 18502 - DNA, 19 bp, Artificial sequence  Forward Primer
  Primer
tttttcacytgtctgatgg

SEQ ID NO: 18503 - DNA, 18 bp, Artificial sequence  Forward Primer
  Primer
atggcctgggtggggctt

SEQ ID NO: 18504 - DNA, 20 bp, Artificial sequence  Forward Primer
  Primer
gacaagtctgaatattgcca

SEQ ID NO: 18505 - DNA, 26 bp, Artificial sequence  Forward Primer
  Primer
ctataaatgtcctctctgacatctgt

SEQ ID NO: 18506 - DNA, 19 bp, Artificial sequence  Forward Primer
  Primer
tcggtcctcatgtcatgtt

SEQ ID NO: 18507 - DNA, 25 bp, Artificial sequence  Forward Primer
  Primer
atgaaggtagaatcttcacttaaca

SEQ ID NO: 18508 - DNA, 26 bp, Artificial sequence  Forward Primer
  Primer
tgtgtaatggacatttaaactgtttc

SEQ ID NO: 18509 - DNA, 23 bp, Artificial sequence  Forward Primer
  Primer
aagctgtttaatctcttgtgtgc

SEQ ID NO: 18510 - DNA, 25 bp, Artificial sequence  Forward Primer
  Primer
attcattgctgagtcatatctcatt

SEQ ID NO: 18511 - DNA, 29 bp, Artificial sequence  Forward Primer
  Primer
tctctactgaaagtgttattrtaaaggaa

SEQ ID NO: 18512 - DNA, 19 bp, Artificial sequence  Forward Primer
  Primer
ccacagagcaagaggtatc

SEQ ID NO: 18513 - DNA, 25 bp, Artificial sequence  Forward Primer
  Primer
ataagaaatgacacacacagttgac

SEQ ID NO: 18514 - DNA, 23 bp, Artificial sequence  Forward Primer
  Primer
ccagagtactaaacagagaggtt

SEQ ID NO: 18515 - DNA, 21 bp, Artificial sequence  Forward Primer
  Primer
attgggtttagttgttttctc

SEQ ID NO: 18516 - DNA, 23 bp, Artificial sequence  Forward Primer
  Primer
aaaaatagccttgggtcttatca

SEQ ID NO: 18517 - DNA, 22 bp, Artificial sequence  Forward Primer
  Primer
aaaactaatgcatcaacttgca

SEQ ID NO: 18518 - DNA, 26 bp, Artificial sequence  Forward Primer
  Primer
aaaaatgctttctcttaaaaacagtc

SEQ ID NO: 18519 - DNA, 19 bp, Artificial sequence  Forward Primer
  Primer
ggagactgggaaggagact

SEQ ID NO: 18520 - DNA, 19 bp, Artificial sequence  Forward Primer
  Primer
tttgaaggagccacaggtc

SEQ ID NO: 18521 - DNA, 18 bp, Artificial sequence  Forward Primer
  Primer
ttcratcaccaggcaagg

SEQ ID NO: 18522 - DNA, 21 bp, Artificial sequence  Forward Primer
  Primer
atttttccctttcctctcctg

SEQ ID NO: 18523 - DNA, 25 bp, Artificial sequence  Forward Primer
  Primer
agtcgtctraagaaaagtgaagatt

SEQ ID NO: 18524 - DNA, 30 bp, Artificial sequence  Forward Primer
  Primer
actcacaaagcttattactattattgaaga

SEQ ID NO: 18525 - DNA, 26 bp, Artificial sequence  Forward Primer
  Primer
aaatttctctttgctattttcacatc

SEQ ID NO: 18526 - DNA, 20 bp, Artificial sequence  Forward Primer
  Primer
aaacaaaggcctgagtcacc

SEQ ID NO: 18527 - DNA, 23 bp, Artificial sequence  Forward Primer
  Primer
tagatgggaagagcattaataca

SEQ ID NO: 18528 - DNA, 20 bp, Artificial sequence  Forward Primer
  Primer
tggtggacactaagggaaga

SEQ ID NO: 18529 - DNA, 19 bp, Artificial sequence  Forward Primer
  Primer
ttccctggtgatcaaatgg

SEQ ID NO: 18530 - DNA, 18 bp, Artificial sequence  Forward Primer
  Primer
ttcatcatggcctcctcc

SEQ ID NO: 18531 - DNA, 28 bp, Artificial sequence  Forward Primer
  Primer
ttttattatgtaagatgtgagttcatga

SEQ ID NO: 18532 - DNA, 21 bp, Artificial sequence  Forward Primer
  Primer
tgaagaactcggatgacatct

SEQ ID NO: 18533 - DNA, 23 bp, Artificial sequence  Forward Primer
  Primer
ttttgatacatgagactttggct

SEQ ID NO: 18534 - DNA, 25 bp, Artificial sequence  Forward Primer
  Primer
tttattttcctctttctcatctgaa

SEQ ID NO: 18535 - DNA, 27 bp, Artificial sequence  Forward Primer
  Primer
cttcaatraagttacattgttttcatc

SEQ ID NO: 18536 - DNA, 23 bp, Artificial sequence  Forward Primer
  Primer
aaaatttgtcgatgaaaactgtc

SEQ ID NO: 18537 - DNA, 26 bp, Artificial sequence  Forward Primer
  Primer
agataaacaaaacaagcattcatagc

SEQ ID NO: 18538 - DNA, 23 bp, Artificial sequence  Forward Primer
  Primer
taggcagaattgttattttacat

SEQ ID NO: 18539 - DNA, 20 bp, Artificial sequence  Forward Primer
  Primer
tgaccaaagtatggcagctt

SEQ ID NO: 18540 - DNA, 20 bp, Artificial sequence  Forward Primer
  Primer
ttagaaaaccgctggtgttg

SEQ ID NO: 18541 - DNA, 19 bp, Artificial sequence  Forward Primer
  Primer
aaatccagagcctggtatg

SEQ ID NO: 18542 - DNA, 27 bp, Artificial sequence  Forward Primer
  Primer
caagtgtatcttaagaatatcctagtg

SEQ ID NO: 18543 - DNA, 30 bp, Artificial sequence  Forward Primer
  Primer
ttattctacagttgttcttatttatttagg

SEQ ID NO: 18544 - DNA, 21 bp, Artificial sequence  Forward Primer
  Primer
aacagctgaacaacaagagag

SEQ ID NO: 18545 - DNA, 22 bp, Artificial sequence  Forward Primer
  Primer
tttattgctgtatccacaaggg

SEQ ID NO: 18546 - DNA, 28 bp, Artificial sequence  Forward Primer
  Primer
gtataattgccaaagtaactatcaaaca

SEQ ID NO: 18547 - DNA, 27 bp, Artificial sequence  Forward Primer
  Primer
attcttgacaaaaaataatgaggtatg

SEQ ID NO: 18548 - DNA, 25 bp, Artificial sequence  Forward Primer
  Primer
aaaaatcatgtgtaacattcaggtt

SEQ ID NO: 18549 - DNA, 29 bp, Artificial sequence  Forward Primer
  Primer
tttctttctataggtattttgactcagag

SEQ ID NO: 18550 - DNA, 19 bp, Artificial sequence  Forward Primer
  Primer
tactgtcctgtgatgccgt

SEQ ID NO: 18551 - DNA, 18 bp, Artificial sequence  Forward Primer
  Primer
atctggtggccaaggccg

SEQ ID NO: 18552 - DNA, 21 bp, Artificial sequence  Forward Primer
  Primer
aacagtgaaggaatcatccca

SEQ ID NO: 18553 - DNA, 19 bp, Artificial sequence  Forward Primer
  Primer
gatcacaggaagtggacga

SEQ ID NO: 18554 - DNA, 22 bp, Artificial sequence  Forward Primer
  Primer
ttaaattctccaggtcacacag

SEQ ID NO: 18555 - DNA, 18 bp, Artificial sequence  Forward Primer
  Primer
gcggacacagtggttttc

SEQ ID NO: 18556 - DNA, 22 bp, Artificial sequence  Forward Primer
  Primer
ctgatcagatctggttaaaggc

SEQ ID NO: 18557 - DNA, 20 bp, Artificial sequence  Forward Primer
  Primer
atgtctgaagcagtgaagaa

SEQ ID NO: 18558 - DNA, 26 bp, Artificial sequence  Forward Primer
  Primer
tttaaaatcatgttatttaacccacc

SEQ ID NO: 18559 - DNA, 24 bp, Artificial sequence  Forward Primer
  Primer
ttttcgttcttgctgaagtataac

SEQ ID NO: 18560 - DNA, 21 bp, Artificial sequence  Forward Primer
  Primer
aaaagaacctctctccccttt

SEQ ID NO: 18561 - DNA, 23 bp, Artificial sequence  Forward Primer
  Primer
ttatttaacccaccaatcaaatg

SEQ ID NO: 18562 - DNA, 24 bp, Artificial sequence  Forward Primer
  Primer
tctaattttcaacagatgaaagcc

SEQ ID NO: 18563 - DNA, 18 bp, Artificial sequence  Forward Primer
  Primer
tgctcctggaatgacagc

SEQ ID NO: 18564 - DNA, 24 bp, Artificial sequence  Forward Primer
  Primer
tgggtgaaatttgttttttagaat

SEQ ID NO: 18565 - DNA, 22 bp, Artificial sequence  Forward Primer
  Primer
actcgtccatcctgaataaaaa

SEQ ID NO: 18566 - DNA, 18 bp, Artificial sequence  Forward Primer
  Primer
gtgggaggactaggaggc

SEQ ID NO: 18567 - DNA, 23 bp, Artificial sequence  Forward Primer
  Primer
ataggcaggaaatatcctcttca

SEQ ID NO: 18568 - DNA, 18 bp, Artificial sequence  Forward Primer
  Primer
ttcgcctgctgttagctt

SEQ ID NO: 18569 - DNA, 23 bp, Artificial sequence  Forward Primer
  Primer
cagctcttagttgtgattaagtg

SEQ ID NO: 18570 - DNA, 19 bp, Artificial sequence  Forward Primer
  Primer
cagtacaaatgctggcacc

SEQ ID NO: 18571 - DNA, 28 bp, Artificial sequence  Forward Primer
  Primer
ttttaatttcctgaatcatttatctagc

SEQ ID NO: 18572 - DNA, 27 bp, Artificial sequence  Forward Primer
  Primer
tattattttcaaggggttaatagcata

SEQ ID NO: 18573 - DNA, 22 bp, Artificial sequence  Forward Primer
  Primer
tcagaggagagaatcacacacc

SEQ ID NO: 18574 - DNA, 21 bp, Artificial sequence  Forward Primer
  Primer
aaaagactcaaggtcagggac

SEQ ID NO: 18575 - DNA, 27 bp, Artificial sequence  Forward Primer
  Primer
tttaatttataagagaagcagaacgac

SEQ ID NO: 18576 - DNA, 18 bp, Artificial sequence  Forward Primer
  Primer
ttccctgtcaatgccagc

SEQ ID NO: 18577 - DNA, 24 bp, Artificial sequence  Forward Primer
  Primer
tttgagtaaaatttccaaaacagc

SEQ ID NO: 18578 - DNA, 24 bp, Artificial sequence  Forward Primer
  Primer
aagaaatgctaagattttccaaaa

SEQ ID NO: 18579 - DNA, 22 bp, Artificial sequence  Forward Primer
  Primer
accatcaagactcagctttctg

SEQ ID NO: 18580 - DNA, 19 bp, Artificial sequence  Forward Primer
  Primer
ctctcccacctcccataga

SEQ ID NO: 18581 - DNA, 19 bp, Artificial sequence  Forward Primer
  Primer
aacttagacccgaagcagc

SEQ ID NO: 18582 - DNA, 23 bp, Artificial sequence  Forward Primer
  Primer
tttaaaattttgccttcttttgg

SEQ ID NO: 18583 - DNA, 19 bp, Artificial sequence  Forward Primer
  Primer
tgcagttaattttgctgcg

SEQ ID NO: 18584 - DNA, 23 bp, Artificial sequence  Forward Primer
  Primer
ttgctgaattgtctctcttttca

SEQ ID NO: 18585 - DNA, 19 bp, Artificial sequence  Forward Primer
  Primer
aatcgaaccagggtctcct

SEQ ID NO: 18586 - DNA, 21 bp, Artificial sequence  Forward Primer
  Primer
ttgggaagaggtcttaggaaa

SEQ ID NO: 18587 - DNA, 18 bp, Artificial sequence  Forward Primer
  Primer
agtgccccctccttcctc

SEQ ID NO: 18588 - DNA, 28 bp, Artificial sequence  Forward Primer
  Primer
tttgcttacatttttagtagttctgaag

SEQ ID NO: 18589 - DNA, 19 bp, Artificial sequence  Forward Primer
  Primer
tgaggggaggctgtaaact

SEQ ID NO: 18590 - DNA, 28 bp, Artificial sequence  Forward Primer
  Primer
attcatagctctttagagaaaaagagaa

SEQ ID NO: 18591 - DNA, 27 bp, Artificial sequence  Forward Primer
  Primer
catactgcagaaattmttttcttaatg

SEQ ID NO: 18592 - DNA, 19 bp, Artificial sequence  Forward Primer
  Primer
tcagcacgtccacaaagtg

SEQ ID NO: 18593 - DNA, 23 bp, Artificial sequence  Forward Primer
  Primer
aatcaagacaatcaatcctttgt

SEQ ID NO: 18594 - DNA, 21 bp, Artificial sequence  Forward Primer
  Primer
aaattgcaggttaagaggagg

SEQ ID NO: 18595 - DNA, 20 bp, Artificial sequence  Forward Primer
  Primer
agtgagtgtcttggcatctg

SEQ ID NO: 18596 - DNA, 18 bp, Artificial sequence  Forward Primer
  Primer
caggatcacagcccccag

SEQ ID NO: 18597 - DNA, 20 bp, Artificial sequence  Forward Primer
  Primer
aatagtgtttgacggtgcct

SEQ ID NO: 18598 - DNA, 22 bp, Artificial sequence  Forward Primer
  Primer
agacatgactttgcaaatgaac

SEQ ID NO: 18599 - DNA, 27 bp, Artificial sequence  Forward Primer
  Primer
taaattataaatattaccagacgtccc

SEQ ID NO: 18600 - DNA, 18 bp, Artificial sequence  Forward Primer
  Primer
agatggctgaggcaccac

SEQ ID NO: 18601 - DNA, 18 bp, Artificial sequence  Forward Primer
  Primer
ccacttctcccagcccca

SEQ ID NO: 18602 - DNA, 27 bp, Artificial sequence  Forward Primer
  Primer
attatagagaaagtagaattcctgcac

SEQ ID NO: 18603 - DNA, 24 bp, Artificial sequence  Forward Primer
  Primer
agtgactgaacaacaacataaatt

SEQ ID NO: 18604 - DNA, 18 bp, Artificial sequence  Forward Primer
  Primer
agggctcaaaatcaggcc

SEQ ID NO: 18605 - DNA, 23 bp, Artificial sequence  Forward Primer
  Primer
aatgtaagcttaatgaaggcagg

SEQ ID NO: 18606 - DNA, 23 bp, Artificial sequence  Forward Primer
  Primer
agttaacattattagcgcagtgg

SEQ ID NO: 18607 - DNA, 23 bp, Artificial sequence  Forward Primer
  Primer
agttaagtgagaatcaatggctg

SEQ ID NO: 18608 - DNA, 24 bp, Artificial sequence  Forward Primer
  Primer
atataygcataatggatggatgtg

SEQ ID NO: 18609 - DNA, 30 bp, Artificial sequence  Forward Primer
  Primer
aataataatgaccaattttagaactgtact

SEQ ID NO: 18610 - DNA, 25 bp, Artificial sequence  Forward Primer
  Primer
aataaatactaggtcccacatctcc

SEQ ID NO: 18611 - DNA, 18 bp, Artificial sequence  Forward Primer
  Primer
ctgggtttgcagtttggc

SEQ ID NO: 18612 - DNA, 25 bp, Artificial sequence  Forward Primer
  Primer
taacaagttacaggaaaaatttggt

SEQ ID NO: 18613 - DNA, 30 bp, Artificial sequence  Forward Primer
  Primer
tacagaacaattaatcttttcttacgtatg

SEQ ID NO: 18614 - DNA, 23 bp, Artificial sequence  Forward Primer
  Primer
agctgaattgtaggcacttttta

SEQ ID NO: 18615 - DNA, 25 bp, Artificial sequence  Forward Primer
  Primer
ttgcccagaagaatattagtctcta

SEQ ID NO: 18616 - DNA, 30 bp, Artificial sequence  Forward Primer
  Primer
taagatatactgcattagcactattttagc

SEQ ID NO: 18617 - DNA, 25 bp, Artificial sequence  Forward Primer
  Primer
aaatttctccttttccttacacact

SEQ ID NO: 18618 - DNA, 24 bp, Artificial sequence  Forward Primer
  Primer
ttgacattattttttacctttgtg

SEQ ID NO: 18619 - DNA, 25 bp, Artificial sequence  Forward Primer
  Primer
tttttctctttactttgttttggtc

SEQ ID NO: 18620 - DNA, 27 bp, Artificial sequence  Forward Primer
  Primer
actctctgccagtatagtgaatactgt

SEQ ID NO: 18621 - DNA, 18 bp, Artificial sequence  Forward Primer
  Primer
aaggcccgcagtggacta

SEQ ID NO: 18622 - DNA, 27 bp, Artificial sequence  Forward Primer
  Primer
tttctcattcctttagtgtgaatatag

SEQ ID NO: 18623 - DNA, 25 bp, Artificial sequence  Forward Primer
  Primer
aaatgagctctttcacagtagctag

SEQ ID NO: 18624 - DNA, 28 bp, Artificial sequence  Forward Primer
  Primer
acctataaaatgaataagaaatgctttg

SEQ ID NO: 18625 - DNA, 27 bp, Artificial sequence  Forward Primer
  Primer
aaactaagtatttattaggagcccatt

SEQ ID NO: 18626 - DNA, 22 bp, Artificial sequence  Forward Primer
  Primer
taaagtaagcaggcttttgttg

SEQ ID NO: 18627 - DNA, 25 bp, Artificial sequence  Forward Primer
  Primer
cccaaaggacaaaaaagatattatt

SEQ ID NO: 18628 - DNA, 26 bp, Artificial sequence  Forward Primer
  Primer
tttatcctgatcagagagtcaattaa

SEQ ID NO: 18629 - DNA, 22 bp, Artificial sequence  Forward Primer
  Primer
tacagtgacacactcatccatg

SEQ ID NO: 18630 - DNA, 25 bp, Artificial sequence  Forward Primer
  Primer
aatttcaaacaatcatataggtcca

SEQ ID NO: 18631 - DNA, 27 bp, Artificial sequence  Forward Primer
  Primer
gctcttaacatcattcttgataatagg

SEQ ID NO: 18632 - DNA, 21 bp, Artificial sequence  Forward Primer
  Primer
agttagacagctgagggtaat

SEQ ID NO: 18633 - DNA, 27 bp, Artificial sequence  Forward Primer
  Primer
aaagctttttctctttatattccttgt

SEQ ID NO: 18634 - DNA, 23 bp, Artificial sequence  Forward Primer
  Primer
ttaagccaagaagaatctttacc

SEQ ID NO: 18635 - DNA, 27 bp, Artificial sequence  Forward Primer
  Primer
ttagtgatacctgaatagaactggatg

SEQ ID NO: 18636 - DNA, 24 bp, Artificial sequence  Forward Primer
  Primer
aaacatttgtctcattttgctata

SEQ ID NO: 18637 - DNA, 25 bp, Artificial sequence  Forward Primer
  Primer
gtagagatgtcctgaaaataattgc

SEQ ID NO: 18638 - DNA, 28 bp, Artificial sequence  Forward Primer
  Primer
ataaaaattagtaagatttacatgctgc

SEQ ID NO: 18639 - DNA, 23 bp, Artificial sequence  Forward Primer
  Primer
tggcaataaagatggatgattaa

SEQ ID NO: 18640 - DNA, 18 bp, Artificial sequence  Forward Primer
  Primer
mtttccccctccttctgg

SEQ ID NO: 18641 - DNA, 27 bp, Artificial sequence  Forward Primer
  Primer
ataagagcatgtgagatttataggata

SEQ ID NO: 18642 - DNA, 20 bp, Artificial sequence  Forward Primer
  Primer
aattcatttggtgtgcaaaa

SEQ ID NO: 18643 - DNA, 29 bp, Artificial sequence  Forward Primer
  Primer
aataaaaaaggtgtctactaaatgtgttg

SEQ ID NO: 18644 - DNA, 23 bp, Artificial sequence  Forward Primer
  Primer
tattttagagaacatgatgggga

SEQ ID NO: 18645 - DNA, 26 bp, Artificial sequence  Forward Primer
  Primer
acctctgatgttatgaagttcctagt

SEQ ID NO: 18646 - DNA, 25 bp, Artificial sequence  Forward Primer
  Primer
tatcttcaaagtagctgattcttct

SEQ ID NO: 18647 - DNA, 28 bp, Artificial sequence  Forward Primer
  Primer
taattgtgtaattttctgcaactactct

SEQ ID NO: 18648 - DNA, 25 bp, Artificial sequence  Forward Primer
  Primer
aagagaacagtgagtgatttttgaa

SEQ ID NO: 18649 - DNA, 24 bp, Artificial sequence  Forward Primer
  Primer
aaacatttagagccatttaaaccc

SEQ ID NO: 18650 - DNA, 25 bp, Artificial sequence  Forward Primer
  Primer
atatagagcacctactgacatcttt

SEQ ID NO: 18651 - DNA, 28 bp, Artificial sequence  Forward Primer
  Primer
ttttaagatttctctttcactctcataa

SEQ ID NO: 18652 - DNA, 21 bp, Artificial sequence  Forward Primer
  Primer
aaggggaaaaaacaaaacaaa

SEQ ID NO: 18653 - DNA, 19 bp, Artificial sequence  Forward Primer
  Primer
tttagggaatgttcagggg

SEQ ID NO: 18654 - DNA, 26 bp, Artificial sequence  Forward Primer
  Primer
gttaaaagagtattgaaggtcctcac

SEQ ID NO: 18655 - DNA, 18 bp, Artificial sequence  Forward Primer
  Primer
agcagtgaaccacagccc

SEQ ID NO: 18656 - DNA, 19 bp, Artificial sequence  Forward Primer
  Primer
aaatgtacccatgcctccc

SEQ ID NO: 18657 - DNA, 23 bp, Artificial sequence  Forward Primer
  Primer
tttaaatagtgaaaggccatgaa

SEQ ID NO: 18658 - DNA, 19 bp, Artificial sequence  Forward Primer
  Primer
tgtccttccaagctcacct

SEQ ID NO: 18659 - DNA, 26 bp, Artificial sequence  Forward Primer
  Primer
actttggaatagctgcttaaaaataa

SEQ ID NO: 18660 - DNA, 23 bp, Artificial sequence  Forward Primer
  Primer
tttttaatgtttccttgtggtcc

SEQ ID NO: 18661 - DNA, 20 bp, Artificial sequence  Forward Primer
  Primer
tttaaaagggaagctgctgg

SEQ ID NO: 18662 - DNA, 24 bp, Artificial sequence  Forward Primer
  Primer
ttgtgagaatgacttacaaggaga

SEQ ID NO: 18663 - DNA, 23 bp, Artificial sequence  Forward Primer
  Primer
tcagtttttaaagyagaggtgca

SEQ ID NO: 18664 - DNA, 23 bp, Artificial sequence  Forward Primer
  Primer
aagtttaaaggtgagaaagtgcc

SEQ ID NO: 18665 - DNA, 22 bp, Artificial sequence  Forward Primer
  Primer
acaattgttgagctgaaatttt

SEQ ID NO: 18666 - DNA, 23 bp, Artificial sequence  Forward Primer
  Primer
aaaagcacttgaaatgattcaaa

SEQ ID NO: 18667 - DNA, 23 bp, Artificial sequence  Forward Primer
  Primer
ttcatcccagagtaaaaatatca

SEQ ID NO: 18668 - DNA, 22 bp, Artificial sequence  Forward Primer
  Primer
atcatctccttgtctgtgttag

SEQ ID NO: 18669 - DNA, 19 bp, Artificial sequence  Forward Primer
  Primer
actgcccctgcacagtaat

SEQ ID NO: 18670 - DNA, 19 bp, Artificial sequence  Forward Primer
  Primer
aatgcaccttgaccctcac

SEQ ID NO: 18671 - DNA, 18 bp, Artificial sequence  Forward Primer
  Primer
tgctgcaggagagcccac

SEQ ID NO: 18672 - DNA, 21 bp, Artificial sequence  Forward Primer
  Primer
ttaccagagaggaaaagacct

SEQ ID NO: 18673 - DNA, 23 bp, Artificial sequence  Forward Primer
  Primer
ttttaaaaattcatgtgcaaacc

SEQ ID NO: 18674 - DNA, 18 bp, Artificial sequence  Forward Primer
  Primer
gcaagggactctactgcg

SEQ ID NO: 18675 - DNA, 20 bp, Artificial sequence  Forward Primer
  Primer
attatggtgatggttgcaca

SEQ ID NO: 18676 - DNA, 30 bp, Artificial sequence  Forward Primer
  Primer
gattttcatagtattgctcttcagtatatc

SEQ ID NO: 18677 - DNA, 26 bp, Artificial sequence  Forward Primer
  Primer
ttatctaaagcatatggctctctctt

SEQ ID NO: 18678 - DNA, 18 bp, Artificial sequence  Forward Primer
  Primer
acccagacttggattggg

SEQ ID NO: 18679 - DNA, 18 bp, Artificial sequence  Forward Primer
  Primer
tgggtttggcctggagta

SEQ ID NO: 18680 - DNA, 25 bp, Artificial sequence  Forward Primer
  Primer
aattggatgctttagtcacagttat

SEQ ID NO: 18681 - DNA, 27 bp, Artificial sequence  Forward Primer
  Primer
aaatctaaataattaaaccatatgcgc

SEQ ID NO: 18682 - DNA, 20 bp, Artificial sequence  Forward Primer
  Primer
aaccaatcacagtgggaaca

SEQ ID NO: 18683 - DNA, 28 bp, Artificial sequence  Forward Primer
  Primer
ataattctgaagctgtactagtttcctt

SEQ ID NO: 18684 - DNA, 20 bp, Artificial sequence  Forward Primer
  Primer
tgaagaagttcgtccagagt

SEQ ID NO: 18685 - DNA, 27 bp, Artificial sequence  Forward Primer
  Primer
gttagttattattccatcttccagaag

SEQ ID NO: 18686 - DNA, 21 bp, Artificial sequence  Forward Primer
  Primer
tttgtcagcttcatcaagtcc

SEQ ID NO: 18687 - DNA, 18 bp, Artificial sequence  Forward Primer
  Primer
ctcctcagctgtggacca

SEQ ID NO: 18688 - DNA, 23 bp, Artificial sequence  Forward Primer
  Primer
cccagtttcctacttggatttat

SEQ ID NO: 18689 - DNA, 21 bp, Artificial sequence  Forward Primer
  Primer
tttcttgcattgatctttctc

SEQ ID NO: 18690 - DNA, 25 bp, Artificial sequence  Forward Primer
  Primer
aaaatgtgagagagaagatgaagag

SEQ ID NO: 18691 - DNA, 18 bp, Artificial sequence  Forward Primer
  Primer
gccttctgttgaccccag

SEQ ID NO: 18692 - DNA, 26 bp, Artificial sequence  Forward Primer
  Primer
cttacatttaaccaaagttttatggc

SEQ ID NO: 18693 - DNA, 22 bp, Artificial sequence  Forward Primer
  Primer
aaaagcaattggcttatcagtt

SEQ ID NO: 18694 - DNA, 23 bp, Artificial sequence  Forward Primer
  Primer
atttttccctccctaacctttaa

SEQ ID NO: 18695 - DNA, 20 bp, Artificial sequence  Forward Primer
  Primer
aaaaagaggtggtggtcatg

SEQ ID NO: 18696 - DNA, 19 bp, Artificial sequence  Forward Primer
  Primer
tgagaaaccctttgactgt

SEQ ID NO: 18697 - DNA, 18 bp, Artificial sequence  Forward Primer
  Primer
tggcagaagagccatcgg

SEQ ID NO: 18698 - DNA, 24 bp, Artificial sequence  Forward Primer
  Primer
ttacaggtgatcaagctctacaga

SEQ ID NO: 18699 - DNA, 20 bp, Artificial sequence  Forward Primer
  Primer
accccataatgctcagttcc

SEQ ID NO: 18700 - DNA, 19 bp, Artificial sequence  Forward Primer
  Primer
taggatctgcgtgrgagtg

SEQ ID NO: 18701 - DNA, 24 bp, Artificial sequence  Forward Primer
  Primer
tacaagtttgtaggttcaccacac

SEQ ID NO: 18702 - DNA, 25 bp, Artificial sequence  Forward Primer
  Primer
acagtttgaaaattctttctctaga

SEQ ID NO: 18703 - DNA, 30 bp, Artificial sequence  Forward Primer
  Primer
agtttgaaaattctttctctagattaagtc

SEQ ID NO: 18704 - DNA, 23 bp, Artificial sequence  Forward Primer
  Primer
atccaacgctctgaaatagagtt

SEQ ID NO: 18705 - DNA, 28 bp, Artificial sequence  Forward Primer
  Primer
atcagatataaatgagtgaacatagctg

SEQ ID NO: 18706 - DNA, 30 bp, Artificial sequence  Forward Primer
  Primer
attagcagatgcaaagtactacatatagat

SEQ ID NO: 18707 - DNA, 24 bp, Artificial sequence  Forward Primer
  Primer
aaagaaaatacaattccaaggtga

SEQ ID NO: 18708 - DNA, 23 bp, Artificial sequence  Forward Primer
  Primer
tcactaggggaagaaaatggtat

SEQ ID NO: 18709 - DNA, 23 bp, Artificial sequence  Forward Primer
  Primer
aaacagatagaaccatttgtcca

SEQ ID NO: 18710 - DNA, 27 bp, Artificial sequence  Forward Primer
  Primer
aaaaacaagatgattaatttcagagtc

SEQ ID NO: 18711 - DNA, 26 bp, Artificial sequence  Forward Primer
  Primer
cccttgatatttctaacatgtcatta

SEQ ID NO: 18712 - DNA, 20 bp, Artificial sequence  Forward Primer
  Primer
actgcccactttttggtctt

SEQ ID NO: 18713 - DNA, 20 bp, Artificial sequence  Forward Primer
  Primer
atggtcccttcagagtgacg

SEQ ID NO: 18714 - DNA, 28 bp, Artificial sequence  Forward Primer
  Primer
aaatatgtgaattctcactactttctga

SEQ ID NO: 18715 - DNA, 18 bp, Artificial sequence  Forward Primer
  Primer
ccccaggacgaggaggaa

SEQ ID NO: 18716 - DNA, 27 bp, Artificial sequence  Forward Primer
  Primer
atatgagagatgaagttgttatcttgg

SEQ ID NO: 18717 - DNA, 19 bp, Artificial sequence  Forward Primer
  Primer
atccttcaccatgacagcc

SEQ ID NO: 18718 - DNA, 23 bp, Artificial sequence  Forward Primer
  Primer
cttagctgctctgtctttgaaat

SEQ ID NO: 18719 - DNA, 22 bp, Artificial sequence  Forward Primer
  Primer
acagtaagagctcaacaatcac

SEQ ID NO: 18720 - DNA, 23 bp, Artificial sequence  Forward Primer
  Primer
agggtgggatatattagttttag

SEQ ID NO: 18721 - DNA, 21 bp, Artificial sequence  Forward Primer
  Primer
tcttctttgacatcaccagca

SEQ ID NO: 18722 - DNA, 27 bp, Artificial sequence  Forward Primer
  Primer
aaagttgagacttaactcttctttcct

SEQ ID NO: 18723 - DNA, 23 bp, Artificial sequence  Forward Primer
  Primer
ataattcagaaggcagttggagt

SEQ ID NO: 18724 - DNA, 18 bp, Artificial sequence  Forward Primer
  Primer
atgttgaagctgcttggc

SEQ ID NO: 18725 - DNA, 19 bp, Artificial sequence  Forward Primer
  Primer
gaatccactcagggaagga

SEQ ID NO: 18726 - DNA, 21 bp, Artificial sequence  Forward Primer
  Primer
taaaaatggagtcgggttttg

SEQ ID NO: 18727 - DNA, 19 bp, Artificial sequence  Forward Primer
  Primer
ccacaacaaaagatccaca

SEQ ID NO: 18728 - DNA, 19 bp, Artificial sequence  Forward Primer
  Primer
attatgcagtgttggtgtg

SEQ ID NO: 18729 - DNA, 23 bp, Artificial sequence  Forward Primer
  Primer
tttttcagagaagaaatcaagcc

SEQ ID NO: 18730 - DNA, 18 bp, Artificial sequence  Forward Primer
  Primer
agcgggtgagctygccta

SEQ ID NO: 18731 - DNA, 22 bp, Artificial sequence  Forward Primer
  Primer
atgcctggaatttttttattgg

SEQ ID NO: 18732 - DNA, 21 bp, Artificial sequence  Forward Primer
  Primer
tgagtaagcagcagaggaagc

SEQ ID NO: 18733 - DNA, 22 bp, Artificial sequence  Forward Primer
  Primer
agcctgatgtaaccttgtgtac

SEQ ID NO: 18734 - DNA, 20 bp, Artificial sequence  Forward Primer
  Primer
agactgactaagctgagccc

SEQ ID NO: 18735 - DNA, 23 bp, Artificial sequence  Forward Primer
  Primer
ataattcagaaggcagttggagt

SEQ ID NO: 18736 - DNA, 23 bp, Artificial sequence  Forward Primer
  Primer
caacatcctaccccaataaaatt

SEQ ID NO: 18737 - DNA, 25 bp, Artificial sequence  Forward Primer
  Primer
tttttctgtgacaccagttaaactc

SEQ ID NO: 18738 - DNA, 20 bp, Artificial sequence  Forward Primer
  Primer
tcaaaagtcaaattccttgg

SEQ ID NO: 18739 - DNA, 20 bp, Artificial sequence  Forward Primer
  Primer
ccccagataaatgtacagca

SEQ ID NO: 18740 - DNA, 28 bp, Artificial sequence  Forward Primer
  Primer
tttatctcatttatatgaacacctctga

SEQ ID NO: 18741 - DNA, 27 bp, Artificial sequence  Forward Primer
  Primer
aagaaatgagtacaggaaattcttttt

SEQ ID NO: 18742 - DNA, 27 bp, Artificial sequence  Forward Primer
  Primer
attgtgtccgttacagactttattatg

SEQ ID NO: 18743 - DNA, 20 bp, Artificial sequence  Forward Primer
  Primer
tgcctgtccttctttgtatc

SEQ ID NO: 18744 - DNA, 27 bp, Artificial sequence  Forward Primer
  Primer
aattatcttgatagagccttacaaaac

SEQ ID NO: 18745 - DNA, 21 bp, Artificial sequence  Forward Primer
  Primer
aaaaagctgaacaactttgca

SEQ ID NO: 18746 - DNA, 22 bp, Artificial sequence  Forward Primer
  Primer
tattgtcatgttcatcccaaat

SEQ ID NO: 18747 - DNA, 19 bp, Artificial sequence  Forward Primer
  Primer
agggacacagtttgcacaa

SEQ ID NO: 18748 - DNA, 20 bp, Artificial sequence  Forward Primer
  Primer
agatttcctcttgtcccagg

SEQ ID NO: 18749 - DNA, 19 bp, Artificial sequence  Forward Primer
  Primer
cacactgaccacctccaga

SEQ ID NO: 18750 - DNA, 23 bp, Artificial sequence  Forward Primer
  Primer
atctacttcccatgacacagagc

SEQ ID NO: 18751 - DNA, 29 bp, Artificial sequence  Forward Primer
  Primer
ggttaaaaagaaattctgttacaatgtac

SEQ ID NO: 18752 - DNA, 21 bp, Artificial sequence  Forward Primer
  Primer
atgtcagggatttgcttctta

SEQ ID NO: 18753 - DNA, 19 bp, Artificial sequence  Forward Primer
  Primer
tagattgcatttcggctga

SEQ ID NO: 18754 - DNA, 21 bp, Artificial sequence  Forward Primer
  Primer
ggcagaaatgatcttcaaggt

SEQ ID NO: 18755 - DNA, 20 bp, Artificial sequence  Forward Primer
  Primer
agtccatttggtatacaggg

SEQ ID NO: 18756 - DNA, 22 bp, Artificial sequence  Forward Primer
  Primer
attgaaatccgaaacagaagaa

SEQ ID NO: 18757 - DNA, 30 bp, Artificial sequence  Forward Primer
  Primer
gagacaggtatattatgtagttcttaaagt

SEQ ID NO: 18758 - DNA, 28 bp, Artificial sequence  Forward Primer
  Primer
aataaggaaaagaatctgaaaacattac

SEQ ID NO: 18759 - DNA, 27 bp, Artificial sequence  Forward Primer
  Primer
tattcaaaattaaacaatgaggagaag

SEQ ID NO: 18760 - DNA, 20 bp, Artificial sequence  Forward Primer
  Primer
tttctgaaaaccaagcgaag

SEQ ID NO: 18761 - DNA, 23 bp, Artificial sequence  Forward Primer
  Primer
agagtggtttttctttttcagtg

SEQ ID NO: 18762 - DNA, 18 bp, Artificial sequence  Forward Primer
  Primer
ttccttgggagtgaccac

SEQ ID NO: 18763 - DNA, 23 bp, Artificial sequence  Forward Primer
  Primer
aaataatgtggcagtatcttgca

SEQ ID NO: 18764 - DNA, 30 bp, Artificial sequence  Forward Primer
  Primer
ataattattaactaactcaatcctacctaa

SEQ ID NO: 18765 - DNA, 27 bp, Artificial sequence  Forward Primer
  Primer
aaaagatattggagactctttatttgc

SEQ ID NO: 18766 - DNA, 19 bp, Artificial sequence  Forward Primer
  Primer
gcaggttgactcatgtgaa

SEQ ID NO: 18767 - DNA, 30 bp, Artificial sequence  Forward Primer
  Primer
aatcaattaatctatctacctatctacagt

SEQ ID NO: 18768 - DNA, 26 bp, Artificial sequence  Forward Primer
  Primer
atctaaagaatagcacccaacttaaa

SEQ ID NO: 18769 - DNA, 28 bp, Artificial sequence  Forward Primer
  Primer
attacagagtatagagtagagttccctg

SEQ ID NO: 18770 - DNA, 30 bp, Artificial sequence  Forward Primer
  Primer
aaatatagatagtattcagtctgcagagta

SEQ ID NO: 18771 - DNA, 20 bp, Artificial sequence  Forward Primer
  Primer
caaggggacagtgagtgact

SEQ ID NO: 18772 - DNA, 24 bp, Artificial sequence  Forward Primer
  Primer
ggttacatccaattttataacttc

SEQ ID NO: 18773 - DNA, 29 bp, Artificial sequence  Forward Primer
  Primer
ataaattagagatactccaagttgaaacc

SEQ ID NO: 18774 - DNA, 20 bp, Artificial sequence  Forward Primer
  Primer
aatcctctgtgacttttgct

SEQ ID NO: 18775 - DNA, 19 bp, Artificial sequence  Forward Primer
  Primer
tttctgcctttggtgttgg

SEQ ID NO: 18776 - DNA, 20 bp, Artificial sequence  Forward Primer
  Primer
atagaagcctggaggaactg

SEQ ID NO: 18777 - DNA, 19 bp, Artificial sequence  Forward Primer
  Primer
atcctctgagcagtgatgg

SEQ ID NO: 18778 - DNA, 29 bp, Artificial sequence  Forward Primer
  Primer
tcaactacttttgatcttaacactacagt

SEQ ID NO: 18779 - DNA, 25 bp, Artificial sequence  Forward Primer
  Primer
aatacatgtttatggaacgaattca

SEQ ID NO: 18780 - DNA, 20 bp, Artificial sequence  Forward Primer
  Primer
ctgattttcaggccctcttc

SEQ ID NO: 18781 - DNA, 27 bp, Artificial sequence  Forward Primer
  Primer
acactttatctactgtcatatctgcag

SEQ ID NO: 18782 - DNA, 18 bp, Artificial sequence  Forward Primer
  Primer
attcctgagtccctggcc

SEQ ID NO: 18783 - DNA, 30 bp, Artificial sequence  Forward Primer
  Primer
ctcatttattatgtcaactctaaattctac

SEQ ID NO: 18784 - DNA, 30 bp, Artificial sequence  Forward Primer
  Primer
tattttagaagatcttattcttagctcact

SEQ ID NO: 18785 - DNA, 30 bp, Artificial sequence  Forward Primer
  Primer
tcatattttagattccacctataagtaata

SEQ ID NO: 18786 - DNA, 21 bp, Artificial sequence  Forward Primer
  Primer
atccaccttttcttttaactg

SEQ ID NO: 18787 - DNA, 21 bp, Artificial sequence  Forward Primer
  Primer
atgtttagcagacagggaagc

SEQ ID NO: 18788 - DNA, 29 bp, Artificial sequence  Forward Primer
  Primer
cagatatatttaaataaagtttggtgtgg

SEQ ID NO: 18789 - DNA, 25 bp, Artificial sequence  Forward Primer
  Primer
tgtactcttcatttaaacattgcac

SEQ ID NO: 18790 - DNA, 22 bp, Artificial sequence  Forward Primer
  Primer
cctggttatgagtgtgacaata

SEQ ID NO: 18791 - DNA, 23 bp, Artificial sequence  Forward Primer
  Primer
ttttgtttttccagtatttcagc

SEQ ID NO: 18792 - DNA, 24 bp, Artificial sequence  Forward Primer
  Primer
ttgttttacaagagaccatcaaaa

SEQ ID NO: 18793 - DNA, 28 bp, Artificial sequence  Forward Primer
  Primer
aaaaagcttattttcgtatggttatatc

SEQ ID NO: 18794 - DNA, 24 bp, Artificial sequence  Forward Primer
  Primer
gcatgtgactaatcagaaatctct

SEQ ID NO: 18795 - DNA, 24 bp, Artificial sequence  Forward Primer
  Primer
aaaaatgcttctgcttttacaatt

SEQ ID NO: 18796 - DNA, 22 bp, Artificial sequence  Forward Primer
  Primer
tggtcacttctctttcctttct

SEQ ID NO: 18797 - DNA, 20 bp, Artificial sequence  Forward Primer
  Primer
agagctctttttctccaccc

SEQ ID NO: 18798 - DNA, 19 bp, Artificial sequence  Forward Primer
  Primer
aagctttgtctgcatgtgt

SEQ ID NO: 18799 - DNA, 18 bp, Artificial sequence  Forward Primer
  Primer
tcaggagcatctgggtcc

SEQ ID NO: 18800 - DNA, 27 bp, Artificial sequence  Forward Primer
  Primer
tcatatttgaaagaaattaaacagagg

SEQ ID NO: 18801 - DNA, 24 bp, Artificial sequence  Forward Primer
  Primer
gctgagagagaccactttttctaa

SEQ ID NO: 18802 - DNA, 22 bp, Artificial sequence  Forward Primer
  Primer
ataaagacattttcccaaaccc

SEQ ID NO: 18803 - DNA, 27 bp, Artificial sequence  Forward Primer
  Primer
gagaactttttcctgaattttaacttt

SEQ ID NO: 18804 - DNA, 30 bp, Artificial sequence  Forward Primer
  Primer
taattaaaccagtaagactaagtaaggtta

SEQ ID NO: 18805 - DNA, 22 bp, Artificial sequence  Forward Primer
  Primer
aaaatatcctgatgaaaagtgc

SEQ ID NO: 18806 - DNA, 19 bp, Artificial sequence  Forward Primer
  Primer
agggggttgttttgatgag

SEQ ID NO: 18807 - DNA, 21 bp, Artificial sequence  Forward Primer
  Primer
tcccacttttcacatattcca

SEQ ID NO: 18808 - DNA, 24 bp, Artificial sequence  Forward Primer
  Primer
tttaaggactcattgtcatccttt

SEQ ID NO: 18809 - DNA, 24 bp, Artificial sequence  Forward Primer
  Primer
aaatcgatggagaaaagttacaca

SEQ ID NO: 18810 - DNA, 19 bp, Artificial sequence  Forward Primer
  Primer
tatctgccaggctagggtc

SEQ ID NO: 18811 - DNA, 23 bp, Artificial sequence  Forward Primer
  Primer
aaaaaaacctggctgttaataat

SEQ ID NO: 18812 - DNA, 19 bp, Artificial sequence  Forward Primer
  Primer
agggatggctcagaaatga

SEQ ID NO: 18813 - DNA, 18 bp, Artificial sequence  Forward Primer
  Primer
acgtgctcatgatgggtt

SEQ ID NO: 18814 - DNA, 20 bp, Artificial sequence  Forward Primer
  Primer
cggtaccctgaaaacacaca

SEQ ID NO: 18815 - DNA, 21 bp, Artificial sequence  Forward Primer
  Primer
tgtccaacttggtgcttttaa

SEQ ID NO: 18816 - DNA, 18 bp, Artificial sequence  Forward Primer
  Primer
tggctgattttgaccccc

SEQ ID NO: 18817 - DNA, 24 bp, Artificial sequence  Forward Primer
  Primer
attcatctgaaagtttgactgtgg

SEQ ID NO: 18818 - DNA, 20 bp, Artificial sequence  Forward Primer
  Primer
tgctttcttcagcttttgct

SEQ ID NO: 18819 - DNA, 22 bp, Artificial sequence  Forward Primer
  Primer
atagcaaactttcaaaatgcct

SEQ ID NO: 18820 - DNA, 24 bp, Artificial sequence  Forward Primer
  Primer
aaaagaaaggacctgtgttctaaa

SEQ ID NO: 18821 - DNA, 18 bp, Artificial sequence  Forward Primer
  Primer
acacacagcattcatggg

SEQ ID NO: 18822 - DNA, 22 bp, Artificial sequence  Forward Primer
  Primer
tatcacatcccttgttcctttt

SEQ ID NO: 18823 - DNA, 27 bp, Artificial sequence  Forward Primer
  Primer
taactagtttctctgtacccactattg

SEQ ID NO: 18824 - DNA, 20 bp, Artificial sequence  Forward Primer
  Primer
acaaagggtctctcctgtgt

SEQ ID NO: 18825 - DNA, 27 bp, Artificial sequence  Forward Primer
  Primer
ttaacaaaatgtctttcaaggaatatg

SEQ ID NO: 18826 - DNA, 19 bp, Artificial sequence  Forward Primer
  Primer
tgtgtatccaggaacagct

SEQ ID NO: 18827 - DNA, 19 bp, Artificial sequence  Forward Primer
  Primer
ttgggaaaccgctaagaac

SEQ ID NO: 18828 - DNA, 19 bp, Artificial sequence  Forward Primer
  Primer
tggaaagcttaggaagtgt

SEQ ID NO: 18829 - DNA, 23 bp, Artificial sequence  Forward Primer
  Primer
aacactgaatgagtaacaggcag

SEQ ID NO: 18830 - DNA, 26 bp, Artificial sequence  Forward Primer
  Primer
aatagtaattacaagacatggatggc

SEQ ID NO: 18831 - DNA, 22 bp, Artificial sequence  Forward Primer
  Primer
agttttaaccactggatcacca

SEQ ID NO: 18832 - DNA, 24 bp, Artificial sequence  Forward Primer
  Primer
tttgaatctcagctctaccaattt

SEQ ID NO: 18833 - DNA, 26 bp, Artificial sequence  Forward Primer
  Primer
accaaactctaaacaagataaaactc

SEQ ID NO: 18834 - DNA, 25 bp, Artificial sequence  Forward Primer
  Primer
agctttaaatgaatttgactttctg

SEQ ID NO: 18835 - DNA, 23 bp, Artificial sequence  Forward Primer
  Primer
gagactagttcaatccttagccc

SEQ ID NO: 18836 - DNA, 20 bp, Artificial sequence  Forward Primer
  Primer
tcctcactctkatggcaaac

SEQ ID NO: 18837 - DNA, 29 bp, Artificial sequence  Forward Primer
  Primer
tattataggagtttgttagtgaaaggaaa

SEQ ID NO: 18838 - DNA, 19 bp, Artificial sequence  Forward Primer
  Primer
ctgcctgagtgttctggtg

SEQ ID NO: 18839 - DNA, 23 bp, Artificial sequence  Forward Primer
  Primer
aaatgaacacacaaatacccatg

SEQ ID NO: 18840 - DNA, 28 bp, Artificial sequence  Forward Primer
  Primer
aatgaagctttactaaaagtatgactgc

SEQ ID NO: 18841 - DNA, 27 bp, Artificial sequence  Forward Primer
  Primer
ccttttttcccttcttttatttaatag

SEQ ID NO: 18842 - DNA, 22 bp, Artificial sequence  Forward Primer
  Primer
attattctcccatgaaaggagg

SEQ ID NO: 18843 - DNA, 25 bp, Artificial sequence  Forward Primer
  Primer
aatgttaatctcattcagaaactcc

SEQ ID NO: 18844 - DNA, 23 bp, Artificial sequence  Forward Primer
  Primer
acttgtctcttttgtttccaaac

SEQ ID NO: 18845 - DNA, 20 bp, Artificial sequence  Forward Primer
  Primer
agggcaaagaatgaaaatgt

SEQ ID NO: 18846 - DNA, 21 bp, Artificial sequence  Forward Primer
  Primer
tgaaaagaaacagaaatgcta

SEQ ID NO: 18847 - DNA, 19 bp, Artificial sequence  Forward Primer
  Primer
aacgccttgatcttggact

SEQ ID NO: 18848 - DNA, 23 bp, Artificial sequence  Forward Primer
  Primer
ctctttctctagggaaatgtaat

SEQ ID NO: 18849 - DNA, 25 bp, Artificial sequence  Forward Primer
  Primer
aaaagagtacctttggtttgtatga

SEQ ID NO: 18850 - DNA, 21 bp, Artificial sequence  Forward Primer
  Primer
aaaaactgacacctgggtttc

SEQ ID NO: 18851 - DNA, 25 bp, Artificial sequence  Forward Primer
  Primer
ttgtcattgtaatatgttggagatg

SEQ ID NO: 18852 - DNA, 20 bp, Artificial sequence  Forward Primer
  Primer
agaacatcctagtcatcggg

SEQ ID NO: 18853 - DNA, 18 bp, Artificial sequence  Forward Primer
  Primer
aaaatccatatggcccca

SEQ ID NO: 18854 - DNA, 18 bp, Artificial sequence  Forward Primer
  Primer
acaccagcatctgctccc

SEQ ID NO: 18855 - DNA, 22 bp, Artificial sequence  Forward Primer
  Primer
aatgaactggaaaaccatctga

SEQ ID NO: 18856 - DNA, 26 bp, Artificial sequence  Forward Primer
  Primer
ttttcttttaggatagaaagagggta

SEQ ID NO: 18857 - DNA, 22 bp, Artificial sequence  Forward Primer
  Primer
aaaaaattctggaaatggatgc

SEQ ID NO: 18858 - DNA, 24 bp, Artificial sequence  Forward Primer
  Primer
agtaatataatagaacttccctgc

SEQ ID NO: 18859 - DNA, 18 bp, Artificial sequence  Forward Primer
  Primer
tcctcacagaaggcgtgt

SEQ ID NO: 18860 - DNA, 26 bp, Artificial sequence  Forward Primer
  Primer
ttagttcattgagaggaagttaggtt

SEQ ID NO: 18861 - DNA, 19 bp, Artificial sequence  Forward Primer
  Primer
ttgccaaatgaaagttgga

SEQ ID NO: 18862 - DNA, 25 bp, Artificial sequence  Forward Primer
  Primer
aaatatttgtattgtatccacggaa

SEQ ID NO: 18863 - DNA, 24 bp, Artificial sequence  Forward Primer
  Primer
ttcatctccctgatttttaaattt

SEQ ID NO: 18864 - DNA, 25 bp, Artificial sequence  Forward Primer
  Primer
tctagtttaccatcatatttaggat

SEQ ID NO: 18865 - DNA, 20 bp, Artificial sequence  Forward Primer
  Primer
gcatcaagtgctgtcagttt

SEQ ID NO: 18866 - DNA, 25 bp, Artificial sequence  Forward Primer
  Primer
attgattcaagtgtaagagacttcc

SEQ ID NO: 18867 - DNA, 29 bp, Artificial sequence  Forward Primer
  Primer
aataataaattcttagtttcctagggttg

SEQ ID NO: 18868 - DNA, 27 bp, Artificial sequence  Forward Primer
  Primer
agaaatgtgtaaattagraagttcctc

SEQ ID NO: 18869 - DNA, 24 bp, Artificial sequence  Forward Primer
  Primer
aaagaaccactacttacggtgaac

SEQ ID NO: 18870 - DNA, 18 bp, Artificial sequence  Forward Primer
  Primer
agatgtgcctggaccatg

SEQ ID NO: 18871 - DNA, 22 bp, Artificial sequence  Forward Primer
  Primer
actttggtgtcttcttaccaag

SEQ ID NO: 18872 - DNA, 18 bp, Artificial sequence  Forward Primer
  Primer
acgattccaggctccttg

SEQ ID NO: 18873 - DNA, 19 bp, Artificial sequence  Forward Primer
  Primer
cttggatggtgtctcagcc

SEQ ID NO: 18874 - DNA, 20 bp, Artificial sequence  Forward Primer
  Primer
caacagcctgtggaaagaga

SEQ ID NO: 18875 - DNA, 18 bp, Artificial sequence  Forward Primer
  Primer
actgctgggtccatgcct

SEQ ID NO: 18876 - DNA, 28 bp, Artificial sequence  Forward Primer
  Primer
cccttatttttgttttaaattatgtagg

SEQ ID NO: 18877 - DNA, 24 bp, Artificial sequence  Forward Primer
  Primer
ttacattcctaatctcagccaact

SEQ ID NO: 18878 - DNA, 28 bp, Artificial sequence  Forward Primer
  Primer
aatgtctatttacacagatttctgactg

SEQ ID NO: 18879 - DNA, 25 bp, Artificial sequence  Forward Primer
  Primer
ttggaacattgtgtaatgatattgt

SEQ ID NO: 18880 - DNA, 23 bp, Artificial sequence  Forward Primer
  Primer
acacaaatatgttctgacagttg

SEQ ID NO: 18881 - DNA, 18 bp, Artificial sequence  Forward Primer
  Primer
tatgctgcccttgcaaac

SEQ ID NO: 18882 - DNA, 19 bp, Artificial sequence  Forward Primer
  Primer
aggtgggtgaaggtcttga

SEQ ID NO: 18883 - DNA, 23 bp, Artificial sequence  Forward Primer
  Primer
aaattcagctttaagaggctctg

SEQ ID NO: 18884 - DNA, 27 bp, Artificial sequence  Forward Primer
  Primer
ggggttttagtacctatatcrtttttt

SEQ ID NO: 18885 - DNA, 18 bp, Artificial sequence  Forward Primer
  Primer
acctgggtgaagatgggt

SEQ ID NO: 18886 - DNA, 20 bp, Artificial sequence  Forward Primer
  Primer
agagattgcccaagaaatgc

SEQ ID NO: 18887 - DNA, 22 bp, Artificial sequence  Forward Primer
  Primer
ttgaaatcaagatgtgaagtgg

SEQ ID NO: 18888 - DNA, 22 bp, Artificial sequence  Forward Primer
  Primer
aacatcaaaggmggtgataact

SEQ ID NO: 18889 - DNA, 24 bp, Artificial sequence  Forward Primer
  Primer
ttattttcctaaagatcctgagca

SEQ ID NO: 18890 - DNA, 28 bp, Artificial sequence  Forward Primer
  Primer
gcctttgtttcaaaattattatctactt

SEQ ID NO: 18891 - DNA, 18 bp, Artificial sequence  Forward Primer
  Primer
agtgagatggggactgcg

SEQ ID NO: 18892 - DNA, 21 bp, Artificial sequence  Forward Primer
  Primer
aactcacctttgtagccttcc

SEQ ID NO: 18893 - DNA, 20 bp, Artificial sequence  Forward Primer
  Primer
aagtaatgggaagtcccagg

SEQ ID NO: 18894 - DNA, 20 bp, Artificial sequence  Forward Primer
  Primer
aatggagttgctgagtcaaa

SEQ ID NO: 18895 - DNA, 18 bp, Artificial sequence  Forward Primer
  Primer
acggcagagagcatgggg

SEQ ID NO: 18896 - DNA, 21 bp, Artificial sequence  Forward Primer
  Primer
aaaaatggaacaaaaagggaa

SEQ ID NO: 18897 - DNA, 21 bp, Artificial sequence  Forward Primer
  Primer
gcttccttttgtcatgacctt

SEQ ID NO: 18898 - DNA, 18 bp, Artificial sequence  Forward Primer
  Primer
ttctttgccacgcaggta

SEQ ID NO: 18899 - DNA, 20 bp, Artificial sequence  Forward Primer
  Primer
atctcacagtctcacacccc

SEQ ID NO: 18900 - DNA, 28 bp, Artificial sequence  Forward Primer
  Primer
tttttctcttattcttattcaattgagc

SEQ ID NO: 18901 - DNA, 19 bp, Artificial sequence  Forward Primer
  Primer
cctcgccctgaaactattc

SEQ ID NO: 18902 - DNA, 21 bp, Artificial sequence  Forward Primer
  Primer
gctttccaaaagtgtgtgtgt

SEQ ID NO: 18903 - DNA, 20 bp, Artificial sequence  Forward Primer
  Primer
acaggcagatccaygtttat

SEQ ID NO: 18904 - DNA, 29 bp, Artificial sequence  Forward Primer
  Primer
taaatattgcatgagacctacttatatcc

SEQ ID NO: 18905 - DNA, 24 bp, Artificial sequence  Forward Primer
  Primer
ttactctgggactttgttaactcc

SEQ ID NO: 18906 - DNA, 18 bp, Artificial sequence  Forward Primer
  Primer
tcctacacaagccccacc

SEQ ID NO: 18907 - DNA, 24 bp, Artificial sequence  Forward Primer
  Primer
tctcctttcataggcagaatagaa

SEQ ID NO: 18908 - DNA, 22 bp, Artificial sequence  Forward Primer
  Primer
aatttgtgtggcctgttttatt

SEQ ID NO: 18909 - DNA, 20 bp, Artificial sequence  Forward Primer
  Primer
ttyatgtttcccatggacaa

SEQ ID NO: 18910 - DNA, 26 bp, Artificial sequence  Forward Primer
  Primer
tataaagcacaatttctgacttcaag

SEQ ID NO: 18911 - DNA, 21 bp, Artificial sequence  Forward Primer
  Primer
tagaaatccttcccattgagg

SEQ ID NO: 18912 - DNA, 23 bp, Artificial sequence  Forward Primer
  Primer
ttcacttctgaattatctttggg

SEQ ID NO: 18913 - DNA, 18 bp, Artificial sequence  Forward Primer
  Primer
acacctgcctgggagaag

SEQ ID NO: 18914 - DNA, 22 bp, Artificial sequence  Forward Primer
  Primer
ttttcaaggtagcctgacatct

SEQ ID NO: 18915 - DNA, 25 bp, Artificial sequence  Forward Primer
  Primer
cagaaaaagatatcatcygctaatc

SEQ ID NO: 18916 - DNA, 23 bp, Artificial sequence  Forward Primer
  Primer
acgctcaagatgttagtttcaaa

SEQ ID NO: 18917 - DNA, 20 bp, Artificial sequence  Forward Primer
  Primer
tgcacmactgttactctggg

SEQ ID NO: 18918 - DNA, 23 bp, Artificial sequence  Forward Primer
  Primer
aaaatcacaaggtcatgacagaa

SEQ ID NO: 18919 - DNA, 22 bp, Artificial sequence  Forward Primer
  Primer
ttkaaatcagtcatttttggca

SEQ ID NO: 18920 - DNA, 27 bp, Artificial sequence  Forward Primer
  Primer
ctctaattaatgattttttggaacttg

SEQ ID NO: 18921 - DNA, 20 bp, Artificial sequence  Forward Primer
  Primer
taccttgtcccaaaggatgc

SEQ ID NO: 18922 - DNA, 18 bp, Artificial sequence  Forward Primer
  Primer
agcccggtgagctacagt

SEQ ID NO: 18923 - DNA, 26 bp, Artificial sequence  Forward Primer
  Primer
tattggaattttataaataggaaccc

SEQ ID NO: 18924 - DNA, 18 bp, Artificial sequence  Forward Primer
  Primer
tgagcccagactcttgca

SEQ ID NO: 18925 - DNA, 23 bp, Artificial sequence  Forward Primer
  Primer
tacatcacattctttgtgtatga

SEQ ID NO: 18926 - DNA, 23 bp, Artificial sequence  Forward Primer
  Primer
acagccaaatcaattctagtttc

SEQ ID NO: 18927 - DNA, 18 bp, Artificial sequence  Forward Primer
  Primer
agaggggcaggcaagata

SEQ ID NO: 18928 - DNA, 25 bp, Artificial sequence  Forward Primer
  Primer
raaacaattcacatgtcaagtatgg

SEQ ID NO: 18929 - DNA, 28 bp, Artificial sequence  Forward Primer
  Primer
attaatgtattttatttaactgtgctgg

SEQ ID NO: 18930 - DNA, 20 bp, Artificial sequence  Forward Primer
  Primer
cagtagccacagatcatgag

SEQ ID NO: 18931 - DNA, 20 bp, Artificial sequence  Forward Primer
  Primer
aatggaatgtgggagaaatg

SEQ ID NO: 18932 - DNA, 29 bp, Artificial sequence  Forward Primer
  Primer
ttaggattatttttctataatgtctcctg

SEQ ID NO: 18933 - DNA, 18 bp, Artificial sequence  Forward Primer
  Primer
tgcttcaggccagcgagg

SEQ ID NO: 18934 - DNA, 24 bp, Artificial sequence  Forward Primer
  Primer
ttcctccttacatctcttttcatc

SEQ ID NO: 18935 - DNA, 30 bp, Artificial sequence  Forward Primer
  Primer
tgctaagatactgttattaaagaaaataag

SEQ ID NO: 18936 - DNA, 24 bp, Artificial sequence  Forward Primer
  Primer
acagccagaagtaaacagatttag

SEQ ID NO: 18937 - DNA, 23 bp, Artificial sequence  Forward Primer
  Primer
taagttttctgacagagcaagtg

SEQ ID NO: 18938 - DNA, 29 bp, Artificial sequence  Forward Primer
  Primer
ggatcttttattcacatactattttcatg

SEQ ID NO: 18939 - DNA, 18 bp, Artificial sequence  Forward Primer
  Primer
aggagtggcggttggtct

SEQ ID NO: 18940 - DNA, 30 bp, Artificial sequence  Forward Primer
  Primer
attacatgtcttataattaaggtagatgag

SEQ ID NO: 18941 - DNA, 20 bp, Artificial sequence  Forward Primer
  Primer
ttttaggttctgcctcgaca

SEQ ID NO: 18942 - DNA, 26 bp, Artificial sequence  Forward Primer
  Primer
atttacattataaggcttctttctgc

SEQ ID NO: 18943 - DNA, 23 bp, Artificial sequence  Forward Primer
  Primer
tgcaaaaatattcaaaatccaac

SEQ ID NO: 18944 - DNA, 18 bp, Artificial sequence  Forward Primer
  Primer
caccagggacctttccca

SEQ ID NO: 18945 - DNA, 19 bp, Artificial sequence  Forward Primer
  Primer
tgacagagtcttgggatgg

SEQ ID NO: 18946 - DNA, 18 bp, Artificial sequence  Forward Primer
  Primer
tgccttggagagcttgtc

SEQ ID NO: 18947 - DNA, 28 bp, Artificial sequence  Forward Primer
  Primer
atgaatatttaaatagatcccaaagatc

SEQ ID NO: 18948 - DNA, 20 bp, Artificial sequence  Forward Primer
  Primer
tcaaagaaaggagatgatgg

SEQ ID NO: 18949 - DNA, 20 bp, Artificial sequence  Forward Primer
  Primer
ttgcaacaaatacartggca

SEQ ID NO: 18950 - DNA, 20 bp, Artificial sequence  Forward Primer
  Primer
cagatcccatcttagttcct

SEQ ID NO: 18951 - DNA, 24 bp, Artificial sequence  Forward Primer
  Primer
tttggtgtaccttgtttatgtctg

SEQ ID NO: 18952 - DNA, 23 bp, Artificial sequence  Forward Primer
  Primer
ttatcctattcccaaatgtaggc

SEQ ID NO: 18953 - DNA, 28 bp, Artificial sequence  Forward Primer
  Primer
atcaaatacatactaacttggctatttt

SEQ ID NO: 18954 - DNA, 23 bp, Artificial sequence  Forward Primer
  Primer
atgcagttaaggattcaaaggtt

SEQ ID NO: 18955 - DNA, 24 bp, Artificial sequence  Forward Primer
  Primer
tattgaacttggatcctgtatcct

SEQ ID NO: 18956 - DNA, 25 bp, Artificial sequence  Forward Primer
  Primer
atatgaatggagcttctcaatatcc

SEQ ID NO: 18957 - DNA, 26 bp, Artificial sequence  Forward Primer
  Primer
atgctacaaggacaaataaatcaata

SEQ ID NO: 18958 - DNA, 21 bp, Artificial sequence  Forward Primer
  Primer
aaaaagccaaaaccttttcag

SEQ ID NO: 18959 - DNA, 24 bp, Artificial sequence  Forward Primer
  Primer
aaatccaattcattttaaagagca

SEQ ID NO: 18960 - DNA, 30 bp, Artificial sequence  Forward Primer
  Primer
tttttcagaaagtgatagttatatatggag

SEQ ID NO: 18961 - DNA, 22 bp, Artificial sequence  Forward Primer
  Primer
gacttcagactggagaatttcc

SEQ ID NO: 18962 - DNA, 26 bp, Artificial sequence  Forward Primer
  Primer
aaatttgataacaaaaggaagagtga

SEQ ID NO: 18963 - DNA, 23 bp, Artificial sequence  Forward Primer
  Primer
acgttccttcatttgtaagacct

SEQ ID NO: 18964 - DNA, 27 bp, Artificial sequence  Forward Primer
  Primer
atatttgtcacattcagttttcactaa

SEQ ID NO: 18965 - DNA, 20 bp, Artificial sequence  Forward Primer
  Primer
ggtcttctgggtgatctcac

SEQ ID NO: 18966 - DNA, 19 bp, Artificial sequence  Forward Primer
  Primer
ggagcttaaggaacccagt

SEQ ID NO: 18967 - DNA, 19 bp, Artificial sequence  Forward Primer
  Primer
tttgcttggagtcttgtgg

SEQ ID NO: 18968 - DNA, 21 bp, Artificial sequence  Forward Primer
  Primer
accaccactcaagtccaagtt

SEQ ID NO: 18969 - DNA, 24 bp, Artificial sequence  Forward Primer
  Primer
ttattggatttcttagttcggtca

SEQ ID NO: 18970 - DNA, 26 bp, Artificial sequence  Forward Primer
  Primer
aaagaggaattctaaatgtgttttga

SEQ ID NO: 18971 - DNA, 22 bp, Artificial sequence  Forward Primer
  Primer
gaacctaaagtctccttttctc

SEQ ID NO: 18972 - DNA, 25 bp, Artificial sequence  Forward Primer
  Primer
agaactgaattcacatctcacaatt

SEQ ID NO: 18973 - DNA, 26 bp, Artificial sequence  Forward Primer
  Primer
ataagaagtcaagctatgtgatagcc

SEQ ID NO: 18974 - DNA, 20 bp, Artificial sequence  Forward Primer
  Primer
tgctgtaccaaactcagctg

SEQ ID NO: 18975 - DNA, 18 bp, Artificial sequence  Forward Primer
  Primer
atcagctgccacccactt

SEQ ID NO: 18976 - DNA, 23 bp, Artificial sequence  Forward Primer
  Primer
accctgtacactgttgaacactc

SEQ ID NO: 18977 - DNA, 30 bp, Artificial sequence  Forward Primer
  Primer
atttatctagaactatctatctataactat

SEQ ID NO: 18978 - DNA, 28 bp, Artificial sequence  Forward Primer
  Primer
attacttttagcctttagaaaatcatga

SEQ ID NO: 18979 - DNA, 21 bp, Artificial sequence  Forward Primer
  Primer
tggtgggtagtagtgaaaaga

SEQ ID NO: 18980 - DNA, 19 bp, Artificial sequence  Forward Primer
  Primer
aggtccactaacctcctcg

SEQ ID NO: 18981 - DNA, 25 bp, Artificial sequence  Forward Primer
  Primer
tttatatgtagctccagcagtcttc

SEQ ID NO: 18982 - DNA, 19 bp, Artificial sequence  Forward Primer
  Primer
ctggtaagatccttcttgc

SEQ ID NO: 18983 - DNA, 24 bp, Artificial sequence  Forward Primer
  Primer
tggttaactgaaacatacatgctt

SEQ ID NO: 18984 - DNA, 18 bp, Artificial sequence  Forward Primer
  Primer
atcgcctccaatgatttg

SEQ ID NO: 18985 - DNA, 24 bp, Artificial sequence  Forward Primer
  Primer
gcctaaattatcccttggtaaatt

SEQ ID NO: 18986 - DNA, 19 bp, Artificial sequence  Forward Primer
  Primer
agggaggagcctgcttatg

SEQ ID NO: 18987 - DNA, 30 bp, Artificial sequence  Forward Primer
  Primer
gattatattgtttagtaggtatttaccata

SEQ ID NO: 18988 - DNA, 18 bp, Artificial sequence  Forward Primer
  Primer
agggatcaaacccatgcc

SEQ ID NO: 18989 - DNA, 25 bp, Artificial sequence  Forward Primer
  Primer
tttggttatagcrtttttcttcttt

SEQ ID NO: 18990 - DNA, 21 bp, Artificial sequence  Forward Primer
  Primer
accttgaaacctgatttgtcg

SEQ ID NO: 18991 - DNA, 26 bp, Artificial sequence  Forward Primer
  Primer
taaatgctaacagtaaaattctcctt

SEQ ID NO: 18992 - DNA, 28 bp, Artificial sequence  Forward Primer
  Primer
aaaactgagcataagaacctataagatt

SEQ ID NO: 18993 - DNA, 20 bp, Artificial sequence  Forward Primer
  Primer
aagtggaaatcccagttcaa

SEQ ID NO: 18994 - DNA, 25 bp, Artificial sequence  Forward Primer
  Primer
ttattraattcatcaggagaaaacc

SEQ ID NO: 18995 - DNA, 26 bp, Artificial sequence  Forward Primer
  Primer
cctgaacttcataatgkgatcttatt

SEQ ID NO: 18996 - DNA, 25 bp, Artificial sequence  Forward Primer
  Primer
tttttgaatctgattcttcaacatc

SEQ ID NO: 18997 - DNA, 23 bp, Artificial sequence  Forward Primer
  Primer
tcaaatcaggtagaaagcaaaaa

SEQ ID NO: 18998 - DNA, 27 bp, Artificial sequence  Forward Primer
  Primer
gtaggttgcttgtaatttatgagattc

SEQ ID NO: 18999 - DNA, 28 bp, Artificial sequence  Forward Primer
  Primer
cttttatttgtaacttcagtcactattt

SEQ ID NO: 19000 - DNA, 25 bp, Artificial sequence  Forward Primer
  Primer
ttaaagttcaaaggacagatagcat

SEQ ID NO: 19001 - DNA, 19 bp, Artificial sequence  Forward Primer
  Primer
ttgcacagatgacatcgtc

SEQ ID NO: 19002 - DNA, 25 bp, Artificial sequence  Forward Primer
  Primer
attaggtgaggtttaaattcaggtc

SEQ ID NO: 19003 - DNA, 28 bp, Artificial sequence  Forward Primer
  Primer
gagagagagatatagtctcttatcccaa

SEQ ID NO: 19004 - DNA, 24 bp, Artificial sequence  Forward Primer
  Primer
aaaatatgaatgaatgaaggtttg

SEQ ID NO: 19005 - DNA, 19 bp, Artificial sequence  Forward Primer
  Primer
aatccaattttcgtggtgc

SEQ ID NO: 19006 - DNA, 24 bp, Artificial sequence  Forward Primer
  Primer
tccagtaacattctcaaattctga

SEQ ID NO: 19007 - DNA, 26 bp, Artificial sequence  Forward Primer
  Primer
acatatagaaaacagaattaagagct

SEQ ID NO: 19008 - DNA, 19 bp, Artificial sequence  Forward Primer
  Primer
ttttggcccttagatcttt

SEQ ID NO: 19009 - DNA, 28 bp, Artificial sequence  Forward Primer
  Primer
atatgagacttttctaaaccttgagttc

SEQ ID NO: 19010 - DNA, 23 bp, Artificial sequence  Forward Primer
  Primer
ttgaggatctgttgtgaataagc

SEQ ID NO: 19011 - DNA, 20 bp, Artificial sequence  Forward Primer
  Primer
aaccacttctcctaaaggcg

SEQ ID NO: 19012 - DNA, 23 bp, Artificial sequence  Forward Primer
  Primer
cttattcagaatcagtgtgtgca

SEQ ID NO: 19013 - DNA, 19 bp, Artificial sequence  Forward Primer
  Primer
caaccgaaaaacaatttca

SEQ ID NO: 19014 - DNA, 29 bp, Artificial sequence  Forward Primer
  Primer
caaaaagaaatactagagataaaaaccac

SEQ ID NO: 19015 - DNA, 19 bp, Artificial sequence  Forward Primer
  Primer
tgtgtcaacacggcctaag

SEQ ID NO: 19016 - DNA, 22 bp, Artificial sequence  Forward Primer
  Primer
atttttcacagtccatttgctc

SEQ ID NO: 19017 - DNA, 25 bp, Artificial sequence  Forward Primer
  Primer
tcttcaattagatagaggagatcat

SEQ ID NO: 19018 - DNA, 23 bp, Artificial sequence  Forward Primer
  Primer
ttgtaaactctcagtgcacatgt

SEQ ID NO: 19019 - DNA, 29 bp, Artificial sequence  Forward Primer
  Primer
tttattacaatagtgagaaactgatcaac

SEQ ID NO: 19020 - DNA, 19 bp, Artificial sequence  Forward Primer
  Primer
atggtccagaagcgctaca

SEQ ID NO: 19021 - DNA, 27 bp, Artificial sequence  Forward Primer
  Primer
aactagaaaataactatgatacccggt

SEQ ID NO: 19022 - DNA, 23 bp, Artificial sequence  Forward Primer
  Primer
aatatgttggcctctggttaact

SEQ ID NO: 19023 - DNA, 19 bp, Artificial sequence  Forward Primer
  Primer
gaggatgagtaccgggaag

SEQ ID NO: 19024 - DNA, 22 bp, Artificial sequence  Forward Primer
  Primer
atcatgatttgctctaggaggc

SEQ ID NO: 19025 - DNA, 21 bp, Artificial sequence  Forward Primer
  Primer
acacatgcacatttttggtct

SEQ ID NO: 19026 - DNA, 26 bp, Artificial sequence  Forward Primer
  Primer
tatatcaaccctcctaggtagttttc

SEQ ID NO: 19027 - DNA, 21 bp, Artificial sequence  Forward Primer
  Primer
ttccaatgaggttgtttgtca

SEQ ID NO: 19028 - DNA, 28 bp, Artificial sequence  Forward Primer
  Primer
aagttaaccacagactagattatattag

SEQ ID NO: 19029 - DNA, 26 bp, Artificial sequence  Forward Primer
  Primer
attttaccctaattcctcatacaacc

SEQ ID NO: 19030 - DNA, 24 bp, Artificial sequence  Forward Primer
  Primer
actgcagaaagaaaagagtaagca

SEQ ID NO: 19031 - DNA, 27 bp, Artificial sequence  Forward Primer
  Primer
aatgtcacatagttcaatctaaaaggt

SEQ ID NO: 19032 - DNA, 20 bp, Artificial sequence  Forward Primer
  Primer
ttggagaaggaaaagtcacg

SEQ ID NO: 19033 - DNA, 19 bp, Artificial sequence  Forward Primer
  Primer
aaaaaatgtggcgtgttca

SEQ ID NO: 19034 - DNA, 18 bp, Artificial sequence  Forward Primer
  Primer
ttcccttcccagtctgct

SEQ ID NO: 19035 - DNA, 23 bp, Artificial sequence  Forward Primer
  Primer
atgggttggagtttatttcagat

SEQ ID NO: 19036 - DNA, 18 bp, Artificial sequence  Forward Primer
  Primer
tccgagctcacgctgcag

SEQ ID NO: 19037 - DNA, 18 bp, Artificial sequence  Forward Primer
  Primer
ctggagcgtgacatttgg

SEQ ID NO: 19038 - DNA, 19 bp, Artificial sequence  Forward Primer
  Primer
aaactctttttggggactc

SEQ ID NO: 19039 - DNA, 24 bp, Artificial sequence  Forward Primer
  Primer
tagcatcattagcctacaacttca

SEQ ID NO: 19040 - DNA, 19 bp, Artificial sequence  Forward Primer
  Primer
aggcaggagacggtagaga

SEQ ID NO: 19041 - DNA, 24 bp, Artificial sequence  Forward Primer
  Primer
aaaacagaaacacacgacagttta

SEQ ID NO: 19042 - DNA, 25 bp, Artificial sequence  Forward Primer
  Primer
aaacctactcgactgagactctttt

SEQ ID NO: 19043 - DNA, 28 bp, Artificial sequence  Forward Primer
  Primer
attaaaatcagtctcacaatttctacat

SEQ ID NO: 19044 - DNA, 19 bp, Artificial sequence  Forward Primer
  Primer
acaacaccgtccctgactc

SEQ ID NO: 19045 - DNA, 24 bp, Artificial sequence  Forward Primer
  Primer
aaatccctgatgatttgtttaaag

SEQ ID NO: 19046 - DNA, 18 bp, Artificial sequence  Forward Primer
  Primer
tggagcgtgacatttggt

SEQ ID NO: 19047 - DNA, 22 bp, Artificial sequence  Forward Primer
  Primer
tttatgcagttttccctagagg

SEQ ID NO: 19048 - DNA, 20 bp, Artificial sequence  Forward Primer
  Primer
tytgtgctatcatcatcagc

SEQ ID NO: 19049 - DNA, 25 bp, Artificial sequence  Forward Primer
  Primer
agtaagcaggtatgcagtgactact

SEQ ID NO: 19050 - DNA, 21 bp, Artificial sequence  Forward Primer
  Primer
ttcaaccatcctctgaaatga

SEQ ID NO: 19051 - DNA, 18 bp, Artificial sequence  Forward Primer
  Primer
cttcctgggggatggaca

SEQ ID NO: 19052 - DNA, 26 bp, Artificial sequence  Forward Primer
  Primer
atttacccaagtaacacttttctgag

SEQ ID NO: 19053 - DNA, 23 bp, Artificial sequence  Forward Primer
  Primer
taacactttgactttcaagcatg

SEQ ID NO: 19054 - DNA, 18 bp, Artificial sequence  Forward Primer
  Primer
ccaagcgctgcatacagt

SEQ ID NO: 19055 - DNA, 22 bp, Artificial sequence  Forward Primer
  Primer
tactcatgtctgactttgtgac

SEQ ID NO: 19056 - DNA, 25 bp, Artificial sequence  Forward Primer
  Primer
aaaacaagcaactgtaaaaacaagt

SEQ ID NO: 19057 - DNA, 24 bp, Artificial sequence  Forward Primer
  Primer
atccagtcactagaaccataatgc

SEQ ID NO: 19058 - DNA, 19 bp, Artificial sequence  Forward Primer
  Primer
cccagggaggaaaggatac

SEQ ID NO: 19059 - DNA, 23 bp, Artificial sequence  Forward Primer
  Primer
tttgactattctgtccccttatg

SEQ ID NO: 19060 - DNA, 23 bp, Artificial sequence  Forward Primer
  Primer
cactttctcttatgggaggaaac

SEQ ID NO: 19061 - DNA, 23 bp, Artificial sequence  Forward Primer
  Primer
aaaaacctgtatcaaacttacct

SEQ ID NO: 19062 - DNA, 21 bp, Artificial sequence  Forward Primer
  Primer
agcctttatagccaggataaa

SEQ ID NO: 19063 - DNA, 18 bp, Artificial sequence  Forward Primer
  Primer
ctgccggttactgctcat

SEQ ID NO: 19064 - DNA, 22 bp, Artificial sequence  Forward Primer
  Primer
cctgtgtggtctctagsaaatt

SEQ ID NO: 19065 - DNA, 28 bp, Artificial sequence  Forward Primer
  Primer
tttaattgtttttctctagttaatctgc

SEQ ID NO: 19066 - DNA, 20 bp, Artificial sequence  Forward Primer
  Primer
cagaaaagagtggacagaca

SEQ ID NO: 19067 - DNA, 19 bp, Artificial sequence  Forward Primer
  Primer
atgggcaaaacaaagagct

SEQ ID NO: 19068 - DNA, 22 bp, Artificial sequence  Forward Primer
  Primer
ccttcttgaactaacyggtgag

SEQ ID NO: 19069 - DNA, 22 bp, Artificial sequence  Forward Primer
  Primer
agagaggtctatgaggtgaggg

SEQ ID NO: 19070 - DNA, 23 bp, Artificial sequence  Forward Primer
  Primer
ttgagggaattattaggaggaaa

SEQ ID NO: 19071 - DNA, 21 bp, Artificial sequence  Forward Primer
  Primer
atcatcctaggtatgccctcc

SEQ ID NO: 19072 - DNA, 18 bp, Artificial sequence  Forward Primer
  Primer
acacatccctccaaccca

SEQ ID NO: 19073 - DNA, 24 bp, Artificial sequence  Forward Primer
  Primer
ttagttctctctcattgtttgctc

SEQ ID NO: 19074 - DNA, 29 bp, Artificial sequence  Forward Primer
  Primer
attaatttaatcatcaagacttgactagg

SEQ ID NO: 19075 - DNA, 18 bp, Artificial sequence  Forward Primer
  Primer
tgacatccagtggccagc

SEQ ID NO: 19076 - DNA, 22 bp, Artificial sequence  Forward Primer
  Primer
ttaagctcatttttttcctgca

SEQ ID NO: 19077 - DNA, 28 bp, Artificial sequence  Forward Primer
  Primer
atataaaatgaaggctaaataattctgg

SEQ ID NO: 19078 - DNA, 28 bp, Artificial sequence  Forward Primer
  Primer
agggataaaagctgaaaataaagatata

SEQ ID NO: 19079 - DNA, 26 bp, Artificial sequence  Forward Primer
  Primer
atatttagaggcaaaataaaggtagg

SEQ ID NO: 19080 - DNA, 18 bp, Artificial sequence  Forward Primer
  Primer
agttcccctggcaggaag

SEQ ID NO: 19081 - DNA, 19 bp, Artificial sequence  Forward Primer
  Primer
cctggaatctgttcacatt

SEQ ID NO: 19082 - DNA, 21 bp, Artificial sequence  Forward Primer
  Primer
cgatgtccagcttataaccag

SEQ ID NO: 19083 - DNA, 23 bp, Artificial sequence  Forward Primer
  Primer
acagaatggttgtaccttgtgaa

SEQ ID NO: 19084 - DNA, 18 bp, Artificial sequence  Forward Primer
  Primer
tggacccctctgtcttcc

SEQ ID NO: 19085 - DNA, 29 bp, Artificial sequence  Forward Primer
  Primer
aggaattccaataaataaatagtacttgg

SEQ ID NO: 19086 - DNA, 20 bp, Artificial sequence  Forward Primer
  Primer
agagggacagccattaaaga

SEQ ID NO: 19087 - DNA, 21 bp, Artificial sequence  Forward Primer
  Primer
aagtggastsagaagtccagc

SEQ ID NO: 19088 - DNA, 26 bp, Artificial sequence  Forward Primer
  Primer
agaygtatttttcagttgtttcactc

SEQ ID NO: 19089 - DNA, 22 bp, Artificial sequence  Forward Primer
  Primer
ttctacaacatgctcctccttc

SEQ ID NO: 19090 - DNA, 28 bp, Artificial sequence  Forward Primer
  Primer
tgaatctatattttaacatctttcttgc

SEQ ID NO: 19091 - DNA, 19 bp, Artificial sequence  Forward Primer
  Primer
gaagtgggcagagtgaaat

SEQ ID NO: 19092 - DNA, 18 bp, Artificial sequence  Forward Primer
  Primer
atctcgatgggcatgcat

SEQ ID NO: 19093 - DNA, 25 bp, Artificial sequence  Forward Primer
  Primer
ttgtctattcaacacattgttcaga

SEQ ID NO: 19094 - DNA, 22 bp, Artificial sequence  Forward Primer
  Primer
cctcaaagaactcacaggtatt

SEQ ID NO: 19095 - DNA, 21 bp, Artificial sequence  Forward Primer
  Primer
ttctgaaagcttcccctgtac

SEQ ID NO: 19096 - DNA, 25 bp, Artificial sequence  Forward Primer
  Primer
ttctgtttaaggaatgaaaaggtaa

SEQ ID NO: 19097 - DNA, 22 bp, Artificial sequence  Forward Primer
  Primer
atgaactcattccgtggttaaa

SEQ ID NO: 19098 - DNA, 19 bp, Artificial sequence  Forward Primer
  Primer
ttatctccggcttcatttg

SEQ ID NO: 19099 - DNA, 25 bp, Artificial sequence  Forward Primer
  Primer
tcttctgaaaagtctatgatatgcc

SEQ ID NO: 19100 - DNA, 18 bp, Artificial sequence  Forward Primer
  Primer
ctgggcctttgagcatga

SEQ ID NO: 19101 - DNA, 25 bp, Artificial sequence  Forward Primer
  Primer
aatgatgcacttgaatttaaaagag

SEQ ID NO: 19102 - DNA, 23 bp, Artificial sequence  Forward Primer
  Primer
aaaattactcatccattccactg

SEQ ID NO: 19103 - DNA, 19 bp, Artificial sequence  Forward Primer
  Primer
actcattcctccatgaagc

SEQ ID NO: 19104 - DNA, 26 bp, Artificial sequence  Forward Primer
  Primer
aaaataaagtgattaaaggcataggc

SEQ ID NO: 19105 - DNA, 23 bp, Artificial sequence  Forward Primer
  Primer
attttaaacaccacagtggtcag

SEQ ID NO: 19106 - DNA, 21 bp, Artificial sequence  Forward Primer
  Primer
ctatcacagagtttctccaaa

SEQ ID NO: 19107 - DNA, 28 bp, Artificial sequence  Forward Primer
  Primer
aaatataaagggaaatctactttatggc

SEQ ID NO: 19108 - DNA, 19 bp, Artificial sequence  Forward Primer
  Primer
tgctgtgcacttctctcaa

SEQ ID NO: 19109 - DNA, 18 bp, Artificial sequence  Forward Primer
  Primer
aacagcccccaaaacacc

SEQ ID NO: 19110 - DNA, 25 bp, Artificial sequence  Forward Primer
  Primer
acctctttgtgtataatcagctata

SEQ ID NO: 19111 - DNA, 18 bp, Artificial sequence  Forward Primer
  Primer
tgaaggctgaccatgcaa

SEQ ID NO: 19112 - DNA, 29 bp, Artificial sequence  Forward Primer
  Primer
tatttattgacttgatttatactggaagc

SEQ ID NO: 19113 - DNA, 21 bp, Artificial sequence  Forward Primer
  Primer
agttcttcatggataaaacgg

SEQ ID NO: 19114 - DNA, 28 bp, Artificial sequence  Forward Primer
  Primer
agttacaggaggaaagttaaaagtatca

SEQ ID NO: 19115 - DNA, 29 bp, Artificial sequence  Forward Primer
  Primer
aaattctcctttactgttcttaagattct

SEQ ID NO: 19116 - DNA, 22 bp, Artificial sequence  Forward Primer
  Primer
attttcagtgtgttttgctgac

SEQ ID NO: 19117 - DNA, 22 bp, Artificial sequence  Forward Primer
  Primer
aaaaggcacagaaataaaaagg

SEQ ID NO: 19118 - DNA, 21 bp, Artificial sequence  Forward Primer
  Primer
tcctgatgaacactgacgact

SEQ ID NO: 19119 - DNA, 30 bp, Artificial sequence  Forward Primer
  Primer
tttattagtcagaggaaagactttttattc

SEQ ID NO: 19120 - DNA, 21 bp, Artificial sequence  Forward Primer
  Primer
tcaggcgaacttactttctgg

SEQ ID NO: 19121 - DNA, 24 bp, Artificial sequence  Forward Primer
  Primer
ttgtcctaaacctttataaatttc

SEQ ID NO: 19122 - DNA, 30 bp, Artificial sequence  Forward Primer
  Primer
catcagagttactatgttgtaaagatttta

SEQ ID NO: 19123 - DNA, 24 bp, Artificial sequence  Forward Primer
  Primer
tctttctttttagcaacattctat

SEQ ID NO: 19124 - DNA, 30 bp, Artificial sequence  Forward Primer
  Primer
tattttatatgtgtaataacatgctcctaa

SEQ ID NO: 19125 - DNA, 24 bp, Artificial sequence  Forward Primer
  Primer
aaaagagtaagtgaaaacaaaatc

SEQ ID NO: 19126 - DNA, 25 bp, Artificial sequence  Forward Primer
  Primer
aaggggatatatgttcaactgtact

SEQ ID NO: 19127 - DNA, 18 bp, Artificial sequence  Forward Primer
  Primer
tcagcgcccttgcattta

SEQ ID NO: 19128 - DNA, 23 bp, Artificial sequence  Forward Primer
  Primer
tacataaatccccatttacataa

SEQ ID NO: 19129 - DNA, 21 bp, Artificial sequence  Forward Primer
  Primer
ataaaaagatgctccttggca

SEQ ID NO: 19130 - DNA, 26 bp, Artificial sequence  Forward Primer
  Primer
aaaatgtctctttcatgtttcatagg

SEQ ID NO: 19131 - DNA, 19 bp, Artificial sequence  Forward Primer
  Primer
agagcatggtgtcataggg

SEQ ID NO: 19132 - DNA, 26 bp, Artificial sequence  Forward Primer
  Primer
agatatccagcagtacaaattagctt

SEQ ID NO: 19133 - DNA, 25 bp, Artificial sequence  Forward Primer
  Primer
tggatagaattctgttttggatagt

SEQ ID NO: 19134 - DNA, 26 bp, Artificial sequence  Forward Primer
  Primer
aatttattgagcatttactatgggtg

SEQ ID NO: 19135 - DNA, 20 bp, Artificial sequence  Forward Primer
  Primer
aaacagaagccagtggtctg

SEQ ID NO: 19136 - DNA, 20 bp, Artificial sequence  Forward Primer
  Primer
attgtctttggccartcctc

SEQ ID NO: 19137 - DNA, 27 bp, Artificial sequence  Forward Primer
  Primer
taatgttctcttgctattaactcatgc

SEQ ID NO: 19138 - DNA, 18 bp, Artificial sequence  Forward Primer
  Primer
tctggtttgccaagaggg

SEQ ID NO: 19139 - DNA, 19 bp, Artificial sequence  Forward Primer
  Primer
aagcaaaatgtcacccaga

SEQ ID NO: 19140 - DNA, 25 bp, Artificial sequence  Forward Primer
  Primer
ggtcacctagagtcatataccaaaa

SEQ ID NO: 19141 - DNA, 20 bp, Artificial sequence  Forward Primer
  Primer
tcctgcatctttgattcaag

SEQ ID NO: 19142 - DNA, 19 bp, Artificial sequence  Forward Primer
  Primer
tactgaagggggagaagga

SEQ ID NO: 19143 - DNA, 21 bp, Artificial sequence  Forward Primer
  Primer
attgtagtaggtgccgtgtcc

SEQ ID NO: 19144 - DNA, 24 bp, Artificial sequence  Forward Primer
  Primer
aataaagtgggatcatagcagagt

SEQ ID NO: 19145 - DNA, 19 bp, Artificial sequence  Forward Primer
  Primer
aatattccatggcacacgg

SEQ ID NO: 19146 - DNA, 26 bp, Artificial sequence  Forward Primer
  Primer
ttgtacaattttaaagtaaaaagggc

SEQ ID NO: 19147 - DNA, 24 bp, Artificial sequence  Forward Primer
  Primer
caaaatgcttgattaaaactcaaa

SEQ ID NO: 19148 - DNA, 24 bp, Artificial sequence  Forward Primer
  Primer
tcaaagggattaagttttattgtg

SEQ ID NO: 19149 - DNA, 20 bp, Artificial sequence  Forward Primer
  Primer
ttctcagcacgtttggttct

SEQ ID NO: 19150 - DNA, 23 bp, Artificial sequence  Forward Primer
  Primer
tgatacggtttactgasagcatt

SEQ ID NO: 19151 - DNA, 22 bp, Artificial sequence  Forward Primer
  Primer
ttataatggagctgaagggaac

SEQ ID NO: 19152 - DNA, 22 bp, Artificial sequence  Forward Primer
  Primer
tgttagagtctgaggtccagag

SEQ ID NO: 19153 - DNA, 28 bp, Artificial sequence  Forward Primer
  Primer
cctcaatttttaaagaaacagttaattc

SEQ ID NO: 19154 - DNA, 25 bp, Artificial sequence  Forward Primer
  Primer
ataaaatggaaaaggttacacgttt

SEQ ID NO: 19155 - DNA, 24 bp, Artificial sequence  Forward Primer
  Primer
taagcattcttatcagtttttctg

SEQ ID NO: 19156 - DNA, 21 bp, Artificial sequence  Forward Primer
  Primer
gactcttcacttcctcagaaa

SEQ ID NO: 19157 - DNA, 22 bp, Artificial sequence  Forward Primer
  Primer
aactctcatcacaagggaaaaa

SEQ ID NO: 19158 - DNA, 22 bp, Artificial sequence  Forward Primer
  Primer
agctgatgtgtcagacatgtta

SEQ ID NO: 19159 - DNA, 18 bp, Artificial sequence  Forward Primer
  Primer
aagtggggatgcagaacc

SEQ ID NO: 19160 - DNA, 26 bp, Artificial sequence  Forward Primer
  Primer
aggttctgtgtcatattaaaacaaca

SEQ ID NO: 19161 - DNA, 18 bp, Artificial sequence  Forward Primer
  Primer
ctgttgtcactgctgggg

SEQ ID NO: 19162 - DNA, 29 bp, Artificial sequence  Forward Primer
  Primer
atagtgggtatgtaattgtagtttctttt

SEQ ID NO: 19163 - DNA, 26 bp, Artificial sequence  Forward Primer
  Primer
aaggcttttatctgtgaaaatactct

SEQ ID NO: 19164 - DNA, 20 bp, Artificial sequence  Forward Primer
  Primer
aacacttcctctgggactca

SEQ ID NO: 19165 - DNA, 19 bp, Artificial sequence  Forward Primer
  Primer
gcaccaaactgtacggaca

SEQ ID NO: 19166 - DNA, 18 bp, Artificial sequence  Forward Primer
  Primer
gagatgccaaagacaggg

SEQ ID NO: 19167 - DNA, 22 bp, Artificial sequence  Forward Primer
  Primer
tttaggcttttgcgtttttaaa

SEQ ID NO: 19168 - DNA, 30 bp, Artificial sequence  Forward Primer
  Primer
atgaatactagaaagagatttattataagg

SEQ ID NO: 19169 - DNA, 24 bp, Artificial sequence  Forward Primer
  Primer
actttggaaagacatcaatattaa

SEQ ID NO: 19170 - DNA, 24 bp, Artificial sequence  Forward Primer
  Primer
taaatcacatgtatcaactgtttt

SEQ ID NO: 19171 - DNA, 18 bp, Artificial sequence  Forward Primer
  Primer
cacgtgagctgaccaggg

SEQ ID NO: 19172 - DNA, 26 bp, Artificial sequence  Forward Primer
  Primer
atatttcatcagaaatcttcaacctg

SEQ ID NO: 19173 - DNA, 23 bp, Artificial sequence  Forward Primer
  Primer
aagtgattcattaagattacggg

SEQ ID NO: 19174 - DNA, 26 bp, Artificial sequence  Forward Primer
  Primer
agaagaaaaaccaaataatttatgcc

SEQ ID NO: 19175 - DNA, 26 bp, Artificial sequence  Forward Primer
  Primer
tttttactctctatccctgctcttaa

SEQ ID NO: 19176 - DNA, 18 bp, Artificial sequence  Forward Primer
  Primer
gacgctgcccgatgaagt

SEQ ID NO: 19177 - DNA, 18 bp, Artificial sequence  Forward Primer
  Primer
tcacggcatctggcaact

SEQ ID NO: 19178 - DNA, 19 bp, Artificial sequence  Forward Primer
  Primer
tgcttggctaagtactgcg

SEQ ID NO: 19179 - DNA, 24 bp, Artificial sequence  Forward Primer
  Primer
tttttgctatgtgtgacctctaga

SEQ ID NO: 19180 - DNA, 26 bp, Artificial sequence  Forward Primer
  Primer
aatttctaagacatcaaaagtgtcct

SEQ ID NO: 19181 - DNA, 23 bp, Artificial sequence  Forward Primer
  Primer
tttttcttcaacagtgtagcaca

SEQ ID NO: 19182 - DNA, 28 bp, Artificial sequence  Forward Primer
  Primer
ataaagattattggacaaagattaaagg

SEQ ID NO: 19183 - DNA, 24 bp, Artificial sequence  Forward Primer
  Primer
tttggctacattttcctttttaaa

SEQ ID NO: 19184 - DNA, 18 bp, Artificial sequence  Forward Primer
  Primer
atcgggcctctgaagtcc

SEQ ID NO: 19185 - DNA, 21 bp, Artificial sequence  Forward Primer
  Primer
ctatcacagagtttctccaaa

SEQ ID NO: 19186 - DNA, 24 bp, Artificial sequence  Forward Primer
  Primer
atgtaagtctcattagactccgtg

SEQ ID NO: 19187 - DNA, 18 bp, Artificial sequence  Forward Primer
  Primer
tgtcgtgtggagcaatca

SEQ ID NO: 19188 - DNA, 24 bp, Artificial sequence  Forward Primer
  Primer
ttatttggtaggtgaaatgcatac

SEQ ID NO: 19189 - DNA, 21 bp, Artificial sequence  Forward Primer
  Primer
aattaaacacaagcctccgat

SEQ ID NO: 19190 - DNA, 18 bp, Artificial sequence  Forward Primer
  Primer
ctgagcctggcacttgaa

SEQ ID NO: 19191 - DNA, 29 bp, Artificial sequence  Forward Primer
  Primer
aactatactggtacatatttgttttggat

SEQ ID NO: 19192 - DNA, 24 bp, Artificial sequence  Forward Primer
  Primer
tagggtagatacaaaggattggaa

SEQ ID NO: 19193 - DNA, 18 bp, Artificial sequence  Forward Primer
  Primer
agctcagctcagtctcgc

SEQ ID NO: 19194 - DNA, 24 bp, Artificial sequence  Forward Primer
  Primer
tctatttttttaaggaatctccat

SEQ ID NO: 19195 - DNA, 21 bp, Artificial sequence  Forward Primer
  Primer
agatctgcacagagggagaat

SEQ ID NO: 19196 - DNA, 24 bp, Artificial sequence  Forward Primer
  Primer
tgtattccaacatacagtcattgg

SEQ ID NO: 19197 - DNA, 24 bp, Artificial sequence  Forward Primer
  Primer
tgtattccaacatacagtcattgg

SEQ ID NO: 19198 - DNA, 28 bp, Artificial sequence  Forward Primer
  Primer
ttgattatatttttttctacgtcagaga

SEQ ID NO: 19199 - DNA, 28 bp, Artificial sequence  Forward Primer
  Primer
attctaaataaaaggtgttggttttact

SEQ ID NO: 19200 - DNA, 20 bp, Artificial sequence  Forward Primer
  Primer
ttctcagcacgtttggttct

SEQ ID NO: 19201 - DNA, 23 bp, Artificial sequence  Forward Primer
  Primer
tgatacggtttactgasagcatt

SEQ ID NO: 19202 - DNA, 22 bp, Artificial sequence  Forward Primer
  Primer
ttataatggagctgaagggaac

SEQ ID NO: 19203 - DNA, 20 bp, Artificial sequence  Forward Primer
  Primer
aagctttctcttggaaatgg

SEQ ID NO: 19204 - DNA, 22 bp, Artificial sequence  Forward Primer
  Primer
aacaaatgttctttcaccttca

SEQ ID NO: 19205 - DNA, 24 bp, Artificial sequence  Forward Primer
  Primer
tttttatgtcaaaggccagatagt

SEQ ID NO: 19206 - DNA, 24 bp, Artificial sequence  Forward Primer
  Primer
tgtaacaccctgtgtcagattaag

SEQ ID NO: 19207 - DNA, 27 bp, Artificial sequence  Forward Primer
  Primer
ttttggaatatcaattctcttttgtac

SEQ ID NO: 19208 - DNA, 20 bp, Artificial sequence  Forward Primer
  Primer
tgtgtgaaccaccagagact

SEQ ID NO: 19209 - DNA, 25 bp, Artificial sequence  Forward Primer
  Primer
tttcaggtcacttcactagaaaact

SEQ ID NO: 19210 - DNA, 22 bp, Artificial sequence  Forward Primer
  Primer
attttcagtgtgttttgctgac

SEQ ID NO: 19211 - DNA, 22 bp, Artificial sequence  Forward Primer
  Primer
tctagcctaaggatgagaaaag

SEQ ID NO: 19212 - DNA, 26 bp, Artificial sequence  Forward Primer
  Primer
taaatgaaagagcaaattttagtgag

SEQ ID NO: 19213 - DNA, 25 bp, Artificial sequence  Forward Primer
  Primer
tttaaggattcgtttgaaaataagc

SEQ ID NO: 19214 - DNA, 19 bp, Artificial sequence  Forward Primer
  Primer
tggacttgatcctgtcctg

SEQ ID NO: 19215 - DNA, 23 bp, Artificial sequence  Forward Primer
  Primer
aataacgtgagtcctaaactcgg

SEQ ID NO: 19216 - DNA, 21 bp, Artificial sequence  Forward Primer
  Primer
aaaaatcggcttaaaggaaca

SEQ ID NO: 19217 - DNA, 19 bp, Artificial sequence  Forward Primer
  Primer
gcattgcattcttgatcca

SEQ ID NO: 19218 - DNA, 21 bp, Artificial sequence  Forward Primer
  Primer
aatatgccttcattggtaggc

SEQ ID NO: 19219 - DNA, 23 bp, Artificial sequence  Forward Primer
  Primer
cctgagtaatatagcagcaacgt

SEQ ID NO: 19220 - DNA, 30 bp, Artificial sequence  Forward Primer
  Primer
ataaataataattcagcaagtaatctagac

SEQ ID NO: 19221 - DNA, 23 bp, Artificial sequence  Forward Primer
  Primer
atatgaaaagatctgcaaaacca

SEQ ID NO: 19222 - DNA, 24 bp, Artificial sequence  Forward Primer
  Primer
aggagaagtactgtatgctcattc

SEQ ID NO: 19223 - DNA, 21 bp, Artificial sequence  Forward Primer
  Primer
ttttaaatgagcctctctggc

SEQ ID NO: 19224 - DNA, 18 bp, Artificial sequence  Forward Primer
  Primer
gaggtctatggtgcgtgg

SEQ ID NO: 19225 - DNA, 19 bp, Artificial sequence  Forward Primer
  Primer
ggattgtggcttcaaagaa

SEQ ID NO: 19226 - DNA, 21 bp, Artificial sequence  Forward Primer
  Primer
ttttcatggagtttcagatgc

SEQ ID NO: 19227 - DNA, 22 bp, Artificial sequence  Forward Primer
  Primer
agccacgagtttaggataaagg

SEQ ID NO: 19228 - DNA, 22 bp, Artificial sequence  Forward Primer
  Primer
tgttagagtctgaggtccagag

SEQ ID NO: 19229 - DNA, 28 bp, Artificial sequence  Forward Primer
  Primer
cctcaatttttaaagaaacagttaattc

SEQ ID NO: 19230 - DNA, 25 bp, Artificial sequence  Forward Primer
  Primer
ataaaatggaaaaggttacacgttt

SEQ ID NO: 19231 - DNA, 24 bp, Artificial sequence  Forward Primer
  Primer
taagcattcttatcagtttttctg

SEQ ID NO: 19232 - DNA, 21 bp, Artificial sequence  Forward Primer
  Primer
gactcttcacttcctcagaaa

SEQ ID NO: 19233 - DNA, 22 bp, Artificial sequence  Forward Primer
  Primer
aactctcatcacaagggaaaaa

SEQ ID NO: 19234 - DNA, 22 bp, Artificial sequence  Forward Primer
  Primer
agctgatgtgtcagacatgtta

SEQ ID NO: 19235 - DNA, 18 bp, Artificial sequence  Forward Primer
  Primer
aagtggggatgcagaacc

SEQ ID NO: 19236 - DNA, 26 bp, Artificial sequence  Forward Primer
  Primer
aggttctgtgtcatattaaaacaaca

SEQ ID NO: 19237 - DNA, 18 bp, Artificial sequence  Forward Primer
  Primer
ctgttgtcactgctgggg

SEQ ID NO: 19238 - DNA, 29 bp, Artificial sequence  Forward Primer
  Primer
atagtgggtatgtaattgtagtttctttt

SEQ ID NO: 19239 - DNA, 26 bp, Artificial sequence  Forward Primer
  Primer
aaggcttttatctgtgaaaatactct

SEQ ID NO: 19240 - DNA, 20 bp, Artificial sequence  Forward Primer
  Primer
aacacttcctctgggactca

SEQ ID NO: 19241 - DNA, 19 bp, Artificial sequence  Forward Primer
  Primer
gcaccaaactgtacggaca

SEQ ID NO: 19242 - DNA, 24 bp, Artificial sequence  Forward Primer
  Primer
tggctcttaaatagtgctattctt

SEQ ID NO: 19243 - DNA, 24 bp, Artificial sequence  Forward Primer
  Primer
atttttggaaaacaaatcaaagtg

SEQ ID NO: 19244 - DNA, 23 bp, Artificial sequence  Forward Primer
  Primer
aaagatgaaaattagcagaccca

SEQ ID NO: 19245 - DNA, 27 bp, Artificial sequence  Forward Primer
  Primer
aaaaactagaactccctactgtaaagc

SEQ ID NO: 19246 - DNA, 20 bp, Artificial sequence  Forward Primer
  Primer
atcaacaccctgcatctgtg

SEQ ID NO: 19247 - DNA, 23 bp, Artificial sequence  Forward Primer
  Primer
aattggtgttgtattgtaggctc

SEQ ID NO: 19248 - DNA, 25 bp, Artificial sequence  Forward Primer
  Primer
tattttatgatttgattcacgaagg

SEQ ID NO: 19249 - DNA, 25 bp, Artificial sequence  Forward Primer
  Primer
tgtgtactttaaaggataggcattc

SEQ ID NO: 19250 - DNA, 22 bp, Artificial sequence  Forward Primer
  Primer
acgaagaaaatataccatggga

SEQ ID NO: 19251 - DNA, 27 bp, Artificial sequence  Forward Primer
  Primer
aggtatttttttcctaaaatgttctca

SEQ ID NO: 19252 - DNA, 24 bp, Artificial sequence  Forward Primer
  Primer
tgctatcacacatactttttctgg

SEQ ID NO: 19253 - DNA, 24 bp, Artificial sequence  Forward Primer
  Primer
actactccaacagaaaagtgaagc

SEQ ID NO: 19254 - DNA, 21 bp, Artificial sequence  Forward Primer
  Primer
ttcatggtgaggtacaggatc

SEQ ID NO: 19255 - DNA, 24 bp, Artificial sequence  Forward Primer
  Primer
ttgcacatttaaactgaaaacatg

SEQ ID NO: 19256 - DNA, 24 bp, Artificial sequence  Forward Primer
  Primer
agcagcatcttcttatttagactt

SEQ ID NO: 19257 - DNA, 19 bp, Artificial sequence  Forward Primer
  Primer
cagccctggaactaggact

SEQ ID NO: 19258 - DNA, 28 bp, Artificial sequence  Forward Primer
  Primer
ttgtttaataattcaaatctgtctagct

SEQ ID NO: 19259 - DNA, 18 bp, Artificial sequence  Forward Primer
  Primer
ttcgctccaccacccagg

SEQ ID NO: 19260 - DNA, 27 bp, Artificial sequence  Forward Primer
  Primer
ttaaatgaaagagttaggacagatgat

SEQ ID NO: 19261 - DNA, 26 bp, Artificial sequence  Forward Primer
  Primer
atagacttgtgtccttctctgtcttt

SEQ ID NO: 19262 - DNA, 25 bp, Artificial sequence  Forward Primer
  Primer
acctctttgtgtataatcagctata

SEQ ID NO: 19263 - DNA, 30 bp, Artificial sequence  Forward Primer
  Primer
tatataactccttctgtcttatggattaag

SEQ ID NO: 19264 - DNA, 25 bp, Artificial sequence  Forward Primer
  Primer
aataaatactctggtctccttctcc

SEQ ID NO: 19265 - DNA, 29 bp, Artificial sequence  Forward Primer
  Primer
tgaatgataaccctaactacaatattaca

SEQ ID NO: 19266 - DNA, 21 bp, Artificial sequence  Forward Primer
  Primer
attgtaccttaagagccccct

SEQ ID NO: 19267 - DNA, 22 bp, Artificial sequence  Forward Primer
  Primer
ttttattcagatgtagctgacc

SEQ ID NO: 19268 - DNA, 23 bp, Artificial sequence  Forward Primer
  Primer
aaaagaagccatttcttttgact

SEQ ID NO: 19269 - DNA, 19 bp, Artificial sequence  Forward Primer
  Primer
ttcagaaggaaacatggac

SEQ ID NO: 19270 - DNA, 21 bp, Artificial sequence  Forward Primer
  Primer
taggccttagctgacsttctg

SEQ ID NO: 19271 - DNA, 18 bp, Artificial sequence  Forward Primer
  Primer
gaaagcctcacagcctgg

SEQ ID NO: 19272 - DNA, 25 bp, Artificial sequence  Forward Primer
  Primer
ataaatgaacacatatgtccacaca

SEQ ID NO: 19273 - DNA, 20 bp, Artificial sequence  Forward Primer
  Primer
ccagaatgaggagtgagatg

SEQ ID NO: 19274 - DNA, 20 bp, Artificial sequence  Forward Primer
  Primer
attactttccaggaaacccc

SEQ ID NO: 19275 - DNA, 18 bp, Artificial sequence  Forward Primer
  Primer
tgaaggctgaccatgcaa

SEQ ID NO: 19276 - DNA, 20 bp, Artificial sequence  Forward Primer
  Primer
aaaccctggagaggaatgac

SEQ ID NO: 19277 - DNA, 23 bp, Artificial sequence  Forward Primer
  Primer
aaggttaatcaggtaaaagggtg

SEQ ID NO: 19278 - DNA, 21 bp, Artificial sequence  Forward Primer
  Primer
attcatgtgtgctccagctac

SEQ ID NO: 19279 - DNA, 27 bp, Artificial sequence  Forward Primer
  Primer
gagaaaacaaagtttgtaaaacagaat

SEQ ID NO: 19280 - DNA, 21 bp, Artificial sequence  Forward Primer
  Primer
aaattgagcacagcaggtagg

SEQ ID NO: 19281 - DNA, 18 bp, Artificial sequence  Forward Primer
  Primer
aagcccatggtccggtgc

SEQ ID NO: 19282 - DNA, 23 bp, Artificial sequence  Forward Primer
  Primer
attttaaacaccacagtggtcag

SEQ ID NO: 19283 - DNA, 20 bp, Artificial sequence  Forward Primer
  Primer
cagacaacagactccagctg

SEQ ID NO: 19284 - DNA, 18 bp, Artificial sequence  Forward Primer
  Primer
ttgagtgacaccaggcgc

SEQ ID NO: 19285 - DNA, 28 bp, Artificial sequence  Forward Primer
  Primer
aaatataaagggaaatctactttatggc

SEQ ID NO: 19286 - DNA, 22 bp, Artificial sequence  Forward Primer
  Primer
tataagagccggaagtaggaca

SEQ ID NO: 19287 - DNA, 19 bp, Artificial sequence  Forward Primer
  Primer
ccgcatttgcatagtctgt

SEQ ID NO: 19288 - DNA, 28 bp, Artificial sequence  Forward Primer
  Primer
atccatgctttaggtaaataattctaca

SEQ ID NO: 19289 - DNA, 19 bp, Artificial sequence  Forward Primer
  Primer
ggaacagggagtggagatt

SEQ ID NO: 19290 - DNA, 18 bp, Artificial sequence  Forward Primer
  Primer
accaggaagcccagatca

SEQ ID NO: 19291 - DNA, 21 bp, Artificial sequence  Forward Primer
  Primer
atcaatctggttattcctttc

SEQ ID NO: 19292 - DNA, 18 bp, Artificial sequence  Forward Primer
  Primer
ccagtcgtgtagccccct

SEQ ID NO: 19293 - DNA, 20 bp, Artificial sequence  Forward Primer
  Primer
agttgagggcttgaagtgtg

SEQ ID NO: 19294 - DNA, 21 bp, Artificial sequence  Forward Primer
  Primer
aagagttcatgatccaaaccc

SEQ ID NO: 19295 - DNA, 18 bp, Artificial sequence  Forward Primer
  Primer
aactccaagtccaagggc

SEQ ID NO: 19296 - DNA, 19 bp, Artificial sequence  Forward Primer
  Primer
tctttgggggacattttct

SEQ ID NO: 19297 - DNA, 24 bp, Artificial sequence  Forward Primer
  Primer
ggttattgtaggcctaatggatag

SEQ ID NO: 19298 - DNA, 19 bp, Artificial sequence  Forward Primer
  Primer
aagtcaggcagaggtgagt

SEQ ID NO: 19299 - DNA, 19 bp, Artificial sequence  Forward Primer
  Primer
agaccaagagtttggagaa

SEQ ID NO: 19300 - DNA, 23 bp, Artificial sequence  Forward Primer
  Primer
ttcatagcagaaaaggtacgaac

SEQ ID NO: 19301 - DNA, 20 bp, Artificial sequence  Forward Primer
  Primer
gaggcctagatttgagtcat

SEQ ID NO: 19302 - DNA, 21 bp, Artificial sequence  Forward Primer
  Primer
agttcttcatggataaaacgg

SEQ ID NO: 19303 - DNA, 18 bp, Artificial sequence  Forward Primer
  Primer
ttctcctcttggcccgta

SEQ ID NO: 19304 - DNA, 21 bp, Artificial sequence  Forward Primer
  Primer
aggattcactgctcattcatc

SEQ ID NO: 19305 - DNA, 21 bp, Artificial sequence  Forward Primer
  Primer
tttgtgacattgagcaagtgc

SEQ ID NO: 19306 - DNA, 25 bp, Artificial sequence  Forward Primer
  Primer
aaatatctgaaagcttcaagaatgc

SEQ ID NO: 19307 - DNA, 19 bp, Artificial sequence  Forward Primer
  Primer
ttgccagaagacctactgc

SEQ ID NO: 19308 - DNA, 18 bp, Artificial sequence  Forward Primer
  Primer
tccttgtgagtggtgggc

SEQ ID NO: 19309 - DNA, 27 bp, Artificial sequence  Forward Primer
  Primer
ggaataggatttaggatgtttttaatt

SEQ ID NO: 19310 - DNA, 24 bp, Artificial sequence  Forward Primer
  Primer
aaatgctaaaagctcagaaaattg

SEQ ID NO: 19311 - DNA, 20 bp, Artificial sequence  Forward Primer
  Primer
caaactacctacagctcagg

SEQ ID NO: 19312 - DNA, 23 bp, Artificial sequence  Forward Primer
  Primer
atgaaagtgatttcctttcacaa

SEQ ID NO: 19313 - DNA, 27 bp, Artificial sequence  Forward Primer
  Primer
ataactaaactgtcattatttcgtcct

SEQ ID NO: 19314 - DNA, 22 bp, Artificial sequence  Forward Primer
  Primer
acagctttcaaagagagtagtt

SEQ ID NO: 19315 - DNA, 24 bp, Artificial sequence  Forward Primer
  Primer
taggaaataagaatccatagggta

SEQ ID NO: 19316 - DNA, 21 bp, Artificial sequence  Forward Primer
  Primer
taataccttccggataaggat

SEQ ID NO: 19317 - DNA, 26 bp, Artificial sequence  Forward Primer
  Primer
tgatttaatcaattcaatacactgct

SEQ ID NO: 19318 - DNA, 18 bp, Artificial sequence  Forward Primer
  Primer
tccaaccccagtgccctt

SEQ ID NO: 19319 - DNA, 24 bp, Artificial sequence  Forward Primer
  Primer
atactatgttgcatcagctttcac

SEQ ID NO: 19320 - DNA, 25 bp, Artificial sequence  Forward Primer
  Primer
ttaacacattaaggtactattatgc

SEQ ID NO: 19321 - DNA, 30 bp, Artificial sequence  Forward Primer
  Primer
agagtagaatgtgtagttagatatattttc

SEQ ID NO: 19322 - DNA, 24 bp, Artificial sequence  Forward Primer
  Primer
taaacatgctgaaggaagtaaatc

SEQ ID NO: 19323 - DNA, 27 bp, Artificial sequence  Forward Primer
  Primer
ttttaggacaattactgaaaaatagct

SEQ ID NO: 19324 - DNA, 18 bp, Artificial sequence  Forward Primer
  Primer
tgaggctgaaggagcccc

SEQ ID NO: 19325 - DNA, 19 bp, Artificial sequence  Forward Primer
  Primer
tttgccagagcaatgactc

SEQ ID NO: 19326 - DNA, 25 bp, Artificial sequence  Forward Primer
  Primer
atatgcatttgtacactgacagttg

SEQ ID NO: 19327 - DNA, 28 bp, Artificial sequence  Forward Primer
  Primer
aaatatcatcaccaattttaataccttc

SEQ ID NO: 19328 - DNA, 29 bp, Artificial sequence  Forward Primer
  Primer
ttttgaggtaaatacaatttatagaggtc

SEQ ID NO: 19329 - DNA, 24 bp, Artificial sequence  Forward Primer
  Primer
atttattacatgaggggcagtatg

SEQ ID NO: 19330 - DNA, 19 bp, Artificial sequence  Forward Primer
  Primer
gagccaaagactgggaaaa

SEQ ID NO: 19331 - DNA, 25 bp, Artificial sequence  Forward Primer
  Primer
taaaatttgcttatcgtacatcaca

SEQ ID NO: 19332 - DNA, 21 bp, Artificial sequence  Forward Primer
  Primer
agaatctctgggacaagagtc

SEQ ID NO: 19333 - DNA, 27 bp, Artificial sequence  Forward Primer
  Primer
cctgtttcatttatacctacttgaaaa

SEQ ID NO: 19334 - DNA, 24 bp, Artificial sequence  Forward Primer
  Primer
atctgctagtcttcagtccaattg

SEQ ID NO: 19335 - DNA, 19 bp, Artificial sequence  Forward Primer
  Primer
tttccaaaactcaccacag

SEQ ID NO: 19336 - DNA, 24 bp, Artificial sequence  Forward Primer
  Primer
accacccacactttatctactgtc

SEQ ID NO: 19337 - DNA, 18 bp, Artificial sequence  Forward Primer
  Primer
tcgggaggctgtaaatgc

SEQ ID NO: 19338 - DNA, 18 bp, Artificial sequence  Forward Primer
  Primer
gcctgagggcctgaacta

SEQ ID NO: 19339 - DNA, 18 bp, Artificial sequence  Forward Primer
  Primer
aagagcagccttgctgaa

SEQ ID NO: 19340 - DNA, 18 bp, Artificial sequence  Forward Primer
  Primer
tgcacgggttacagctga

SEQ ID NO: 19341 - DNA, 28 bp, Artificial sequence  Forward Primer
  Primer
atattccacaaactctataaaaggttaa

SEQ ID NO: 19342 - DNA, 27 bp, Artificial sequence  Forward Primer
  Primer
ttacattgactcataagaaagtgtcat

SEQ ID NO: 19343 - DNA, 24 bp, Artificial sequence  Forward Primer
  Primer
gaatatcatactccgaagacttcc

SEQ ID NO: 19344 - DNA, 23 bp, Artificial sequence  Forward Primer
  Primer
attaaggctgtggagtttttacc

SEQ ID NO: 19345 - DNA, 19 bp, Artificial sequence  Forward Primer
  Primer
tctacgtgtcctccccaac

SEQ ID NO: 19346 - DNA, 19 bp, Artificial sequence  Forward Primer
  Primer
tttgggggtaaaaccactc

SEQ ID NO: 19347 - DNA, 24 bp, Artificial sequence  Forward Primer
  Primer
tggatggattaaacatttttcttt

SEQ ID NO: 19348 - DNA, 20 bp, Artificial sequence  Forward Primer
  Primer
aaaaccacagccatttctcc

SEQ ID NO: 19349 - DNA, 24 bp, Artificial sequence  Forward Primer
  Primer
acttagagactaaaccaccaccaa

SEQ ID NO: 19350 - DNA, 27 bp, Artificial sequence  Forward Primer
  Primer
ataactcaaagtgattttccatatgag

SEQ ID NO: 19351 - DNA, 20 bp, Artificial sequence  Forward Primer
  Primer
ttttctggggacaacaaaac

SEQ ID NO: 19352 - DNA, 23 bp, Artificial sequence  Forward Primer
  Primer
ggaaatttgccttactctttaat

SEQ ID NO: 19353 - DNA, 18 bp, Artificial sequence  Forward Primer
  Primer
tgtgtcctcgggctcaac

SEQ ID NO: 19354 - DNA, 20 bp, Artificial sequence  Forward Primer
  Primer
tcacgttcctaccttttccc

SEQ ID NO: 19355 - DNA, 19 bp, Artificial sequence  Forward Primer
  Primer
accgagtggggagttagaa

SEQ ID NO: 19356 - DNA, 27 bp, Artificial sequence  Forward Primer
  Primer
ttttcactttgtaaatagagtcagctt

SEQ ID NO: 19357 - DNA, 20 bp, Artificial sequence  Forward Primer
  Primer
aggcaatgatgattcccttc

SEQ ID NO: 19358 - DNA, 18 bp, Artificial sequence  Forward Primer
  Primer
ttgggaggtggggttgag

SEQ ID NO: 19359 - DNA, 22 bp, Artificial sequence  Forward Primer
  Primer
ttcatgctagtggtgacagttg

SEQ ID NO: 19360 - DNA, 26 bp, Artificial sequence  Forward Primer
  Primer
tggtctattgactctacttatgaatt

SEQ ID NO: 19361 - DNA, 29 bp, Artificial sequence  Forward Primer
  Primer
agaaatatttttgcagyctattgatatag

SEQ ID NO: 19362 - DNA, 25 bp, Artificial sequence  Forward Primer
  Primer
ttaccatcacaatttcctaattacc

SEQ ID NO: 19363 - DNA, 18 bp, Artificial sequence  Forward Primer
  Primer
tgctgcagggtgtcagat

SEQ ID NO: 19364 - DNA, 23 bp, Artificial sequence  Forward Primer
  Primer
attttatgtttctccagggtctt

SEQ ID NO: 19365 - DNA, 19 bp, Artificial sequence  Forward Primer
  Primer
atttgctatgatttggggc

SEQ ID NO: 19366 - DNA, 21 bp, Artificial sequence  Forward Primer
  Primer
tgggwgaggtaaatgaaatgg

SEQ ID NO: 19367 - DNA, 26 bp, Artificial sequence  Forward Primer
  Primer
aaaaggtaaacgttagttccatttta

SEQ ID NO: 19368 - DNA, 24 bp, Artificial sequence  Forward Primer
  Primer
tagcaaccagagagaactcataaa

SEQ ID NO: 19369 - DNA, 19 bp, Artificial sequence  Forward Primer
  Primer
tgagctttccttaggggtg

SEQ ID NO: 19370 - DNA, 21 bp, Artificial sequence  Forward Primer
  Primer
tcccaatcatagagaatgagg

SEQ ID NO: 19371 - DNA, 27 bp, Artificial sequence  Forward Primer
  Primer
aatgtgtaaaacattttgtaaaacctg

SEQ ID NO: 19372 - DNA, 18 bp, Artificial sequence  Forward Primer
  Primer
tgagatggtagccccctt

SEQ ID NO: 19373 - DNA, 28 bp, Artificial sequence  Forward Primer
  Primer
ttcttcatatagaaagaacaatatcttc

SEQ ID NO: 19374 - DNA, 29 bp, Artificial sequence  Forward Primer
  Primer
tatttattgacttgatttatactggaagc

SEQ ID NO: 19375 - DNA, 22 bp, Artificial sequence  Forward Primer
  Primer
ttgaagtcctaaaaacacccac

SEQ ID NO: 19376 - DNA, 29 bp, Artificial sequence  Forward Primer
  Primer
tataagtactcttgtgtattgaacttgga

SEQ ID NO: 19377 - DNA, 26 bp, Artificial sequence  Forward Primer
  Primer
aaaatagaagcatctgccataatatc

SEQ ID NO: 19378 - DNA, 26 bp, Artificial sequence  Forward Primer
  Primer
tagaatacaggcagtgtatttacttc

SEQ ID NO: 19379 - DNA, 24 bp, Artificial sequence  Forward Primer
  Primer
aatgaatgaatgatttttggtttg

SEQ ID NO: 19380 - DNA, 24 bp, Artificial sequence  Forward Primer
  Primer
tttcatgtggaaatcaaaaataac

SEQ ID NO: 19381 - DNA, 22 bp, Artificial sequence  Forward Primer
  Primer
aaaagcatcataatgaaaccat

SEQ ID NO: 19382 - DNA, 23 bp, Artificial sequence  Forward Primer
  Primer
aaaatattccaaacaagtttccc

SEQ ID NO: 19383 - DNA, 20 bp, Artificial sequence  Forward Primer
  Primer
tgaaagatacacttccccat

SEQ ID NO: 19384 - DNA, 23 bp, Artificial sequence  Forward Primer
  Primer
atttctttccagaatgattgcta

SEQ ID NO: 19385 - DNA, 30 bp, Artificial sequence  Forward Primer
  Primer
aattagagatagtttagaagttaacatcgt

SEQ ID NO: 19386 - DNA, 23 bp, Artificial sequence  Forward Primer
  Primer
atgtcttctgatctgtgaaatgg

SEQ ID NO: 19387 - DNA, 30 bp, Artificial sequence  Forward Primer
  Primer
actacttgcattcctaaattaaatatatcc

SEQ ID NO: 19388 - DNA, 19 bp, Artificial sequence  Forward Primer
  Primer
acaagagctgcaggagttc

SEQ ID NO: 19389 - DNA, 21 bp, Artificial sequence  Forward Primer
  Primer
ttgctttaagagaacagagaa

SEQ ID NO: 19390 - DNA, 26 bp, Artificial sequence  Forward Primer
  Primer
aatgtacaagacaaactgagaagaat

SEQ ID NO: 19391 - DNA, 27 bp, Artificial sequence  Forward Primer
  Primer
tataatggatagaagcaaaagaatttc

SEQ ID NO: 19392 - DNA, 28 bp, Artificial sequence  Forward Primer
  Primer
ttcttctctaaacatacacactatgctc

SEQ ID NO: 19393 - DNA, 20 bp, Artificial sequence  Forward Primer
  Primer
tcccaaacctttgcatttac

SEQ ID NO: 19394 - DNA, 19 bp, Artificial sequence  Forward Primer
  Primer
gttggcttgaaagatcaag

SEQ ID NO: 19395 - DNA, 27 bp, Artificial sequence  Forward Primer
  Primer
tttaccattcaaacataattattggtc

SEQ ID NO: 19396 - DNA, 22 bp, Artificial sequence  Forward Primer
  Primer
ttcatggttaggactcygaaat

SEQ ID NO: 19397 - DNA, 25 bp, Artificial sequence  Forward Primer
  Primer
aatttctttaccaactgagctatga

SEQ ID NO: 19398 - DNA, 25 bp, Artificial sequence  Forward Primer
  Primer
tgtgtgccttatgtacaatgaatac

SEQ ID NO: 19399 - DNA, 24 bp, Artificial sequence  Forward Primer
  Primer
tttaaattgcatgatgacttacca

SEQ ID NO: 19400 - DNA, 28 bp, Artificial sequence  Forward Primer
  Primer
aatacaaaattattttcatacaggaagc

SEQ ID NO: 19401 - DNA, 19 bp, Artificial sequence  Forward Primer
  Primer
gaacagcagcaaaacacac

SEQ ID NO: 19402 - DNA, 27 bp, Artificial sequence  Forward Primer
  Primer
tgtttgaggattattagttcataactt

SEQ ID NO: 19403 - DNA, 26 bp, Artificial sequence  Forward Primer
  Primer
aataagaggtgttaataggatttgga

SEQ ID NO: 19404 - DNA, 24 bp, Artificial sequence  Forward Primer
  Primer
aaaacctggagctgacttctaata

SEQ ID NO: 19405 - DNA, 20 bp, Artificial sequence  Forward Primer
  Primer
tttccttgatgatgtggtct

SEQ ID NO: 19406 - DNA, 19 bp, Artificial sequence  Forward Primer
  Primer
caacggtctctcacacctc

SEQ ID NO: 19407 - DNA, 19 bp, Artificial sequence  Forward Primer
  Primer
ttgccatcaagtgtgcttc

SEQ ID NO: 19408 - DNA, 19 bp, Artificial sequence  Forward Primer
  Primer
ttgtaattcacctggccac

SEQ ID NO: 19409 - DNA, 24 bp, Artificial sequence  Forward Primer
  Primer
agcawtagggtaaagataaaacag

SEQ ID NO: 19410 - DNA, 20 bp, Artificial sequence  Forward Primer
  Primer
ttactatgccattctgggga

SEQ ID NO: 19411 - DNA, 25 bp, Artificial sequence  Forward Primer
  Primer
tgatatgcttacaaattgtcaactg

SEQ ID NO: 19412 - DNA, 20 bp, Artificial sequence  Forward Primer
  Primer
tcttctgacccttcactcaa

SEQ ID NO: 19413 - DNA, 21 bp, Artificial sequence  Forward Primer
  Primer
atttctgggaaatgagaatgc

SEQ ID NO: 19414 - DNA, 23 bp, Artificial sequence  Forward Primer
  Primer
aggatgcaggatcttagttctct

SEQ ID NO: 19415 - DNA, 26 bp, Artificial sequence  Forward Primer
  Primer
aatctagaaraatggtacagatgagc

SEQ ID NO: 19416 - DNA, 25 bp, Artificial sequence  Forward Primer
  Primer
aygtatttttcagttgtttcactca

SEQ ID NO: 19417 - DNA, 24 bp, Artificial sequence  Forward Primer
  Primer
ttgatgatgtggtctaagaatctg

SEQ ID NO: 19418 - DNA, 22 bp, Artificial sequence  Forward Primer
  Primer
aaatttcaggaaaacctcctca

SEQ ID NO: 19419 - DNA, 27 bp, Artificial sequence  Forward Primer
  Primer
agcttctgtattttactgaagatctga

SEQ ID NO: 19420 - DNA, 24 bp, Artificial sequence  Forward Primer
  Primer
caaagatgaataagaaagtgttct

SEQ ID NO: 19421 - DNA, 18 bp, Artificial sequence  Forward Primer
  Primer
tgcagtcaatggggtcac

SEQ ID NO: 19422 - DNA, 18 bp, Artificial sequence  Forward Primer
  Primer
tctccagggacggagacc

SEQ ID NO: 19423 - DNA, 20 bp, Artificial sequence  Forward Primer
  Primer
agagcaattcgattcactgg

SEQ ID NO: 19424 - DNA, 18 bp, Artificial sequence  Forward Primer
  Primer
ctgacaactcctgggcag

SEQ ID NO: 19425 - DNA, 24 bp, Artificial sequence  Forward Primer
  Primer
atttaatggaaaatcgtttcttca

SEQ ID NO: 19426 - DNA, 20 bp, Artificial sequence  Forward Primer
  Primer
agctcacttgcaagacgttc

SEQ ID NO: 19427 - DNA, 23 bp, Artificial sequence  Forward Primer
  Primer
aaataattcacgtggaaactaat

SEQ ID NO: 19428 - DNA, 28 bp, Artificial sequence  Forward Primer
  Primer
tcaactatttaaatgcaatgtagtcttt

SEQ ID NO: 19429 - DNA, 25 bp, Artificial sequence  Forward Primer
  Primer
attttgaatacagaactgcactctg

SEQ ID NO: 19430 - DNA, 22 bp, Artificial sequence  Forward Primer
  Primer
tgggaaagctttataatggaaa

SEQ ID NO: 19431 - DNA, 24 bp, Artificial sequence  Forward Primer
  Primer
tcttcaaagcactttcaataaaaa

SEQ ID NO: 19432 - DNA, 28 bp, Artificial sequence  Forward Primer
  Primer
aaattatagttgatgtggtaaagaacaa

SEQ ID NO: 19433 - DNA, 19 bp, Artificial sequence  Forward Primer
  Primer
acagatggtgcttgatctc

SEQ ID NO: 19434 - DNA, 24 bp, Artificial sequence  Forward Primer
  Primer
tgctttgattggtttgataattaa

SEQ ID NO: 19435 - DNA, 20 bp, Artificial sequence  Forward Primer
  Primer
tgatcactcaccactttgct

SEQ ID NO: 19436 - DNA, 26 bp, Artificial sequence  Forward Primer
  Primer
tacttccatatctaaccatgtttcaa

SEQ ID NO: 19437 - DNA, 18 bp, Artificial sequence  Forward Primer
  Primer
aacagcccccaaaacacc

SEQ ID NO: 19438 - DNA, 18 bp, Artificial sequence  Forward Primer
  Primer
ccagggggcaayagagga

SEQ ID NO: 19439 - DNA, 19 bp, Artificial sequence  Forward Primer
  Primer
atagcaggctcacagcatg

SEQ ID NO: 19440 - DNA, 29 bp, Artificial sequence  Forward Primer
  Primer
aagatactgtgatagctatctgaaaaatg

SEQ ID NO: 19441 - DNA, 20 bp, Artificial sequence  Forward Primer
  Primer
tccgttttccctctaaatgt

SEQ ID NO: 19442 - DNA, 27 bp, Artificial sequence  Forward Primer
  Primer
gctagaaactcaattaagtcaaaatga

SEQ ID NO: 19443 - DNA, 21 bp, Artificial sequence  Forward Primer
  Primer
gcaaataacactttcctcttt

SEQ ID NO: 19444 - DNA, 21 bp, Artificial sequence  Forward Primer
  Primer
aatcaacaagactagcacgca

SEQ ID NO: 19445 - DNA, 24 bp, Artificial sequence  Forward Primer
  Primer
aagagatggaatgtactgactggt

SEQ ID NO: 19446 - DNA, 22 bp, Artificial sequence  Forward Primer
  Primer
tgaagctttgagatgttatgga

SEQ ID NO: 19447 - DNA, 18 bp, Artificial sequence  Forward Primer
  Primer
atgctcagggcctctgcc

SEQ ID NO: 19448 - DNA, 23 bp, Artificial sequence  Forward Primer
  Primer
aagtcttccgagcttctttactt

SEQ ID NO: 19449 - DNA, 23 bp, Artificial sequence  Forward Primer
  Primer
atttatttcrcctcttccatgtt

SEQ ID NO: 19450 - DNA, 21 bp, Artificial sequence  Forward Primer
  Primer
tttgtgagagacagggttttc

SEQ ID NO: 19451 - DNA, 30 bp, Artificial sequence  Forward Primer; identical to SEQ ID NO: 19119
  Primer

SEQ ID NO: 19452 - DNA, 20 bp, Artificial sequence  Forward Primer
  Primer
tgtatgcaccacgaggatta

SEQ ID NO: 19453 - DNA, 30 bp, Artificial sequence  Forward Primer
  Primer
tatttattactcactaataggatcacaagt

SEQ ID NO: 19454 - DNA, 28 bp, Artificial sequence  Forward Primer
  Primer
gtgaattaaatataaaaatagccaacac

SEQ ID NO: 19455 - DNA, 22 bp, Artificial sequence  Forward Primer
  Primer
ttctccaaagcaagtagggata

SEQ ID NO: 19456 - DNA, 18 bp, Artificial sequence  Forward Primer
  Primer
tgcttttttggaaggacg

SEQ ID NO: 19457 - DNA, 25 bp, Artificial sequence  Forward Primer
  Primer
aaaataaactccccatatcacctat

SEQ ID NO: 19458 - DNA, 23 bp, Artificial sequence  Forward Primer
  Primer
aaatagcctgggacatgttatat

SEQ ID NO: 19459 - DNA, 19 bp, Artificial sequence  Forward Primer
  Primer
tgctgtgcacttctctcaa

SEQ ID NO: 19460 - DNA, 19 bp, Artificial sequence  Forward Primer
  Primer
tcatttccttctctaggga

SEQ ID NO: 19461 - DNA, 30 bp, Artificial sequence  Forward Primer
  Primer
tattgttttataacctgtttcttttctact

SEQ ID NO: 19462 - DNA, 28 bp, Artificial sequence  Forward Primer
  Primer
ccctaatatttctaagtattccgattta

SEQ ID NO: 19463 - DNA, 29 bp, Artificial sequence  Forward Primer
  Primer
aaattctcctttactgttcttaagattct

SEQ ID NO: 19464 - DNA, 21 bp, Artificial sequence  Forward Primer
  Primer
tcctgatgaacactgacgact

SEQ ID NO: 19465 - DNA, 25 bp, Artificial sequence  Forward Primer
  Primer
aaatatccatgagtcttgcactatg

SEQ ID NO: 19466 - DNA, 28 bp, Artificial sequence  Forward Primer
  Primer
tttttaatctgacagaatgactaaaaga

SEQ ID NO: 19467 - DNA, 24 bp, Artificial sequence  Forward Primer
  Primer
ttaaagtagatggcagaatttcct

SEQ ID NO: 19468 - DNA, 18 bp, Artificial sequence  Forward Primer
  Primer
agcattggaacggggcct

SEQ ID NO: 19469 - DNA, 27 bp, Artificial sequence  Forward Primer
  Primer
ttttgaagaaataataaaagcagtgtc

SEQ ID NO: 19470 - DNA, 20 bp, Artificial sequence  Forward Primer
  Primer
atcccatctacgattctacc

SEQ ID NO: 19471 - DNA, 18 bp, Artificial sequence  Forward Primer
  Primer
tgtgggcagagcctccct

SEQ ID NO: 19472 - DNA, 21 bp, Artificial sequence  Forward Primer
  Primer
aaacrsactcacttgccagat

SEQ ID NO: 19473 - DNA, 600 bp, Bovine  MMBT08498
cttgcactgtaaccatggttattttatcattaaagtgaatgcagsggccaggtgaagagttttgtgagaaccaggttctcgtgtggtttagtctttgagtgcctgaagcragtcatccttctccatctatgaratgggacaaaggaattgggcactggttaatctatctgtctcagcaaagtgctgcaaaggttccccaggacactgcacatgaaatcaaagcagccaccacctccactgtcaccaatctttacatgcttacaatatgccaggcacaggctaatatgttaaatgcatcayctcactaaatgcttaatgtgacttggtggcgtagacattatttccataataatgaaaacactttaccaggaaattatcatttaattctcattgcagccctttgggataggttattaaggagcctcatttaacagaattggaatcaggctcagagaggtgaagcaacttgctcaacagcacacagccattaactcatggaaatagagctcaaccctcctctgcttggtcccactgccaatgcctggatgatacacaagctcattctacagatgagaaaactaaggtttagagaaaggctga

SEQ ID NO: 19474 - DNA, 600 bp, Bovine  MMBT04310
caaagacataactgggtcagagccttggacactgacttaaccttcctttgcccttctctgctgaagctttggacggaatatggacaaagagcaatttaaatctctttccattcctgtccttagagcagcttcacatctgaacctctaataaagatgcggataataaaatggcagggaaagtacaatggaaattatattgactctcatagaagtgttggaggagaaatagattctcttccctcaactctgtaataatataatcatggtatgatttctacttcgctagacttgggactattyggaaatctttaatgaatataatcaggtagtaagcatttaaaagwtrctcttttctgaaagccaggaaattatatgctcagtcagtggaaaattcaaagaaaaaggaaaaagraaaaaaagcaagctacctttttttttttaaacaacataatacacgtgtcgtgatggaatcmaggtgggaaatgagacctgagttacggcatttgctttggaccctgcagtataaacttggggggagtcatataatatctttggggatgcggcttttgtgctgttgcaaaataataattgcaagcattt

SEQ ID NO: 19475 - DNA, 600 bp, Bovine  MMBT09435
tcagaggtgatcatgtgatctcctgaaagtcaataaaactcaaggaaacttttgctaggaatgctggcagagagtkagatggtctttcccacagataatgctaacaattatggcatcacaagccagatcagtcaggagccaaacatggggtctgagaatgaagatagttcagtggatgatagtcaaatgacagagagaaacgaggtccctggatcaaaacatgcttgaagtttactcttcccttgcactttcacattacataagccgtttctcccactttcgcttatttctctgagctgraaattctggatacctgcaatagtgagtcctgactgatattattgctgtaatggccccaggagtgctatgtaaatgagaagcagtcaatcaacttacaggattattgttgctatgtaaataaatttctcttttgactgmgtgagcagagacttccaagccagggcagttttccaaattagatttttcattgtctcagccagaagagaggcacattaggctactcagagggcaccaagcctgcccatacctctgagaatgagactttcctgccagctttccctaattgctgagggccaggtg

SEQ ID NO: 19476 - DNA, 600 bp, Bovine  MMBT06751
agctcattcagttctagttactttttcttttgtttcaaatggcagccttctctgtaaatcagataaagaactgtatcattatgttatcatctttgaaagctccataattgtagcttttctacccaagtcactgaaataaaacatctaattctacactaaatataaatttatttccagttttatgtattgtattatttactaggtgatagtgcttccaacctttttcagaggtgagcctatagtataaagaactattttttaaattacacatattttcacaaaagacaatgaaggctacayagattaggagttactcttagtagttcgtcaatacttccatattttttcttaaggacataaaagacagatattactgattttgctttaaaattagtccaaaaggctggaaaaaaaaagtcatattgaattaattaatttagatctaattaatttgtgtattcactagagcaattaagatttgtgtaaaatgagcagggattaaaaaaagtacaataaacaatatgaaaatatttactagggataatttactgctgagagtctattactgtatttttctctttatccttgttcctcaagaac

SEQ ID NO: 19477 - DNA, 600 bp, Bovine  MMBT09899
actcttcaacatggagaatcagaaagtctcatccagagatgttgtctcagacgggtgcagagctctccccttctccccctcccactccatccgaatgctgaggacacgtggagcaagagtacttccaacatcggagacccttgggaaatttaggtttctaaaaaccaaattaaagaactgcatacaaaataggttgattacagagatcataactgctttaaacaagccaaagaaatcccttctcaaaggaatactacactgattctttttgtggttccttcatgaaacagatggtctccsgttggcgctacctttgcaaacctgggcatctgtgatgggggttctacacgcccccctggtctgaggagccagtctacttgcactaatgagctgagtgagtgaggaaccaaaaatgacgtccttgccttttcttgtaaaccccttttgggaygaaacttaagtgtgtacacacacacayacacacacaattaactcttcagtctgctccctcataaagtgacaataaaaatacttgtcacagagggattaaagaagctgtctatactgaaaaattaactttaaataagtcgacaatataca

SEQ ID NO: 19478 - DNA, 600 bp, Bovine  MMBT07829
aatgaatagagtgactatacaatttatcgttcaaatgagagcacttcccaggagagaaaggttgcaccaatagtgcagaaaccagtactgtcccaaatgaaccgtgacatgtagtcatcctgacatgaagcacaataacatcaaactatgcttcctcgagcttactagcatcgtgtggaatgtgatggcaaggggcaaatcctatgttacactgatccagagagtgctaatcttgtagaaatcattggtaatagtgcctctgaagctgtaaagtgtggtggcccttttccttactccaarccaggcaattttgttaggatttaatccatattaatttacttactattcaaaaactctgaaatgcttatctccattttaagaggaagaaaccaagatagattgtytgaataacctgcccagagtcacagagctaaaactggttgagcgaagatatgaaaccacaaggtctagytttccaattcctattttaatcactgtttatacacctccttgttaattctttttctcttgcataaattttctttaataatcagaacaatactttaagaggataaaacttttaggatgaataaatttccc

SEQ ID NO: 19479 - DNA, 600 bp, Bovine  MMBT08559
catgtcatcctctgtcaccctcttctccttctgctttcaatcttttagttttcatctgatgcaaatgggaataaccatttgaaattaccaccttaaaattaacaagaaatatgagatcaaggaggaactatttccaaggaggagccatcatttttctctgagaaacagcccccctgaatgggacatgtacaggtgtggtagccgcctgcccttcatcactgggtcatgagcatttaagtgtttgtccaacatctgaatagagtctaccgttacttctgggtcttcttctccttctcagaygtgtacagttatgatttatggagcccatttctttttcctgctcatgaaacatcatgcatgtgactctcatcgggcttttgaggcaagcatggccaaggataggcaagtaacctgtggtttctataagaaagacaggttccctggaccactgtagtgcgagaaggctttcagaattccccctttcagttggacatgacaaatacctgaatggactctgggactgagaagtagagcagcatttaaaaacagacttcagactctggaamcagactgcctgggtagggctaagtcactcagcra

SEQ ID NO: 19480 - DNA, 598 bp, Bovine  MMBT17264
  misc_feature (1)..(113): n is a, c, g, or t
nnnnnnnnnnnnnnnnnnnnnnnnnnnnnnnnnnnnnnnnnnnnnnnnnnnnnnnnnnnnnnnnnnnnnnnnnnnnnnnnnnnnnnnnnnnnnnnnnnnnnnnnnnnnnnnnntcctcagctaaatgcatatttgacatagtcaggaacttaaataggcagttgttccactactgaaaattgtctgagtggaatgcctgagcactggcggtagtctaaaaagaaaataagagacatctgtcggggtccttcaagcagttcagctttctaatcagaccatctgaattccttagtgaaagayaagaaaaaatcctgctacccattaggacagtcactcaatggtgataaagcagatgtttaaacaaggtacacatactatgtctgtcagtctgtcatttagtgaagcggtggagcgcactggagagggggttaaggaacagatgagggagaggaagcaaagaatcctgctagacctgagtctgtgagccatagaagcaatggcttaaaataacaatgtggcaacctaagacactgttgyaggtctgaaagagaagctgcaatttgctaattttgaaagactaggttagtgcwagtgaacc

SEQ ID NO: 19481 - DNA, 600 bp, Bovine  MMBT00723
atataagcaactagtagtcaagagtgaaaaggggatataggtgacacatggtaaaatggcctatttgattatttgaataccatttttgttaaacttttggttgcatatcagaaactatgattaattttttcataatagtgtgcatactttgtgatttttttatttaaaaatattacaggtaacaaaaccgttgttttttacaagttgttatcttattacgagtaataaaactgttggataaagtttagtaattctaaataaaaaggaaagataacatatatgtcagagtccaattatgcygatarwtgaaacttcaggtatctttctgtgtgatagaatatctgctataattcttaccaattttgaacttatcttagtttttatgtgtacatatctcttttaattaggctagaaatgctgtattctttagccattaactaaaaatttaatttcaatgctagaatattattttggatatgaattaaccacctgacatatcaataaacttttttctatttaagataattaaagcaaagttatacttcctttcctgtataactaaaatgacaattttgttcaggacctcaaatttatatgaga

SEQ ID NO: 19482 - DNA, 600 bp, Bovine  MMBT04766
gctttcatttttatgctggtagatatttttgatgtacagtttcattctcagtgcttcctgtttcagagtctgacaaagaggagaaaccgcagagtgctgtcatacccaaggaagtgaccccagcgctgtgctccctgatgagcagctacggcggcctctcggggtcagagagtgagccggaaggtgagcctggctccgggtggtaacagtgggtgtggctcgctccactgttgcctctgatgtacactgtgcatcagtagcatcctttcacgtgtatgtatctgaggacgagatgtgtcwtgcacattcttaagttgagcctcaaattcctttctcatttgattccgaagttaacatgggatgaagggacgtgggagagatggagaactgtgttgctcctctaggagaaaggggcaaaaataacataatgaaagaagaggaaggggaagagatatccactagtgaaatcagagaaaattctaaaagataaagcaaaggaagttaatactccttcccactctcaagaacccttgtcttaacacgtttcgcaccttttgaagctggagaggggtcctttatgacaaagaggatggtaaaatt

SEQ ID NO: 19483 - DNA, 598 bp, Bovine  MMBT10814
  misc_feature (1)..(69): n is a, c, g, or t
nnnnnnnnnnnnnnnnnnnnnnnnnnnnnnnnnnnnnnnnnnnnnnnnnnnnnnnnnnnnnnnnnnnnnactgcataatactgctggactccaaattgtcaaacattacaaaacaagaaatgtttcaacaaccattcagcatgttttaaggacaaaatatatataatatacttgatattatatatgtattttatcacatactcagtaaagtatgccaaggtgattcatccatccaataaaattgaaaataaaaattttacatttctctacttgtcagtattcaggcttctgaaggtggaycttgaactcagaatggtcagtttttgaggaaagccacataatcrgtgagtctggctaactgctgctctttggggatggrtggaacaggggygggctctgataaggaaataaacctgttaaaggaaacatccagggyccctgcaactggcttcttgggcatgactatccttatggtggagtcrgcttgccagccttgttcaaggatacctttcacagcctcctctacagggagtccaacaaaggctgcgaaatcgtcggcaatgatggaggtataggcttgggagaccagggcgaaggc

SEQ ID NO: 19484 - DNA, 601 bp, Bovine  MMBT06093
  misc_feature (1)..(1): n is a, c, g, or t
nctgtgaatgttttaatgtacaataaagcactttgatagctgccttaaaaaaaaaaaaaactggtaatgtttgcaagtgtttcctgaaggcctcactgaaataccaccagcagctaacaaaggggaaagggttagtcgtcatcaataatacggggaaagttgctaaatgactctggcaaacagcacagtaagtgaaaagattggggtgcagtgtggggccactacaaggaacaccacctgatctggggaacgatgctcctcccatggggtaatgtggagtccagaaggcattgtttctccsccttaacctttgtaactgctgcaggagactttcgccatcagagttcagttagtcttaagttgttgctatttagtccctaagtcatgtctgactctgtcagacaccatggattgcagcacaccaggctttgctgtttttcactatctcctggagtttgctcaagctcagtcttcaattctgaccccttaattggcaacttacaccttccagaattatctgttggacaaagttaaaaaaaacaaacaaacaggcattcccatgcctgcccataaaatatgtcttacatctgagaagacttaa

SEQ ID NO: 19485 - DNA, 600 bp, Bovine  MMBT02373
gaccgatctgactttaggaaaactgagaccaggcctgatgacttttgtttcagcttcttgtctccttgaaacttgggaggtacagcagcacttgatgtatatttcccaactcagctccagtttttgctctccctgggtccctatggatagttctatctttgaggatggaagaggttgggatctgaaggcctcttctatctgtgaagctgcaggtgtctccttacctcctgctggatgaaatttgggatggggaacaaggatggcagattgtttcttgagagggttttaagtgcagagtgratgttctggtacaggcttctcagaggcatcagagatgcctgagggatacagatacttgccaacttatgctcctgtcttgatactagttttcagttctttctgagcatcctcaagcagtaattttgcccaaagagsggcagggccaagcagtagccctagcacatgggagaagaggagagctgaagaggccaggcttccttgcctgggaggtgacaagagttgtctcctaggcatggtctttctaggagctgctctgtggcattttgtagaggagaaaaaacattcatgccataggaactc

SEQ ID NO: 19486 - DNA, 579 bp, Bovine  MMBT05603
tccaaatctaaagttttcaagaaaaccacttgaaatatggatatacacccacttatattaatggacttctccattaatggtagttggttagcatattatgtcctgagatattaactastaatactatgaattccagtgattagccatttaaaagctaagcattcagaacaggaagacaaacttcagtttttcagagatacttaaagttttacggaacaaacctggttcttgacaaatctcatgaaacctactaataattgcttagaagcctttcttgaggtctttcaatatacaattaaygaacaaaagtcacaaatcatcggcatctctagttcttcttgccacagtaaaaactgtttgaaataattataaaacaaaagaccaacaaactcaaaagcatttctttgtcagcacatttttagggaagtcacagaaacattgccgaacatacgaagaaacaaatattagaacagattggccatgcatttgggtgatagtacaaatgtttgtaacatgtctccacttatggtgcttgttagagtctatttcaatagttacattgccaaagaacttcttttt

SEQ ID NO: 19487 - DNA, 600 bp, Bovine  MMBT20503
tggacttgttgagagggctgtctttatcataagactgtgaccttactgtatttgtcactcttgtacatctagtctttaacacctagaccatgcaaggtggttcagtagttcaagctgtgtatgtctcagagtcacctcaggagtctgaagatataaacacccagaggccctggtcctcccgcaagcctggccctctgatcctgttgctcctctcagagatgttgccatgagtcaacctctgagaacctcatgcaacgacaggcagtgaaatccagagctctgcagaatgttctagagcaycccacctctcttttgctttctctctctctgcaccgccacccttcccaacccctccccgtctttctctccttgagttattttcatacagttcttcatgatctgctctcttggcacattgagaagatttgtattctatgatgtttccaagtgtccaggtgtttggcatcttatattttaatatacagatgcttgatgggagctaggccttgcacacactccccaccaaggcatgcacggactatctgatgctttctaccggtttaaagtctcagcagtccctattggcatggtaattgttta

SEQ ID NO: 19488 - DNA, 600 bp, Bovine  MMBT02421
ctactcatctgtacctgggtctgactgccaattagcagctcgagatagtcacacatggtggttgaaactgccctggagggtacaggttaatgatgctcagagagagtaaatggaattgatggctgttcagccctctctcaccctgggctggagcagtgctgagagtcctcagagatgctgctggcaaggtcaggtactcctggcacatggaaagtgttgccacaagagggctggtakgggtcctcctattccatagacctcctcataggctcaagtatctggagtaggccttcctttccmcaaggagcatgccagaatgaatatatgtacccacagagggagggatagtttcactgagggcagtcgctaatccttggatggcagacaagcagcccctataatgcccttgtccttagagggctcagggcagacaccctgaattgatgcctgcactcttgcttgctgagctaaactctggccatggttcctctcaaatgagccttctaagtagtactatcatcaatcacagttggtagcagaaatggaatccatttgccatccttgcattaatcttttatcggagattaacttgtctgattg

SEQ ID NO: 19489 - DNA, 600 bp, Bovine  MMBT18047
ctcgcctccctccgcgggggctgacccttttcctgcgaggcttccggagagggtcttcgctcaaaacccaaccagagcccttgccaatgtgcttgggggaggaaagcttacttgacatcagccttccagtgcattcctgtaattacagctcaatgctaaagcgctaaatggttattattatgaagccagggtgtttgctgccaaggcgataggaaagacaccaacacgaggtttagggaaatcaagggtttttactggatttgagactaaggaggggaggcgagaacaagagatggagayctttagtcatgtatgcaaaggcgccttagactggtgacagcagagatgtagaatgtacaaatacaggttcaggtacccattttcaaggattctggaatatataggcagcttcaatgttgaaatgtatgcttccacaaactcttcgtggaattttcacccaaagacgtctagtgaaatctgggtcgctcctccccaaaaggagctcttggcctgtggtcagatcattctcgattccagcccacactttccctgttggcgcctgcatcgctgcctggcgtttccaaccctgggaatgttgaa

SEQ ID NO: 19490 - DNA, 601 bp, Bovine  MMBT10303
  misc_feature (1)..(1): n is a, c, g, or t
ntgcatttaaaaaaaaaattgcttctgtgagcaaggttataaggaatattattccctaaagataggctattttgcacactcatagaactcttaggataaattcccaatagcagaattatcaggtcaaagagtagtcttttgttaggagtttggttatgtgcccaatgtgattaaaaatattacacagctctttcataattcaatttgttttcctttccttttcattcttccctcttcattttcaaagtttcagatctaagcaaaaattaatagtattctcccaatttaaagagctttgtaytgtgataacatgctactttaatggtgaattttttgtttctgaaatcagattcttattgtaagtgagaggcttagggcacttgtaattgcatcattgcacaagtcaacaaagtgctgtttattgcttacaaagttggtatgaaacaaagaaaaaagacattaagcacaacacaccagcagctttgaaaatgcaggaggggtcaagagcaagtttcaacatgtcatttcatttgctttttgttaaggtctgaagaaagtctaagaatatggaaacgcattacaaaagaagcattcagtctta

SEQ ID NO: 19491 - DNA, 598 bp, Bovine  MMBT12068
  misc_feature (1)..(23): n is a, c, g, or t
nnnnnnnnnnnnnnnnnnnnnnnttccccgacgcagcacagctgtgcccgggacacacagagtctctcaggtgctggtgcagccagagctcactccccgctctcctcacttatctctgtgacaatgtctatcaggctctggagcccaaagatatagccagcatcctggccttcgtggaccacagtgtcctcaccatacagcctgcacgtggtgtgcgcaaaatcgatcatgcgcacgtccaccgagctagtgccgatgggcttgtaggcataggcgccggctgactcgtcagcagactcytccgacaggtcctccaagtcctccgcgtctgagtccagggccacttcagcccgctccttgccgtcatagatgatcagcagggagcttgagtagaagcggtaggattcttgtcgctccagcacgcccttgagttcagtcagcttcctgagcaccgggcccaggagctcccggcgcaagtaccggccgttgtggaaaaactggaaaagtgcctctttgaagccctgtacggacagcttccgtccgtggtacttgttcatgaacatgagctgcccactgcccgcctggtacacctgtggga

SEQ ID NO: 19492 - DNA, 600 bp, Bovine  MMBT04279
acagctgtgtaatttttctccaggaactctcagctgctcagtctaagggccaaagaaagaggatggctgtataagaggtgaaagtgatacyraaagcatgatttaagtggtggacaccagtgtccagggctggacaggggaaaatgggaagacagaaggggctgattgattaggagaaaatggaagactcaaagcactgggggtcacgaggtcaaagagcaagcatagttcaagtaagaacaagaaagccagcagaagcaaacggtggagagaagcagatgtcttgcttaaacatgaagmctgaatctgaatctctctacagaggaggatttgtgttcatccatcttctgtcrtatcattctttcttaggattcctgatctttctgtgactttcacccacaagctggatgaccacttggtggggctcttgcagagacaatgtcagcctrttggttgaaaatgaagattcccctgaaaaccggaaatgctatgaaattttgcagtttagtttattctagcactttagtggtaagtactgagaagtactttttaacctcacttctttgagttacctagtccctggtgcatcaaacagaaaaa

SEQ ID NO: 19493 - DNA, 600 bp, Bovine  MMBT19729
aaagaacagtgtaccaggagcatctggtacactgaatttgtcacactgcagacaagctaatctcattatgggagcccacaggggagaagagaaaagattcacatttagtccatatgaactaccaggagacccatcaaggcagttgggctagctcatgatacagcagcttctagcaaattaccagcccataacaacttagtcataatgagctgcaagaccctgcaccataagctccaagccattaaagggaattcaagtacatgaattcgtgtacacagtagaaccttarcatctgtctgygctaagccaatattttgcttatatctttttaggaacagcaaaattaccsttgtgtcccctgaaactagggactggaattttcatcaactgcagttttcacctgcgagacagggcagagccgatccacttcagcctcccccggccaccgagccgggcagcaagccgctcattctggcggctgttttgtacatattaggctgattttctcccaaaccatttcctcttgctgttcaagtgggaaaaacaatagtctagtcataaattaaacaggcaacaagacatgcggatccacgaagagcc

SEQ ID NO: 19494 - DNA, 598 bp, Bovine  MMBT16345
  misc_feature (1)..(222): n is a, c, g, or t
nnnnnnnnnnnnnnnnnnnnnnnnnnnnnnnnnnnnnnnnnnnnnnnnnnnnnnnnnnnnnnnnnnnnnnnnnnnnnnnnnnnnnnnnnnnnnnnnnnnnnnnnnnnnnnnnnnnnnnnnnnnnnnnnnnnnnnnnnnnnnnnnnnnnnnnnnnnnnnnnnnnnnnnnnnnnnnnnnnnnnnnnnnnnnnnnnnnnnnnnnnnnnnnnnnnnnnnnnnnnnngcttaataaatgactgttgaactgagtgaatgcatggataaacagagttgtcagatatgatcctgaagaggtgaaacrtttaatttagtatgtatattcactttccattttattaataagaaactacagactggagctgcaagataacctttactaatgagagtgacattgcatacacaaacaactgaaacctctaaccaggcttgtaaagtgtttttattttacaaccaaatttgatttgtcctgccaaatttgcattgctctgctcattattatcaatagcaggctttgtctttttttttttttttaacccatttctatttagatcatagaaaaaattgtaacttgttcagccaaagattttttctttgaaaag

SEQ ID NO: 19495 - DNA, 600 bp, Bovine  MMBT08987
gaacaacaaagctagctatatgaggtaccaacctgttttagctaagagcatgaactctgaaaccaaaaccatgtggattcaaatctcaactccatcatttagtacagtatgtccatggacagggcttccctggtggcttagctggtaaggaattgcatgcaatgtgggagacctgrgttcgatccctgggttgggaagatatgtttatgacatttgtgcatctcagttttgtcatttcaaatatgggataattayygtacctaactcatacatttgtgcttagaacagtatataagtaaytgtatctctatacagtatctctatacagtaactgctgtatatgtgtttgctactattgctatyatccttttatttaatagccctggcgtggaatagcaggtgccattaggaaattgattctggaattcaggttttctcctgtcatcatgaagaagtattttctttccactttgggttcaggagctttcagtrtggaaagaggcacaggcggtctttagtacatcaaaaactgaggacatttgtacctttatcaatcatcaggctgcacagactggccagaactaacaaggaactttttat

SEQ ID NO: 19496 - DNA, 600 bp, Bovine  MMBT11858
cacataaagacactgatatttgcattcttctcagagatcaagctttggatggagctgggtcatatgcggctaattacactgctggctcctactcactttatttggcaaagtgtgattaaaatgcttattaaaacatatcctccarttttgtttctcatttgttcagtcatgtacaactctttgcaaccccatggactgtagcccaccaggctcctctgtccatggaattttccatacaacaatactggagtgcgttgtgatttcctactccaggagatattcccaacccagaggtcaaayccagtttcctttgtctcctatattggcaggtggattctttaccagtgagccacctgggaagccagtttcattacatcacagggaactcaattcaggtccatgtaattctgctctgggcactttgctgaggtttcctaaaagtatatagttctatttctcacattacttctctttccgggaagagacagcactcctcagtcatcctccagcctcaggacactgaactctgctttgtgatttctagttcccaccttgaagccctttctttttttccatgaagcaagaagtccaaacagtaac

SEQ ID NO: 19497 - DNA, 600 bp, Bovine  MMBT13228
ctcttagccctgacactaaaaggcttcactggagtcctcaggaagatagtgtgagccatgcctgtgctctggctttatagttggggagggtactgtatgaaagattgtccccttttcctcctagaaacaacctgagatgcagagatccttactcaatcctggctctgctcccagtttaggcaagtgcttttccctctctggatctcagtttcccagtctgcaaaatggacacagttggcctagatgccctctgacaccccctccagctctaagcatctcgattttatgcgcagttcttcrcagtcttatgacctgaattcagttaacaggtagtgttgcagggggttatgtttgcagtgatgcaactgttaagcctcagtgtcatgtgacacagtagagtacgcagaattggaaagctgctttgtttgcagcagaagattscaaacttgtgcacagtaaaaaaaaaaaaaaaaagaagtcctcaaaactttcttagtctgcggcctggaaaaactcgagcttatcatgagattgttgcacttggactcccacgggagaggaatgctccatgtgctaaaagtatccgctgttgactgattc

SEQ ID NO: 19498 - DNA, 600 bp, Bovine  MMBT07398
agaccttccttgtcattatcattgtcatttttcaaagatatcctttagaagttctctttctcaggggccattgttgttaaacttaattttttgaggtgaaaaatatctttaatttgcctttgaccttgaaggatacttttgtttattttagatgggcagttatttcagcattctgaatatattatactattgttttctattgaaatatcagcagtcattctaattgtttccctctatatgtgatatatctttcctatatggttggtgtcaagagcctctcattgtctttggtgttctctrgattcattgccatgtatccaactgtgaatttttcaaagaaatgtactgagcttcctgaatttgagtgttcataccttttgcctgtttgggagaactttcagccattatctgttgatttttctccattctctcctccacaaactgattggatgtgtgctagactgaatcagtcaggaaaatagaatcaataccaagtagttcaacagaggaaatttaatatggtgccatggtctgaatatttgtattctccccaaattcgtatgttgaaaccctaactgccagggtggtggtgttgggagg

SEQ ID NO: 19499 - DNA, 600 bp, Bovine  MMBT01279
atcttaggtcttagcaatgcaatatcccagagagtaaaggatgaaactgactacaaggtgaaatgctgccaataaaagaagccaaaaagaaactcactcttcaaggatagctcattggtgtcagctcaggtcagaatggtgttgcagcaccctcatcattgatgactgatactctgacctctttagctcggagatgggatgggagctgatgctgttagcttttaatataatgcctgggcaatttactggtaagtagaaaaggaagttggtgaggatgagctcacatttgccaatgaacartaatgtgcagaaaatgtttaatcagactgtgaaagtttaacttcaattcatcaatcaagcatttccaagatactgactctatgattggcactaagtaaaaggcctgaggggaatgaacacagtccctgacattaaacagcgtaccttttaccaaggagacagaacaggctaaagaaaatgatcaatggatgaaaagacccccaaacagaaaaatatgatcagttctgacaagcagaagagtttaatggcctggcaggcaagttgtagagccaagtaggttcaaatttcagctctattact

SEQ ID NO: 19500 - DNA, 600 bp, Bovine  MMBT01425
ggcttctctcctagtgacaagttcatggaggctgagaaacacagtgagtggcctttctcgcctcacttactgcctgggagagggctgttcataactttccgctgacatctggagaacgtaggttttggaggagcagagcccagactcccgcaagccagcggagccaagtctttttttgagtttccagcacaacccatgttataataggagttggtcattgtgtttaacagtgaagcaaagcccaagtgcatgtcacaagcacatctcttctttgtgccggggtgagcagaggtgaccctycctgagtgtgtaggatgatacgaagagcattacagacatgggaaagcatttcagagcacccaaatgtggcatgagtaatcacaggcatagagcccacaagactgccttttcagcccctgcctcccctttttgtactccagttcagtcagttaagacagaaattaagtggtaagaagaggggccgcccgctcttcagactccaaggtgtttgtagcccaggacccctgcgtgggcatgggcccagcagagcctagagaacatcccctgctgggatctttctcagactgacttgctmacttc

SEQ ID NO: 19501 - DNA, 600 bp, Bovine  MMBT01892
ctcagcttctgtctgtaagttgtttcagtgtcctcttgacatggcagccactccgccagaccaagcaatgcaagagacagtcaggtgaaagctgtcctttttgtcacctatcctgggaagcctcagagcatattatctaccatgttctattcattagaaacaagtcactamgtctgacacatattcaggggcaaaggaattaggttctgccttttgaaggaaagagtgtcaaatattctgtgaacacatttaaaaaccatcacatggaatagcaagwgccagtggtacaataataacatkcactagacattcttgaaatatccagccccatcatggcagagagcttgtctgcttgaagckatactgcattccttgcacctggcacagatgttcacacatggaagcttcattaaatattttttggactgttgatgttttgtagatgaagatattcattttcagatatttcagtgacagatctcactaagtaagtgttgaagccaagatgtaatttgatcttactacccagtttctctttctgctcaccttgctatctgtcaaacagaatcactcatctctattaaaatactcactttgctc

SEQ ID NO: 19502 - DNA, 600 bp, Bovine  MMBT09481
accagtcagtcctctgtgttagcacatttgacagatacttgggatttactggcgtcatctcatcttcccacccagccttgccccttctctaagccaatgtcttttacaaatattgtgctgtgacactcgtctctgctcccattaatagaaaagccagctggagtccagagagtacaagtgatgtgcccgagctcacacagcagtgagcatcgcagccagaatttcaacctggatgggtaaaactcaggagcacagcgctcttccgatactaagctgctcttctccttattagaaacacartgtaattaagtgctcggggcttgccataattcaaaatacacttgacaccacaatctacccgagacaccatccataatggaacaatgacagggaactgccctcttggcaggtgagattctattggtctggctccatcaycaccattactcgttctgtatctcgattatctcccccataagacatatttacagcaatattaaaagggagatgaagggatatattatcttccttatgtacaacatatattacacgcccatgccygtcacagcccagatgatgcctgacaagtcagcctgcggt

SEQ ID NO: 19503 - DNA, 600 bp, Bovine  MMBT02715
tcaggtgaaaaaagagtcctcctggctagcccaatttacatacagcaggctgggaaaaggggggcagaaaaaaacgtataaaaggaggagccaaaattgatctctcttctttagggtcaaggcctcaggcctcaaggatatattttcctttgcttgccaaataaaactgagctgtaaccaagctgtaacactggtggcaaatttttgctgcagtgagacagaaccaaggaattacacattccccccaacagcttcaagctccatgtgcatgacttaaacactgataaacaggtgactgastgttggcagttgtaatatgtatccacacaaatgccatatgctgctttattaaatgcagtcatatccgttagattcctaacatgtccaagtgctaggtctagctcaccagaaaaataaaacatagaaggaatcatgccctccactccctcagattctgatagaccttctatgttttgatggaatccacactgatcaagaaaaagaatcaggttgagccagtaatagcaaagacctctctctgagtttagtgaccttgatgggacaaaattataatcctgcagtgtctgtaaaaaggtattc

SEQ ID NO: 19504 - DNA, 600 bp, Bovine  MMBT05233
agcckggaccacctacatcataatattctgaagggattattgtgtatgaagattttctgtcccacgtgtacaggatcctcaaagatcatattctctggagggtagatggattggatagtggcttaggtatctacattttgacaagctccaaagttgaatggtggcacactaaagtttaacaattattactgttgaccttacgtggaagtttagtgagagcagttttgagcatgttctgtttgaaatagaagcgtctggttggcagaactgaagtagagatttgggagtgagcagaatgtwtgtatttgaagtgaatgagcagaatgattgtatttgaagccctgggaagggtaaaaatgcagagataagatggaacaagagggacggaaccttaggaccatgacttggagaaaatgaacaatcagggaggagctttgggaaaggtagtcaataatagattctgcctgggcagtcagagaggcaggagagccagctgggctggcacctggaaggcgagatttagtgacataaagactgatacgtttccccattgttttgcagctagtggttcattagtgtccttggtaagggtggatgaat

SEQ ID NO: 19505 - DNA, 598 bp, Bovine  MMBT01454
  misc_feature (1)..(59): n is a, c, g, or t
nnnnnnnnnnnnnnnnnnnnnnnnnnnnnnnnnnnnnnnnnnnnnnnnnnnnnnnnnnncagggagaacatctcccacccagggcaaaactttcagaaagttctagaaagagtcctggttccccagtgaaggtggtcagaatcacacacctttgaactgrttgcatttgactcagtttctcaagcattccaggaaatagatttgaggaccagagaagcaggggagcacattgcctcagcacaccccaagggagctcactaggagaaggagtccacaacgggctgctccctgccatcgccyaggctaatttaaggcactgaccacgctgaccacactttaccctttcctcattccaggctcatgatcaggaaattttccgatatttggcctgaatttttctttgcttggttttcaccccctggatttacagcaatcccgtgcttctcattaaattgggactgaccgcttcaggcgagttaagtaatgcccagatgtatggccaccagaaagatgaaaaccaggtctgttttcaagtttgctggaaggcttgcagacttcagagaaatgattttcctccttttccagtagctcctccctt

SEQ ID NO: 19506 - DNA, 600 bp, Bovine  MMBT19058
gatgaaggggtgatgagacactattctggaggggaacatggagatagtgatgggatgggaaagttaagtggggtgagtaagcatgagtgtaggtcaaaagtcagaagtggccttttagaggtcaaaattagattgcttaacttctaaagtagcagacaaaaattcaactataagtgaaaatgaaggaagaaaaaaaaggaattagaaacaaaaaaaacctgtactatcaatgagaactctcagctcagatgttgaactaagtcctcataaracagtctggaaatgttgcccagctccagyacctaccaactctgtgaccttgggctggrtacacagtttctctgaaactstttcctcatctctaatatgrggaaaactatcatggctaccagctggctatgaagagtaaatagcataaggtgcgtgagagtgctctcctacgtggctctttgtagacagtgaatattctagttctctcctctcttctccctctttagcaagtctagcttattaacacttactcattcaagaatatttcctgagtacctgtatcagttaggttgctttcaattgcaagtgacagaaaacctcacctaaatg

SEQ ID NO: 19507 - DNA, 600 bp, Bovine  MMBT10026
ctcagtaacagatataaatacacgcaagacactattttctcctttgaccacttttgcatctacttgcaaagaggagttatgggtataaaacagagcaaactacagacaagtagtaggaagactcaaggaagtttaaaaagaggagacaaaacctagcaaagcaatttgagttatgcctcatagaggaaaaagtgagttttttctgtatctttgtcatctcttctctgcttctctgatgctaagaaactatttacttttgaacttcttgtgaaataagcaacaaatggtacccttaaaatytgagccacttttagttgggaattctgacttgcagatgaaagtgtattgtcatgaaaaccagctgttctaggtttaatcccatgcaagttttaatttactgactcatgtagaagcatctaaaagattcccttgggatgctgccrtttttcaaacacattgtgttttgactcagtgagagcatatatttactaattcataaaatacacatttatgaagctatcttctatgagacaggccctatgctaggcatggaaatttaaagattaatgagacatcrttccatttacagaactcataatc

SEQ ID NO: 19508 - DNA, 600 bp, Bovine  MMBT02233
actgcttttatagaatgataggcttggagtatttaattgatttgatttgatttaaaaatgaacaggaccttgatcttatgcaagtcaatatcaaagggcaccgtttctaagtgtgtgctctgaatggtttcactgcttccttgagttgcaattctgtagtggggaatcggggtgaaatcacgttagtgaagaaggcatgtgtctggcaagttcccaaggcatgagtatttatggcacgatgaactgtgaatttgatgttgattcacgcacacaacaagcaggtggttcacatctaatttygttgcctgcaaaaatgagctattttaaaatgtgtaaaatgtttgttttatagaaaatctttagccaaaatgaacaataaataaatcaaggtcagtacaattagattttctgtgaaatggagtaaactcaattgacatggtatggaatacrtattctattctagggactatgtaaacaatttggaggatgggatgacaaaggcttgcaaccttttcagagtactttttaataatgacatattaagggctcatatgagctttgtaaaataagggcatggagaggaaccgaagaacatgtact

SEQ ID NO: 19509 - DNA, 600 bp, Bovine  MMBT02716
attgactgggccacatcacaaaatcaggaggtgaactgacttttcttttaaaacttgcaaactctcattttctctagaatagagataattaggtggactttcttgtgctgcttctcttagattggactaaacttaaaacctattatgttagcagagtatttaattgaaagaagtattttccaatctagtaataatgaggaaacaagatctaaaggacaaaaggaaagttttgtggcaggtgtgacaggtggaagaagagtagatagaaatgagataatgaagagaatggtctataaagtytgatgtgcagccagactagaagttcaaataagaatatggagaagttgagaaatgggagaagagagaggaaaagtaaacaataatggaaatagaagtgtaaatatacacctaattttcaaataggcaaaatgcttttgcttatatatttttaaaagacaaattgcaaaaggaaacattatgacaatacaggtaaaacagtgtatgkcatttttttctcatgaccaatagttctgtgaggccagagcatgtcatattttggaattatttttttttaagttgtctatgacttagtgacctaga

SEQ ID NO: 19510 - DNA, 600 bp, Bovine  MMBT05626; identical to SEQ ID NO: 4518

SEQ ID NO: 19511 - DNA, 600 bp, Bovine  MMBT01807
cctcttgaaccatcctggaaactatgctggagattatgtcagtgcatttggccatttcctcaataattgaagtaagtgataggttgtcaatatcgagagactctgaggtagctttacatccagaacttactgaactagtatctgtgtcgacactacataattttgcaatgatatattccaaaattgttgtggaaatgagctgaatattagactgcaattcagtggctctttgctgattcttgtttgtcttctctctacttaccttagaacaagatggctgacagtgagggtgggcccctrtgagcttgcataacatttcatagagtgtttccccaatattatctaacacttgtaatctggaattctctttcagatcttttccattaatgacactatggagagcacatggagtagctaaaattttgtaaaaagattttttatcctgtctgcttggcaaaatgttccctttatcaactttatcagatccatgtgaagctgttggctttgagttatctgaagagagtgaaatattgctttgatctggatgtccacttgataatrtttcacaaatacaagttaataatggtgattccatgatgt

SEQ ID NO: 19512 - DNA, 600 bp, Bovine  MMBT06707
raggacttgggggctgagcctgagggagatgactctattgtggccgaggatgggtcctggggtgacgatggtgacctacagttcagaaatcaacatgcagtaatccagctctgtaaatcacatccagatcgtggccatggttaaagactgcagaggaaagctcattagggtgggagggccctctgccgtcttcccagccccctgagcgaccttggacctgagctttacatcttcagctggataatgagagggagttgaatggcttctggggtttcttccagctttaacattctatgactstatgatttgttgtttgtgttaccaagcaaaacttgggtgtgctcaccctcgagcagtaactaaccaagctattgacacagggtggtagtgaaggaaaactgccacatttattgcagggtgcccagcaaggagtctagggacgctagtgctcaaaagactctaactccgtgacggatttcaacaaagcatttttttttttcatttttggaaagtatttatttatttatttgactttgccaggtctttgttgcagcactcaggattttcagtcttcagctgcatcatgcaaattctgagttg

SEQ ID NO: 19513 - DNA, 600 bp, Bovine  MMBT08886
gtgtctcttgtgtctcctgcattggcaggcagattccttaccactgagccacyagggaagccccccattatgtatcatttaagcttataggcaaaatccctttagtgattaacttgtaatactgaattgagtacaaaggytatttcctattacataaggacagatgagaaaagtggagtggtaggtaaccatggtggtccttgaaaaccttgttcaggagcgtcataggtcaagaagagccattgttgttttataagcaggggacagaatttgagctgattaggaaacagtgtctaaggwaggacagaaatgagacagggtgagcagttgccagagccgtgtagtgatttaggtgagagagaatcgtttctgtagaaatgaatgtaaggggcagatctatgagatggaaggggtgtggagtggaggagaagagggctttgaaagtgacctgaggtttctagcctgtgcatactgcaggcagggggctgggggaaggatgctgctgagaggaagaacccaggaggagggtctgctaggctgggaatagggatcttctcgagctcacactgcatttgagggtctggcaggatgttccttggg

SEQ ID NO: 19514 - DNA, 600 bp, Bovine  MMBT00863
ggcctttgttatccaggaaaggacactgaaagggtcttagaatgacatgatttggaatctgcagaactgggggtcacattattgctctgccatgtgttagttttggcatctgaagaaaatcactgaatctgggggttcattttcctcccccacaaaaatgagagtattaaggacaaaaattgcctcccaaaattattgtgagaatgaaataaattggcatgtgtgaacgtacttgggacagagtaggttttcaccaaacgttaaatgattttccttaatgaaggracgaaggcgtcccayctcattttcccttctcactactgaagtgaaagaaggatcgtggcctccagkgagaagtcctgstccccaacctgagagcacgtctctcgcagcgtgatggtggagtttgggccattctagtcttgatttcttctctccatctggccaaggagtctggtgggggtttttttttaagactyttttttggatgtggaccatttttaaagtctttattgaatgtatcacgatattggcttctgttgttttgttctgtttttttggctagagtcgtgtgggatcttagctccccagccagggatt

SEQ ID NO: 19515 - DNA, 519 bp, Bovine  MMBT07641
tctaagatgtcccagttgcaggaagagtgtgttttttgttcttttttaaatcatgtcctacttgaaactaaccttatgcctttggttcagatttctttcagaacacacaccttggcctcattccctcctttaaggtgttgcctgaggttcagttttcaatcctgtttcttcaccagtaccctacattcttttctgttctgagttcaaaactcccatatccatgtgaaaaggaaatctagagctgtgtcacaaagacagggcccagtcataatcagctcaccatctttggaggtatatcakactggactacagtagaattcatgcattaaagttctgaatcaaaataacttaggtccaaaatcttcagctgcctacagaatattttacttggaaatgccataattccctcaatcgatatatatgatcatagatatccctgccaactgtttacctatcagtcacaagagcctgttcagctattacaatctgttacaatccgtcaatccaagagttcatcac

SEQ ID NO: 19516 - DNA, 600 bp, Bovine  MMBT11031
cccggcttgctgcagtccgtggagtcacaaagagtgggacatgactgagtgactgaagaactgaacaaattttgataaattgtattttcattttcagttagttcaaatatttttaaattgttctcaataattctttggccctggtgttatttagaagtgtgttgtgtaatttccaaatagttggaaattttctagctatttttctattcctgatttctagtttaatgccactgtggtctaagcgtacacatatgatttctagccttttaactttsttcagatatgttttcttccccagcrtgtggcctgtccttggtgaatattccttacgagcttgagaagctatgtcatctgctgtcgggtggagtgttgctctacatgtcgttagatgcagttgagggacagtgctgttcaggttgtctgtccttccttcctgcttctgctgtcagttactgatggaggcgctgaaatccccgataatggatttgtctaatcttttagtagttctgtcttytcccctgcttctacccttgaccgtcttctttccaaaggctgcacggggagtggttaagaatgtcagctttagggtcagccagacct

SEQ ID NO: 19517 - DNA, 598 bp, Bovine  MMBT18180
  misc_feature (1)..(154): n is a, c, g, or t
nnnnnnnnnnnnnnnnnnnnnnnnnnnnnnnnnnnnnnnnnnnnnnnnnnnnnnnnnnnnnnnnnnnnnnnnnnnnnnnnnnnnnnnnnnnnnnnnnnnnnnnnnnnnnnnnnnnnnnnnnnnnnnnnnnnnnnnnnnnnnnnnnnnnnnnnnnttctaaataaggaatcccttattaaacaaaaaggacaatttatcagttggttaataggacgaggggaatttgttatcagccagtaacctatctttgcttggaaaaaatcaataccaaagaatttaaacaagaatatttctttactraagtcaaatgtcttttgtgtgcactcccaggatgaaattatctgaggaagcaacatataggaacagtacaaaatctctctggcctaagtgacttcaattttggttctggtctcttgacaagcagaatgtgagctgaccttctggaagaagaaagggccagtttttcacagatctacttccagcgttctataccagaagccagcaagttctgacccactttccgggtacagcttatccacatacccttatccacacaaacacttcatcctaaagagctgtgtggccctgtaggggcatg

SEQ ID NO: 19518 - DNA, 427 bp, Bovine  MMBT06259
agatgagaaaacaagtcctgggataacttatttttcctaggataaagaaagaaatttgtagaattctttctcctttgaaataataaattctttatttaaactaaaacttgaaagtaatatccatttctctgatatgttgaaagtagtctcttggagcctgtagtgtaatcttaaaccattcatcctcaatcatgggaaaaagaagttgccagaagcagctgagtgctccattgagcacagatgagctgaccatctgccaggccccagagaggwcaggccctgactattcccatgtcctcrctagatccacctgctcccatctttagtccaggaggcagtcattgcttctgccctgaggatgaaagtaagaagaggacacggtgggcaactgctcattcacagcagcccacatcgctcaacgtcatag

SEQ ID NO: 19519 - DNA, 600 bp, Bovine  MMBT20274
cacaaacaatagaaacccgcagctccactgagggatgaaagtrttcagaagtttctctgtaaagaaacacaatcagctttccagcaaggatagtttccttttcatctagaaatttacatatttatacaaaacctgcagacatttttatctttgcagacattmtctctcttttgactccatccaggtttccggtgrgatagtccctaataaagtagggaaattagacttttatatgcacttcttgctrtaartgtgaaaatgcattaaaaggagtggtttgttgtcctcagtaatctcatytggctccagcataattctttgagataatacccttgctagctggttgtattccatgtgtgtatagaccatattatgtttccctaatctaaattatgcaaagaaccagacccttactttccaccatattgtatagacacttatttttactaaattgacatcaacatttcatcatctttgaagtcttgattmtgttttcagcttaaaatttttccctcaggttttaaagtctacttcttcctaaaacattttttgaacttgatcatatttacatattatatggctaattctggagaaggaaat

SEQ ID NO: 19520 - DNA, 600 bp, Bovine  MMBT04642
ttgtcacagattattggtgttcagttacatgactttggttgtctaaagcctgtgtgtgctcaccagctacttcgttctttctttttcatctccatcattcaacaaccagatcctatcagccatgccactttaaacccatctttcttttcatggggtctggatatcactgtggttttagctctttgacagatatattgcttttttgagatattcagaaactgtctaaagtcatgggaggctgagacagtagccacatcacgaccctgatttcccttgtcttgattctactcagttgctcaygttctctgtgtgttgctcagaatcccaagaaatgcatttctatctacttagaatttataaaatacaactgctgctggttttatttgttctctattatcacagtgacctagcagatgaaagaataggggatagacccctggtggttcagtggctaagactytgtgctctcaatgcaaggggctcaggttcaatccctggttagggaactagatcctacatgctgcaactaaagaccctgtgtgccacaactaaagaccctgtgttgctgcaactaagaatggtaaaccccaaatatatata

SEQ ID NO: 19521 - DNA, 600 bp, Bovine  MMBT03042
ggggtttccctgatagattttagcatttgaagcatagaactcatatttccatgtaatatgcctgaaattcttatatgtctgagacaatgtacttattacctagtcaaaagattggctagacagaaaatgggaagcatgtgctgaagagagagttgcacatagctctatcagtgaatggaaacaaatgtctttactatttgaaaaattgaaacaatatgaccattatgtcaaattaaatttcctggcttactcggcaatttcagaagcatttatcatgataatgtatgaatctcgttgcayatattgtcttggatatatatacaattctaagaaaaagaatctatgtacaacaagttactattctatcctctcagtgacaatgttttgatatgaattttatatattttctacttacacacacaagttaataaacacatactcacacaactccattcagggaagatgaaacccaaaggaaaagagagggaaaattatattcccaaagtgcaaaccatggaggggaggagtatatattctgttttgaagttacacataaatattcaattaacctatttctcctgtcttttttatgactacata

SEQ ID NO: 19522 - DNA, 600 bp, Bovine  MMBT13437
gttcttaaccaagactatttaacttaccacgtattcactgaaggatgttgtggctttggttgaaaagatcgaaaaccactttctctgctgctgttttaaaaacaaatcatgtgcctagatactcacgatttccaaataacatttccatcttctttctagaaacttgagggttagttgggaaacatcaattttacttctttcatcacttgacaagtactttgtgttgttaattaactcagctcactatttgccaggtgttgtgctgggcactggggatatattaatgaactagatatagtscctgcygtgtagagcttacagttggtctagacaataattgactggacaaattaattgagaaatgacaagttgtgataagtgctgtgtcagtcagagtctaaccagaaaagcagaaacaccttgagtattggaagtaggatgttttcgcaggaaattggttacagaggtgatagagaaaccaagcaggggggagagaggctgcccagacagtagacacagtaggaagcagctgtccccccagactggagagacagtggagggaagtggggttgctggagcttggggtggaggagttggaac

SEQ ID NO: 19523 - DNA, 600 bp, Bovine  MMBT03335
aatccacttcacatgtatttctttctgcccttgtacatacatatatgacatggcttgagagtttcccttaagctgcaattactttgggacattttctcttaaatttaagaaatagatgcagaaaatcaggtttgaattcctggctatatgccaatgactaatagttctcttcggctcttttctgtgatgcttctgtaactggatagatgatggtgacttttaatggctgctttgggccttgggaaaaattatatataatatatatatggaaaagaaagccattaaggacaaaagattgtygaaagctttactgactttcaaactgtgaaaagaagaggccaaggtaccttatgcttttgatgcctgagggctatgaagcagaaagggaaagaagaaaaaaaaatcacatattggggctctgatttgaaatcttttttcttctttccatctgtgggtacctaaatagggtcaaaaagccagcacctcagttattttgttgaaaggctaacaaaatgtctcaactttcagcacacattcccactataagtgataactaagtaagttgatcttcaagtcactaatgctttcttcctgttagaa

SEQ ID NO: 19524 - DNA, 600 bp, Bovine  MMBT03696
tcttctgatgactaagaaaggaattacaaagcagaaaagagcagcaatacataagattttggtcgagggttttcaaagccttcatctgctttcactgagtagaggacactttgtatacacttggtaactgatacagttatcaggtttactgtctattgcttaatttttttccattctccttcagatagaaattgcaatgtgaatttggtagtagtatgtattaatttaaggattgaaggaagatccagtgataggtgttgcaggactaatatttctgtataatctttacagaaaaatgaygggcagttcactgtgatccagctggttggcatgctgagaggcatcgctgcaggaatgaaatacctttccgacatgggctacgtgcatagagaccttgctgccagaaacatcttaatcaacagtaaccttgtgtgcaaagtgtctgactttgggctttccagggtactggaagatgatcctgaggcagcctacaccacaagggtaagatctaacagaatgccttctgaaatactatgctggagacattgaatatttaaagattttaaaaagaaaaagaagttcctcccacataggaagaaa

SEQ ID NO: 19525 - DNA, 600 bp, Bovine  MMBT05083
ccctaacagcaggtgtggacatgctcaggtgtcctccccaggggccgacaggcctccaaaagcctggggcttcttccctgcagtttggaagtaaggagaggacagctttgggttgtttcttccagaagggggtcgaagggcttaatatatcactgtggctgcagacaggtgaagggctaggctagcttgcagagaggagttgccttccgtgagaagagggtgccgtggacagggttccttctaaggctaatcgaaccatgagactggtttctccccagtggtctcagaggccctgggagygtrtctggatatcctggtagttgcagcattttgggagcctcgctgccccaggaaaagccagcactctgagcaagactgaaaagcatcgccctctagtccytccgttaatgagatcatttctgaatcgctgtttgtttgggttaagaagatattctcctttaagaaaataatcctttcatgattgacgccagaaacaaaagcaaaggctgtacccagcccattttgagacctgtaattttttktttctttagcagatctaaatccgatttaaatcgttgaaatactttgctgtattatcgc

SEQ ID NO: 19526 - DNA, 598 bp, Bovine  MMBT07104
  misc_feature (1)..(7): n is a, c, g, or t
nnnnnnntgtggaccacggcagcagctttgtcctctcttcctgcactgggggagctctctttgaaatccatcttccaccccactatccaagagtttctcgtgaacataaactcactcacgttctcatctactcaaaatcccccagctcccatcccagtttcccactctctacaggacagaatttccaatgtaaaccctgaagaacctcctggtcacctcagctcccactctgcactattaatcttagccaagaggacccctctcatttccctggcaagcctattcatatcaccatgcttytctctcgacaatcccccagttcagccttcaaaactgctacttgtccttccctacccaaatcaaatggctccttttctctgaagtctttcctgcccctcaccatgcccactcccaggcagtcactcctgtctctttactccttcagtaaatgtgcatcttcacctggtcagtctcacagaggatctaggctggcctgatgacagagaccaccacttctctttcctcttcttctctctagctcctaaagtgatcagcaccttttaaactataaataaacacttactataaaaragaagat

SEQ ID NO: 19527 - DNA, 600 bp, Bovine  MMBT12904; identical to SEQ ID NO: 4756

SEQ ID NO: 19528 - DNA, 600 bp, Bovine  MMBT06323
agtctcaccaaaagactcagaaaaatctttccatgacatattccagaaaattgccacaactggtagcctgacggacagttgtcaactggttgtccaactggcaccagttcattcgagattgagcatgagaggtttaaacactaatacctttgagctgctgaaacactgtgtcatactgagaggaggcttgcttttagctgtaaatctgatcacaaagttacattttcctccaaaaagaatgaacagaatcaaatccttccattatcacaaggtaactgaagaatgcaaaacacaatcgakgacttccctggtggtccagtggttaagaatctgccttctaattcaggggacacaaactaagatcccatatgcctcagggcaactaagccccctgcgctgcaactgaaacccagtgcagccatggagaaggaggtcttaaataggtagggagtaaagtgaagctaagcctggcctctgtctcaagaagaataaaggtatgatagragggaagggcttgtgaacyaaactttgagactgacmttgaaagtactaatgaatttggactaatagcacaatgcaaaaatttactgaagtgaaatt

SEQ ID NO: 19529 - DNA, 600 bp, Bovine  MMBT09363
ctgtgagatagtgtcaggatcgtcgaacattgccataggaaccacagagtagtaggaagaacttgaaatagttcaaggacctgctttttctgttgataacttccccaagtcatccaggagttactgcaaatatttacaggggagaaagggctgcccaggtggctcagacagtaaagaatctgcctgtaatccaagagaccctggagaagggaatggctacccactccagtattcttgcctggaaaattccggaagagattctcatgggcagaggagccaggggggctatatatagtccayggggtcacaaagcgtcagacacaactgagtgactaagaacgaacagggaagaaaatggagacagaatattatcttctctaccatattggcccttgatccttgatgartagaaccaccagctagtcaataatgacctgtgtctaggatttctacttttgttaaaacacacactcatccacatcatggtttaattcagcagaggtgatgaagagaagttgattttctttcattctaacttctaagtctcaaaaaaaaaaaaaaaaacctgtgttttcctaaaagttcataacwgctctgaaa

SEQ ID NO: 19530 - DNA, 600 bp, Bovine  MMBT09786; identical to SEQ ID NO: 4565

SEQ ID NO: 19531 - DNA, 600 bp, Bovine  MMBT09770
ttactgtacaggagaaattaacagagcattgtaagtcaactacacttcaattaaaaaaaaaaaatcagctacagctaatcccaccatcagtccaggccctgaacatttagtgcaaaggtcagtcatgtaaaagagccagacagttaatccttcaggctttgcagaccatgtatctctatcacgactactggactctgccattggagcataaaagcagccagagacagtacctcagtgaatgagcatggctgtgtaccaataaaactttatttacaaagtcaggcaagaggttgactttgrcctaagaactgttggttgcccacctctgatgggaagcatcacaaacctcaccttctgctgcagctcctcgatgatgcggaagtggctctgatagtccggacacacggtggactcagggcatttgctcagctctcggatctggctctccagctccgcgttgtcccgctccagccggcgcaccctctccaggtagctggccagccggtcattcaagaactgcatggtctccttctcatggctgttgaagaagccttcgccgaaggtcccgcagattccgatgttgcctggaatgtcgcaggt

SEQ ID NO: 19532 - DNA, 600 bp, Bovine  MMBT09504
gagtaatatcatgttttcaactttctatatgtttaatcaagacatgaagtagggttcaaactcatttcccccaaaagaggactttsttggcaatccaaccaagtcaagaaaaatgttagaggcccatttgagcctcagagatgactggacatcagaaagcacatggccaggatgcctttgagccaacttggcatgacaattctatcagagtagtttttccatagtctttgactccttctaatctcacatctcaaggcttcatcgctgaagacttaggtttccttccctagaaccagattraaaagtcccmggtaggcctgcccaacatgggtcacttgcctatgtcatttctttgatgagtcttttttggaccagttccgggcgaaggggagttgttgattagggagcttcaaccatttctcacagtccctcagtgttctcatgcttccagagcccttcatttctgaggaagccttcattcatatttaaacattagaacaggagtgtggaaacgtttctcacaggtctattttggagagttctatgaacgggaggaggttgagtgcagtgattgattagtaatgtcttccacatcctggg

SEQ ID NO: 19533 - DNA, 600 bp, Bovine  MMBT04694
acagcaaccggctgcccagcctcggggaggacacgctgcgcggcctggtcaacctgcagcatctcatcgtgaacaacaaccagctgggcggcatcgcagaggaggcctttgaggacttcctgctgaccctggaggacttggacctctcctacaacaacctccacgggctgccctggggctctgtgcggcgcatgatcaacctrcaccagctgagcctcgaccacaacctgctggaccacatcgccgagggcaccttcaccgacctgcagaaactggcccgcctggacctcacctccaacmggctgcagaagctgcccccggaccccatcttcgcccgctcccaggcctcggctctgaccgccacgcccttcgccccacccctgtcctttagtttcgggggcaacccgctgcactgtaactgtgagcttctctggctccgcaggctggagcgggacgacgacctagagacgtgcggctccccggggggcctcaagggccgctacttctggcacgtgcgcgaggaggagtttgtgtgcgaaccgccgctcatcacccagcacacgcacaagctgcttgtcctggagggccaggcggccacgc

SEQ ID NO: 19534 - DNA, 600 bp, Bovine  MMBT08375
actaacacaaacacacaatagaatcctatagtatacagtttaatttccattatctcatagatgtctacgttatccattattgaacattagtcttgaactgtcaggataaagttgacattaactaaagtttgaatttagtccatagcatctacgcacatgtgtttgatttgtcaaaacccaacagcataatgtttcacatatttattcattctcctttgttgctgttagccatgtgtgcatttgcaaaatgaactagctttgtgaatggttatagagagaaaacaagaaatatgtaaagasaataaataaataatttgcrtctttaaaaaayacgtagttagtgtttctgtctaaaaatattgtgtgatgaagaaatagatccgaaacaagagtaattcttttcccatgaagcaacactaaccttgcaatttttactcagctcctttgygtaaggatgaattcttccccccaaatcttggagaattgtaaaaatggaaatgaaaagttgactcttgagacgatgtattcctttaccccacctgtgtgtaactgtctacttcagaatgctttatatccccaaagtgcagccatcttctctaa

SEQ ID NO: 19535 - DNA, 600 bp, Bovine  MMBT11472
gtgaaagcacatgtcctaaccgctggaccaccagggagtcctcccagtcccacactttaatcatatacttacttctcgctgacttactccaagctgccttcatcacacaaccctgagtgattcaactcaagcctcttagttctgcaccccagtattcccattctgtgcatattactatcactgcctaatttgagggtgtctggccttcctygctactaaaaccacagctaaaacaaacacgcaacattcctatgtattcctgaagtcctactcagctcaaagtctgctctgtcttaactscaaggcccttgtgtgtactccactctgctcacagcctgagcctttccacactcccaagttcccacttcgtctttcacactcaatctggctgctggggagtttgggagccttctcggcattaaaaaaaagaaaaaaaaaatgcctgcccaactccttgttaatttaatctattttctgatcaactgtgaagaatgtggggttttttccccttcaattttaaagcctttcgcttgtaattaagcagctctgcagctgaactcagggcggcacaggaaggtcagaactgcccaactgttctgc

SEQ ID NO: 19536 - DNA, 600 bp, Bovine  MMBT18670
tagcattggtaataacccagtgagggttaatgaaatcaatatttcctttatcctcaacacaggtagtgtaggtatctcttctgtgtatatatttagaatattgtgagcctatttctctagttaattgggtatacattcagtgatcactggtatattcataaattattagaagggcaagagcacttggtttctttctcaagaggtagttcaggaactttggagatctataaacctccagcaagttaaattatcctacatactacccataggtactattagaacacaaatgttcaacctttmtgaagaatacacatttcactaaatctgtaggcagaattgttattttacatagtctactatgtgatttgcaagaattrctgttacaacaaccaagaaagcacttgaaaggtatctgaaattatttttcacacagggctatatatttctctatctaatatgacagcmtgycattcatataaacatatttatggctgtgtcagttcatatcaagcacattgggacagtgaaaaaaatgtaatctagatgaaaaagaatttcatctgattctcaagagtccccactcctctgtaatgcattaga

SEQ ID NO: 19537 - DNA, 600 bp, Bovine  MMBT08171
ttttttctttggtgattgtatagcagagtgagtcttaatctagaattttgttgaaatcaggaaaacgagtggacttgccgtgtgaaaatctgacttatcagtgaatgcctaacctctaaataatcttctttttgtgcccttccttttttcttctgattattttccttttctctttggagacttaggccgcttatcttcccaagaaattctgacaagatttttcagaagcatcctgaaaactgcagacagcgttttgctcttggttgtgggaagcgtggagacagctttgccagccccgcrgcacccaggctctttgctgcctagggaaacyggcccgtggtgaagccgtaacttgttcccttctgattctcagtcgaagtttattagcttgtgatttaagcaaaccatctggtgctgctggcactgcacactgtccgcctagagctccctacttaatgtcttagtggaggcagtttaggttacatacttgaatccctactctggtctggacttttttttttaatgtcttaaaacatgtgcttttgaaaatcgtactgtgacccgaagcacattttaaaatcgtggagaatttcttcgttg

SEQ ID NO: 19538 - DNA, 600 bp, Bovine  MMBT06493
ttatttattcctacatcttaattttaactctaaagaaaccaagagccagaaaatgtgatgacctaagatcacacagttaatttactccaggggtgaaaaggacactttggatgtattcaggtgatcacacattcttcaagtgggaagagaggagactttcacttttaaaacatttaaagcaaattattatcaagaatagaataaattcatctacacaaggaaaagtagtaggagactcttcctattaaccatcagaagagaaacattcaggatctgtttagtgcttattttattacctcygccagtagacagaacaactaagaagtgtagccctctgaagtttaaagtctataaggatggctaataaaaactttgaagttgtacagaactttacagttcttaaagcttycatgctgctatgatttagcatagcctccaaggatgcatgtgaagtgggctggcagtaactaggtccccctgatttgcctgtgagtagagcacttgcccagatccacaaagcaatatctcatgggagagatccatagaacccagtgctagcccagggccccaacagcacaccccacccacaaataacaccgg

SEQ ID NO: 19539 - DNA, 507 bp, Bovine  MMBT10070
caaaatttaaataaataagagcccaagactaggaaatagacaatcctagagtgtaatagttaacactgttttgctcttatgaaacaaagataactaattcaaacatgtgaataaaaaaatattattttaaaacaagaagtcattaatttgagttttttttcttttaatgatgactgtagccagtgcatttttttttttttgaaataccaagattcttaattatcatttgaggagaacatacaaatctcaaagattcctgcttcaaatttagacagtgaggacagtaaatatgacaccatrtcgccacctagtggacatttcagaaagtgtctagacatccaggtttctgttgtcatgattatacttaggatcacaaaacccaggactcaggggaacttttcacgctgccctaaacagggctcttgtttcacgggatagtcataggtgcaatttgcattgcattacagtgcaaaccacctacatttgcattgtaaaatcaagtgtcaa

SEQ ID NO: 19540 - DNA, 600 bp, Bovine  MMBT06754
tgacgtttccatagcagctggcactaagcagctttgcttactaattagtctcatggtacagtctgaaattccctttatccaaagaccagaggttagaagatatggccttttttgtaaacataaccttatgtgacaggaaaccaaaaaagcaaaatttatccagatgaaacagaaaggggaaatgtgctcagccaaactgttagattcaagctgagagttggcagaacacggggaagaaaataccctctcctgatttgttatcatatacatactcagtggaatacttaataatcaggcttkttttgtaatgcagtttggcaactggcatctccagtacccaaggtctttaaatttcattacaagacatgatttaacactgctttagaggacgtcggtctgctgattcagctccaccacttcctgtcaacaagaacactaatattataaaaaaactcttctcacgtactcagtggttatttaacaaagtaatctagctctcaggaaatagagaataatccatcaggccaaagagtttactgggaattcagagctgcctcacaatatccaggtactcaagtttatcctgagtcttctttacgt

SEQ ID NO: 19541 - DNA, 600 bp, Bovine  MMBT06320
aggtgtaatttttaaagactcattctcaaagttcttcatcccttcaaacttttaaaaataagtattgtaaaactttttcctgtactaaaaataacaaaaaatgagaacatgacatttgaagcaatgatcttcaatttagaaccacttatagttcacagtattctaatcctggtaagaaagtacagttgccttagctcatcctagcattaaagtaaaactcattctactatttcttgaaggacagaataacaattggtgcctgactaaataaatgaatgaatgagtgaacacatgcataastgatgaatgtccttcctccccagaagctcaagtgtgaccaagcgaggcaggctggcagcctaccaagatgccttctagggaggcaattattatcttggtgattttaccctgatgccaagtctggcttttggatttgcagactcagcttaaagctagtctgtcagcttataagtggggccacatccctccgacagcttctcattaacccagctgagaaagatcagaaagtcaacttattaatttactatataaactataaattccatgaggactactattcagcaggtctagtgcatttcc

SEQ ID NO: 19542 - DNA, 600 bp, Bovine  MMBT07260
cagaacagttatttatggggctttttatatttctctgttttggaaccaaatgctcttgcatgaccacaaaatgactgataatggctcataaaactgagagctgttcatctgcataactcaaggctgtttatcatctccttataaactcgaatgcctaataaatgctttctgataataatacattwaagaatgtggctcgtgtatattaagagtaaaacttctagtccacttccagcttagccatggcagctaatttgaccactaacccgttgtagctgcttcctctagakcttgtggacragtggataggatcaagaattcacattgagatgaagagtgatgaggagactgttggtatacttctgggatttggtgactttgtcaatatggtattggaagatgtcactgaatttgaaatcataccagaaggaagaagaattactaaattagatccaatttttctaaagggaaataatataccaatgctggttcctggaggacaaggacctgaaatatgaatgacttccttgacttatgctagatgctgttctgtcttgtaatgacaacaaaagtttttttttagtcttttaatgtttgtat

SEQ ID NO: 19543 - DNA, 600 bp, Bovine  MMBT11553
atgtgatgagaggctgactttctaaaacttgagcaaactctgcccgaatggctttaataagtttaatgagcttctcagagttgagatgatcaggttttggggtttagatcttggttttgctcttatcttcatgcgtggcctgacagccaatcattttctgtgactgtttatggaagccactgatagttgaagtttcctcatttgtaaagtggaagtcacaatcctccatcatttctgagaactgggaggaggaaagtgctggccactaggaatcgtgtctgagtttcagctacaaaccayggacttttgagagactttagcaggaaaatgccaggacatacctggaggatgtttttgtttccctttttgttttttaaagggagaaagagcaatcctttgtactttgtgacctgttatgcacaaaccttaaagcagcaagggccggaccccattcctagggctcattcaaagttataaatgcacagatatacaaaggatgtttacaaatatggcttattatgcttacagtagcaacaacaggagttcagttttagtccgtggaaaattgctgcttaataagaactttcccaaacccatgtc

SEQ ID NO: 19544 - DNA, 600 bp, Bovine  MMBT11565
tttagtaatgaaaatttagtaaatttagtaatgaaaatacatatttggacaattttgtccaaatatcacaaaataaatgattaattcttttgtattgtgaaggattcttttctcccttttaagtcagttgcatcaaccaatctcttctattttcagtagaatgttactacagacacagtctaatcaaatatacctgggttaaagtggatcttgatttagtcactttctattgacaaaactttgatgaaattactgatattctctatattctgcacacttagcctaaaaatgtggataaartattatcatcatggggtggttttgttaattaccrggagtaatccatttataccacccagcaccatgcctggcaataaaaaatgttacacctctaaatcattttacttttaatttatttcactatcacagaagatgatataaatatgtgcaaaacattagaaagacacaactattataagcccttaaaatactaactgatattattaaactcctgctttaactgtctatcactgcatcccttaccttttctccaacaccaccaactgagccaatggatcctggaggtccttgtggtccctg

SEQ ID NO: 19545 - DNA, 600 bp, Bovine  MMBT13824
cagtagaaaactattccatatagtatcgtatcccaaatgccgcattttattattcatttttccatcctagatcagttctcacttgggtgcctgttatgctatttctctctcatagttagtttgagaagtaacaaacggtctttgctactcagagtgattcactaatcctgcttaggatgtaaccagagctactacgtaaactccaaagacactaagagaaaggggaacagtggatgctagtttgtctttaagtatagaaattgcctcaatggtcactggatatgagagtagctaatccarttcaaggttactctcaggatatgtgcatggaatgcgacctgggtttacagagataacatgattctttgatcatacaaagaccaactgtttctgtgcagaaatgtttgagttagctgaagctattgagtgaatttgtccacagatagtcactaacaatgatgtcagaacccagaaagatacagtgaaatgactccaaaattttatttgagaatctgtttaaatcccccactgaaatgttgagtatcaccaaaaaattaacaaaaagtacacttttattctaattagagttttattttagat

SEQ ID NO: 19546 - DNA, 600 bp, Bovine  MMBT09759
cgctcaatgagatcaagaggatggaggagctctctgtgaccacaaagtgataagaaaatacaractttcttcgtatyggttcacttaatgatctctaactgggaaattcacacacaacaggggcctcatcttggtggtcaccagacatgaaagcctccagcctagacatcagtctttttctttttttttagtttatttattttaaatgaaacaaagatgaatattttaatgagagaaggtacaattcacaaagaatagacatcataaccacaaagacacctagcattagacacataaccrcaaagaaacaaagatatataaatcaaaaattcagaagaaatatagggaaaaagaaaaaaaaataatcatagtgagacatattaacgtttctctgagaatattttatcaagtgcagaaaaagtaagaataggagcatctggaatgatgccattaataatttaaatataatagactttaattaattatattaatcttatatcctacacaaatatatttaaaattctgtatgtcatatgttgctactagatagacatcagtctttagcgagggtagagagagacacttcccacgacaatcact

SEQ ID NO: 19547 - DNA, 600 bp, Bovine  MMBT20958
ctctgtggacagaggagcctggtgggctacagtccatggggtcgcaaagagacagacacgactgagcatgcacatgtgcagaactggtatctcagacatcaaagaaatcatgtttgtttcagaaacaagtttcagcattgaatcctttggtatctccagatagtgatctcttccttgcatttattccttcactaattcattgacttggcaaatatttatcaagatcttcttaactacagagcagtaattaagaagctaaaggattaagaaggataaaatgtatttcgtacataggtaacracaggtattacagagtgtgacaaatccatgatttagggacaagttctcacaatgacattctctgaattggaagtccattcgaacaaaaaaaaatctgtaagactagccatcaacaggagttactcaatctggaggatatggatgtatcagtcccccctgacatatccaccataactgtaactttattttgtgacttgggtaaacagaacacaaggttgtgttgtaatgctgtaatgacagaagcattattttctggggaaaaatagttggaaaagaaaagtatttgcaaatggtacaaat

SEQ ID NO: 19548 - DNA, 600 bp, Bovine  MMBT20113
ggatggcttcaccgactcgatggacatgaatttgggtagactccgggagttagtgatggacagggaggcctggcgtgctgtggttcatggggttgcaaagattcggacacgagtgatcgactgaactgaactgaactgataggatctggcagcagagggcaatggaggcaggaagcaggcagtgttcccctgttcccttcacgcttcattgtctggctcagcaagtggcaacgtgtccccgtgacacaccttctgccagcgcgagcacctcctstctgagtccagctctcaccgggcccyccacttcctaccaggccagcgtctatcacagcttcccgctgttttcatttctggtgctccgaactctcttaccctgcccactccactgtccagtcccttcgttaaggaatcttctgttgaaccacctgagaagttttctatctcctctgggaccctggttgatatatgcaattataatacatttcaatattttcccatgcaacctacttccctatcagtcatgctcttagtttaataaaatattttccatcattaaaaaagaaattctggagaatctccaactggcacatgcagcttttg

SEQ ID NO: 19549 - DNA, 598 bp, Bovine  MMBT02942
  misc_feature (1)..(24): n is a, c, g, or t
nnnnnnnnnnnnnnnnnnnnnnnnattatgaggttaatgcagaagtcaactggtgaagtttctgtcaactgttacacttaatgtcctcttcctgattaagagaaaatgaaaatattaaaaatatagaaaagtgaactttaaacaacactattagccagaattcaagtttaaaatcagcattagttctcgtaaagttcaacaaacatactttaccaaatttaactatcatttatattaccacctttttgcttttcaaattaataatacagcaaagtaaagcagaagcaggtgaaaaaattyaaaggtaaacgtgatataaaatgaaactgtatattcagctaaaaaaaggaataccatggtgttctacatacttgctggcaaaaagaaataaaagttagtagacaataccatttctagaaattcagttacttcaagttttttttttcccactcacctctgaaaccaccaccccctcttcctcctctgaaacctccacctcctcttccacctctraaaccacctaaaaataaaggaaatattaattaaataactgtaacctatcatattttgataagcctataaacatcaatatatttct

SEQ ID NO: 19550 - DNA, 600 bp, Bovine  MMBT02372
tttacctctgcattttctccattcaaaccaggcaagtctgtagcagttaattttggcttttcattttctagaggactggacacttggtctaaaatcctttgcagtcctggacttaaatcaaatgatgctcctraccatagaaatgaattatcttgccttgtgccagttaacttggatttttgagaccttttatctttttcttctccaattacttctctttgggaatcatcattacctacagtcacttgatcactcmgtttcagtatttttagagattctgcagtattatgyttctcctgsacaggaactatgtctacattgtccaaagctgcaaccatctggacagaatcgatttctgaaaatataatagactcatcactgaaacaagacaatggctgctgattatcttgattctcattcatatctggttttttaattatgccctctggttgtagacacagagaatcatcgaaatggactgatgttatttcagaaggaaggtgttctttttcttgtccatcaggtcgttgttcttctacaaggtagtcttcactgaaactgtcaaacagtaaactaccactcaaattcaaacttgtttca

SEQ ID NO: 19551 - DNA, 600 bp, Bovine  MMBT07137
tacctttcacaaacctaaacctgtgtttttcacatgtataaaatactagaaatcacacraagctttaagcacagcaaaccactaggaattacatgagagcattccccatttttacaaccgcttcaaatttattgcacwaaagcaagtgtggaagtgcactgcctacctgcatcagctctggaccgctggccaggtgtctttccgaatggggtcttcattcatctgtatttaggtgagcagcacagctgctggactagggtgaaaatccaacacgctccaatttgaaacttcacagacttkcaatgttcttgttaatccatcatcccaagcgctttttttttttaaacaagttcagcaaaaatacgtgaaatcttamgtactctgtaaaacagtgaaataacagttcattactagagcatcacacaagagcaaacttctccaagtaagccatcaaacatgacattattttaaatgtaacatcagtgaaaatgcattttgcccagaagcaattaactttaatttctcagtccttggtgccaaggactgcacagagaagcaagagaaaagaaagtactagacccttcaacaaagaaaagggta

SEQ ID NO: 19552 - DNA, 600 bp, Bovine  MMBT03917
tacctgggctatttcagtgtttttcttgaactaatctgcttccactatgctaccatagcgtgtgtatggtagcactcaccaatcagtgattctgatgacatttgagttaggaattgatacacatctagttaaaaaaaaaaaaaaaaggccttgaatggcttcccatttcactaacaacaaaaattaaaattagtagaatgagcagctattatggtgcttatctaatttatcatccccaaatgaagaccttcttcatactgaaaaggagcactttgaacaatcagtcccagacaacatgcrtaaacagacacaatcccagacaaagcagaagtgttttcctcctactctcccacctggaagccccttcacaatctacccctgccccctgcaatgaacttgacttcatcacctgcctcctcccttgcaaatatctctcactacatacgtcttttcttgcacatcctaaaagctgtcagatttcctcctgcatcaaggttctttgcccaggcagatgtttttgcatgtaatacctacccttccttctcctatcctcagaaatcactccgtacttttcctttgtttctgcttgagtgtcgcctg

SEQ ID NO: 19553 - DNA, 600 bp, Bovine  MMBT20156; identical to SEQ ID NO: 4821

SEQ ID NO: 19554 - DNA, 600 bp, Bovine  MMBT11121
ttattttaaaatatgtgtctattgtaataggcaaatgttctccaactcaaaacaacagcaactaccaccataaccttctgcccaaaggacaggattcttctgttaggctggccaaaaatttaattcaggttttcccataaggtggtactggaaaaacccraaaaaagtcgaccaacctaatattttcattatcagttaatccatacaatcattcatttaacgttccatgtggcagctagtgcactgaatctacaaggcggaaaagataggtcttattttaaggagctcacaacacagtasgcaagacagagaagtaaactgactgctcctacaagtccacaactatttagcacccactacatgcaggacaaataatttaaaataactatttgggatttccaaatagtagtttccaaatgacattgtttatctgtatcaccaacagactcaattttcaggtcccactccagacatactgaatgagaatttcagggcatggggccccaaaagctttttaaggtgtttttttttttttttaattttcctggtgattttgatggcaatccaagtacaggaaccactggtttccccacacaacga

SEQ ID NO: 19555 - DNA, 600 bp, Bovine  MMBT13727
tatagctaaaatttaattaatatgtaattttgagcatttaatgtaaatgcaaagtctgtcattagtgtgatgtgaagatttcaaatttgaatgcaaatatacacataatagacataagaggggcagattgtttctaaaaagctgtacattttattataattgcttaaaaggaattaatggcatttatgaacccattgtgggcaatgttggagagtgatataaacaaatcagcttcttattcttgaaaacwgcatatttgtgaagcagaatgcatgtgcaggaaaaaaaaaaaaaaaagayttaccaaataraacaaagtrtggcaaaataaagaacttctcaaaagcttcaattatgtgcaagaaaataytcagaaagaacgtagtggatataagtttactttaggctttctgtctcaccaaagtttttccttcttatagagtttagatacattaaaaaaaatgatttgagccataactcattcttttccatttcctgtattctgaaaataacagagaaatataaagaatatgtagggccctggctctggtatttggtttagttgtcctgaggaaatcaactaaatctcgttccttacat

SEQ ID NO: 19556 - DNA, 600 bp, Bovine  MMBT21031
tcttaaaaatatagtacttttgacagttctcaggtcatagaattattgatttatactctgcaaatatatcctaagtatattcacatgaataattagaatttggggctttgatatcatttggaagcacactatttaggttggatggttctagaatcaaacagcctccacacagttcttagttcctgtacatttcttagttattgctttttacactttggtaaattatttctgttccctttgattaagttccctcatcaatataaaagataggatcatgatagcacatacctcataaggtgytctggacattaaattagtatacctaaaactctgtcatttcatwttataagttgtggctaatattaatttgttcaaaagttaagcaaaaacataattttgtcattctgtgagcttcaataattcattaatttgaattcaatttattcttygtaagttgaatatagggcyttggatatcatctgaagtkyaggttacaattaaattgctgattacagaggatcactaaagatatttgtgctatgtaaagaagtctattatctgttctattctagtttttcaatgtcagctgcaatctctcta

SEQ ID NO: 19557 - DNA, 600 bp, Bovine  MMBT01109
aaattctgtaactccataacaagctaaacagaaggaaatgaaattctctgggatgacattcagggctttggtagattgccactctatcttgcccacccttgaaaaaatgcatgacaaaggatacttaatgagctccatcgcccctcccactcactttctctggaaagccctgatttgaggtgtgaggtccgcctgcctttggagtggttagtaaaactcctggaactcgtctgtcagcctaggtctcagcagttcgatctcattatgagaatctccctccccttcactcccactcagacrttcttttctgtatcttgcagtttgacacttacccatgaaacatcaagaaaagtcacttaaaattggatttttttttcagtcagaatgtcgaaaataacaagattcagaaggagactggagtaataaacttgacccctttcttacctcctctggccgttctttggcattcccttctcagcattgccatggaaaccgctgactcctttcttgtcagggtgattataccttttcagattttgacaactggaagatacaagtgaaagaaatccagactctttcattactgctcccccttccact

SEQ ID NO: 19558 - DNA, 600 bp, Bovine  MMBT17611; identical to SEQ ID NO: 4503

SEQ ID NO: 19559 - DNA, 600 bp, Bovine  MMBT08158
ctttctcccctctttctcctctgcttccatgtggtcctaggcggatgagcaaactgacttcaaaagcacagaggagttccctggcttccctgatgcctggaccccacagggtgggagatgctttctgggttggctgaggaggaagtcaagctgggcgctacccatggagcctgcttcctttttcactcttggcctcattccctgcaaggcgagcttgcaaggacggttgctctggttacaagaccaaatcactgctgtttctgtctcttcctccgtgaaggtctcgggggaatcagcttrttagagaagcagtggctgagtgatggagtcggctaggacagtaaagggactccttggaggtcctcagatacaaagcccccggttcttctcttgatgaagccagagcctccatctcagggctgcctggacaaccctatctgcgactgctcccgtctgctgtcttcyacttcatacagcggtgctctggtatcagagtcagtctgcggtttgaatgtgcccgctttgatgtcaatccttactgtagaggcagaagctccattgtccctgcccaactcttccctgcactctctctggtcatgg

SEQ ID NO: 19560 - DNA, 601 bp, Bovine  MMBT13803
  misc_feature (1)..(1): n is a, c, g, or t
ntctgtactgctgactcacttggagatattcgagaaggtatgtctatttgtaaacttgcaytggctaccattttggatgagggcagcagactaaaattaaagtaaaactcaagtttctttaattttatatgaaatttgctacgaatcagtttttccctcagaaaaacttcatgggacattcagataaaaraagagaaggtcaaagagtcatggtgaaatggagttttgacttggcttaasaatcgctccaaggaaatcacacacttcacctttgcctcctgtgagaggagagcagaagacrtcagaggaagaaaggagagcatactctctcctcccgtaagatgcttggggccaaacttaggatctgtgtcttagggtgcctcctgggctttgtgatgacaactcagagtggatgcgcagttgggttagcagcaggacatagtccagggcaggtgggaagtgtgtggaaacagagagaagttaagcaatttgcccaaggtcacaccacgcataccaaacatcttgttccagagcccacattctcagctattatttagttctgctgtatgttctgggagaagggatgaagtgtgtcattgcc

SEQ ID NO: 19561 - DNA, 601 bp, Bovine  MMBT21975
  misc_feature (1)..(1): n is a, c, g, or t
ngagaagggatgaagtgtgtcattgccagtgacaagggcaatctgggatccaggttaagacttttacatgctcgtccaaacatgatttgtgtagagagaatttgccatttgtggttttttttttttttggtcgtgccacacaactcacaggatcctagttccctgaacaaggattgaacctgggtcctcggcagtgaaagtgcagagtcccaaccactggaccgccagggaaatccctagaatttgccatttggacttgactctgcctgagatgatcctacagctgaaccctggggtagcrttaaggggggttattgctcccggaagctgggcaggccaagccaggggggcaaggcaggcactgcatgcgaggtgtctggggtcccaccgtgtgtagcaggtgcagcagggcctcccgcaggcagctgtgcctcacgtagaagctgatgatggccaggtgggtgctgtagctgtgcaggtagaagaggcattcttggtagtaggtgttgttcaggatcttcccttcaggaatcacttccagagagaggctctgggtccggagggttgcttccagctctttcaaggtggccaagaagtcatc

SEQ ID NO: 19562 - DNA, 600 bp, Bovine  MMBT08652
caaggaaatgggaattttcacacttattcacacatatatttgagtcattttccaagtgaacaacacattgatcctactttataatttaataggctttttgtgcctcttctcatctgtaaagtaggaaaaacaatagtacctgctcatgggttgtcattaggattaaatgagtcratgtatataaagtacttggcatagtggccagcataataaatgacaaataaaggtagctattactcatattccaatgagttctttggtttctataaatcataaaaggtgctccttgaacacacacayrcaagaagtttccaggggtttgctaggtctatgaaatttgatmttccttgccttaccttggcaagaatcttaactagctaaagttattgatccaggtagcaagatccacacctctacataactgtttccactcactgcaaatttccagaaagtaatcgtttcaggctgtaagtgtccatgtttggtctcaacccaggagaaactcacttgcaytggaagatgggagcagaatccataccctgcttttgagcaactgggttgaggaacaaatagacttttttttttctatcccaaaataag

SEQ ID NO: 19563 - DNA, 600 bp, Bovine  MMBT05326
aaaagcaggctctgtctgagatatagatatggcgatgaggttaaatagacaccagaaaatcacatcgctattttcgctaagatataaattttgccagcattttccagatcacactggagaagggaaagcttccacagaatctgagagtgatgggttcatgggttctgattgcgtgattaatatacactcatggtatttttcggtgtgtcagcaaaacgtacaggtctctgagcctgacatttaattattacacggatggttgcatgaactagaggagtgaacacagactttggagtcccrgttcatcattaatggtgaggattccagtctccatttcttccattcagtctccatcactcttactatctaccacctgtaatccttttagagccagtataagaggaggaagggcttcccaggtgccactagtgagaaagaagctcctgccaatgcaggagacatgagacacaggttcaatccctgggtcaggaagatcccctggaggagggcatgaaaacccacttcagtattcttgcctggagaatccctgacttcccagaggagcctggtgggctacagttcacagggtcataaagagtt

SEQ ID NO: 19564 - DNA, 600 bp, Bovine  MMBT13077
tcgatgaacgtgagtctgagtgaactctgggagttggtgatggacagggaggcctggcatgctgcgattcatggggtcgcaaagagttggacacgactgagtgactgaactgaactgaagaccgcagaacaagggacctattgctagggaggaaagggagttaaggaggatgccaaaaacgcccagataaaatacaggctttgctgaaggccccatttacttccttgcccttcagatccagggctctctctgaccagatcccaggtttcattcccccttctttacttcatttccattacygtgtcctgtgtctccaggatgttcacatggaattctgtgaaaactgtcttttgtgtgtctttcttgctttacgtcctcttctgggactgacggccacctgtccagggttcttggtcttttcacgacaaacgaccctcagcaggtttctctgaggcctgtttacttacaggcttccgagtctttgcggggatgcagaccagactctcctgctctgcaacacaccagtcatactgatacattggaatgctcttggtacctggtgtgtttcccatgtggtggcagggaagaacagggttcttt

SEQ ID NO: 19565 - DNA, 600 bp, Bovine  MMBT05331
gtcacaaagatcccctggagaaggaaatagctcccactttcagtattcttgcctggagaattccagaggagcctggcaggctgcagtccagggagtcgcaaagagtcggacacaactgagcgactaacacttggaggtaaagagagtcaggagagatgtgtaaatagttgtaaaatcaactgctgtggcatgtggggatggattgatgggtgggagctttatttttaagctttgtgaaatcatcttttatagcctgtatccgttttagaggttgtcattaagaatcatgtgctgagtatrtagcatggttgacatattgtattaaatgttgggaataaaataaagaatcttggaacttgggagctggaagcatctttgagatttttctggctgtgtttgtagttttattataagtttaagttggctcttggctgtttctacagatgcagtgaccatatttttctgaagtaaaacatctttttcatcacagaaatttttttttcaatttgtaaattatggacaggcaaagttttacaaaggcacataaattgtgtcagattttatcttagatttactatcttttggaaaaagaagagagta

SEQ ID NO: 19566 - DNA, 598 bp, Bovine  MMBT13510
  misc_feature (1)..(25): n is a, c, g, or t
nnnnnnnnnnnnnnnnnnnnnnnnntttccttatgtttgctcttcaggaaaaaaaaaaaaaagaaaacaactgtaacctttttaaaatcgaaaggatgatataaaaatgcccagcatcttcttccgtaacgcttacaaccccatcaagctgtattattaaaatgacagggaaccctgttatctagtagatgaaaacctcgccatgagagctttggagcagagggaaacctaatccctcttgttgccactgtgatgacaggtattgtattccaggtgygggagcgataacacggttgcctyaccgtgtaattatcattgtttccgttggtgttatcctaagtagtaattatcactaactcacatatggcatttggtagtaacttggaaaacagcctgccactttggcttcatcatttggggtggatgttgatggcattatgctggaaatcctgagttgctagtagttgcttctgtgaggctcccaagagggctgtatacactggggactctagcaggttgggaagcaaagtgccgctttgtcattagctgtacgagtaccyrattctccaatataaacctctggtaatgttyaggtagg

SEQ ID NO: 19567 - DNA, 600 bp, Bovine  MMBT09507
gtagtgcttaaaactgcccatcttgtcaacactgtgactagtgatgagggaacaaatgttccagggtagaaaccagagaatatccaagtatatgaagaactgagtggggctggaaaacagaatactctacacctaattcaatgtgacttttatatatacaacattgactctgtgccagcttttgtatgcagcattgaagatgcagggaggagttaaacatcacctctgtccttgggggagatcccagtgtggagggctgggcaaaaaacacacagcaagctagaccaggaacagtgttayaagaggcatttgacgagacatttgttcttgatagtaattctcaagttagagtgagattactcattgagcattttcatgtgttccaaaaaaggaaaacattttcttgttctgtacagagatgatgctacagggaagggataaagttttctttcttctcttctcttttgtaaaacactgaatttgaactgctgaggtggcacaactataacagctcaaagtttcagtcctggtttgaagatgaaagccaaactgtgtacatgggttctttattcctttgctaaataaattcctctgtgaact

SEQ ID NO: 19568 - DNA, 600 bp, Bovine  MMBT05154
ctaaatttgtgttaacgtttccttactcatttagtgatgatacatgctacatttcatctctgaaagaagtggcagttttctgtattgttttttattttagtttcaatttaatagtgcaaaagtcaagtagttggttcccagaattaatgttttattttattaatgtttgatcttcttaatatttatatttctaccattttttgatgtaattcaagtgagtataatcattgcctggcaatcatttggatgtgattgaaatatgaagtatgcagattgggaaaaggttgaattaggaaatayatttatcacattttcacttcagcatgacaataaatctctccattaggtgaaaccagccatgtaactatctgcttcctttaagaggaaagatataaaatctaatcagttttatgaaacagtcttgcatgagactaaacaacaattcaaaactgacaaaatactaaatatcacccactgatgctcactcagagaaaacactccagacaattaaaatttctacattcatgaaatatttccacagcaaatctccatatcctagggttcagatttttctatatctcttcactgtggccatacatg

SEQ ID NO: 19569 - DNA, 600 bp, Bovine  MMBT00854
agtagcaaaatattccaactttattctatgacacaaaattatattaggttaataatgtaattatgttatattaggtaatataaattgcattttaatccacttaaatggaaatttctgttgagtgttcattgaactgttgagaagcttaaatggattttatgaaaattaaacatcttaattcataaagaacttaataaactttaattctggcttacataaaattaaaatttaatatttaagtctaatttatatgtttatctttttggaaaatagatacatcatattttaatacagacctcytgaagtttaatgagaaagcaaagacattttcatgcttataaatgtacataaaatgatagttcaggacttcatttttacgctattcccaagagtggttttactgattcgtaaaccatacggcttatacaaactgaaggaaacaactttaagaaagttggagtcatgcctctgaaaaatcctgtcactccttgtcttttataaattttataaaagacgctaatcatatttagctgtggaactcctagaaaatgaaagggaagggaaaaataaagttaattttatgttttagctttctttcaa

SEQ ID NO: 19570 - DNA, 600 bp, Bovine  MMBT07256
ccagcacaaaccttatctggtgtttctgggtatcagcctcttggaaattcaagtggcaaatagttactgcacctggtaacatgctttgaacatggaggagcctaaggcaaactcaacagcaaattcacttgatcttggttctggctgggtctagagtacctcaggttcctgtctgctgtctgtaaacctcagtttctcccctttcttccacctcaaacaaggacaagggacacccagcccgtgccaggggccgggaagagcccacctcatccctccagagtcagtcctaacgccagcctrcagccctttcactggtgcctccgccgtggaccgcagcatcggctccaagtccttctgagcgcctccttgacctctttgttgcggaggctgtagatgagcgggttgagagctgggatgacaagggtgtagaacacggaggccatcttatcagtgtccagggcgtagctggagctgggacgcaggtacatgaagatgagtgtcccgtacagcatggccacacccgtgaggtgggagccacaggtcgaggctgctcgccaccggctctcggccgagcgcatgcggatcacagcgccggcgatg

SEQ ID NO: 19571 - DNA, 600 bp, Bovine  MMBT20275
agataatgaaattacagtatatctactcccagtcaacataactccttggaaagactgtttatgcgccctgtgtaaaagttagtccattgtttcaatgttttaagaaactatagtcacagaaagagtattgcctggtaaatgtttatttaaaatatgcccccaaactgggctggaactctgaaatgttagatttccttcagaaatgtttacccagattcacaaatctttcagactgtggctgtacagaattgctgagtcaattcatttcttcagacgggcttctctgatacctttttattytgttccaacaaaaatrttttcaatagcaaggaaatttttccctgagagaccatttctacacactgaaaagtttatttcaataattctgcctttttggaactaaataaactttgaaactgaagaagaaaaagagtaacttaaacacttgtgtagctttaactgcatatcatcaatttcctttctaaacagttacctttgtggggtctcccacactatcaactctcaccactataaaaggctgataacagcacagtaattaaaatacagctgagaaaagaagatatttaaactaatttgcat

SEQ ID NO: 19572 - DNA, 600 bp, Bovine  MMBT11656
cagtaccgccctcctggccctcgtcctccttctgctctggaagcactgggactccctcacctacctcctagagcacgtgctgctgcccagctgagggccccgtgctccccccagctccccactggcccctgctgctccaggggggaccctggggctcctgagtctgtggggcgtcttcacgtgtccagtttgacctcctgcccaaactgtctgtcctggcgacttctgcccccttctctgtgtgtgcttcttctgtctgatgccttttccttgttgggctgaagggagcgttgagtgtakctcccgcaggaggttggggagatgcctgtggccacgcggagctaaggacccggatggactgtttacagtcacagcagaacttctcccagcagacgcctggggtcaggaaggccgaagagagctttcctggtggggagcccacgctggagacagctctagccccggctcgtggagatggtcgggatgaaggcaggagcacgggtggcctccctggcccaggaggctccccagctcacccctccgtcctccagagctgggtcctgggtggggcccttctgggatctgaggatgccggctctg

SEQ ID NO: 19573 - DNA, 600 bp, Bovine  MMBT19606
gctgacaacctttggatagattttatgtgtctctattttctccattgccttggaaaaactacttctctttaactctcytgaaatcccaagtttcctcacacaatatccattcttggcatttacttcttgccaaacactgagctaaaagctttccctgcattatctcacttaatcctcacactgaccctcactggtatgtatttgaattccagtgttacggatgagaaaacagctcagagtcagtatagaaggaaatgtgctaagaccacacaggcaagcattcaagctctggttgttctrgctccaaaaattgtgcactcacaactgttctacagctagccagcaacaaggaacacaagagtaagttccaaaacttcctctagtcctttycagcatttggaagaactcaaaaytgtttgcaccctttgcaggcagattctttaccatctgagccaccagggaagccttttgcatccttctgctccttcaaaattgagtcctttttggattmttttcaatagataagccttaaggtatatgaaagtctactatatatgtatcttttaaaatatttattttttattttggctatactgtgct

SEQ ID NO: 19574 - DNA, 581 bp, Bovine  MMBT19610
tggcatttacttcttgccaaacactgagctaaaagctttccctgcattatctcacttaatcctcacactgaccctcactggtatgtatttgaattccagtgttacggatgagaaaacagctcagagtcagtatagaaggaaatgtgctaagaccacacaggcaagcattcaagctctggttgttctrgctccaaaaattgtgcactcacaactgttctacagctagccagcaacaaggaacacaagagtaagttccaaaacttcctctagtcctttycagcatttggaagaactcaaaaytgtttgcaccctttgcaggcagattctttaccatctgagccaccagggaagccttttgcatccttctgctccttcaaaattgagtcctttttggattmttttcaatagataagccttaaggtatatgaaagtctactatatatgtatcttttaaaatatttattttttattttggctatactgtgctttagttgtggtacatgggatcctttttttttttttttaagttgccacatgtgggatcgaacccaggccccctgattgggaacacagagtcttag

SEQ ID NO: 19575 - DNA, 600 bp, Bovine  MMBT06702
caaagagacccctgctctgagatgtttctttttcactcaatatgttcttcttggaatcctaaccaatttcacgagtgatgacttcaaacttgcttctctctgttgagcttcagacctgcatttactacatttgctggagtctgtctgatgtccagaacacacttcaaattcaacaactcaaaaaaactgtacttagcatcttccttttagagccagctcactgtcctgggttttccatctctaccttactgttcaagcctgaactaagattctggtctcccaacccagtacatcaaatcyactcccacatcctctccagactgttttcttaagagcttctccatttgcccccatactctgttcccacaaacaagccctggtgatttctcctctagattattgatacccctgacttcacgatgcaattcatctccatagcaaagataaacattcgttcatgattaccctaggcattcatatgatatggcacttccttagcagagttaacaaagcctctcgtaatctggctcctctctgcccgcttacctcccaactgcttggcatgcagtgtcagtgtcagtgtcagtgtcagtgtgtgtg

SEQ ID NO: 19576 - DNA, 600 bp, Bovine  MMBT08547
tttcaatggaccgctttttcctgctccactgtaaccgtaattgatcactgctcacagaagacatagcttccgtattttggtccaccacattttccaccatcacgtaagtatgcttgttaggttctcactttattatctgcctatttattgcttccagaatgcccagtaaagctgaaatttttcatttaaagtgatagaaaaattttcctaaaatacttgcttaatcatcttagatttgacttttggcaagacagttaagcacatagaaatgaaaacactacatttcacaaatacacacamaaaaaaatmcaaactttcactgtttttcttatagagctcagtcgtaaatgtgcagcttacatataaactaaaaacacttttaaacatgattgtcacaaaaatattttaaacagagatgaaatgtatgaaggcacacacagattgtcgatagtgacatcagttacatcacatttctttagaaacagaacctttcctgtttctgtaaacaactttttttttctcacacatttaaagtgagggttagtgctgacataagattattgctatactcacagtttgagtgtttccactgtgtatgag

SEQ ID NO: 19577 - DNA, 598 bp, Bovine  MMBT05372
  misc_feature (1)..(37): n is a, c, g, or t
nnnnnnnnnnnnnnnnnnnnnnnnnnnnnnnnnnnnnaacacccaggactgatctccttcagaatggactggctggatctccttgcagtccaagggactctcaagagccttctccaacaccacagttcaaaagcatcaattcttcggcgctcagctttcttcacagtctaactctcacatccatacatgactacaataacatagtaatcataaataatgttaaactgtatgctttgaccttagaaatccaatatgcagtgaagaaatctgtccattgagcaaatatttatagcacatctwctaatgctcagtgctggggaacaaaatagattttttttttgtatcatgtcgtttatattttatttacacttttacttaattatctacatatagtagaatgtactttttagaaaaatcttgccattgwtaagtccaaatttacttttaactttggtataaactttccttgacaactctaactcccacgagtataacaaggcaatagatatgtttggcagrgcaactatttatgtcctgtcttctgtgttgccagggtgatggtagcaatatcgaaaacattggaggtggttgttattgg

SEQ ID NO: 19578 - DNA, 601 bp, Bovine  MMBT20235
  misc_feature (1)..(1): n is a, c, g, or t
nttaaactgtatgctttgaccttagaaatccaatatgcagtgaagaaatctgtccattgagcaaatatttatagcacatctwctaatgctcagtgctggggaacaaaatagattttttttttgtatcatgtcgtttatattttatttacacttttacttaattatctacatatagtagaatgtactttttagaaaaatcttgccattgwtaagtccaaatttacttttaactttggtataaactttccttgacaactctaactcccacgagtataacaaggcaatagatatgtttggcagrgcaactatttatgtcctgtcttctgtgttgccagggtgatggtagcaatatcgaaaacattggaggtggttgttattggcaaggatcctaactttcattttcaaatggaagaactgtaaaaagcaaaatgtaggctgggatgtgggctgtagactggtcatggctatacctaaactagatgaatggattattaatggttaaccaagtatggatgctattctcggaaaactaatactgataggcaatatttccttaatatttaaaaattaatgaaatttggtcattacatcaaatactttt

SEQ ID NO: 19579 - DNA, 600 bp, Bovine  MMBT10468
caaaaacaaacaaacaattttcttctaactcttcttaatttttaaaatatgttatcatgattttccagaaatttattcaagcacatacataaatatattgctttctgtcctgtaaaatcaattactcgcagcttttaagaaacactcttttcctgaagtgagcagtttactccattagcttgctgtgggcattagatatcatagcaattacagaaagatgattcaatgaatattaattggtaagaaaaatcaatgaggcttggcattgcctcttcatgtaaagactatggtgtcccttayagcattattatgaccattatttgataatccttgctgtgaattctgattgatttctaaaatctagaacatagcatcatttacttggattctgtactgcttggcataaaaggaatgagtctactgttgtgttccctagagcctccytcagattttatattataagagcagactgtgtcatctatacagtaagaaaaagaagagatttcattacagatctattgggtgccagttcttagctttattttggaaatgttttccgggaagcataatcactatgaatgttctgaataaagaattgca

SEQ ID NO: 19580 - DNA, 600 bp, Bovine  MMBT02961
tataaatatgggaaagaggaaggattttattacattaatgtattttttgaaaaatgtatgtaaatatgaaatgaaaaacactgtccaaaagtacactctacagtgtacaaagaatgctattcacaatgatttcattaatgagttctgtttctttgtacttacaattgctgggttatcattgtttatttttatatccaaacagtgaaatggaatatggagcattacaaaacttggagatgtgaactgtgccccaagcaaccacaagtgattctgaatgttatgaactaactttcaatgggrttcatgtggcaaagctctgttgtgtctaggactctattgttgggagttctccaaattaacatccacatagactacagtttttactaaagtaaaagtaacatgaaygcactaattagaagttcagttatatatttcatcagtattaactgcagcaattttctctaataacaaacgatatttttataagaagaatgtttaatcaatgatgttaataatactgaaagtcacttaatcatgtctgactctgtgaccccatggactgtagctaggctcctctgtccatgaaattctataggcaga

SEQ ID NO: 19581 - DNA, 600 bp, Bovine  MMBT16278
cgttaagtgatctctcctggcatctcctgttctacttatgattggactcaagcccagtctctctggctacttctcggcatagctcgcctcctactcctaaattcaagtgctcagctatatcaagctgctgagttgtaactttgcccctcgaccatctggaagggctatttttatacaagttgtagccacgtctctctacttccaagcatcggatggctacccagaagcttgaggaactaggccacccttccaatcaccatgatgacggagacactttggaacaggtggaagagtagaaaygccttgaatttctcttttgtgacaccttgcttattgagaagtcacttakccagccatctaaaccatccagaatcccagttgaggacagaaaacatgcccmaaagtgaagatctccatcacaggtgtcacaaagtccaatcactaaaggcttaggtcttctctcaagacctcatgactcatattttaaagacagttctagcttaaagggtgacctggtctctggctcttagaaaattgggagcagaataactaaaggaaagacggcaatttgtaggtttatatactgaaaataattttttc

SEQ ID NO: 19582 - DNA, 600 bp, Bovine  MMBT09888
aaaaaaaaaaaagatgaaaaataacaataaaaaaaatcagggtagggggacttccctggtggtacagtggataagaattcacctgccaatgcaggggacacaagttcgatccctggtccgggaagatcccacatgctgcagagcaactaagcctgcacgcctgcagctactgagcctgtgctccgcaacaagagaaactgctgcaacgagaagcccttgcacccaccgcaactggagaacagcccccgcttgccacaactaaagaaagcctgagttcagcagccaaaactgcgaccccaygggctgcagcccgccaggctcctctgtccatggggattctccaggcaagaacaccggagtgggtagcctatcccttctccaggggatcttccccaacccaggggtcgaactggggtcttctgcattgcaggcggattctttaccagctgagctaccagggaagcccaaaagaaataaataaattaaaaaaaaaaattttttttttgatgatcaaaggcaggaaaagaggaaaagggcagaggctatgaagctggtctccatccctgagcccaaggagaaagctgtgagggatgggcaggg

SEQ ID NO: 19583 - DNA, 600 bp, Bovine  MMBT09593
gtagagaaaagctcttaaaaaaaaagagaggaaaaaaagcttggagttgtcctcatttgcctctcctttgagccccagtgttctctgttctcaatgcaaaatcctaacttccagagtggggtggtttttctctggagaaagaaaaataaatgcaatggcagaggcttgctaactaagtactgaagatccatattcaacagtaaaactgactttttgaagtagggcatcaagggaattggaaagaggacagagagagaacactaacttttcaaattcaatcctaaatttaagctgtatttycccccctcatttatgtccctgtctcattcctctgcgattttcactatccaagagtggtttcaatagttctcattgtcaaaagagttttgccaatatcgatgtgagttttcagatgttcctgaatgagaagggaagtaggtgtttgtggagctagcgaactccagtactcttgcctggcaaattccatggatggaggagcctggtgggttgcagtccatggggtcgctaggagtcggacacgactgagtgacttcactttcacttttcactttcctgcactggagaaggaaatggcaaccc

SEQ ID NO: 19584 - DNA, 600 bp, Bovine  MMBT19249
ggtttggtcatggaaacttaaaaccattagggtatgaatttgggtccctgaagcagagcagaaggacagaatccttggagccgatttcctgatttactctgtcatttctaaaggggtcaggtctatctcctggatggaagtcggtccatgtgcagatgtgtgtgtttgagcatgggagatcatgttatttgtttcagaactgtagcaactgtgggctgctagaataatctgtattccagctcttccatgggattaggtaataaggtgctgccaggatcccctcacattcagtaaaagcamtttaaaaagtaagggccttgtttcagcatttgatttttgctcagactctttctccatgaggaacatgactagagaagaatcttttaatatttagaaaatcacatgcatatttatatacaaaattacatcctgttaggataaacctagaaatccagcctgaactactcctcaaagatttagctttggctctagatattgctaagaatgctgtttctaacttctgaagtccctacctcaaatcacaaatggtggattttgagaaaacatttaaatcatttatttcaggtaacaataagctgt

SEQ ID NO: 19585 - DNA, 600 bp, Bovine  MMBT08480
tccaagtggtatttctcaagctggagagcatgttcatttaatccacaaacactttttaaaggcctactatgtgccaggcgctcctctaggcactaaatcagggaccagaactgagcagaccctgccctcggggtgggggtggggggaccctcccagcagctcagatcaggaggtggcttcacgggcatcaggtgcgtgtccctagaagctgscttgcacgtccgtgcctgcacacgcgcatgtgcatacactcacggcctcctcccaccgcctgggcccaccagtcrtctgccagcccayaggccatcacctggaaaacctgcccgtccacctcggcataggccttcacagcgtgctccgggaacatgaaggtgacgaaggcaaagcccttgggcttcttggtcaggctgtcgatggggtaatgcagctccgacacgggacctgcgggcaggaagggcgtcagtgtcccatgggccagggccaggtgtgagctccgggcaggaaaatgctgggcactagtcaggggaggggttttaaccagtgagagcgtggagctgaggtggctgctgaactaaacaggaggactatttaaacagcaga

SEQ ID NO: 19586 - DNA, 600 bp, Bovine  MMBT08809
agggggtcttcccgatccagggattgaacccgggtctcctgcattgtaagtggattcattgctgtctgagccaccagggaagcccgtgactcttaggcaatttataagactgagtccagtagattgttaacatgtcaaagaaggactttcaaagtatctgtggagaagtgccaagtattgctctcattgtttaaaatttccagcccatggaggactaatatttgtataaaatacaatatcatgtcactgctgtgtcctattgctataaaagttcctagatattttcattgtggttctgtyataaactgtccacaaactggttttaawctcctttcaatagcatgaacttaaaattctaatttgggatttcttagctctcactttctagaagtttctgatatctttgaattcaagttgcagacagtttcctccaggaattgattattttcattctttgcaataactgatacaaaatgtctaatataattcaagagcaccaggaggttttattatcagtgctccaaaaatagccccaccaaataaattctctccgttgtattagctgtatgtattgtgtatcataaaacaagatagtttatg

SEQ ID NO: 19587 - DNA, 600 bp, Bovine  MMBT01771
aaattaaggttgctaatcagctgatcttaaaagaagattatgatgatgtgatttgagtgggcccaatgaattcacatgactccttaaatgtggatgagggaggcagaaagttaggtgaatgcactcacctaactgtaggccaccggaaacctcctgttaaaratagaataatagtgctagtcccctaaattagtttgtttgttgactcaggggtttcatttactctcattaactagtttggtttcagaggtctggaaatcaattacacttgtgtgtaaaacttataacatagagcagaaytgagcattgattcctcctactaagtatgattagccctttacatgaaggcaagatgctttcaaagttgatttggttaaatcctaaaacaattgcacctcaagaccartaccaaaagaatgttccaatgctcwcttatgcattcctctcatgtgccgcagatatatcttgctgtatttttgcttttcttcacaataagcatttccagttgtcttgcctaagggttttcacgggtagatactcttttctctgaaaatctgaactgttgttagtgattagaattccaaagcaaacatgccaaga

SEQ ID NO: 19588 - DNA, 600 bp, Bovine  MMBT21845
aagagctagttaaaactggcatgtaccaaaataagaggattggtatattagcaatgaatattttagtgtctacagttgttctacttttcactgcaatacagtgtttcttatccttcacttgtgtaatagaataaatgacatatttctgaggactgatttatttgtcttggtttgtgtgaattgattcatttcagagcattcaccagaatagttggtatcaaaataatgctgtatacaaaacatataaatgcattattgaatgaagaatgaactgaaagaccataagttctcaaagatgakgctcasagcaagaggattaaattgcataaaaatcaagtcactactctgaaatacttagtgtaataaaagcttgagagaaaaatgtaagatgaactcaatttctcagccattgctatgagtctggatgtgcatcctgctgttatgtgaacaattaccatgcctggagggaactgaatgaatgttggcacctattggcagatgaaataaaaacctaagcttattctcctatcatgaggctcacatgccatatgctaaaaactaatacattaagctggcataatgaggaagataacacattgt

SEQ ID NO: 19589 - DNA, 600 bp, Bovine  MMBT09838
gtaccatacatactgcgagatcatgttaaagtcaatccacaacctatactatagtgaatattttaagaagttggagaggtaaacatggagagtaccatggagaggttaacatctaaatcagcagttaaaaataggtatgaaaaatacaaatcaagatttcaaacaaaaaataagtacccttactgaactatgaaactttcattattctaaaattacaatatctccatctggtaatctgacatgaacaagctgataaatgcaatcagaacaacagtatattctcgcaaaaccagaaatttyctgaaagcctggaaaaatatgtccacaacagatggatcatttagaaaataaatacatcaatctgtcaaaaggascactagtctaatttcctaaatgaaaatcagtgggagctctactttccaagagtctgtgacattagaaaggccaaagaggaaaaacccagagatgcacataaacagatttgctatgagctagagtgcatactgtcaggtttcctgtcaaacatactcaatgtaggtaaagtccttaccagttaacttcttcacaggttggagccgaacactgatagactgatgtgtg

SEQ ID NO: 19590 - DNA, 520 bp, Bovine  MMBT04412
  misc_feature (1)..(1): n is a, c, g, or t
ntggtttcatgatgtctcamacaggctccataaccttcatgatatacaaccttggaatttgtgtgcacctcgtcttttctctgaggcagagattcaacatatttgaactgctgaggtggagaaagtgacttattaatgtttcttagcctacgactgygtctgttggcaaatsttaggggcagaaatgtgacttgcgtgccctaggtaaaatggtgttcatgagccctcctttgtgactgagcaagtgtgtaagagaagttttatttcctgcagagaagcaggtgaatcagtcagcacatcmacatcactggtgtctctgccctgggtggcatgccwtggggttaggaagaaattctgtcacaatcaggcgaaatatccaaaacaagcctgctctgtgatttcccatgaatgctcttgttttctgagtcctagctttccccctgtgagccctacttatgacagagggaagattcaccaatgggcaatgcttgtttcctctttaatttcccttttgtcaggg

SEQ ID NO: 19591 - DNA, 600 bp, Bovine  MMBT02648
cttgacaaggagtagataagaacagactgcattagtttatcaaagatgcatgaataaactggtgctcctaagtgtttgcagggactcgaaactatctgtatatgaaacttaccattgatatccttacagtcacagaattcactcatttagttcaatcagcgaatcaatcaatcaatcactccattagtcattgtcccagagagggtttgaggtcttttccatctttcttcctcttacactgacctcagatgcatcacccaactgcacagacggtggggatgtggaggatgcagatctttyctcgtatctgagcctcaattaattcatctgtaaattggggtgggtgacattgttctggcttctgcctgttgttagatacaaatgacataaagaccagaaaaggytttgaagactgtctgtgctttacagactgtagagcgtcctggcaatgtgaggactcttcatcacactgattaagtagatagagattaatagccaagcatgaaggctgagaattggattaactgctctgggctagattctattatcataatgataatcatttgttcacccagtgaatatttaccgagtgcttttccc

SEQ ID NO: 19592 - DNA, 600 bp, Bovine  MMBT09828
atggactgtgtttggaagtcagggcaggtaagctgagagcaggaccgggaggaatatcagaagccaaatcaggaagacaacaaaacagccgtgacagagggtcaaggccagaggagtctgtaatattttaagggacaaagtgacaggatacaggagaaaaagatcaggagttagtgttatagtggagaatggaagcagagatacaggctccaacacagaggagctgtgtgtgtactggctctgggcaagccaattatctttctgggcctctgactcctcatccataaaagtggaaaaccmatacagtctcacaggggtgttgcagggtgtgtgttagataaatggcatatggtgagctctctgcacataaggggtatgcgtgtgtatatgtgaataacaagtctgcaccatgggaagcatcatcatagatggtgactatcacgacgatcctgagaggcatgacaggcaccactccagcatatggaagaggagctgaaagctcagagagattcagggcggctcagggtctccgagtgacagatctggaacacaggctgctggtccttagctagctcattctatcagctgcatctgccctgg

SEQ ID NO: 19593 - DNA, 600 bp, Bovine  MMBT10546
tagaggggtgggatgggatgggaggtgggagggaggctcacgagggaggggacatatgtatgtatacctatgactgatctgtgatctatggcagaagccagcacaatgttataatgatccttcaattaaaaataaattaacgaaaagaaaaaaaacaggagtgagttagtgaacgctgactcccaccccagctggggttggtgcccggccctcctgctgcagaagcccatgatctttcctagccagtccccggagggggagcaccgtttatttttrtattgtgtgtattttgtctggtcwactgattccttgtttcactgagaaacttatattcgtgtgtgtgctstgctgagtcgctcagtggtgtccgactctttgtgaccccgtggactgtagccygccaggctcctctgtccatggaattctccaggcragaatactggagtgggttgccatgccctccgccaggggatcttccctgcccagggatcaaacccaggtctcctgcattgcagacagattctttaccgtctgagcccccagagaagcccccacttacatcagtagtcagctctagtttatgtgctggataatttttta

SEQ ID NO: 19594 - DNA, 600 bp, Bovine  MMBT18970
aaaaggatacaaagcataatcagcaaagggaaaggaacatgagacaaggtccagaggaaaccagacgcaagcttccaagagtcctctctcactgaagtcacacaggacatcttaattctcccgatgggaaatcaggacaacccgtgtgtaatgttatctaytagggaagcttattagatactcagttcctgaagtatctggtcacrtgtgcagcatctggcagatatgaaccaaaattccagactctcagaaggcaggcaggtattcagcataaactccactgtttgtacactttaggyrtactgagtcatttttggacagttctggaaatggtgggaactcttttgaaatctaagcttagagttactaacccagagccaaacgcttaagcatatctttttaaggacagcagtctcaagcttgctagtgttaactctgttctgaacatttactcaggttgttgcatctgtaagtagtccattcattttcattgctgaatagcatttcatctgcagacgtaatatgtggctggtggtgggaagtaaagtccaatgctgtaaagaacaatactgcataggaccctggaatgttaggyccatg

SEQ ID NO: 19595 - DNA, 600 bp, Bovine  MMBT20142
catgaatctycttaaacatctgtttttgtttttttccccaaggtgtaaaaagatggttccagcttcaaagagattcactatacatagatcttctaatgttcttactctttctctgaaacgttttgcaaattttactggtggaaaaattgctaaggtgggtagataatattattaacaactgtttatgctgagcctttcaaggcttaactgyccagcagctacatggaagttktattacctgattttctaagttcttccagcacttgttagtggaataaaatgtcaaagaactgagctcaragtttgctgtgtgtgtttacagagtgtgtgtgttttcgtctgtatcccttagctgactagactttctgaaggtcacacctggtgcttattatccgcgtttgggcgtcatagttggtgaaggtgctgagtgggttcagggaacgcttatggcatttcaagtccaaagatttcccagccagaccttgccattctttgaccagagtttgcttgtttattcgtttgttttctgattggtagtatactgacctttcccattttcttcccactttctgaaactgaaagtggtcagaaatccagtaa

SEQ ID NO: 19596 - DNA, 600 bp, Bovine  MMBT08796
tcctgaccaaccagcaatcacatccgtactccctgaattggaaagtcttaaccactggaccaccagggagtcaccctaaaagaggagaattttaaaagcccaaattgagtgtttatctggtcttttaggtggaaggtttgcttcattactgcaatgttgtacaggcaagaagttaaaaaggtaattccaaagctaaattactcttgcagaaccaacacgacatgccagcagagcccagaaaagatgtkcacctgcccaagtgctaaatttagaaagaactaatcacaccgaacggcgtamgaatttcagagagggaatcttcttcattaatatttcataaaattatgagtgaacacgaaaacaaagagggaagagtgttcaattttaccccctgaagagataagaatgtttccatgttctatttcttcctttattgaccaaaaatgtattcgtatgtaagtttcacattgcagatagcaatgttatcatgattttttttaaagtcctaattaacatccttaataatgcatttccttgccagggttatatatgactgtgtagtgagcattttagcatcattcctatttttccctttggcca

SEQ ID NO: 19597 - DNA, 600 bp, Bovine  MMBT05337
atgaacagataaaaaccctcctgtcttcccaatatattccttccactcttcttatgatcaaaggcatcatttatctcctcttgcaattagaacatcggtgatggcacctccacacttaaaaaggacaggatcctgaacacaactgcctactgtctcccttgattgactaatctgagctcaaattctgaaggctgctggggtccagtgcattaaccaggcccaaattctcttttttccttccctcctcatcaagccctgcctatactcctaggaaagagggatatcatttttcgtaacagyaaaccttgcaaaacaagatatgggctgaagaaatgagatgtatgaggcccctcttttggatctctcattattcgggaaaatgcacactttgctggatggcttaattttctctgtttgagctcaattcatccaggaaggagcagcacacctcattaacttactttccacacagagcagtctccgaaacgaactgcccacttcagcacttgagtctgcgtgcaccctgcctatcaactgtattggggcaattttcatgaatcaagactcagcctgttccatgcacagcaagggttcttacct

SEQ ID NO: 19598 - DNA, 600 bp, Bovine  MMBT04002
actctgattctttgttgtttcatgggctttctctagttgtggtgctcaggattctcaytgtgatagcttcccttgtttcaaatcacaggctctggagtaygggctcaggagttgtggttaatgggctcagttgccttgcagcacgtgggatctttccagaccagggattaaatccgtgtccccagcattgccaggtggaatcctaaccacaggaccaccagggaagtactggaatgaatattttttaagtaactkcatgatacttttcatccaaaaaagattaattttcaacttctgatrtaaattttaaaaattcaccacatttatagagttttatagttcctctttcatttcctctgtccctagaatccatgactaattaattgaaagttaaagagcatgagaattttcatctctcatgcagtttcacagcatygaaaagagttgcagtttgtgagcactgatggccaagaactgttcctatctcctgcaaaaagcagggttgccatttctaatgtttcctaatcttattttcaggcttgtcttacgaagtacacacagatattaaaatgactgcactgggagaggtgagaggtgaaa

SEQ ID NO: 19599 - DNA, 600 bp, Bovine  MMBT12469
tgcagcacgtgggatctttccagaccagggattaaatccgtgtccccagcattgccaggtggaatcctaaccacaggaccaccagggaagtactggaatgaatattttttaagtaactkcatgatacttttcatccaaaaaagattaattttcaacttctgatrtaaattttaaaaattcaccacatttatagagttttatagttcctctttcatttcctctgtccctagaatccatgactaattaattgaaagttaaagagcatgagaattttcatctctcatgcagtttcacagcatygaaaagagttgcagtttgtgagcactgatggccaagaactgttcctatctcctgcaaaaagcagggttgccatttctaatgtttcctaatcttattttcaggcttgtcttacgaagtacacacagatattaaaatgactgcactgggagaggtgagaggtgaaaaatcctacatattctatgtgcatcctgcctgaggattaagggagagaatttgcttaggaaatcaaatcaaattattggctgtagaacaagctttggctctatcatggcattgcactggagatcaaatgtttacttt

SEQ ID NO: 19600 - DNA, 600 bp, Bovine  MMBT06302
ggttgggaggcatatttctaagaaggctttctagaataggtgatgggtaagttgggtccaaataaatataatctgttacaaagggcaggaaattttgtgcagaaatcgtagcctgagaaaagtcttgggatcaaaatacaatatcgtgtttagggaacaagaaacaatttagtattttcagaagacattatataaagaagagtgatgggaactgaagttgtagatacatttagggttccatcctcgagagtcttggaaacaacgtaagggaaatttgagtgtagcctgtgggttatagakagatcttttagatctctagtaggaaaggtgatagatttgatagatttgcagttgtaataaattccctggttctagaaaagtaagctgccctgttgtaaggacagttgggaagcctcaggagaggcccacatggtgaggcactaaggctttctgccagtagccctgtgagatcatcatctatgaagtggatcttccagtcctggttaagttttcaaatgactctgaatgtgactgtggggagaccatgagccgacaccatgcacttaacctgcagaaactgtgacataagtgcttgctgtt

SEQ ID NO: 19601 - DNA, 600 bp, Bovine  MMBT12738
gaactcattaccagttgaagaagtctctaatgtgactacagctaatgtgttcttgggactaatttagaaaacttcagggaatctgctgctgctgctaagttgcttcagttgtgtctgactctgtgcgaccccatagtacacaccttcaaatataaaatatttgagtgtgtatgagatgaactgatgtatcagtatttgaatacatgtgaaatagcaccctatttctcagtattccatatttcaagctattccagtgctcctcccaatcatatagcttcacctcttgtattgagatgatakggtagaatgtaaaatagcaagaatcttgatggaagttaaaatsttagcttttagggaagggatataaagaacacttgttatataatagagttagatgtgcaattgaaggggyttccctgatggctcagatggtaaagaatttgcctgcattgctcgagacctgggttcaatccctgggttgggaagggcatggctatccacttcagtattcytgcttggagaatccccatggacagaggaccctggcaggttacagtccatgggggtcacaaagagtttgacacttaagtgtgagtgata

SEQ ID NO: 19602 - DNA, 600 bp, Bovine  MMBT11056
tgctacataaccccacttttatagttggttaagtctattaatttcacgaaacataaatatcttagctattctgatattgagcacttagatgacggtatatttttaataatataaataaggctgaatattttgccattttcttttttaatgataatagttaacttccataaattacacattttgaacagttgttgagtattagaaagaaattagataaatattctgagcagaatctctgaaatagttttttcagaggacttattggagacatatcttttgtggatatatatggattgtttkagctgaaaagataaggccacccacagcacagatttgttttcacactccatctgtttggtatatactgtgtagattaggaaaaagttctgaccccagtgagacagaatgtttagtaatatttctctcatattcttcaatttctctgtgagtcactttctccagatgcctaacaagattgtgagctttgcaaaaatcttccaaaaatggaatctgcttctcaaaaaatgaatacagtttaatgaacacattgcattcattacaaaaagtactacttaaataccaaaatatatatgttacaac

SEQ ID NO: 19603 - DNA, 600 bp, Bovine  MMBT02264
ctctgataactcctaagaggccaactgaagctccttattcccagagttccaggctctctygatagttctcatttcctayaagtccctggtagctaaaagamttcactcagtagatttaacacatgttaagaarttacgaaaacaacataaggtttatttttctgaaaatgaactttctttttattcacaacaggaaaaaactcctcaatctaatagaaatcttagccctaagttattactttctagtagtctctgaaagtgtatgtttggcatatggtatattttactttagttttatgyktaaaggtattcgaataaagaatgtatttttttaaatcttaaaaagaaataagtaaaatacatttctaagaacttcataattattcactgttcatttaaaatctagccttttgagatgtgcttatgtattatgcatgtctttttacagaatctaactacagaaattccatctctcaatgccttattcaattcatttttggtacctttatttttccaaaaaaaaaaaaaaaatgtccctaatcatatttccattcttctctcattataggggttgtctctctctgtctaaaaggcattgct

SEQ ID NO: 19604 - DNA, 598 bp, Bovine  MMBT02198
  misc_feature (1)..(3): n is a, c, g, or t
nnncacttttaaaatgagagacctaaaacaatgcattctgctttcatttatttgtctattattagaacacttgcagggagcaatcaatacagtgaaattgtaaacgaagcagtctgcatgactctcgtacattcattttcatgggaaaaattaagtgctacgaatataatacaattccagtagggatttgaagcagtgtttggaaatgaaaygacatccattggtctttaaatgyaactttgcatctccttcaggaataatttgcttttaaatgatcaataaagatttggcgagcttttygagtaacttaactgtatgtacaggttcaaacattgtttaatatatagagagagactctcatgtgaatcacagtggtcagtaggataattttagggtctgttctcttgctctctatctctttctcacttactcactctgtctcttgtccagagctgttaatccagatatgatactggatttaggctccctgggaactcctggtaaatgcataaatatattgagagattgcgtctttttattaaattttagcaactctgcttccttcagaaatcttcaaaggttatgtatctgagtggag

SEQ ID NO: 19605 - DNA, 600 bp, Bovine  MMBT05287
tggctcaatcataaaggtctcttccagtaactcaccttctaataaaagcagatgggtgggtcagtattttttcctttgtatttgatttttctcttctgggtgattcactgttagatataactgctatcgtgtgaacacaagaaagctgcatttccacagccaaaggaaaggatgcctttccttagcagtgataaagcagcattcaaaggattgatgtgtgacagtcatgtgatgcctttggcaaaactgataaatctcacggaacggaacactgagagtgaggtcaagtgttgctatcarttagtgcttaatacaggttcatgtctttgtatcagcaacagatggttttcaatttaattgtcccacatcttctataattctaaagatgaagctttcataagaaaggaggttataaacaacctgaaaaattaaggcccccattttttttatgaataactcattgtcatcattctatcccaccatttttatagtgatccttaggaagttacaggtacattttaaattatgaaaaaggatgaaaattatatatgaaaactgtagaaagctattaggcctctgtcataattaattttttaataa

SEQ ID NO: 19606 - DNA, 600 bp, Bovine  MMBT18738
gcaaatccggtttttgctcccttgaccagggaagtaccaagaagataacatctggaaggagaccctgaattcatgtaaggaatctcttgtatggaatcacggggcttccgtcagctccacttctgtgctgctctgygttcactgcctctgagcaagacactgccctactcacaccacactgcccacaccttagccgcaggcgccagctgccaacccatctggggttcctgctgccgaatgccagagggtcagaggcagggagggacctgcatcttctgcattcccttccattttaagtcrgggcgagcctccatctgttgggttcttgggtgtggagctagtcttaaacattaatcattttacgagagtggtgaagagggcttccctggtggctcagatggtaaagaatctgcctgcaatgcaggagatgcaggtttgacccctgggtcaggaagatcccctggaggagggcatggcaacccactccagcattcttgcctggagaatcccatggacagaggagcctgacaggctacagtccctaaggtcacaaagagtcagacatgactgagtgactaacacacttggtaaggcagacat

SEQ ID NO: 19607 - DNA, 600 bp, Bovine  MMBT17119
aaattaaatccaggcatttgaaaagtctgtggtctgagacatattttaagtctatggttttaaaccgcaaatcagacctcacacagtaagtgcagtctggctccctgtgcacagtggcattggttgtcaacggttgcaaagagcaccaatgtcagcttcatgttaatgacctgaagacccagtctggtccggccccgcccccccccccgccctgaggaatgctgtcagtccccaggcaggcactgtcatggtgctccccctaattctggcctctgagtctcctgacaggttagtggggcycttgaccctttactgctctgtgacacctggccgactttgctacctgacctcctgcactctggactcagagttcctgggtccacgaggcctggtttcatcaacctgctgtggctgaacgtctttgaacttggtctttggacaatttgacttagagctctgccagtccaacttcaggctcatcccttaacccagaccagcccattcaagattctccagaggacacagagaagacccctctgaagtaagacagcaccccatcccctcaaagagctatttgtagagacaaggatggacctagag

SEQ ID NO: 19608 - DNA, 600 bp, Bovine  MMBT22492
ttccctgaccatgcttactctttggctgaaagcagtgatggggtgcatggtcttggtgtccactcagaactcagcagctgcatctatcagctgctgattatgctcttggtagcaggagatctgagaggcacattttatggcttttgcccctttcccttctacccttcctttcttcctccctttctcctttccttccttctctttctcccttccttctctcttttttttctgttttttttttttttttttaagtgttgtttaagttccagccttagtgccaggtattggtgatatacaatkaatatggcaaatatgatatctgctcttatggaacttcattgttcattcttctgtaggactttggggtagagttctgttgaaataactgaaaacattcttgatttcaaggaggaagagagacttacctagctccatgccttccctccctactttattatcccacagagcctggtcagttgcctcatacatcattaagatgaccatatttactaagttcaaaaccagcccattcttattcatgacttttttttttttttggcagaaaaagtcgtaaacaagtatgaaagttaaattgtagtt

SEQ ID NO: 19609 - DNA, 600 bp, Bovine  MMBT20497
ttttaatgaccctatgttgattgctgttataaagcaaagaatattatgccaataataattagtatttctgttttgtgggttttaatgctcttgtataatgtttttctttgaggtaagtattatatgaggaatttttatattttcaataagaaaaagcccagcctggaacagcctgagtgaacaaaggagctgtatcaacccctaaattgtgttttagaggagcacratttcagatgctctcaaattcgccaccgaggaggatctgtctcctgtcccagtctcccctgccacacacagackaatcttgttctttgtgactctggtagctccaggcttcccttggagttggaaatgctcttgatgttttgtgtattgctttcccactgcgtctttctgggattaggtagtctctccatgactatttcctgcagaaaagaaagaagattctctttttccagaaggtcctggccatttctccttctgtctccttagctctgggtgcagcagtagtggctgtggtccagggcatgcagctgaggtgatgcacgtggcttctcagcaggaagcggggcacagcgggtgctttccactgctgggggg

SEQ ID NO: 19610 - DNA, 600 bp, Bovine  MMBT16934
tgaggaggttcttacttctatacctgaacctagactgaccataatataacttcctactatggaaatatctcttacagtaagacatatgccataacccagaaattctacttctcagtatgtatataagatacatatatatatgcatatatatactcagtacttatataagatacacgtatataagatatacaaaagcaaatgtttatttcatttatcttaataataataaaatcctgaaaagaagtcaaatgttttctatatggtgagtggttaaatgactcttgatatttttattttatkaaatattatgcgacagttaaaaagaacaagccatacctatgtctggggccttccaggtgtttcaggggtaaagaatctacctgccaatgcaggagatgtgggttcgatccctgatctgagaagatcccctagagaaggaaatggtaatakactctagtattcttgcctgaaaaccctatggacagaggagcttggcaggctacagtcagtggggtcttaaagagtcagataagacttagagactgaatgacaacrtattgatatctatgtttggttatagcaacagaattctaagacgtt

SEQ ID NO: 19611 - DNA, 574 bp, Bovine  MMBT06042
  misc_feature (1)..(1): n is a, c, g, or t
ngcaagagtatggcatgctttgagaacaatactggatgttagttcagtggggctggaccatcaggtgcagatagtagctgagcctgcagagctggaaatttggcttttgcactgaaggtaaggagagccattacagtgttgggaggggagggatgtgctcagacatgaatgttagaaaacgtattgagatagcagcgtgaactgccatggggggagttgctggaaatataacctaggacgaagaatggcccactccagacactcttgcctttccatgttccctgcaagtaaaagcccatcygggaaccaagctaacagttgaacaggattttcaattattctggagcaatgctataatctacttcctatgagaagaatgctgtttgccatggctgaaaatgctcaattggtagttctctgggagaaagtactcaatttgcaaaaatttaaatacccacagagtaaaaacaaaagcagctaataagaaatatgtcactgaaattgaacagaagctagaaaagtccaatttcttgttttactttatcttttcaaaagctggttccacagccattta

SEQ ID NO: 19612 - DNA, 600 bp, Bovine  MMBT19535
atgaggcaggcgtaattgacttctgcttgaaacagtcagtctgcccttggcaaaacagccaaatgtaccttgaaaatggcaattatttattaccattggattttctgagatttgtgaaaaactcaaagtstgccagactctataaaaatattagtctcaactaatagaccttttaaaatttcttttaactttcragaataaaatatgaggaattaagaccatcatgtttagtcaaaaaaaaaaaaaaaagaccatcatgtttaggaggaccacatgctcaaaagatgaccttgatgtatrttacarttttcmacatgctatataattcaacaaagttttgtgaaaactgatgctacaattagaaaataatggccaaaatatttgtgtacatgcatactgtgagaataaaacaaaatgctacactctccaacaacaagggttctgttgagtgtttttagtgtttgagtagaaatgagttcccaagggtgaaaaatccaagagtcacgtgtggatgcgagagttggactgtcaagaaagctgagcactgaaaaactgatgcttttgaactgtggtgttggagaagactcttgagagtccctt

SEQ ID NO: 19613 - DNA, 600 bp, Bovine  MMBT19536
taattgacttctgcttgaaacagtcagtctgcccttggcaaaacagccaaatgtaccttgaaaatggcaattatttattaccattggattttctgagatttgtgaaaaactcaaagtstgccagactctataaaaatattagtctcaactaatagaccttttaaaatttcttttaactttcragaataaaatatgaggaattaagaccatcatgtttagtcaaaaaaaaaaaaaaaagaccatcatgtttaggaggaccacatgctcaaaagatgaccttgatgtatrttacarttttcmacatgctatataattcaacaaagttttgtgaaaactgatgctacaattagaaaataatggccaaaatatttgtgtacatgcatactgtgagaataaaacaaaatgctacactctccaacaacaagggttctgttgagtgtttttagtgtttgagtagaaatgagttcccaagggtgaaaaatccaagagtcacgtgtggatgcgagagttggactgtcaagaaagctgagcactgaaaaactgatgcttttgaactgtggtgttggagaagactcttgagagtcccttggactgcaagga

SEQ ID NO: 19614 - DNA, 600 bp, Bovine  MMBT02952
agcactaggagaaaamcctaaaatttatgtaggttgaaatgartgaaatattatgatacaaattaagtggacagtgcaataaaagaaaatgatcctattgcattctatgagcccagtccatgtttgatgtgtaaaatgaatatatatgctttccctttttaatayagttttattgaggtaaaatttatgtaaaataacctgcatgtatttaaagtatacaatcagaagctttaatttatgtatatacatataacatatgttaagcaatcaccacagttaagataatgaacatatccatcwctcccccaaatttcctgatgtctctttataataaaatctgaccctctctatacccaaccttgtccccagaaactcacaaatctgctttctgtcactatggattagttggcgttttctagagttttatcrgagaaggcaatggcaccccactccagtaytcttgcctggaaaatcccatggatggaggagcctggtaggctgcagtttatggggtcacgaagaatcggacacgacttcactttcactttcatttttcactttcatgcattggagaaggaaatggcaacccactccagtgtt

SEQ ID NO: 19615 - DNA, 600 bp, Bovine  MMBT10792
tttaactaaaggtatagaaaaggttcaaatccatgcagaggaaaagtaaatgcatattttgagtttatccaaatgctaaggcctctttctgattctcacaagtgaccatcagacttgaactgttcaaaaatttccaaaggagcccatctcctcaccaaaatatttctatgttaaaaccttcaagaaggcaactggcccagtttttatgatcccaaattaccttggtttcaatgtaatctttgtaaactgggattcccttaggaagatttcaatcttaaaaataaagggatattaagaaayaaaaccctatcccctgctccattttcagagcccatatgccaaaattgtagcttattcatcccaagacattaaaaaaatatattattttgtgacattaacttagaaatttgtacttttgtgtggaatattctaatgtaaaactagtacattatgataaatgtccctttcttggaacctcctctgagtgaatcatcctaggaagcttttctttcattttaatttgtctattatgtcagtgtatagaaccaccttaacaagatggagttaagagaaaaaaatttaagacttagttgtagcccc

SEQ ID NO: 19616 - DNA, 600 bp, Bovine  MMBT07259
ggggataagtaactgagtagacatcccttttatccaagctgcttctgctgctgctgctaagtcgcttcagtcatgtccgactctgtgygacyccatagacggcagcccaccaggctcctccgtccctgggagtttccaggcaagagtactggagtggttcgccaatgccttctccgagcctttggacctcttcaattttagagtttaaaagctttctaattgttgccttttacttactcaatactgactttttattatctttttgatgaaggaaaatgcaaagaatactgtagcctgaartttttgatgaccctctcttgacagatccagatgtggcctgccataccttgacaaaccacatttttctcaattttgtttcatacagatgtaggcttgatgcttctcagagccatcaagcatctgaaagataaaagctgttgaacatcccagagggccatgtttcataaaactgactgtgtgtcaatagagacaaacccagccatgtttagttcagagtcaggtaatattcatttcaggctttctctgtcaataatgttgtgatattctgtgtaagaaaaatgttaactttttgttcttttt

SEQ ID NO: 19617 - DNA, 600 bp, Bovine  MMBT02311
agtctcttgcttggatgcagctagtataatgtacatagtaaatccacwgggagaytgttgatttatcccagaatgaccaaactagccaagagatccaaggttgtttccatggtttagtaatgaaccaaacccctctccactgagaggtagtgatgggacatgctctgtggttcaaattcagaccagctcaattttaggctttggttttacactggctactaaaaggaaggacttccctggcagttcagtggtaagaatcttcttgttaatgcaggagaggcaggtacaatccccggctcwggaagatcccctagagaaggaaatgacaacctacttcactattcaccatgagaaaaccccatggacagaggaaactggtgggctacagtccatgtggtcacaaaagagtctacaacttaggctaagactaagacttaggctaagttgtgtctacaacttagcaactaaatcacagtaataactagaaggaaagtgattattactacatggaggagaaggtttgtaatgaattgctaggtgaaaacagacacctcattaggatttaaacagttgatttggttatcttggagttttggtatc

SEQ ID NO: 19618 - DNA, 598 bp, Bovine  MMBT13340
  misc_feature (1)..(30): n is a, c, g, or t
nnnnnnnnnnnnnnnnnnnnnnnnnnnnnnaatgaatgaaaaacacctgttgctagaggaaataaacaacaacaaatccttgctgaactttttagacaaactagagaaaatcagaaagactctttattcagtgatatgggatgagtgtatcaaatgggagatctgttgtcagaatttaggcactaagaattactgctgaactaatgttatttattaggacttgtgtcctgatcctttacctgacttatcagartgttgtgagaatccaccaagataaaagaatataaactatatacaccycgaaacactagtcaaaaaatatcagctgtcatttgggaaacatggaaatcagatgacttcaaataagaatctgaaygyctgattttttttagaaagtctagggtatcaggagaacatgttttgtttgtttgtttttcctgcatggaaaaactatactagagttgaacagctggtttggcacttcagtytacatttgcaaattacattatttactttacatcacatattttacattatgccatactaccaaccacaagctagctttagccttttgcccctggacctttatatatttgtt

SEQ ID NO: 19619 - DNA, 598 bp, Bovine  MMBT00595
  misc_feature (1)..(16): n is a, c, g, or t
nnnnnnnnnnnnnnnnctcttcctaatctcactgggtttgcagccatgatgggaaagggggccctacacccagctccaggaaccgcttcatttctccctaatcctcccaatagcagagacagcccagggtggggcaggatggaccagcatctcagggttctttctcccacctgtgtacatcagctcagctacccagggacaagcaggcccagagacaaatgggaaacacagagagatacatgggagacattgtcatacacacagctgcccagggcacatagacacacacacagatgaaaygcactgaggaccaagaacagacgtgaacaccaatagagacagacacacagtctcagatgtccaggacacagaaacacatgtccacaccaagccaggagcccagggacatttgtgcagacacccatggactcatacaagccactctgggatgctcagacaccaggaataaggggatattcccacacctgcacaaatgcagctcctacccaagggtgcgtgctcagtcactcagtcgtgtccgactttgcgacccccatgcactgtagcccaccaggctcctctgtccatggaattttcc

SEQ ID NO: 19620 - DNA, 600 bp, Bovine  MMBT07782
agttttggtggtgacgtctgtctgggaggggtttggacttagtccaccgctgttgccgttagttaggtcttaattatttttcccccagagagtagttttcagtttctttttagtaatggaaaaacattttttttttcaaaacagtatttatacccatctccaaatgatataaaacataggatggctttttaaagcaaatgtgtattttcagtaagcatagtgagctgcacagtggargtgagagaaagcatttttgggcttgaatggagctgacccgagagaaccttctcctctgtgggygctgggccgttcccgaatcctgcacggtctggcagtgactgcggtggtggagtgcctgtgagtgggctctctgggaatgggaaagactgtaaaaccctggagtgcgtccccagaagactgaccttacragagaagttctgggaaacaaaccgcagggagactttacaggaatttttkgttgagcccacaagcaaggcacatgaggaaaagagatgtaattatagtttgtaagtctatgaaaagatgcaatgagtgacatgaaatagccattctaagtttcttcttcctgttggacaggga

SEQ ID NO: 19621 - DNA, 600 bp, Bovine  MMBT13151
tcttggagaagatcactcatgctgctatagctgacttaactggtcctcttcatcaccacatcatggcccaagaaggattcaccttgaactctaactgagagggagcttaagttcccatgataggaatgatactacgattggaaagaaaatattcaggagtcatatctgacccaaacaaaagtcatgcaagacacaggggcttccctgaggccttgacaaacaaaagttgtgatgaaggatcacatagtcatttgttctttcaacaagccaagaaggaatttgtcctggaaacacatcttrcttcatctacataaacatcaccagtcaagtagaacagtctgtgactaagataaaagaaaaagcatctgactgtctagaacagccctagctggactttaagacattttcttaagacctgggcttggtaatcaaagcttctggctttaggatctcctgcaagaactaacaacccattctgcttctggtcctcccctgtgttatgattggccaatgcctcttttacagagactttataggaacccactaattcccctcccttggacaataatattatacccagaaagawagatcaggagggga

SEQ ID NO: 19622 - DNA, 600 bp, Bovine  MMBT11385
acgaacttccccagcctttggtggctcaacctgcacttcctcaagtgaaagagaagagtttgttttccaggcaatggctgccaggcatgtgattgtctgttgatacaaggacaataagatgacatcatttagcgataacatttaacttctgatcatacaaatgacacttacttgctataatttgtaacaataagaaaatcacacacaaaaagaaaagagatcattgcaatttcagacataagctggtaaaattttagcatatttcttttgagtctcttaaaatatttttatacagtagaratcatgtcatataagcagttttgcattttagggttttttgtttgttttgttttagccagtgaaagccaccatatattgaacatttactgtttgcttsttctaaaatgttttctcgtgatttcaaaatgctttataattttaaatagctgttttatatttcatcatttgaatatatccaaatattcttaatcagcaactaaatcatttccattgttttgactattataatatatattgtttataattttgacttgcctggttcccttaagcaagaattactaggggaaggatagagacatg

SEQ ID NO: 19623 - DNA, 600 bp, Bovine  MMBT09401
ggaagaagcgtgagcgtgaggggggtgcctgctggtagacagggggatggaagccctctacctccctttcttggatggtcctgtttccttcttcccaatygctcgtcacccgggagagttcagggtatccagcttgaggtgacgaaaaaggctgttgaatgttatcatcatcagctgagcacagaggggcgctttcctgcctctctgcccggccctgggtggggctggaggagcagggacgagccagtgctccctctggggcctctgctttctctcccccgttcaaagcccggttgctgsggggcaggagtgtggactgtctcgtgtttccccatttggccggggtctcatctcttccttgcccggatgattccacctgctctgcattttctggctgttctttatcctgttcacttgtgaggatttcccccaaaactggaccgtcctccccgagcaggtcggcttctccctctggctctggagctttctccccctggagcagctttcgctgagtagccgcgaattcataaatttcttccatctcctcctcgttgaccttttctctgtcttcttcgtggccctcaggcatcagcaggtcct

SEQ ID NO: 19624 - DNA, 600 bp, Bovine  MMBT02284
aaataaccaaataaaaagagcaaagcttaaatcgaataatataaacatgattatatcttaggttttcttatcctaggggcttgatattatatgaactgcctacttccatcaggctattcataaactaaaggtaaataaatattcagactgagattattcactcattttcctgcacattcatttccagtagcttcatgattaatcaaacatgtactcttagagaatactttgaggagcaaggcttccatttcattgtggtttgacctataagttgaagagctggagaaactatacaagagkgtctcaagtactttaatcatggatttacaagcattaaattctttcttatgaatgtgttsgtgctttcacatttttctaactgaaaacattccacagtacattagagatccccaatcctggttcaatgctgtttctagttaatgactgtgtatgattcacatagagtgagttgcaaggtgatatgtaagtaatttttgatatggatgtgaaaaataactttgagatatgagaaaataggtaggccaattgaaagagagtttttgaaaaggtctgaagaattaaaagagcatgttgtgttta

SEQ ID NO: 19625 - DNA, 600 bp, Bovine  MMBT02000
aaggcatttccaaaggtagtgtcagcatgggcagtccagaacatttttccatctgttggtttttatcagaaatatctgaagtcatattgcataattaagattgctgtgacaaacaatttttaatgctttcatgtgcagtggtattttccccaaaagtcatttctgttgtcttaagtggcaaaactaggaagatccattggaaaatataaatgattcaccaactctctatggagaattgagataaatatttatgttggtcatttatcattcatttaatactcaggggcttattatatctayacttactatgttatctctttkaaatattcctatgtgagtgatttttcatagcagccttagagaggggtcctaagagatgagacatttctgcatcttaataccacatttgctgagcaactaccttctatgtttcaagaatatgtatactctattgatttacgcacagtggacttctgtgttgttgtgctgattgatatgcctgctagacccagaatcttatataaaacagcttgaccttaaaaatggtactttatgaaagtgagaaattaataaactaagaatcataggcaatagctttgg

SEQ ID NO: 19626 - DNA, 600 bp, Bovine  MMBT22014
agtctttttgatcatcatcttttcatcatctttttttaaaaaaattacaggggaacccctacattaatacatagttctgagtttcaagaatcagacatttgctaggccagcagatgctttctccacacccaccatcacagtaacgctttgctactctgacttatcaagtcttaacattcagcaggtttctgtcgagtatttcaggaatatcattaatcattctatcgccttaaaaaggtgttgatagtgcaggtttgggacaataagctaaatgaggagaaaagttatagatctcccaastcaaagcttgcttgttattcaggaactacaaaactttcactacacaatgacagccagcattcaaaaatgtgaaatgaatgcatatgctttttacagttcctttcattaaaatgcagcaatgactcttttcaatgggtaaccaaacatgcaaaggaatgcatagacagagtcactcctttccctgagatcttktaacattttataagcattccrttgtattgcttttgtttacttacctgtttctttttctatatcaggttgtaaatttcttgacggtaaaaattttaccttactcatgtc

SEQ ID NO: 19627 - DNA, 600 bp, Bovine  MMBT07271
atcttgaaatgcaactatgctaataatgggaagtggctgcaaagctatagaatctggcccagatttcactgagggaccaggtgcccagaattggaaagggcagtcaacacagcacagtcgggcagtgggtgttgaagagaataaagcatttcatgtctggaccccagcggactccagttctgcaataacctagtaatgataacctcagtcatccaaggaccccaggttgggagtcaccagtctggccacctgaacttcccacagatgcgcagaagggtaggggaggtgctgtgtctatgygggatgagaccygctgggactgccagccaggggcgccctggcagcggaggtgaggggtgaagagggaagagagggatgcaaacaggaggagggtctctggagcgttactgagctctgtcctctgcccggggctttcacaagcttcttcctcacccacacctgactctggtccaagcacagcacgtcagcccccagcccggcggggcggaggctctcacgggccagtcagagtttctgcctgtttgtcttgttatgtttctctgaagccagggacgagggatctctctgccctggttgcag

SEQ ID NO: 19628 - DNA, 601 bp, Bovine  MMBT02356
  misc_feature (1)..(1): n is a, c, g, or t
naagaatagaccaggacaatatgctcggcattgatcactgtaaattcatttttaataactgttgatttttatacagcattggtacttatgttttcttacaaggatgaaaaatagggattcatgtgaaaagtactcaatttacaaaatgtctctaggaatccagaaataaattgtaaaataaatatgaagggcttatcacacattagcttcatctcagaatattcaccttggctaaattgaccagatgagtttatgttgttttacatgtacataactcttaaaattaaaaaaaaaaaaagtragtattctgcctgaaagcatcccctaactgcttactttcactttgaattcttctgaaaattctcttccatctcagatttcttcatagcccagggacaatatccaaactatataatctggtatttcaagacccaaatttgattttttcaacttctccccaacatgagctctctttcagagaatttagtctactctctttcaaaccaaaactccccagaatctcctctaccactctcctccagtcaccgattctcttgccttgatttccctgtgaaatacatattttattttaaacagcaca

SEQ ID NO: 19629 - DNA, 600 bp, Bovine  MMBT08373
ggtgatagaagttttaaaagattaatgtgagggacttccctgatgacccagtggttaagaatctgccttgcaatgcaggggacctgagtttgatccctggttggggaactaagaccccacatgcagcagggcaactaagtctgcatgatgcaactgagcctctgtggtgcaacgactgatccgtgtgcctcaactagagaattggtgcgccacagcgaaagatcccacgtgatgcaacgaaggtccctagtgcagccaaattaaataaatattaagaatagattaatgtgagaatgaatraacacctgcatttgactagatgactacaaaacaggaatcctgggaaaaaagatagcatttagtagagttaaaagtaacatcagaagatggacttatatctgggcttccctggtagctcatctggtaaagaattcacgtgcgatgcaggagaccctggttcaattcctgggttgggaagatccactgaagaagggataggttacccactccagtattcttgggcttcgctggtggctcagacggtaaagaatctgcctgcagtgcaggagcatctgggttcgatcacggggttggaaagat

SEQ ID NO: 19630 - DNA, 600 bp, Bovine  MMBT08862
tttcaaaatggtttaaactatgcctatgtacagtcactaaatacaatcaagtatttttattgtaataagtaatttgaaaattttccattattaatcatctaagaacattcttgctgaaaacagaacttatcatgagtttgaaaatgtacttttggttttcaatttcttagtcctgtgttttgatttaggtttttaatcagatctatttcagtaaatcaaaacttaccgtagctgtgcccaaggttatgcagtttaacagagaacagccttttgtactcagcaagttttacagggtagaaygaaaacatgtttgtagattaatgatgtagtattctttgtgattaaattttcaagtgaagagtcgcagcatcaagtagtggaaataacactggggctggagttagaagaactgaatcagagctcatttatgggttgagtaaccttgggaagtcaattgtcctctctgaggctgtttttctctttagtctaggggatgataaaatccaactcatagcatcattgataggcaactttacagaagtcagtgtcaggtttcttctagttagtcaataaatatttatgttttattttataagaatc

SEQ ID NO: 19631 - DNA, 600 bp, Bovine  MMBT07535
atcagccccaccacagcagtgcaggggctgctggaccaggccagctcctaggacacgttcttcccccacagacctcaagagtacagacccagggacccgctctcccacaggcagcacatagaggccaggaagctgctcgcttggccttcactttggcagttcctctcttctccttctcgtgccactgccctctgaccatttgcaagtcagagaacagaggccaaattgggaaagtgacttacctgggtctgtggtaggcccctgcccactcaaatgctttctgcagtcatttttcaaaaygttctagcttgggagtcctccttggcctagttgacaaggattaagagatttcctggcagtaggggtgagttggggcccctgaatgtttgctgaaggagtgagtaaatgaatggatgaatgaatgaaaaaattagtgaatggatacctgaatgaatggatggataggtggatggataaatgaatgaagtgagtgaatatggaggaaaggaaaaaagaaataaatggatgaatgaatgaatggatggatggatagatgaaaggataaatggatgggtgaatgaatgaatggatggatggatg

SEQ ID NO: 19632 - DNA, 600 bp, Bovine  MMBT03670
ataagagagatggagacagaggcttgagacacagagtcacaggggagaaggccatgtgaaaacataagaagagattagatttatgcccccagaagccgaggaatatatgaaggtattagaagctaaaagaggccagaatggatttttgaagggagtatgggtctgacaatatcttgattctaaactggcctcctcaaaactgttaaaagaataaatttttattattttaagccaccagacttgtggtagtattacagaggccctataacactgatacactgctactccatatgaagattwtttgattgattatgattaaatatatacattaaagataacaagaaaaatagtgaccaaaatgcacaccatgattcttggcaaagaactgcttctgaaatgacttttgtatttttaatatttaattctttggcaattacaactgtgaaaaatatgtatttacatatttttgcaccattttattggaaaattttatatgaatgctagactggaacagaataatgcaataaagtcataaaagatacaggaaattacagtaggattttataactcatggtataaaacctgttgaaaatgcagttg

SEQ ID NO: 19633 - DNA, 600 bp, Bovine  MMBT16824
ggtgtggctggtacgaacctcaccgggagtagctacagaggtcaatcccgccctctgtgccccctccctcactccccaccttgggtgcacaattctgacttctctgggaatcccaaccattagtgaaacagaaaaaccctcctttcaaaatgactcttgcagtggtttcccttggtcttcctaccttcctagcagctcctccagcttcctcattatctatacatgcaaggcggcctttacccttctctgactctgttctgggccctttctccctcccacatctccccagcttcaaacacrtatagccaacttcctgctgtgacatctccacccaaatgccccataagcccttccagctcagccagtcccaaatggaagccacttcctgcagccaccagcacatggctgggaaccagcttctctgcgtctggttttcttctcatcaccggggtttgamtgatccccggttccttcctgccttgaccctgctgcattttcaccaggtcctgtcccaggagcttccaccacctgtcccttcactccatccctactggaaacacgtgtgcagatgtctcctccccaggaagcctccccctgccc

SEQ ID NO: 19634 - DNA, 600 bp, Bovine  MMBT04732
aagagctagagttcaggaaccttatggtttcaacagcccaaggctttttgtacacacagagagaccataagaattcttgttcacttgttaaccacatctcagaggtggtgagaaataccttggagaactcatgggctaaggcgaaagaactagagagcaatctagttgatttgatcgttgtaaacagacaaaccaagtggttcaagtaaatatgctcttgtggtttgaattgccaatttagataattgtttgcttttttaattaaatgaataatcagtaagtctccactttgctttttaycccccctctatagacagagccaaaaattgtttttatttgggtggcatctgagtttaagattgtagaaataataataggaatgaaaaatgccttaagacaatcacttcaaatattaattcctcagttagaagcttcactgtctcatatcattcataagacactgaaaaggagcaagatactccttatgagctctgatttcttctccctggatgtccttggctaagccatctctttcatttgtttaaaaactatgtagtccagattctgtttaaggacctgagtggtacagagatgaaaagc

SEQ ID NO: 19635 - DNA, 600 bp, Bovine  MMBT03609
tcagagacctaattttcctgccacagtgcttcacataaactattcctagaagaagcatagtaactgttattaaaatcattgcctagatcaggaggctgttcagggttaacatgccgccaaagttaaatttctccagacaggatgaccacaaataaaggtcaaatgactccttactgccatctcatcagaatacagagtcttggaataactgaatttaaccgcctattttttcagcacatttccggttttttggaccaatgaccaaaatatttggtggttatccctggtgctgtttccctycctggccacactggtttccttccattttcctcagggtgaagacgactggcctatcctgcatgttccttcattcctctcctgatcctgcctcagtgcagaggccaatgccatatctcacggacaagtttctgaarcttaataaaaacagaagatgccaccatcaatcttatttactcagctaaccaacaagcccaggcaatgtgcacaggctggaaaacagtacgaaatccatggctctgaccccctgattttagacatagatgagtcatagtgacgacctcagcagagagattccagatg

SEQ ID NO: 19636 - DNA, 600 bp, Bovine  MMBT20726
tcacaaggaagtttaaggaatctgagtaacatttaaaacgaccacttcagtagattaaaagttgagcgtatcatcacactgtttctttgatatgatcactcctcctccccatgatattaaataagaggagggggtgaactctaacctaaactctaacctgcaatcatgtttccaaggaaagagaagcgagatgggaaaaacaaaaacaaaaatcaccaactcatttagaaactcatgaaaggcagagtagagtttgcacatatcagaccgatttgcctcggcgtgtgaatcatttaacargaaaaaacacggactgactcagcttgagtgagctctttctgtctctgctgaggtcctcccttagtgtggcccctgtcgctctcttcagaacttgttccgcttctccttgctcactggagagaaacaggaagtgttgtttattaataagcctgaccagggtcacacccaaggcaatatcagggctttacctctcctgggcttggggagaggttcaaagatcaaggatatgctcctggttagaatgagaggcaaggccagactccaaaaaataaactcacaactgggacttgacataagtcc

SEQ ID NO: 19637 - DNA, 600 bp, Bovine  MMBT04154
tttgtttttatcccagtgtttggcacagagtcctgaacaccaagtggggcccctgaaccctgcctgacaccaaattgcattctctaatgtcattcctgttttgctttgtttgataaagactggataataacaaaggggaaagggagcgagtaattaaagtgtgttttgtgaaaactttatgagctaagtccgcaagaaatagagtgtaacgtttaaaagtagggactctggggccagacacagtttcaagtcttggctccattctgtcttagctgcaggacatttgacaagttactcaamctctctgagcctcaatttttttcagttgtaaaatggataaaataataggaccagccttggagagctcttgtaagaactgtatgagggtaatacaggcaaatagcttagctgagaacttggcccacggtgcccagcaaaggttaactagtattatcatctgtactggggagaggtaacttccccagttcccgtaagggatgttaaggctgaaacaaaaggttggcaagataagagttctttaaaaaggacttgttattttctgttttacactacatggtgtggtatacagcaaaggcaata

SEQ ID NO: 19638 - DNA, 600 bp, Bovine  MMBT01121
tcatccttgtcaaatccatggccaatgaactgcaaactatcagaacaaggtgttggatggagtcgatcatactttgatgagtaaaccaacttgacttgttcatttatgaaagaagtttgaaatgcgctcaggcttagtcatgggctggtgagggtgttttcctcttaaaccactcttcatagaggacaacctgtttctaaaaatgcaggagacgtgtgggcaaagtgaccccagtccctgaataaattgctgcactgacttttctatgagtaaaatattataaattcgaataacctcttyggagcatttaaggtacaggaaatgagtcatcgaaagaacctcctgcagcctctggatgctggcaaacattttttttwaaaaaccctcattaattagtgggaaagtaaacttgaaaaacctgagttaatattattttgaaaagaaatatcgtttatgactttcacgttctttccagtataatgacttcaaagtatttcttaatccagtcctttggtgaatgtgttatttttttttaatacacgagaataaaattcagtcatgtgcatggaaagtaagctgctataacaaagcaaactgtta

SEQ ID NO: 19639 - DNA, 600 bp, Bovine  MMBT13711
aaattaagaatgttatgataattttgtaaactatccaggtgtaattaccatccaataaaaataaaatatttcataatactcttagttttcactagatattggtttataagtcatggttctattgtttaccttgtcacaataaagtccttaaaaccaatattctttatttgttgatatgtactaagtggaaatctttataatcctgggattttatgtgcaaaaagctgcccaggtaggccccagctccgggtgtgcagtacgtacaggctgcaggagcatccttgtgatccaggggcctakgttggctggacctttctcaagggacccagaaataacacagctaaaagtggagaaacagaagctaagatctcagctgatatgggccttgcatgaggtcagaggacaagtagtcatcagtaagagaacagtagtgattagaactggaagttgagaaaaagaacaaggctttatgagggctaaatcagctaaaacagttcaaaactaaggctctgaaggacaaagagtgtaagaatattccccatcccctgtttttagtcactggtttaggggatgatttagggggttcccaggtggtgctag

SEQ ID NO: 19640 - DNA, 600 bp, Bovine  MMBT08484
tatttccacagacatttttaaaagtctgttctaactgtctcagtgatttaatttctatcataggtttccttttctttttttttttttttttctggtgtttggccatgcctgtgggcttatggatctttagttccccaaccagggatagaacccatgccccctgcagtgaaagtgtggagtcttaaccactggactgctttggaattccctatcatacatttcaactcattctcctaaacctggttgctcagtgtcagcatcattgacatttaggcagatgattcttggcagtagaggccraggcatygtagcatcctgagcagcaactctggtctccactcattagaggcccggagtgccctcccccaagctgtgatgatcaaaaatgccaaatgtcccctggcaggcaacttgttccccgttcattgaaaagccattgtctaaagacataattcacttatctagtgtgttccagaggcaataatgtcgaagggtrgaaatcagtgactagatgaccttcagggaaagaaaacaaaattaaattataatgggacaagtaaaataaaatcgtttggtttctgtatttccacgaaaggcatg

SEQ ID NO: 19641 - DNA, 600 bp, Bovine  MMBT15306
agagccagagacatatggattaaagtgtcatgagagrcatacgcagagacaccaagacagacacacttcacacctgacacagggtcacttgtggagccacacgcaggcacacacgcccacacggaacacacgtgcacactcacgaacagacaactgtcaccagccagctcaccttgaagggctggggctggaagctggtgggcttccagaggacaccgatcacctctccgccatgctggtcatagaagaaaagagccaggtgtccgaaggcctcctaggaaagggcaggacaggaaaaaractacaggtgggaacctgatagccaacgccacggccccaactcacctggaagcctcctcccaagggccagccagccctcaaggacctaccctgagctgtgccaggtagagctgaggcggatcatagcccagcacgggcataaagggaggagggccctggctcactgagcaggccccggcagaaggaggcagctggtgagtccacggcctggcggtgccgggggatgtggcggggagccaggcggatcagcacgtcgtacatgtccaatggtggccggaacacggtctgaagaagggcagg

SEQ ID NO: 19642 - DNA, 600 bp, Bovine  MMBT12849
acctatggtactgaacattttattaacataaatatgttttctttcttataaacttttttggtttaaagtctattttgtctgatattactgacagctcctttttggttactatttgcatggaatatcattttccatcctttcactttcaatgtatttttgtctttggatctaaaatgagtctctggtagacagtatatagtcagatcatatgtttttcggtattctgccaattttgtcttttcattggagagtttaacacctatttacgtttaaagcaattagtgacagggaagcacttayccctgtcattgtgctgtttgttctctgtatactttatagcttttttttttttctttttgtccctcatttcctgcattactgtcttcttttgtgtttggttgattttttttattgtgaaatatttaaattcctttcttatttccttttgcgtatattctgtagctattttctttgtggttaccatgggaatacatttaacattctaagtttataacactctaatttgaatttataccagcttgacttcaacaacatacaaaattctgctcttttacagctttgtcaccacccctttttgtt

SEQ ID NO: 19643 - DNA, 598 bp, Bovine  MMBT06014
  misc_feature (1)..(72): n is a, c, g, or t
nnnnnnnnnnnnnnnnnnnnnnnnnnnnnnnnnnnnnnnnnnnnnnnnnnnnnnnnnnnnnnnnnnnnnnnncttggctgtactgaggtgggagcttcccctgctccctctttttggcagtctgacattttgaacagatgcgatccatgagaagctataattatagtacaaaccactgccagggttttttctgccggggaatttctatgcccagctagagtacctctcggtgtgatctgtatatcctagattagactgtgccacactcagttcaggcctgcttggtttattgcctcttgwtgaatacagagaaactataaagggaggcatgatctgcttacttcaggaacaccaatcaagaactgacagattatatttaaaaattgtttcctgagttagagtctccacatggggactcagtgggtggaggaggaacacaatatccttctayctgctttcagacaggtggcaaatcagaatagcttttctcagttttactctataacctttcagagttcatggaaagtcctcagcttctgcagtggtttttgagaaaatctgaggtttcatctttcagagggctcttcaccatgggaag

SEQ ID NO: 19644 - DNA, 600 bp, Bovine  MMBT16216
gtgagaaagaaagtctagaaggttctgggcagaagattaacatgaaactttgaagagayactctggctrcaggggaggctcagatagactatttagaatggaactgcaattaaaatatgggggaaatttatccgtattttggtaaacatacatatggcttactatgattagagggcacagcctttagtatactagtaataccttgcagtgtgatatgcaaacttgtgtgatataaattatatacatgagatgttaaaacaacctttaaagaaagtaaaaatgcataaagtaaaagtgacrgcaaattattgtaaaaggacataaacatccaagaatataaagttgattctctttccaaagaaaaatgcatgtgattggagaaaatatcttaaatttcttgytctttataacttaaaattatattacatataatagtatgtattatatataataacatatattgtattagtcactcaattgtgtctgactctttgcaactccatggactctagccaaccaggttacwctgtccatgggaattctccaggcaagaatactggagtggggagctattcccttctctagggaatcttcccccaa

SEQ ID NO: 19645 - DNA, 600 bp, Bovine  MMBT05237
tccagtattcttccaggagaatcccatggacagaggagtctggcaggctacagtccatgaggtctcaaatagtcgagcgcaactgagcaccacgcaacgagtcttcttatttcacagtgaacatggcagtgatggattgaacgcgttgaagagaaaagtgattgattttctgacaagaagccattctatgtcctcttatcagccagccccgccccctaaactgaaagggtaagaagctaaatgctgaaacaattaaggttacttgacattctaactcctggccactagaggggggtagcraccaggcttcttctctccccagctggatgagaggcctctgcccaaactgaaatgttatcccttgaagagtgacaattcagcatacggttctgttcattagcttttccctctgtggagtcagtgtttcctactcaagtaaaggtagctcgtctttcctaagaggagtatttccaaccttgttagtgggtatagagtctttggccgctttaaagtcatagcgcctggatgtggggcaaatagaatggtgcacacaccttccccacccctaagacatagtttccacatatgatctgatatatg

SEQ ID NO: 19646 - DNA, 600 bp, Bovine  MMBT07824
tctccacatgacatcattatctttaatatagattatggccaaaacctccaaactcttctcctgtcccctgctgtacagctgtctcctctttgtaatcataacatggtagtccagcggataatgctgaaacatagattagatccagtcatttctctactccaaaccttccacggctccccatttcctcagtaaaagtaaaaatctttatagtgatcaacatgactcgacgtgctctcagctcttctccttgttatttctctgtcctcaccattcagggggtggatttcaagcatccttacytgaatcccttgttttcctgttatattttccttatagtttggttgtttgaaatgttcttctcctaaatattttcatgatctgctccctcacatcattcagatttgtgttcaagtgttacttcctcaggaagaccctcagccctgactaaaatagctcttcctttctgtctgttgtattgtcatcagtaatgcttttcttgactggtccaactacctggccagaatataaactccatggggcaagagttttttttgtcttattgccactgtgtttccagggactagggcaacacttggcaca

SEQ ID NO: 19647 - DNA, 600 bp, Bovine  MMBT06346
agaactgtgaccaaggaaataggagatctcatatagcagacagatgaaaaaaattcccaagactatggcaaaaaaggaagtatccatatgatagttgtataagaggcctagagaacacaaagactctgttttagtagaaggtcagatgtctcagcaagtcaggtgttcagaagataaaatatgcttgaaaatgagataaaaaaaatcatgatcatatgaaaaaattattgaggcattttatagagcttttctggggtgatattcataggttgaaagtaaaccaaatcaaaagagggcaawttttaactccagtttaaatacaagaamagcagaggaaggaaatgtaakcagataatcttctagactcagcaatgaacactatttaaaaagttatgatggaaaacctaaatgtttttaaataaaaattgaggcataattatattgataggaaaatagagrgtaaaattgagtcaaaatgatawaaccttacaaaagaagctgacagttaaggtttaaactgatacaacagtatattcatattctgttgacctgtggagataattaccaaataaaatagctaaatattaaatgtgtttgctc

SEQ ID NO: 19648 - DNA, 600 bp, Bovine  MMBT19364
aagatagtaaaggttgcaatcttaatgcccattttatatgcatgacttgagttgagcccttatgcataattcatgcggtcatttacaggcttttacacgactccccctttaaaagttaactaacaaagggcaatatcagccatggcaacaaggatattatgtaaatctatctcggtaccaacataagagggggtgggttgattaattaaaaagacagaggaggacaggaggcaaggtgcacatgcctcttgatgttactcatcatttattaatgtatttaattgaaaagaattttgaagsgtaaatatgtgtttgtatattgccactggstgggagagcactgcttaaccctgtgagcaaccatttgaatcagtggaaaacacccgatttcattcatttcatttcctctcctttcaaggaacagcatcatgagaaggtgaactaagtcttgggtttgatatcagctttagcccattatactaaccgaggtacttaactcctttgaggctcagtttcttgcatatagaatatacactaaaatacccatttatttacctggtacagagtgggaggggactatccaagggtatggataggagg

SEQ ID NO: 19649 - DNA, 600 bp, Bovine  MMBT15386
ataacatctaggatctggtgccaaattagtgtgacctttggcaagtcacttcccctctgggggcctgtgttctcatctctgtactgagaatattgccctgtgtctcagctctaaatggtagactccaatccaagagttaaactactggagtcttgagctagaatggacaggagggtgatgaaggcttggtcctgcctgtgggtgctacctacccccagcatctgatggtacagcaggtgatagtaagagatgccgggatgaggaaaactgaatgaatagagtcttgtgttccacgctccrggagctggagaaggaggaagggaaagtggtggcttcgggactgggatagcctgaaacttcccaggcggtccttgaatttggaaatgggtagaatttggtgtcttgggtgagaaagggaatgaatatcagctgggacacctagggaggtggttcctccaggtgaagcaacagagacgagtacaggaagtggagtcattgctgaaacagatcttatcccaggagcacaggtctgatccccaggggaggggagagccagggaggagccagggagacctgtggggctcccaagggcttccggga

SEQ ID NO: 19650 - DNA, 600 bp, Bovine  MMBT14011
ctatctcaataggacttccctggtggctcagacggtaaagaatctgcctgcattgtacgagaccatggagaagggaatggcagtccactccagtattcttgcctggagaaatccatggacagaggagcctggcaggctatagtccatggggtcgaaaagagttggacatgactgaacaactgatactttcactatatctcaataaagcttcaaaaataaaaaatgaatgaaactacgagggagaaaggacagcttttgcccacagttgtaagtacactcaacagtgctttcaaaggggarttccttgtgccaggaaacaggaagacatctctgaattacaccagctagttagggttttgggaggccatctgtgcacactaggagtttttggatgcaagtaacagaaaaatccagctggttaatgtcttggctcgtgatagggtgagtgttcagggttgttttgatgatgatgcggccaagccccaggttcccttttcggtcccctcctccgtgatggttcctttttcatagatcctttttcctcctctcatgaccaccaagatgcctgccagtttcggagggctgtttgatccctggttc

SEQ ID NO: 19651 - DNA, 598 bp, Bovine  MMBT02513
  misc_feature (1)..(36): n is a, c, g, or t
nnnnnnnnnnnnnnnnnnnnnnnnnnnnnnnnnnnncatttctcaacagtatgtgtaataggtgttgatggtacttagtagaatagctttttgacacgaaaattacttatgtccagtataatcattcagattctgacagttcaaatgcttatcctaacagagatgactttgctcttgctaggaagtgaaactgacataagggttgctgaaggaaataaaatatgcagcactctaatatgtgttagaaacagtcttctcattttgcttaagaattttgagatccatacggtgattcaaagytaaaacatttgaaaacgatatactagttttgttttagcccacacattttaaacattcactgagtagtccaaagggtttatagtaatacagggatgtctttgtaatgtattataagatttttgaatgaatttgtaaaaaatgcaaatgaatgaaaggttttaaatcwttcagtctggcctagtatctagaggttggagttcaaatatatctccaaatacagagttcttttgagagttagttgagtatcttaattgcttaaaataatctgtgatcatcatgtatacctgtggtggattca

SEQ ID NO: 19652 - DNA, 600 bp, Bovine  MMBT02746
agtcataaaacaattgatatctggtagtatatccagccagaattcatgttggagtgagttggaaggaaaggattgtggtgacttctagcattctcgtttgcaagcctgatctgtccccttattagacctggtttctcatctgaaacagtaatgccgccgctggagacaggaaaccagacagcagtctgccctgataagggagggcattgtctaagggagggagccctgcttccccctcaactctccttccttgaaatttagtagcaataaaagagatacaatactacaaacgcggtttcwcaaccagaactaagactgttttctcccaaagcaaaaactggctctgctttctctggattgtcaccatagtttaatggcacattagaaaaaactattagtatattttgtgtctgttggtcagagtatttaataaatagtaaggtcctttctctagcaaagcaggttcctagagcgattggaaactcattccattgtgttggcaggtcgaatacattaccatttccccatctcattattaaggggagccagacaccaaatgcagtcacttacatggcccttcagcttctatgtaaccctggg

SEQ ID NO: 19653 - DNA, 583 bp, Bovine  MMBT05153
taagaaggagaagaaggaagctgtcatcagcggatgtttgtacctgtgacttgggttacctgagtagagcattcaatagtctttgaataatgcaaatatatgccatgggtattttacacatcatagacatatttggggttggagaatggggttctagactgatgaatacaaaatggcattcaaaaatattaatgatctgtctcctgcctataggcctctttcctacttatatttctgtagtaccaaatttatgtatttacccaaatgaagcttatgacatcatgactttgtgccttgtayggtacatgtcttctatcgctcattgtcatgaactcctatttatccataaaaaactcagctcctgtgtctacttctttgataaagcctttcttgatcctattctccaaaagagttaaccctttccttatctttgtggcatttatatgtttaatattatttctcattatactcatcaaactatatgataagcatggtcagatgtttttctcctcaagccgtgtgcttattggccttttcatgaggttgaagtatatgaaactaccatttttttcttaatcagttt

SEQ ID NO: 19654 - DNA, 600 bp, Bovine  MMBT21472
taattcagtgtagtggcacacttacatttagtaattctaccatttgggaggtctagcaggaatatgatgagacttctgacaccattttggatgtttttggttaacctcctagtgataggagctgcagctccctaaaatgtgagacatttctgtttggagctgtggccttttatgcctccatttgtaagttatttccccctacttctctgctgatcagagaaacagtctgttgtttgatacgctctatttaaacgagactgaactccttgataatacagactggcagcttgaatttttttsaggggaattttaaagtagtataattgggaatagaagcttagttgatttctgtttttttattagaatccttttctgccaattttagaagtaggtgatttctatgtattgatatggcatatcagctggggataactagagttgtatgtgttgactctagactataataagttaatcaactataccttggcttcattcaattttgttttcaacacagatggttgttattgtttgttctgggcttgcctccctctcagggtcaagaaagtgactcctcggagacctctgtgcgaggaccccgga

SEQ ID NO: 19655 - DNA, 600 bp, Bovine  MMBT02579
tatgtgcattttgaacactcaaattacatagctgatccagttggtgcacttggattttaactctcccgggacttgcagcagcctgcctcagacacagcctgtgggcttcacttactggttgataagctgcccacttctcattccscaccctgcttctgctgggctgctctcctgaggtcttctcacttctaagaaaagattgacctgcaagcccaaacttctgtgcacacctgctgtctctgctctgcggaacctcaggcccttggggccccttgcccatagttctcagttaccgacccycataccccttcccatggaattcaggccagtggtcttgttttcacttgagaaaaacaagtgaaaggcagtcagagttgggccaggatgggctcttgctgggccaccagctttgtccctgagcttgcagcagcagtcaagtggggcccaggcatcccttggaggaggagcatttggcctaaagcagtgtgggaaagccccaccactccctgtggaagggagcctgcgctcacggggagttttcacaatcaaaacacaaagccagagattctgtgcttctctttgactcatctgcctgcctct

SEQ ID NO: 19656 - DNA, 600 bp, Bovine  MMBT09605
tgctgcagtcatttttcttgtctaatatttgtcatcttccattagtcaggaatactaatgagtagtcagggtgtccaaatgacaataattcaccgttttcccagtcatactgagactgtttaaatgcagctrtaggaactgtaaagcatttgcrtgttactgctatggtctaggtcccataaagttctttctggagttttgctcactaaatcagccctaacgcactttcatcttctgtgtgcgtgtctcggcttttcactaaagcttgcttctagatgtttgcttggttggttcctcatyccctttaatgtccgttcagatgttascgctctggcgagaccttcactgyccttccccccaaccactctctggtttagagtgttgctcctctgcctctctgccgttctgtagtagtttttcgtcttatgcggcttttgttttgttttagtggtacttatcactaactgccttgctttgtttagtcccttcttggttattgcctttttcctactaaaatacagggcttctcctgtgactcaggggtaaagaatcctcctgccsatgcaggagatgcaggagacacaagttcgatccccgggt

SEQ ID NO: 19657 - DNA, 598 bp, Bovine  MMBT02999
  misc_feature (1)..(47): n is a, c, g, or t
nnnnnnnnnnnnnnnnnnnnnnnnnnnnnnnnnnnnnnnnnnnnnnnaaggagggaggcctgtgtgaaggctctgacgcttatctaggcacaggatggtggtggcatggaccaaggtgctctaaagataagaagggaaagaattctggactcatgttgaaagggagccaacaagacacgttaacggattcgtggtggaataagagagaaaacaggagtcaggatggcttccaagaacctgaaggatgaaattatcattcaatgagatgtgatgggtaaattctgcatgtaaatgtcttcmttgaaaggtagggcagtgacctttagatcaggtgaattggggtgaatgggtggacaatctaaccagtgcccagattcagcaatgcagggggtgatggaaagacaggctgaggagaattcaggccaacaagccattgtcagggtcctccctggtctcctggacacagccaagaggcagagagcaaggtggtctcaggtcacagcrcacagaaagcctgtgactgactggttttccaggagccatgctaaattcctgatccctgaaaactgaccgcttgcttttgacaaaggaaataacc

SEQ ID NO: 19658 - DNA, 600 bp, Bovine  MMBT04840
agatacattcccaatagaagtttcaatattgaatgrgctataaaaccatgtaataacatctacaagttcatttggaaataaatggctagattggagtttcaacctgggttaataattggtgtaggcatattgacctttgtacttgttcatgtggattgttatttgctatgtcactggaaarcctgattcagcatcacacaagggtatctggagagagaggtgtgaggaccagaactacagggtgatacacgttctcattctcactytgtttttataataatattaagtctaaaatatgtyttaacaaactttatggctcccaaagaggggagagggatacattaggwgcttaggattgatakatatacactactatatataaaaataaataatgacttactgtatagcacagtgaactacattcaatatcttgtaataacctataaataaaatgactctgaaaaagaatatgtatatacatatatatgtatgcaatggcaccccactccagtactcttgcctggaaaatcccatggacggaggagcctggtaggttgcagtccatggggtcactaagagttggacacgactgagtgactt

SEQ ID NO: 19659 - DNA, 600 bp, Bovine  MMBT02772
atgtttttacatttagaaaaggagtgtgcaactaaggattaaacaaatatttgtgagtcagattatttttttcattgtttggcactgatatattgttgaaatgtattagaatatttttacaagtgactctttcacagtagaattgagaatgcaaaagaggaagtagaaggaaagaaagcaactggaaaaaaatcttaaaaacttgagattattacagagaaaaatcgtcctgtgacttcttctgaagataaagtggtagaataaagttagaaatttaaatcttagattaaggcaatattragtgtttttatagatcagaataagatgccaagatagagtttaaagtccctttctggaaatctcttagaagtgaaaaagattattatgcacctaattgaggtataattttgcctgagatgtaaaagatcaactaaataacctctcaaggtccttttgttccaatctttcaataattatttaaatgaaatcaagaattaaatgcttgctttgacttgcaatatcttagtgcactgacctgggctttgtaacttaatatctatgagtactaatctattttaactagatgggaacaggaaaaat

SEQ ID NO: 19660 - DNA, 600 bp, Bovine  MMBT16790
ctttttatggcctggtaactcattctttttagtgctaaatagtatttcattgtctgaataaacagcagtttatccattcacctactgaaggatatcttggttgctttcaagtgttggcagtcgagtgaagcagctataaacatccatgtggattttgtatggatacaagttttcagctcctctgggtgaataccaaggtgcatgattactggatcatagttttgtaaggaactgtcttcctgggaagctcttccaagtggctgtagcattctgcatcccctctaacagtgctcctgtctstccacatcctcttcagcatctggtggtgtcagtgttctggattttggccaaactgataggtgtgtggtgaatcctattttcctgacccagataatgagtcttagtcattttagtttcccacacaatgttgagtccataataattgctaaataaatatttgctgaatgaatggaagactttgccttcttttatgtaggttgttgcattgaacagcctatatgtttttctgaactacttacaaaattgtcttcaaaactaaaccgggcactatggagggcaggaatcaaccagaccttactc

SEQ ID NO: 19661 - DNA, 600 bp, Bovine  MMBT18306
taacttttctgtaggtttgaaaacatttcaaaatatattattttttaaaaccacgcaattgcttattttaccaaaccattttagatcaaaggctcattgcttaatttcaaccaattctgttcttcagggcaaagaggtaaagatatggtatgcctaaccccaaaccacaggtatgcaaatcatgttgctaaccaggccccaattcatactaattcatcaacatttccatgcccagtgctgcatcagctctctcaggtccaactgagacaccaaggtttgcagacttcacttccaatgtcrcaggtgctcattgctcaaaacagccccacccctgctgtgatgcaacaaagaggtactcctttgtggtaacagtccttatctgtcatctgtcagcctttggcaaacatgtatctcttcagtgtccctctgatttttttctacgtgctcttcctctgtcacctcattctctgctcctgctgccttgagggcttagggggtagttttgaggctcaatagttcgtggggacacgacttagcaactaaacaacaacaacctcctcaattagcatcctacatgcagggtctccctccgaagtgtcc

SEQ ID NO: 19662 - DNA, 600 bp, Bovine  MMBT04241
gggttctcaagattaggaaaagaatttccatttgttagtcacattttctcctctttgcatactccattatttctaccccctttgttaggcgacagttctttaaatttataaactcattgcagagaaccaatgaaatgatcattgcacatctacatgggataaaaggaaaccttcagaaaattgggatcctagaactgaattgtgtgctgagaattgaaagatttgatcattatatcctccttgactggatgctttcttctttactaataggcttaactccttatacccaagcacttatgyagatgattctatgtcatacgtgatatttatttttggtattcctcgtagtctgttttcctcttagtcgctcctttcccgtcaaagtttcccacaatatttcctgccttgttttctcttcacggtcttcacaccactcctgatgacagcgttcattagagagcagtcagttttgctttcatagttattctaagcactgagcagtgatggtggatgtatcagggctgacatgttccatcaatccagggtacttgaaaaggaatggttaaattgatgccctaaagtttgatttttgcttcaata

SEQ ID NO: 19663 - DNA, 488 bp, Bovine  MMBT13609
gaaaagttccagctgctgataaagccccctacctggtgagacagaaggagcctggagtggcgtgggaaatgagtcataggcagcgtgtcttcgggaaagtcaccttcattccttctacttcccactttcatggcagctgggccagtaggggttggcttctgtgtggggagtgtgagggcatggtgagggagtgggactgggcttgagactgagtcccagcctcaggctgtgtcctctgttcctcagcaaaaggccaaagataaccgggcagctcaccgcatcaacaaggtgcagaaggtragtgggctcagggtgcgcaggggcatccaagtctggttgtggggcagcctccctgagggtgggggtcagagggcctgcctacagcagcctaactgttctgtgcctggtctcctcctgtagcaggctgagagccagatcaacaagcagaccaaggtgggcgacaggcccgcaagactgaccgaccggcc

SEQ ID NO: 19664 - DNA, 600 bp, Bovine  MMBT11990
gcacagcacaggacggggagcacggggcaggaaggggagcacggcacaggatgggagcacaggacggggaggacagcacaggacggggaggacagcacaggacagggagcatggcacaggacagggagcacagtacaggatggagagcacagcacaagatggagagcacagcacaggatggagctggggaggcccttgctccacccagcaggagcccacaagcccagcccctggagcaggaatcttcttacctcctatgaggatcacacacgctaagctgtgtaaactggtcgtgagcaygaagtgatactggatggcggcctggtgtcactttcattattaacaatttgaaaaagcagattaacgcaccaggcccggcttaactctcttggggctcccgtgaggctcaggtgaaataacagaacacacagaacatcctaaactctcggtgtgaattaactgcccaagtcctctaaacgccctgccccttccagaggctgttttaaaagaggagctgacccaggagcgtttcccccttgccaggctcctgtgctgaggcccccagagtcaagagccccagggctgctctccatgtctgtg

SEQ ID NO: 19665 - DNA, 600 bp, Bovine  MMBT23001
aggaaggaagcaagaagagaaagcataagcatacagataaaaataatagaggtcccttctcttgcattttctaaattatgtttagaggtggaagcaaaattataacatattctaatgttgttctcaatatatgtagagaaaatatttaagacaattatatcataaacaggggaaggtaaaggaatgcaaagggaggtaagatttctgcacatcacttgaactggtgcagccaatctggaaaacagcttggcagtttctgaaaaactaaacatatattatacctaccatatgagccagcartcacattcctgggcatctatcccagagaaattaaaatgtatattcacacaaaaacctgtacacaaagatgtataacagctttatttgtaagagtcaaaaattggaaacaaccaaaatgtctttcaataggtaaagggttaaacaaaccatagtatatcgatagtatcaaatactagtcagatataaagaccaaagtgtacaatttggatggatcttaagagcattatgctgaggggggtaaagatcatttcaaaggtaatgcactacataattccatttatataaaattctcaaaataac

SEQ ID NO: 19666 - DNA, 600 bp, Bovine  MMBT22302
cctgcctcccctcctctccacttgccagaatgcctgccccttctactccagcccttcatcctgcttgatagcatggacccagtgtttgtaccccatcgcctggataaaagctggggaagaagaggaggcttcctcaccgcgttcttctggctcactcactgtaggaagagaagggagcaggggaaagaacgtgtacactcactactgtgtgtctacatgtgtgctggagaaggcacagcctcggaaaggtgacagccagggtcttctctgttgtttgtcgtctgsgaaataacgtgacayttactgatgaccagtgacttgtctgtttcagcaaaaactatatgagaatggttctgaaggtttcagacagggtgctgacatcacatcgtgtacatctgatgcttctacacacttgagggttttttaattgaagtatagatgatagagtgttgygctcgttttaggtgcacagcatagtgactcagttttacatatttagacattctctcttttcttttccattatggtttaccacaggttagtgaatatagttccctgtgctatacagtaagaccttgtttatccrttctgtgtacaata

SEQ ID NO: 19667 - DNA, 600 bp, Bovine  MMBT10846
gcctcaaatgcaacttcttggttcttatttctagaaggagagcttttttggaacttgaggaatccttctgagagaaattgatcagagcctttgcatctgagactaaactcagtgtattcaactctgctaaagtctaaacatagctccttccctatcaacataatggtctttcatgattttatttatttatttttgtgtgtgtgtgtttatttatttatttatttttattcaattttaattaaaaaaaaattatacatgtgttccccatcctgaaccctcctccctcctccctccccatayggtgtttgggatttaggagattaggatcctttatcaactctttgggtaaagagcaagttgttcatttaaccatcttatagtctggaaggcaggattatggagacaatgtacaaggctttttgggaccatctgaaagtccagctatcaagtactccagctgacttcacttctgcacttgaactcctaaaagaagttaaggaggtgagtaaccaacttcccatttgtggatattaaatcttagttgtggcatgggggatctttcattgtggtacgtgggcttctctctagttgtgatgcaca

SEQ ID NO: 19668 - DNA, 600 bp, Bovine  MMBT05181
ttaagtccttcagttttgatgaaagctttgatgtttgattagagaggataattagaataattagggaaggtttctggcttttattggtgatttagacagtgacatgtttatggctaagctatggcatcaaccagatttcatatttatatacatatatttttttccacatctcttatgtttaggaaagaatattctgaaaataagttgaaagtagaaaattgaccttgattttatgacrtaagtcttggagtaagccaaccatttgttttgggaggtttctagagctgatgaagaaaactstctaaaagtcctcatccttcgtgaatcagctggtgctgttgctctgcattctgtttaatcaagtcaaaataattttgggtttaatagatttttggaatctcctgtacctaaatggaatgcttttgccttaagtgaatttgacactcaactccctagagtgcctttattatcagcatgttttcttcacaccttttgcatattttcatgtattaggaagtcacttctcttgtgactttgagcgttgacatagatcatgtggtttatccaaatcagcctctccttcccctggtgctgtgctgc

SEQ ID NO: 19669 - DNA, 600 bp, Bovine  MMBT08339
cttggggagacacatgcagagccatcacatcactttttttcagacatctttcttggtcagttataatcattttgtttgtccccactcccaatttctacttgcctctagtccatcctcctcactgcttgccaaagtgatccttctaaaacacaaatctgatcatattcaaaaagcttttgaagggtaagttttatggtatatgccatatatcagtacaacaaacaaaatcgtctgaggtgccgttgcctacaggataaagtccaaactcctttgcctggcactcmaagcccccactctatyttcttggcctcatctctcatgatgtacatcagccacattgctagtgtctgctcatggccttctgcctagaatgctttatgccccagccaactatttactgtcttcttcagtcgaccagagtgcaatttacctgtttaaaatctatcattttgttatacattgtgcatgtctattatggctcatattaagcaatgccttggattatagtaatttatgtatatgtctatttcatatactttaacctgaaccccttcagaaccatttctttttcatttcttaagttctttgcacctagcccag

SEQ ID NO: 19670 - DNA, 600 bp, Bovine  MMBT12125
tttaatctttatttgatctgtatgcattggatttctaaacaggtggctaacatcatagaaacttgtgatgataataatagatttaacagagaataatactagagagcttccagaagcttaaaaaatcttaaattagaatcctaaatctagttarttcaacacagggtgtttcaaccttctcaagaagctgtttccttcataggtatggtcagtaatcacccactagaatgtaagcgttcatccttaactaacctctctcttaaattacacctactcttcgaatatatgccagtattcatkgtattagattgtgtgaataaaaagcagtaatgtatattttcttcccttataagaaatattctggtggaaataactataaacaataaaacacaagtattcttayatccttataaagataagtacattgtattgtgggattttcttcagtaaaggttagtgattaatggattggtgtcagcttgcccagacaaatgttactaagctgctggacttacattatgactrtattatcaagtgggtgaaagcactgaaaagaaatcagataaaaatgagactgacttaggaggaaatgattggtta

SEQ ID NO: 19671 - DNA, 600 bp, Bovine  MMBT04893
attgccatttcaagttgacctcttttatccaaaccagagttatcttaagtgagtttagataactacctaaattagtcatcattaaagactcacaagctctaaaaaatttgactttaagtcgtcttacttttagaaactttgttttgtaagaaaatgtaaaattcaccaaaatatagaaaaatgattttaatattttttcagttttcttttttagatgcgattcaaatttattcataaattttatttaaataatctgctctatctaatcactaataatagaaaagaatacctctctggcarcttgtattcatcattgctgaaaacccataggacatatttaacagtagaatgatcttgtgtttccccactatttatgagatgaaattctgccaaaagaaaaattatggttgtaataagagagatcctatattttcataatatatatacaacttattttagcaagttgaactaacagttaaatcttatactggattcactttttaaaaaataaaaaaagaagcaaaccagtatttctactctttcatgtttaggtatttgttatattctttgatacatttaattttgtccaagttgataatt

SEQ ID NO: 19672 - DNA, 600 bp, Bovine  MMBT11826
tactactgcagttgtatgaaggcagcattaccatcatgtgatggaacaagctgatgatgatcaaagtacacaagttgacgcagtcatttcagcccagtcacgacttcggtcaaacccatcccccagggagatgcgcagctcttagaatgcggagactgattacgaacctggtttcagtgtcctcagaaaaggctctcccaactcaactttccaatccaaatctctcagatttgagcctgctctgcttctcttcttattagtactgagaccccttcaagaatgcctgatttttttcctttmcttcacacagaccgtggctgtcttcaaagactcctgcctagaaagaggcttttcagggtcccattagagaaaagcccattcagcattgggcgaggtagctaaaaacagggtccctcccctggggggctggtgtgatgcccaacagcacacagtgggcgctgcatacaatgctatttcctgagggcgagtgtctcgatggccagaccaggcctgggattccctgagggccacaggatgttggcaagctggttctaacagctgcgcaagccaccgcaggcaaggacagagtgggggccatgg

SEQ ID NO: 19673 - DNA, 601 bp, Bovine  MMBT09037
  misc_feature (1)..(1): n is a, c, g, or t
ngggattctgtcagatgcagagatatacacggcgggtcacttacattgccacttcatacctttattactgcctttgctaaaagctgcttaactgccagaagacatctgcccattatggaagcaataaattgagatgtcacaaaattatgagaaacaggtgcttcaaaatacaacacaaggggattgtcatagacttttctttttttttttttctttttagmatctctggtttcatgtgtcttttcacagatagatgaatccttccttgctccagtctgataaaaggaaaggaaaattaacyttattkagagagattattaatatatgcctgctctgtattcttaatatatactgggccatttaaccctcacatccattctgcaagctgcataatctcaacctcattttctcaatgaagaaaataaggaaggccccaagtcattcattcagaggcatccattgagtacagtatgccagtgacttcatggatcactagagatacgagaattgatcgtaatatatttttcataaacatatcaataatgcaaggagaaatattatgcacmgtgttagagattgggcgacacttgtgctgaggctt

SEQ ID NO: 19674 - DNA, 600 bp, Bovine  MMBT04478
tgaattttctctttgttgttcattctgtccaatacaattgttgctgtcatcagcgtccattggttcagtttttactctcatccctgcttctgaatgaggcaaatcatcaggcagagaagccaagcaattctgaatcatctcaatgactcgttccagatgcttttgaaacctctcggctgtctcaagacgttgacgtttctgcacctccatcatgactctcaaggtctctcttgcttggtggggtcggtattcatttatgagatgatgtacatgcacaaaaagcagcttaagatcttctarcttctcttctcgttttatactcccagggctccgtatcaagatatctaagaggtctaagaaattaataaggatagacatattgagttttctcagttctttcttgtgatcaaactgcataggatgaagtcgttcaataccctgactttctaaagggcggatgataagatcatcacactggaactggttgccaaacatcatgtaactgtcctttattggaggtggaggcttgggagcgaggccttcctgaatattttcatctgtatactccttgatgtactgcatcggagggggtgggagggc

SEQ ID NO: 19675 - DNA, 594 bp, Bovine  MMBT10881
aaattttcccattttgagcctgattttttcccatttctatcagggagaatgccagggggaaaaatgagttaaatataaacattttaaatgggcatgaactaattttctctgatagagaagaaatagttctacttaaagagaacaagacctcacctgcaatatcttgcagttcttctgttcctcacctctgttctcttctagtcatttttccgagactctactttttgctcatcctgtcacccttactcttctacttttcctgatatatcacaatcactcttactccacacactttgattytatttgttcatgtctctaccactgtaataattgagcatttcccccatacatcttatattaacttaatatgttttctattgctgcataacaaattaccaaaaatctaatggcttaaaatcataccgatgtattagttcacagttttgtaggtcagaaatccaggggcttcacctggattctctgtttaaggtcttgaaaggctgaagtcaatgtgtctgctgggcagtggaagctctggagaaggatctgcttccaggttcattcagattgttggcagaaaccggttccttaggg

SEQ ID NO: 19676 - DNA, 598 bp, Bovine  MMBT13778
  misc_feature (1)..(17): n is a, c, g, or t
nnnnnnnnnnnnnnnnncatgtcacttaggaactaaacacttggtgtttggcaaggggagatattttaaggcttgagagttaataggtgaactgtgaatatatatattttttcatacactgggatatttttgtcttkgaagcaaattaaagccttgtcttccaaggcagggagttatgtgcaacatactaggattatcttggtatatttttcaaaatctttttctgtctagatattttgatagatgatgagagatattcatrttactttaaatatgttcatcgattggaagatagttgasagggcagagaatgttcatataagtcagagaattaagaagcataggcatgcaagatgtttattactttataataataaccccccttgtataacccycctttatacaattgcktattatctctccctcatatttattattacacttatttagctaatgcttcaacttttgttggtttcaccagatttaaattttcatacagtcagggactatttatatttttcaccattacattcctggcccataacagatacttgaactatatagctgctgatgaatacaagctaagaatacagacatc

SEQ ID NO: 19677 - DNA, 598 bp, Bovine  MMBT06634
  misc_feature (1)..(69): n is a, c, g, or t
nnnnnnnnnnnnnnnnnnnnnnnnnnnnnnnnnnnnnnnnnnnnnnnnnnnnnnnnnnnnnnnnnnnnnaactttgtttacatggaatgctgggtttgagaaatgcttgatttattactgtgaaaaagtattcatcctaatacagatgtagaattactgctagaaatcagcaatgtggagaagctttaaaagcacaggggagatcttgtgcatagctctttaaggtaagtgttaatgttctataatattaacacacgcttcacactgctgtcctgatgactctccgtaaagaattacttkattcattcctctaaaactcttgtttatgatttacttttattgcctaatactttataaattataattcacttctttgcacatttgaagttgcttttaaagataaatagaatactataaatgttatatattttatacatattaaaacgcaatgaaaataccagaagtatgaaatgtaaatatatttatttcatttttaattgttttggtgggatgtttgtaaaatgtaaattaatatctgtgacaacaacttgtcactttgttctttaagttcattaatgtactactaataaaactgtac

SEQ ID NO: 19678 - DNA, 600 bp, Bovine  MMBT02930
cagatggatggtaactaaagtcacacatgctgtttcctcagatccataatccatgatatttaagggccactccataagccaaaatacctatacagtcagcaaaccaaaggaggaaacacacttctggattctatgagttcaagatgttctttcaccttataaaatccgatcattcccacagaaattttccttttggtctaaagctttctttactaggtattagcctgaggtaaaaatgtttagaaagaggaagcacagatgaaatatagttagctactgtgtgatttaagaaatggaaargaaaaataaaacactagggattaatgttcagataataaaataactgtataactctgtgttatctttaacctaaactctcctcctataatttcaaggtaaaagagctccactagtacagaatttttaatgattcactggtgtgtaatttaagaatttggagaggggtattttcagtgatgaactactgcatttgatgcttttaacttgtcttttatcaattactaaattttaaaactttgttaaaaaatcataacatttaacagcaattttttcttctaaaggaaaaagaaaaaagaaagc

SEQ ID NO: 19679 - DNA, 600 bp, Bovine  MMBT12662
cagccttgcccctgaaggttcagtgagatgctggctgtcgacccctttgcacgcagccgggcacagagtaagcacaaggtctggtgtccctgccagtataacccgtgtccttgcctgtgggacagactcgagggtaggaggggcgacaaggaggacttcagaaagccagaacaaagcatgcttggtttttcaccttggtagaagagtccgttcrgtggcttcatatattacttatttctttttgcaggatgctttaagggacacagaggagagacttttaagaactacagagctgagatygtcctgctgttggctctggttattttctatgtaacactcatcattttcacttgcgtaagtatcttttgcaaacatctctcattattaaaagatcacctggggcaccaatcttaatgtgttttgtagatggtgcgaatcatttaataatagcaagggacctgttctcagaaccctggccttactgaggtccccagacagtgagactctctactggaggctcccagcttgttctccatctggtggttctgcatagagacgtgcgtggagaaagtgaatcaggaggtgaagaaagtttgtgaa

SEQ ID NO: 19680 - DNA, 600 bp, Bovine  MMBT01237
atccactgatggcccaaagcaataaacataaacttcccttgagaaaatacttgtggagagaacccagattctagttataacctcataaagcactgtattctctcatttcatagcttcacccacataccattttcagccagaatccacccccgggacctgggaatctccactggattccatgttcttggtgaagctgtgtcaaaaatgctttgccagtgggcccttcttcccttgaggctcatcaaatattgctagtagagagttttctggctttgaatatttcctttcctcaggtacccrggaataccgtgtaatttgtaaagataactggggtaatgaatgcgcactgtagtccgctcttcccagtagtaattggcgcacctttcatctcctggcaagcagagtggttgggattaggaccaaaaggcagctatcatctctctcatttcctgactcagacaaaaggcaaaaaaaggtgcctgtctgtgctgataggtgtctgatcaaagcagctgaaagctgtcagaagccagccagcctgagcagcctggctgctgctttctgcagccctgcctttgatcggccagccgtctaactgcg

SEQ ID NO: 19681 - DNA, 600 bp, Bovine  MMBT05596
ctgtaatctgggtccatgtcttgcctctttcatagtctatgagctccgtgagctggggcatgtctgatgcttctctgggaccccagggcccagacccaacttgcagcagaggccgccacacctggctgagtgactctcactgctggtcctgaacttgggcagcaccttcacaacccagctgggcactgtgctgcctctccaagttaatttcttttcctgtgtgtggtctctccattcattcattcattcattcatcctgctttgtgccagatgctatggtccccatcccctcttcttgaytccttgcactactagagaactcatccccaacccctgggcagcccagcagactatcttrcccataaacagtacttggcaaatattgattaacaatcagttgattaatggatgaacaagatattccatatagtggaatattactcagcaacaaaaagaaccaaagtgctaacacatgctacaacatgaataaaccttggaaacagtatgctaagttacagaggccagacacaaaaggtcataaatcatatgatatcatttatatgaaatgtccagaacaggcaaatttatatgaaatgtcca

SEQ ID NO: 19682 - DNA, 600 bp, Bovine  MMBT09228
agtctttcagtgatctgctggtttagcctagccagaaaggctgcccacctagaaagaaggcaagattcatgttgctcacatatcctatcaagaaaaacaaaaaaaatcagacttctttacacttacctccctgctctacctgcaattcttgcagctcctcttgtgataaagatgcacattctggagcgggctcacagctgtcactagctgcaccatgttcagaattcaccatctcgatatcagacccctagagaaaaagcgatcatcagttaattgtctatcagctacccaaagctagayttgactacctgtaaatgcttccattattaaaagtcccagatgctgctataatccaaagggaacagtatctattgcttttgttcaatttagtccataaaacctacagcagagaaacagcagaaaggagccacagatttagactctgaaaggagtcagtccagaagtcaaacactctaactgcactaaaaacccaagagtcaatctgaatcccagaggatttctacatttagctatttctattaatttgcttctactcaacatttatggaactattctagccaaggcattttgctaggtgtc

SEQ ID NO: 19683 - DNA, 600 bp, Bovine  MMBT05946
gagtcctctccaagggcacaagaaaggaaataaccctataacgtattctgttgcataattagaaaatacacatagaaccggaaatagcaactatctcagttactatgataatatggagaaaagcatttttttattttgaaagaagcgaaatttggtacaatacagctgtctaccacaatcttgttttctagaaaaaaaagaatggaaataaaaatgactaataaatgtaagccaaattaaacaggtatatagtcacaagcaaaactgatactatgacttcctrctttgagcaagtctctygttgcattacgtcagtaacctttcccatacggagccattgaaagctaggaaagcggaggtcagcttggcgtgatgccccatcagtggggacaaatttaattcaacagacaactgggtgcctctggagatttacgagcggaacagaagaatgacatgattagactcatgcctagggaaatagcagtggattagactggggagacactgagggttcagagccacagtaatccaggcaagaggttacaagaggttacatgtgcgaagtcacagctccccacccaaaaaaaaaaattgtacatg

SEQ ID NO: 19684 - DNA, 600 bp, Bovine  MMBT01169
gtacacatctgatattcaaatayatgaatcaagaatctggagggtttcctattgcccaccagctggcaggaccacttaaagctgctaagtgttccatccaaagttgcaagccaaaaaggaaacggactgtaaccaaaggcatggcttctcagctgacaattatgaagggaagagagaaatttggtctgtctaaacatctggcacgagcaaacatctggtctagttttccctcaatatgtactaatcatgtgtaccagagagaaataacaaacaaaaaaaatggaaagcggaacattaacmttttcattcatttctagggaggaaagaaaataaccccttcacccatgaggtcagagtagttaatgaggactttgaatcccagggattcaaactcgtttctctagttctggcaaaatcttacagtgttggcttctgagtgggcttcccagcactgggctttcccatgtgggaggggagacagtaccatgtcctttccctgtgggaaaacagaactacttgaactggctgcaaactgtactccggctccctttatttaggcagagatgctgtcaatgaacagtgtgaaatccttcagaatct

SEQ ID NO: 19685 - DNA, 600 bp, Bovine  MMBT01152
gtggsctcgtaacaatggttacacgaggtgggaagtagaagagggaagagtttggggagcagataagttgctctagtgacaggaatgaaaaagaagccaggggtctggcttctggaaggtgcctcttttaagggccgtctaagtcctttgcaggctcccactaatgccgtcttttttcctcttctttttgcatccagcatgatctacactttagtgagctcttaactcsaagaccacgcacatycacagagactgagatgggagaggcccgaggctgtgcagtccatcctgctggtgacrggagcagggaccagtgtggggatgtgacagacagagatgggcagatactcggaattgggagccggaagcaggcagcagccagcgcccgagccagcccgctgtcacacgtgtggtcgccctgtgtaccagtcttccgcgtttgcaccccacacttggcctgtagatcccttctgggcagcaggggcatgtgaggtgatgaaacacgaaacctcttctgaacgagaattgctgcttcctgaatcccctttattgaaaggctccctgaagttcatgctgcgttcctggtctgtgggtgtgatg

SEQ ID NO: 19686 - DNA, 600 bp, Bovine  MMBT06901
ttcatttttaacatatgcaatggccaagtcctcttatagattaaggactcagtgaattataggacaccttttccaaaggtccccagagaagggagaattctatccctttggcgaaagatcttataggaggcaaaggaaggcataaagacaaaagtctttttctaagacaaaagatcacataggagattgtaattccccttagaagaatcctttctaacatgatggacccatcagtcagcaacattttggggcactctactgagtacaaggtacaattttgtacagaaaaatggacgacarcattctagaaagcaacacttggaaaatgtaacaaatgcattaagtcccttatataggagcatttgtgttgagaactttcaaagatgcaaatgtgtgttcttcagtgtcaggtgggagtgaacttgcagcttgccctctgtctcctactcctgatgacctttcagctccaccatgtcccacctcctctctgtcctccagtcagtaactcttcttgtctgttcactcgatgccagcccctgtatgccagctgttgtacttttcaaggtactgaagattgaaaattctttattttctgtgtgt

SEQ ID NO: 19687 - DNA, 600 bp, Bovine  MMBT18915
atatccagtagcatattgggcacttactgacctggggagttcttctttcagtatcccatccattcagtatttctagactctgaaacccctggggcaatagatgggaatttggataagccttgcacagggatggaagcatgaagagagatcctctccttctgaccaagggggaatcaagcaggtcaatgggcaatcaaaagaccgttttcccctcaaacaggcagtgagggttcccccagcatggtgacattggaratgtgtgcacttggtcgggtttctcagttctcccatgctttccargtctttccaggccatgagaaccatgggacctagaaccactttaactaagccgcatgaagttcttccttccggagaccactggccttgattctggccaaggtgctgagagatcycagagcctcctgtggtgggcaaagacttgctgctagcagctggtcccacgatggagagcttcatctcttcagtactccttgagtaacatgtctaaatgaaaaactccctcgggtttaagctctgawtgtcttaatctgtcttaatgtcttaatccttcattttgaaggacattatttttttggtcta

SEQ ID NO: 19688 - DNA, 600 bp, Bovine  MMBT18914
taagccttgcacagggatggaagcatgaagagagatcctctccttctgaccaagggggaatcaagcaggtcaatgggcaatcaaaagaccgttttcccctcaaacaggcagtgagggttcccccagcatggtgacattggaratgtgtgcacttggtcgggtttctcagttctcccatgctttccargtctttccaggccatgagaaccatgggacctagaaccactttaactaagccgcatgaagttcttccttccggagaccactggccttgattctggccaaggtgctgagagatcycagagcctcctgtggtgggcaaagacttgctgctagcagctggtcccacgatggagagcttcatctcttcagtactccttgagtaacatgtctaaatgaaaaactccctcgggtttaagctctgawtgtcttaatctgtcttaatgtcttaatccttcattttgaaggacattatttttttggtctataattataattatagattggcccattattcctcctagagtactttggaaaataatgttattccactgtattctggcttctgtggtttttgttgcaaaatctgccatcatttgt

SEQ ID NO: 19689 - DNA, 600 bp, Bovine  MMBT22889
aacatgctcaggaggttaaggaacttgtccaaggtcccaagcttagggagaattgaaacccaaggcaccctgagcatgaaattcatcctagtccatccaggatacctaactgcctctcwcaggttctacactattgaagatatcttgacatctttaggactttgactagtttattcagagtgaagacaaccaaaacacttttatcctgactctccttcctgtgggggaacctaggtgatcgtggccaccaatgtagcagaaacctccatcacaatcagcgggatcgtgtatgtgattgaytgtggcttcgtgaagctccgggcctacaaccccaggacagctatcgagtgcttggtggtggtcccagtgtcccaggcatcagccaaccagcgagcaggacgcggtggccgcagccgttcagggaaatgttaccgcctttatacaggtaaatgtggcttttttctcttttaggggttttgcctttctcctagtcagcctgggcatcagagaatattacaggtatctacccctattaagcagaacttaagacccagatcttcctcacaaggccttctgtaatctgacccccaccaccttcct

SEQ ID NO: 19690 - DNA, 598 bp, Bovine  MMBT14996
  misc_feature (1)..(150): n is a, c, g, or t
nnnnnnnnnnnnnnnnnnnnnnnnnnnnnnnnnnnnnnnnnnnnnnnnnnnnnnnnnnnnnnnnnnnnnnnnnnnnnnnnnnnnnnnnnnnnnnnnnnnnnnnnnnnnnnnnnnnnnnnnnnnnnnnnnnnnnnnnnnnnnnnnnnnnnnggaagaacaccagaggaggggccacagagatggagaccagagattcaggccttggctgcattcccaaggagcctgaggcatccaggtaaggaaaagtccagatggtcccaggcagcagaatagatacttaagacccctcctcaccttctkctggaggccctgggggactctgtgagtctccgggcacaagtctcccagtgagttcactggccccatcatggagaactgatctgatttccggaagatgcctgcctgccctttgtccccctgagcctctgggaaggctctggattcagctgaattaagaggcaggagatgatcaaggtgttgggtgcttgggcaggagtctccatggtaacagagccatctggctttcttgcctggcaccaggccttgtgacttcatgatggaatcttctctgccaggcacagaggtttcccagggggaa

SEQ ID NO: 19691 - DNA, 600 bp, Bovine  MMBT00743
cgttagtaacttttaaagaaggacgttgtttgtgtgtgctctggttagctttctgtgtagcccttcttgtagatgtttacttgaccatttcacaagggtaaccactaacacgtaaagaaaaaggaccttctactgccagtgttactatgtccaagttgttatcctctcaattcagtgttgatgaaatccaaatttagtctcgtttttgttttagaaactctctagatatttagaaataagtagaatggagctttctctcaagttttccaaatattaatgaaaacatcctgttactcataraactataggtgtatcttgaaccaattttatatcagtcttttattttgaatgttcatagctttgactttggcacagactacaagaaatacactttataagtctcttgctcccaagtctctaaattgcacattctgaaaaactggctatttccgcgcagaacatagagattgaatgcaaggctataattcactttcaggttttctgctgatgacataaaccaccagagctcgttggtttatgaacagcaaccggacacagagattgaattatggcatgtgtcggtgatgagagataaagaat

SEQ ID NO: 19692 - DNA, 600 bp, Bovine  MMBT04250
aaaacccaatgaagtcgtagtaattcctgtgggtcagatgttctggttgttatattagtttattacataacctgattattggtaattttttaagatactgagaaatagttattttacactttttgagaaaatttgatgctttggggagatttggcacttttcaagaggaggcatttgttgtrtcataaacattggatatctttgccattaaagggtgtcagagttcacaggtaatcacaagtcagactgttgaaaggaagaatggtactttttcagtcagtgcagtgatggtgtgagtcrgatctagatacagtttatttggtatgaatcacccagtccattggggcagaaaatcctggagaccaaggttaccaaaaaaaaggtagagagatgcaccttgttctaagtttggaaaagcctgttttatatggggtctgtatcaatcagatacagagaactggagaactgaaactgttaatgttgggagacagatatgaagaaagaaagacattctgtaaggaattatatcccataactgtggggctggcaagtcagaatccataaaacaggtagaaggaatccataaagcagaatccataa

SEQ ID NO: 19693 - DNA, 600 bp, Bovine  MMBT08961
gggatcttctacatttcagtcctctcgggcgaagcagttagttgtcttggcaaaggtcatgcaggtctatggtcacgtttgagaccaaacccacagatttaggtccacctatgctctgtatttctactgctgtgtgtcatcactgagccagcccaggagactctttggcctccctagttagtcaaggattagagaggcagtcttgacatttataaattctgttatatcactggtcatgtcaaaaagagattgtttgttgccaaatttgtgggatttgggaaaagattctgctgtcatggmagactggctagaaggacaggctcctctttcactcttacagaaaatctactcctgccccgaagcttgagattccatttcctttgctttgataaactacaagtggttttaaattgagtcataaatttctccaggccttttggagaccaagcccctgcctttgattccctcacctcctgcggcagtgaaacctgctggagacctactcacatcctttgtgcacatttaggctgggagtttgaaatttacaggccaagctttgcagcacgacctccactttttaatagcttgaaaaggaaccag

SEQ ID NO: 19694 - DNA, 600 bp, Bovine  MMBT01901
gtggagggcttatctgggcaaagtgatggtacactggtaaatagattgcatagttttgaatttgccagaaagcttcagcttctgtcttatgctacttggaccagtcaaggtatccctcctcagatggcaatactgcagcaatcgagttaaaaagaagaattaaaaaagaagaaaagaaaagccccttaagaaaagagagacactctttgatttcttcagtgctcagggttgctatttttaacttaagaggttggtgccggacactggggtataaacactaaatctaccttgatattcaargaacccatactgtcacaatctgtgtcaaaagaactttggttttgtgttcaaacctctctattgtttgaaagcttctgtgggagccttgctttagagctgcactctcaaaaagatacctgatttctaccaaaatctgaactggaaggtaattgctatttatattacctactgcctatcagacactgcaaagaccggctgtcactaaacgttaaccttacaacttactacttgacttccagtttgactttctgttttgttctgtataaccaacacacgccatttattccctaggaagaagct

SEQ ID NO: 19695 - DNA, 600 bp, Bovine  MMBT12486
attatttgaagacactgaaatgacttgtttaaataggatgacaaataaatcaccatttgataatttcatcaaatttaactcagtaattcaactacaaacttaataaaggtcttgctaaattgaccagatttatttttcccagaagccactgattcagtagtcctttggcttctagtggtcccaacactttaaaattcaaagttccttatgagtctttgtcagtatagtattatagctacatacaaccaagacagaattagctttaggactttgtaatagaatttaatctaatttttaagygctttaaataaattatatagtcatgtaatgtgaacatagtttcttttttgtgtgtgtttttgccattgtgtaagaaatcattccttttttcaattatgctttaaaaataaactacagcacatccacaaatgcctatttccatctttgatatatttatgtaggcataaaagtgaatgagtgaatcctactaacctaactatatggatctgccagcatttttagaacctgtcctgttgataataatgagagtggcatattttattagatgtagagttctgtgcttttaaaaaaatatcattt

SEQ ID NO: 19696 - DNA, 600 bp, Bovine  MMBT05869
ggactttgaaaaacctaaaacatggaccaataaatatactttctcacatggtaaagtggaattcacacccctacttctagtctatgatgtttttatggtatttttttcagctgtcatgtaattcatcaatgaaaatcattagcatctgaaaccacttagtgttcacaggatttttctgtataatttcaagttattaagatacataaacctaactgtggaacccatctacacaaaacccactcaccacacttcagaattttaaaagattctactttaaaatgaacaatacacaatggagargaaaatatctagaagtacaaataggawaaaatgagcagtgtggctttgaagattttatttcattgaatcccttcaaattctgaatttmctgtgaaaatggctgcatttttaaatactaagttaatgtaaaatatgcaaataaaactgtctaaagtcctcatcgcactatttgaaatattaattagtacttagaaagccaatgggtgggggaggaggactgcaaagcagttcacaggaagaagtgtcaagaaggaatttcatagagaaatgggtacttggagttcatagttcctttctctg

SEQ ID NO: 19697 - DNA, 600 bp, Bovine  MMBT07019
gaatatttaatgcctgaggagcaaggttatgaaatgtcaaaactactaagtgaaggatctaatttaagaggcagccagagagtctgcaatttaaatatttaaagatgatacagaaagtacaacactgaacaccaatctactccaaagatagcattttatatctcaggtttattctggaattcctcacaagtgtacaagtgatattataaacaaagacaagcaatgctgaaattacttgaagggaaaggaagggagatagaagtaccaggcaataaatgctctagtcaatggcttctcaarctgttcttcacaaaagagacctgactggacaaaatagaggtaaaaatagatttatcaaagtaatcaggtcctgaaaatggaatagtttgagacayagcatattccttgtaattaaaaactcacttcttcatcagcaygcacagtcactcaatcatgtgagactctttgtaaccccatggactgcagcctgccaggctcctctgtcaatgggattttccaggccagaaagcggagtgggtagccattcccttctccaggggatcttgccaacccagggattgaacccaggtctcctacatt

SEQ ID NO: 19698 - DNA, 600 bp, Bovine  MMBT19580
cattttaaaaaagaaaattgtttttcatgttcaaaggaataacctcaaggactctgcactcattcttaatttgctatttaacttatagcttccttggggaagcaatatgatagactatttttgtttatttatttatttattaatctatttatttatttttaaataagttttctattttatggatacccaaatgaatttggagaggaaaactgaaatgtccttccacctagaaaggtagaaaaacatccatactcctgtgactaaatactgacctaggtttaatggcttaaaactgttctkctgattatgttttgtttattcttatttttcaaagtgaaatattccaggaaatttaggctactatacatgacacattattttataytttaaaaatcaatattattttatattttaaaagtcagttgtgtctgtgttaatgtaaacaatgaattatgcttctcttttgttctttctttgaatccacggagagtgagacagtctgattcactcaggtggacagttcaaattaaaaatgyttttctaacattgtgtcttatacttttaaaatacaatttggttaaacaaatggcaggaggaagt

SEQ ID NO: 19699 - DNA, 600 bp, Bovine  MMBT13216
tgtaaattctcttctattgccactgaagaaaagagagaacataagaggagataccattaattaactaataatttcaaagcttaggttggagagcagatttcaccaactatattagcattgtactggtctgtttaaaaaccgggctaaagatagccagggctatcaaaatattattaaaactgtatttgatctatgaactttgagcaattatagatatagaggcagagaatatgtgttaattaacataaaacctctgattcaaagtcatgttcactccaacagaggctgtcatagaataastctcacacatcacatcagatcagccgataatataggagaaaaggaaataggaatctgagaacgattatgacagagacattcccttatcactaactagctaataatcttataaattatctagggaaacaggagtgatgttttgcagtgtatgcaaatacagagagaatttgtcaacagagaatttgtcaacaataccctttatatagttatattaaatacaaatatatatatatatatatatatatttccctcttaagctaacaatgcattaaattcacacagcacatgttattatttaaa

SEQ ID NO: 19700 - DNA, 598 bp, Bovine  MMBT06078
  misc_feature (1)..(6): n is a, c, g, or t
nnnnnnaattcctttagaagattaattttggctaagcagaccgtcattgtgtttcttgaatgaattcttgggatttatcaggctctgaaaaactgccaagatgaatcaaaggcagacttgtcatgggtcttggagaaggaatgggatttctggggctgctgtggatccagtagccaccccctccctcacacccttctccaactcagcacccttactggccagctgtactctcaaggtctctgttgcccaactcagagagtcaaatattttggcaaagaaggaaaacagaccccagaatcyagtggttaagccccacttattcttgacataattgcctgactccagagtcctttctgccaaagcacgtgagatgaaaatgtttacgcagatcaactgctgcagaagggttaggaaatacaggcatggtgcttgtgcttctgtgcaccaagtcaaaaaactcgagccagagattttgatgaggagcagccaggcgcatgccagctctcttggaaggataatggtcacaggatgcttcactgggcaagtcaagcacatggaatcctgtgtttgcattcatctacaaatgccaaaagaacat

SEQ ID NO: 19701 - DNA, 600 bp, Bovine  MMBT15395
aaattctcaaaaatgcccccacactgggttcaaatgctatgtctgcctccttccttcctttttctcctaaggcatccacagggtggtccctgacttactccatgcctccaggtctagaggaaatggcaaatgaaatcttaagttgtagtcatcagagaaggtaggctgaaactttggcaggtatcagtcaagcagctcccaccccatcttccccctgctgccaccaccactacccaaacaggaaggaaggagaggaagaaattccagggatctgccaaaacccagatcccaagttctcckgggatactgaggagtatatggaaaatttctgggtatatttccaaggttttctgaagagcctggaaacacatattctgatggcttggggtggcagacctgtagagctcaaagctacagcctggtatgctgtcactgacaatccccaggcctttctgctctctaccgcaattgcctcctagggcctacccactggcttaggcccaaggttactccctccacattcttgaccccctcctacagcactgtcaaaggccctggcctaaaaggccagtcagtggcaaggacagaagagccttttta

SEQ ID NO: 19702 - DNA, 601 bp, Bovine  MMBT02768
  misc_feature (1)..(1): n is a, c, g, or t
ncttttcaggagatgccaaagtgttttcctctgcagctgttttttaaacattgtgtgtatatttttaacaggaaatctactagggagcagggttgtatctttagtaaatctactactatggctttatgtgaccccaaacacataagaacatcaatgcatccactttccatccagtgagtaytgactgagcacctttgtgctgctgcatggaaacactgggaatacagcagtgaatggaaagagaacgttcctgagtcccagatcttggagtctaggggaagaaattttttttttctcatamgagcataagcttamaaataagatgaacaatgaggcatatgaggacaataaaactgccaaacataatacagcattgttaacaaactgaaattaattttcttagaaagtattgctatgaaacaaacagaaaaaagtcctaccagaactaataagtgaatttaacaaaattaatggtgacagggtcattgtatgaaagtttaatgcatttctgtataccaccaatgactaattggaaaatgtagtaaaaaaaagacaacttacagtataaggaaacaagtcatcaaatatcaagaagtaaatc

SEQ ID NO: 19703 - DNA, 448 bp, Bovine  MMBT18583
tgtctcyctccagctgaagttctcaaatgctttcctccccaccattcttacatactcctagatgttcaggtctttttttgtggaatcttaggttgcagatagcacccacttttaccactttgtcttcactaccatcccttgactgcctgctaggaagcagtatatataggctacttcatcccccatgaaatgtgtaagcgataagaaataagaagctgtgctttgctttcaagagaaaaggctgggagtgagctttctgcaaattccttacacttagtgagttaacttgacattccttgytttacgtgggctgaagctggcacgcagcaatgccagcatttcctctgctgctagcatgtaattaaatgctttgtgaagtatttggggacattcggttatgtgaaaaacatcacagaaatgaaggttgcctttgccttgtcttttaatc

SEQ ID NO: 19704 - DNA, 600 bp, Bovine  MMBT20380
tggacatgccctaaatatgtgtctgttacatggagtggggctggaaggttgaccagcaacaatggtgatcctctttattaccctgatcagttcaggtcttgcacaatcacaaacaccctatctggcaaacacagtcctatagataactgcacctacctccttgaaagctagttagtgaccctcaattataactcaaacatgtcttagagacctcagtcctcatgccagtgaacttatcagaaagtatgaagttcagccaagaaatctggtaaatgacattttctccatcttcttacacaycctgtatgttaagcattttatagtctggagccctgaataaaatcataactgacacactctttaattcagcactagttctgactgattatttcctgtatgtggggttactatattgattgtgtggatttaaaaaaaaaatcctatcacaatgtagctcttaggagattgtgaccaagttaaacacagatttttcttttcagatgaactgccaagccagtctcctcctactatatttatatgcctgacttctatgagcctgaatatagaattttacacttagtctagttgacattcactttg

SEQ ID NO: 19705 - DNA, 600 bp, Bovine  MMBT08324
tctgtccaaatatctcagttgtgaccccagagaaaggagaaggaggtttttgccagtttgaatgggttctgtctaccagagcctttctggrgcaagagtctggagcaaggtgtaaatgagtacagtataggcaattccttttctttcacctatcattgtatttcatatttatttatttttggtgctcgggcttttgctgtgagtgggggctattctgtagttgtggtgtgcgggcttctcatttcagtggcttcttttgtttcgagcaggggttctaggtgctcaggtttcagcagttcrcctgggcttagttgtcctgaggcatgtggatcttcctgaaccacggattgaacctgtgtcccctgccttggcaggcagattcttatccattggaccaccagggaagccctctttttaaatatatactttattgtttgtttattttaattttagttgttctgyatcttcctgctttgtgtgggctttctctagttatcgctagcaggcactactctttgttgtggtgctcargcttctcamtgctgtgacttttcttgttgtggagcacagactctaagtgctcggccttcagtagctgtg

SEQ ID NO: 19706 - DNA, 601 bp, Bovine  MMBT15465
  misc_feature (1)..(1): n is a, c, g, or t
ncagagtaagagctcaggttggtatgacctgaatcctgtgttaattccaatctctcaccctcctaggaatgtgacagctcttcagctgtaggtgttttattattctcaaattcttcaggaaaaagaaaaaagacagttccaagagtaatgtattttggagacacttttctaaattggaaagcgaggacacacagtgacagaaaatcttaaatttgcaagcatcccaagttttgtaaccaaatatttcacaaaagaaaagctattataaatattgcagcaagttaaactttctttcaggatrgttctgaattccatgcccatgaatatctaaaacctgggaactgcgaattrgtayccatatratgtgttaacagtcactgttcattctgtctcctgcttcactggtggaaaagattaatatatcattcagttaataccaagtataatttattyccgaagtggtatgtttcctttacaacatcaaatctggcagctctatgctgtgctgttctgtcagctggaataatgcctttaatgaacttgtctctggaatatcaaatgtgtaatctgctacatgacttgcagctctactgctcagacc

SEQ ID NO: 19707 - DNA, 600 bp, Bovine  MMBT11913
agcaaagcaattgcccacagatgggtcatattcaaggcgcattgttgttaaccggctgtagacagtctgtgtcaaaaccagaagacatgttcaaattccatgagcttatatggaatgatttactataacagtatttgcaagatatgcagtgcatggccggaaaagtccagctaaggcagtagttggttcagtcaatatgcaaactttgctgaattcctttgcacatatgccctggactgttcttaattttcagaaccagctttttctatccataaatttaagacctaaaattgtagctamaaagtttgacaccaaattcaaacagggatccatcccattgctttgttttgcctgttacaaattcactttctaccgaaatcatttgtgaagtaactcatttatatagactaacatttcataaatagacataaattagagcatttatattcttgaaaagtatcatgaaattatatcaaacttttgaaagggtcataacatatcagatttttgggaaagccacttgaattttcttcattgctcttcatatccccaggacctagtctgtgaattgtacataaaaggawaatgaaaatattgttg

SEQ ID NO: 19708 - DNA, 598 bp, Bovine  MMBT15830
  misc_feature (1)..(44): n is a, c, g, or t
nnnnnnnnnnnnnnnnnnnnnnnnnnnnnnnnnnnnnnnnnnnncctccaagcttcctctactcttggccccattcctgctatgctgagcttggaaaattcagaccgctttcctgggagcctccagcccccaccaaaaattattaytcygccccaccatccaccatggcccctgatgttctatttcttgtatcagccaccatcatacccaaggatatgtttttctacagcttcctgaagccctggctgggtgagtaactgtgagtgaaggggatgatcttgggggcccaggaaaaggttsttttgcttactccccatggctgtctctgctaggggatgggctcctgctgagtgctggtgacaagtggagcagccaccgtcgcctgctgacacctgccttccacttcgagattttgaagccctatatgaagattttcaacaagagcgcagacatcatgcacgtgagtctcttgaacccagggtcccagctggagcattgggaaagggggaatgggcctcaacacatatggtctggaatcctgattcagctggatggctttgggggggtcactgattttcctctctaagcctcaatttcc

SEQ ID NO: 19709 - DNA, 600 bp, Bovine  MMBT12138
ctttctgttaatctcatatccttttctccaggagagaggaaatcagcctttcaacagaatattttagaatttagttataaattcatctaactgcccaccattttagagtttagaagtgtgttttggtggagtttcaaaagaaacaaggatagctgatggtaagattggtaaagctctggacaagacagctataagtaatttttcaagaatgtcatctattatgaggataacataatagatgtcatgttattctccccaaagacaccaatttcacaccactggagagcatttttcacttcycttctgacatctccaggcactcagttgcaacacatagaaagcagtgctttgaaggataaaaaggcatattcagcccgcaattttggcttgctttccctattatttttcctcagaattatgtaatctttgggttgttccagaaaataattaaaatgatcatcatctgtataggatcctgtccaatatgcttaaagatttttaatcacacttcaggtcgtgtttgagttttgcatgcaacctccactgggctagaaaaatgtaagcactaagggatggcaatggyyttcttatctaacatca

SEQ ID NO: 19710 - DNA, 600 bp, Bovine  MMBT08326; identical to SEQ ID NO: 4848

SEQ ID NO: 19711 - DNA, 600 bp, Bovine  MMBT01079
taacagactaaagataaaggagtcctctgtgcttcccacctcaggggcaggaagaagagcagaaatgcttcaagaaggcttatgcagatatgtcttgaaacagacttggaaagatcartgattcagaatgaggtaagcaaacttgttgaggcaagtcccattcaaatgttcaaggcagtaaagtggtctgaggtgtccacakaagtactaagaacaataattaaacagaatttcgcaatcttttccaaaccttttgctgccatgggacttttccttcaaacaagcttctgtcggagtccraatacaaacccatgtgaaagcaggttgctctagtttcagaagggtcggggaggggttgggcacggttaaaaaaaaaaaaagtctattaataaaattagaaaattgtaaatcatcatgggagaaaacctttgaattcatatttatatcatagtctaaagaaacactgatcagaaagtgaagttccccaaaccgacacttcattagtttttaaagtgaagagcttttggattttaaggacatttttacttaaggctggagaaggaaatggcaacccactccagtactcttgcctggaaaatc

SEQ ID NO: 19712 - DNA, 600 bp, Bovine  MMBT22281
gtgtcatgacttcacttccttcttccatttccctatttaaagtatcctttgagtctttagtataaactgaactgtatgtataaaatcctgaagtaaacatggaagatatacttcatttgttggctgataaaaggtggccagaaacaaggaatcgtggttaatttgatttctggttgaataagtcttaaagttctagatcgcacttaccatacgtggcctatccaatctgtgtccagcagcgagtagtaataggtccagaagcagtaggtagagactacaatggatctccttaatggctcyggttcaggaagtttattgtgggcaataaaaagctattgaaaagatgttgggagctagggtaagattggtactttagaaatacggctgtgtaaatagagattaagaagacagtggctaaaaggaaaagagactagttctagtgtgaggtaatgatcctgaaatactttggtccagggcactggactggtagtgagagaacaggtttacattagcagcaactcagttcatttccttgataytatttccaaagtgtaccatatttacagtcttgtatgctgctgttggtactcggttttaggt

SEQ ID NO: 19713 - DNA, 598 bp, Bovine  MMBT16199
  misc_feature (1)..(43): n is a, c, g, or t
nnnnnnnnnnnnnnnnnnnnnnnnnnnnnnnnnnnnnnnnnnntctacctagagaattcccagtgcattaattatagagtcaggacagtccactctgtcagtgagacgcatgaacctaaatatatatgaaatttgggtttaaaaactgtcatttttcacaatgcctcctaaagaatggaggtcttatcagtttagcctcttcacagcctagtcacagaattaaatgcttgtaagttttatttggtcatgaacaacatgcacactctttaaaggagaggatatgagccttgaatgaagaayataatgaagcttcccaccaaagtttctcattgatttgctagcttctaacatatgtgggcttcatcacttacctttgtagtacttaaataagtttctctgctacagagacaaggaaatccayagcataggattcaataacccatgagagatgaggtctaaagaattaaatgtggttttgctttttgtagctacagctccaatagatgaggggcagaagagtgagcagaaaccagaggtgttcaggactttatgtaggatagattaaaataaggagtctctgaaggaaatcttgatcaga

SEQ ID NO: 19714 - DNA, 600 bp, Bovine  MMBT04671
gtttccgaagtgatgccctctcatgctggtggtaccagggtgggcgagctagggcagccctcggtggctccgtctgcttatgcagttgtcttttcccctgcgttcaaggaagttctgtgttctctcaactttgcctcacttggttccccttcctgatgaccaggggcctctgcctgctgtgggctaggcagaaaccccagttttgtttttagtttccaggggctgtaggactagctttgaccagagtggggacatggccttcccttagaggctagagggacgggcctgacggggggtgcrtcccgtctctgtgatctgcctccccgagggccctgtctgggttcccagcacgaccgtcttcctcctgtattgctgccaaccagggaggcacagcactgcagcctgagaggggtcttagaggccatgagctcagtcctgtgctttcctgggattccctcctgtgacggagagctcactgcctcacagcacggcccgtggtattatcagacaggccctgtccccgtgccagcgtttcaccgcaccccaaatccttctgtctcttcccaccacactttagggttttccaactcatgcctgctt

SEQ ID NO: 19715 - DNA, 600 bp, Bovine  MMBT16285
tgctgaactttctggaatccwtcagatgcatattctgcatctttgcaaataatttttctttttgaataaatccatcataattccttcttcatcagaataatccaattcattcttatgatctcagtagatgtcatttcctcctagaagagtttttgaaacttttcaaactagtttaagtgcccattctgtgcaagttattgtttattctttcatcttctcttcaagaccacactttccttgtggggtgggactgtgtcttcagaactatgtgtgtatccttatttctctaggaagagtgcratttaaaaaaaaaaagctgttgagtgaatgaaaaatgattacattaattaattcttgctggatagtgagtaagcaataaaccaatccaaatatgggggagaaaacattttaaagtaatatttggcataaggggagtgcgaaatgaaaacaaggatgtgatcataaatcttatactaactgaatcaaaccattagcgttctcacttgccaccagccaaaatacacagcaacagccacagctgccttttctttgaaatacaaaaataagaacagttttcactgcactggtttactgtactaa

SEQ ID NO: 19716 - DNA, 600 bp, Bovine  MMBT16446
tacaaaatgaacaatacatttggttcttgctctcatgggtacacatgtgttttacaaggacactggtgatatattttgctatacaaatcacaagaagtagtttacacacagagctcatgtttttatacatttctccccaaagggtattcatatttgataaatcactgattgaaatctgaggcaattaagttgtgatgaccttggcatactagtgaatgtaatttccattaagacagtgtcagtcctttattatggtctgcctgagtttaaaaaaaaaagccaagttcggttcacggcacrtttaatttcttatccttcaaatacacacagtattttaattcacactgatcaaaatctacctggcagccccttattaggccaagttgaatgccttgcttagaatttccaytttttaattgatataaaagctgttaatctcccaaaagggaaaacaagtatctaacattgcattgatatttatttcttttagtctcatgttagaatcatgaatagaaatttctgctatattctacattgctgtaatacaatattttaaaatattttggttataaaacactttaacaatatccaagtttatgg

SEQ ID NO: 19717 - DNA, 600 bp, Bovine  MMBT09107
tatgtgggaaagagaagagggttaatgagttccactcgagtgttaggcatgcctttcaaattggaacaaaaatcatcccagagtaatgaagacatcttttccacctggtggtcagactgcccgctgaagtgcagttctgatcctgttactgctcagctcagaggtcccctgtgaccccccactgcctgctgagtgaagagccaggggccaggccagccttccccgtgcgggatctcgcacacgtgtccaggcctcacatcactagcctgtgaaatggacctattctctagataccaagcygctcagtcccatcccagcctctgtgctgtcccttctctttgttccctgctagggactggactgtgtcttccggcatttccaggtcatagctctaatcccccctggtgacttatttggggacagagcctgagaagaggtaatgaaagttcaacggggtcatcaggccctcctctgatagggtctgtgtccttctagaaagagaagccttcgtgggacttgcctggtgtccctggtggttggggcttcacctcccaatgtgggggaggcgggtttgatgcctggtcagggacccaggagccc

SEQ ID NO: 19718 - DNA, 600 bp, Bovine  MMBT10198
tttctccagctctgcactcttgcttttgaacatgccacactgtattatgtctggcatattaaagcgaggccaaggactttttttgctctaaacgtttttaaaaggtctttataattattattttggttctggttagcaatgaatgaatgactggctggacatgcttgggaattcttgctgagtgaggtcacctaacctcaaaaagaatataaatgggagctgaacaaattcttaatttaatgcttaatgaggctgacatagtttttgtgccctttgtgagtttttgtgtattttaggacwagaatattttattctccaagtctctaacagttttgtcagcccctgaaaaggcttgaggtcataggtactatgttgaaagtgcttacagataaagacttctttctcagggcacagtgggtgaagaggtgaagtgagaagcatttttttttttttctgacctcatttgagtgcctagatccagccacacctgaagccactaacccctgaccttttcagatagataagtcactccatccactctcyttttttaaaaaamcccacatccagagtattttattaagtcaaacaacaagagtgatc

SEQ ID NO: 19719 - DNA, 600 bp, Bovine  MMBT20822
gccgactctttgcaacaccatgggctgtagcctgccagactcctctatctgtggaattttcccagcaagaatactggagtgggttgccatgcccttctccagggcatcttccccacccagggatcgaactcatgtctatgcattggcagtcatattctttaccactgagctacctgggaagccccacacagttgatgagcacagcttaaagcaattgtcaggacatagcaaaggtacataagattgggttttataattctaaaaataataattctayacctgatggaaatgtaagtcgtyataaaactaatccctgtatttctaggaagtactgctcattcttcacatctaaggctcytgagttcaaacccrgattaacagtcactgcacaaactgtctgtaaaaatcagtgttcacgctgagaacagaacgcatgattagatcagtgaggccgtgatccagaagacagctgatgtgctatttttaaaacttctcactggtgtaaatcagctatcctccaatcaaattgaaaaaccagaaacttctcactgttaaaaataatccacattttgcagatattccttagaaggattatctcag

SEQ ID NO: 19720 - DNA, 600 bp, Bovine  MMBT18366
ctgaacggggccctgaaagtggcacaaaattggctgcctcacattcagggtcaccaaaatggtgtgagtgagagaagcaagcagggaaaggaaagggaaacttgtcaactccatgatggaggtacgagtctgcagggcagcaagagcacgtgccccccaggacacaccttccctgcctccccacctttcgagttctgcccattttaggctgtgccacaaagctgaatagtagaaggaacgatgctgccactgtgttgccatggcacgtgggcacttctctctaagcagaggatccagctrtggactgaacactctgctggctctgggcagtgggaagagctattctagagaaaggtctttggtatcaatttcctagtgagacaggcagcctctcaagtatagaaggcagggatgacttacactgctctgtataaatgtctgatgcttctgagattaaaagcattctgcccaggcacccgagagtcagaccctctctcatcttgttaaatggcagcaaaaactagcttggtagaaggggccaagggaaggagctggaaggcctaggcacaacatacctatagaaggttatcccaagagtgt

SEQ ID NO: 19721 - DNA, 600 bp, Bovine  MMBT08082
aaggctgattctctccacatttgatgaaaaccaagttggctcatatggccctgtagtttcaggctcatgctgctgttttgcagcctgactccttttgtttccccttccttccaagttattagggcaactatttgccaacctgatgccttaattcgccaacctgatgccttaattctaggatagtttcttatccacattctcagactccttgttactttctcttgatcatttctgcctccctagctatgttttgcatgttgaatgtagggggagtcttggaggtgaaatccataccagaayattcaagtaagttatccccaaatcctaaagcccttgggaaccatctgtccaagaagccatcatctcctcttcccaggtcccagatgagcaaagaagactgagggtgggagcttctactgaggtggaagggagcaaccgcagagaagggttgagaacctggagaaagacaaaggtgctttccatttcttaatctcttctttcygtttttaaattcattcttactggctgtccagttcattctttcatwtatttcctgagatccagagatgctaataatccttttaagtagggtttttctaa

SEQ ID NO: 19722 - DNA, 600 bp, Bovine  MMBT08299
agctaatttcatgaaactttcatttcggatgcccatatagtctgtaatgatatatgctctgtggaaacaaacacacaagacattgtccagactcagagaaccatacagtcaaagctttctggttcagcaacactcaaaagggaatttccccccttytaacaaactttcttgcttttgtctcaccagatgcgcttataaatctgaaaggctaggaggagctctgagggtgtctgggtcagttccaattagatttgaaaactgactgtggctacaccaattaccatgtgcctttcatttttkcgctgtaaggactgacaacagcttttggaaaatcaaacagaaatactcagcaaaggcatcattccatgctcactcaagtatgaggagaacagaaacaattcctgaattagwgtaactagaaaggaagagaagagctcactttcctccagttctgtcttctcaaagtcagaactattgaaaagatrctgggagtaagttttaagtataatgtcatatctgaaaaatgttcagaagaaagtcaagatttgggaaaaatttccacrtagggaagcgatgtaaaattttactcaaatacatgtg

SEQ ID NO: 19723 - DNA, 580 bp, Bovine  MMBT11409
gccttcttttcaccttctggtggctctcagaggttagcagctcttccaaacatgcctccctacctttcactgctagcatttaaaatgtggggttttgtttaaaggtagaaatttcattacaagcacaccataagcaaataattctgcctgatggcttgctgaacttctttgctccaccaaaaaacttacctttcacaattagatctataggctccttgtgtttcttttttatattaaaaatgtgtggctcactgaaagcagtccgttgtggaggctcctcagaaggtccacttttggaayggtccttgggaaaacaaatccttttgtatgctgcctgaagttcttggaccgcatcaagtgtttccttttttttgatctccaaaggtatgaatttggtagattttggtttctgatgtttatttctgaagacatttatggaagtacctggaactttattctataaacaaaaataaatttaattaaatttaactgtataaaactaggtaataaatttggtaataaattaataaaattatatccactaaatatattttacaaagtactttactgtataagacat

SEQ ID NO: 19724 - DNA, 600 bp, Bovine  MMBT01050
tcagaggatctctctttattctggaatatcaacacatttgttttatatttcaagcttaatctgttatagttaactatagacctgatttttcctgaatttagggataataatatcttgtcctctctgctgtcacgatagcaaagaccattttatacacagttttggttagcttctagtcggctttgtcaaatttagaaccacttgaacactgtggtttctaaatttagtcagagcctctgagctttaagttccgtttggcactggctgaacagaagctgctgctttgaaaaaaaaattccygtggtagtagtggggtcgagaygtgtgcacagcacagacctcctcttatttaaaagaaatacattcacttttatttgaaagttgggagctccaaggggataaataataaaatatgaaactttaaaaaatgggtcatattttagaacagctctcaagcagaattgggctcttgggtttagggcatggcwttctaaaaaagaatgaaagcaagcaagaagagggcctattttagtcgctttaaaacggacttgctttaacttggctctggagtagagcaaaatcagtccattaattgccaag

SEQ ID NO: 19725 - DNA, 600 bp, Bovine  MMBT11335
ccacagcactgagatgatgtagaaatgcgaaaaatacctgccaagggaaaacaggttagataatgatcaaagcagatccacttgaagctattatgctagaagactattcttttccctcatgctgcaagcatagttttgcttttttaatagaacctgaatcctacagatgttcagatttttgaaatttcctttcagatgataggactggttaactcataggaaaaaggtttcctgaggttaataagaacatgaatggccttgttaaatttagattaaagttaacgatctgtcttatcttcrggtaacaaaattgggctcaaattcaaaaatagagggccccagggcctgacagggagagcctagactgtgctaccacaagccaaacctgtggaagatttctaaatctcaagtaatattgctgcaatagccatacaacttacacaagatttgcacaatcacatgctcatagggctgcaagaaaccttaaataggtcttctgatttagtgtctttctaaattgtgtcgacctaaattacttctatgataacatgacaaataagaactcataaaactagctatcaactcctgatgggtacagtc

SEQ ID NO: 19726 - DNA, 600 bp, Bovine  MMBT19000
atgaagccaggacacagagtttctggcccctcaacaaattaaaagactcattcttgaaaggcagtcttttaaaaacctgaatggtcttttgaaagagttcccttgaaaatttaggtcagatcctttttactttctggcttaaaacctactaagcatttcccatctactcagatacrtgtgtttttctatcaacgcagaatcattctgtcctgatctgtgtagctatgtatgttttttgccccccatcaaagtcagttttaaggatctggagaaactgaagcacctacttcttgtccttcyctgccactagctgtgtagtatttcatccagtaatgaaaaaccacagctaattgatgcgtgaagttgttattgttcaataatatgaactaacctaacagctttgtgactgctccacatggatgtgtcctgggacaatgtgagtttacaagtggtttcacagtagtaaccttgaacattatgcagtttgcctcttcagactttcccacctaacaaagttggaaacatgcagaccagagaagtattaaggagcaggagctagttggggtggcgggcaatctgtgaaggaggaagggctgataa

SEQ ID NO: 19727 - DNA, 587 bp, Bovine  MMBT18999
cagaccctcccggaagctggcttgagcttgtcgcagactgtgaggaaccaggattccaaaccatttcaaagggttctggggagctggggaggagtctggctctggggtccttgggagacccttgcgcctgtgcagagctgcctcgcgggatcccacctcctctggagtctgggtgccggctctcaccatccagaacttctggagtccgtcctgagcctcgctggtgccgacgcggacctggggctccatgtgggacgcatactgcaggggccctactgaattggcacccatggcatagcrcgctttggagagcgagagccagccctcctccacccgggcgtttagccaggaaatctttcttaacactccttgttattctttggaactttgcattcagatgggtatatctttccttttctcctttgccttttgcttttcttcttttctcagttattggtaaggcctcctcaggcaaccattttgcctttttgcagttctttttcttggagacggttttgatcactgcctcctctacaatgttatgaatctctgtccatagttcttcaggcactctatcagatctaatc

SEQ ID NO: 19728 - DNA, 600 bp, Bovine  MMBT15510
tttgccctccagtggttatcaacaacaggtctgactcctgatgggggcccygggggcgagaggcgggattcctacacaggcacacacactctattcttttttttcaaaatggcccacagcaccattccagaccttcctctttgtgctccaacgaaaccactgctggtgcagaaccattttgataaacagcccttcggagggctgtcctcaccggaatgcttactctgctaaatgaagccttctgcggttttagacctcacccatcagtgttctcacgcttttcctttttgtgtccaaggygaatcttccctcttacacacagaactgtgtgtccgtgtttgatgtgtcttgttttcctgttcaattccattttgcaaggaggcccgccttttgggatctgttgcacagtctcgggcttaatacccctgggacttaacacaagcaccttttctactgaagaacccaagccttgattggctttcttgggtacctctggctgtgagatgagggacctgaagtcacaggtcaccatggcttctgtggtcctgtagcctccttggtggatagtctggacagaggagcgtggaaaagtttctcgaa

SEQ ID NO: 19729 - DNA, 600 bp, Bovine  MMBT17002
aaccaggagattgaagaaaagattaaggaagaacaaagcttgctatctacctatgcactcccatcctgttacccaacaaaagatctggctaatacttacgacataaaaccatttccaaaaatcacagatactaaaaagacagaagatttgtactggagacagctgtcattaaaaccccaacttataccttactgtaacccagatcattacattccctatgaacatttaaatcagtataatgtgtaccaaaatcctgttagccttagtaagcctggtattttacaaagtaaaccagacctraaaacttttgattttgaacactttttaagtaagccagaacagttgaccttgaatatggaggatgatgaagaaacaaaacctatcctgggttgggattcctagagctggagtggccaaacctcaaacggacctgctggagcttaagaacgctttttcaaaaactggtgcacaaaaacgtttccataaatcagttctagaagactataaagacctcaggggataaagagcactcggggaagaaacatcaattctatggccataattcctattatttctataattgagctattcatccttccc

SEQ ID NO: 19730 - DNA, 600 bp, Bovine  MMBT11749
atggcaattgatgtcttctgtgtgggcttagataactctgattcagtggggagtgtccaacaaatgcactgcagcatatatgtcacttggttggtttctcagttgactattttgagcatatttatcataagcatttctaatacataattccaaaaagcttaatacaatctgtaggcctttttaccatcaatgartcacactgagcatgttcctttggcctttgatgtcagtgacagagagtgtgacttagtgctcttgtgactaattttgtgtaggttgcttctatatatggaacaacaygaataaatcactccctgtatttcagtggctttacataaatacataaacagtgcatcctggtttctgactgtgatagtttttaaagtgatggtaacatgtagaccagaatatatagcatctacacaagtttacttcttagttttccttgctcttagaactgctttcaggttgggataaggccctgcattttagagggccttgtgtatcatggaaacacacacagagtacatttatctaaaaaagtgtggttatttctgtcacctgggatgtaggactcatactggcacagttcatactgaa

SEQ ID NO: 19731 - DNA, 600 bp, Bovine  MMBT17901
caaattcatcagaattattccaccaaggtgaggccactgtcaacattcatttgagggccttctacacctacctctctctgggcttctatttcaaccacaatgatgtgactctggagggtgtggaccacttttttgtgcaaattggccaaggagaagttcaagggcatggagcttctcttgaaaatacaagaccagcgcagcagctgtgccctctttctggacatgcaaaagccatctcaagataagtggggtaaaacccaggacaccatggaagccatccttctcatggagaagaccccraaccaggccttttgaatctgcatggcctacgctctgcccgcacagacccccacctctgtgacttcctggagagccacttcctagacaaggaggtgaaattgatgagttaccacctgaccaacctccacaggctggctgctccccaggctggagtgggtgaatatctctttgaaarcaccctcaagcacgatcaggaacccctggggccctgtggcctttgaggagccccactaatatcagagcttgtgcctaaacccctctctgctgccactgggcagctatttaacacactggaaacct

SEQ ID NO: 19732 - DNA, 600 bp, Bovine  MMBT20304
atacagagaaaagtactgaattccttaacttaggagatctggttttcctttaattaacaattatcttttgattttccgactacctgccctttgtcgcaaaacatctgtataacctgggtccccctcctcacctcctctgagcagttctctcacggttacttgagatgctgtctcctgggcttgaagtcctaaaagttcccactggataaaacaactctcaactaaaacaaaacaaaaccctttagatcttctttgcaaatcaacaacatcccttgagtagtccgtgcaggctccccccarccccgatcctaccmcgtctgggcacggtgctcaagccagtcctggtycctctttgtccgaaatgactctctcacaggccagccagcccacaggacccctgacaggctggatggccaaactcattaggggaggctggggtgcrggcagagtgcattttgtagacatggagaaagcactgtcaactagatctggggagtccrtgaattgtggcagatttggggcaaagtggaatcaacagggacaaaaataatttaggagacgccctgctgggagctccaaagcttctaagaagatgctgcc

SEQ ID NO: 19733 - DNA, 600 bp, Bovine  MMBT09045
cttaatgatctgattcttttatgcaactatttacaaactctaaagtaaaataaaaatatatagctaaacagtgaaattaaaaaacaaggttgttctcaaataattttatcctaagtaatctattctttggagtagaaatactcacttaatacaatatgttatttatatcaatttttagttacactttgttggtgtggctttagcccaatttaaattcctgtgtgcctagaaattacaactattccttttaaaaagtactaagaatttataacagtttaatattcagactgacatcccacyccaattaaaggtatagaatttaatgatacctctttttgataatggaacttattaacaatgtgaagcattttcctttctcaactctatagttttattcagttatctatataacaattttataaactagtaagcaaagcaagcagcattactttttttaaataacatctttaattaaagtttttgcaaaggtaaaatattaaacttaaaataggtcttagtacatcaaaatactaagttctctaattgtattccaagatggtctttaaaacataatatcccgtatatcacagaagagcaacc

SEQ ID NO: 19734 - DNA, 601 bp, Bovine  MMBT04494
  misc_feature (1)..(1): n is a, c, g, or t
nttttcttctttttgataatctgtctttcaatattttctataataaacatgtattacttttgaaataaggaaaagaaatgaggcaagaaagcaagcaaacaagaagagacaaatgatacatggagtagaaaggatttctgggtgttctgtaaagttctgtaaatggcagtcaatacatcacaattgcagaggcagattcaagttttggaaaaaaaaaaaacagctatgtgtgcagtccccagaaaatggaccattgtggaggctagaagcccagttaaggaggctatgtggcattgtgggygatgaatgatgaattcttgaaaggaataggacatggagatggtgcaaagttagcagagtagcaaggagctatagcaggagaaaaacgtaacccagtataaataagaattacatttaagacttataaaataaaaaaaaacaaagaagtaatgtccaaatggaatgagtttcagcctraggccctcaactggctctcgatgttaagaaataaacaaacaaaacacacacacacacaagaagaaataaatggttatgtgttaagaatcttatagtgaaaattattcatgtctctggaaatgtt

SEQ ID NO: 19735 - DNA, 600 bp, Bovine  MMBT13095
tgatgaaacttcttgtctttaacaagtgtattgagcaaactacaattctactgtatatggagtgtgttaatagtgtataatttggcctgcagaccaaatgataaatatggaaatacaaacttctgaatttttatatgacacccagtggttttcatagtaattagctttgactaaaaattaaagataaggacactttcagctgttggtttccgatmtacaaatgtaagaagwttgttcacctgttttgaatgtctgtttaattctagatcaatgctattattcaactatgatcatcaaagstactgttatttggcaggccctcaacatttctttatccaggtttctgagtaattacattggctttcattaacatgatcaaataccagctccctgcagaaaaatttgagtctacacacaccagttttcacttggcaacttgttctgatwacaaaactgcccttcaaatctaaaagcaacagccaaatttcatggcattgaacaaaatgatttctagagtgaagtgacctgaagtgacgatcaatcctagctgaaattttttgaagagatgtcagaggtttttttgttgttgttattatttta

SEQ ID NO: 19736 - DNA, 600 bp, Bovine  MMBT00926
tatgactgtgaatccttgatgtcatgacttatgtgatgactcctaggagtcccctgcccatggggtaggagcagggctggacccmaaatcccttcttcttccatggagagaagagtgatctggcttctcccgggacctctgtgaatatttattctatttatggttcccaggaagtgtgtttgaaggaagcccctccctgggtactttctgccagtaatggagtagctccctcttttggacctggctcagggggctgggattttgatatattttctaataaaggactttgtctcgcctcckctcctgctttctgcgtcccaggcactctttgcctatctttgctcacccacccccaccttctgcccttggatgacagaacagccaggccaagccaagctttagcaacttttattttcatgggtgagagaatccctgccaccaggggcaagaagaagtgggagctgaggatcaactgttgggttctgtgcccaagacacgggctgctgcctgacgcccgctctctatacagtcattgacagcaaccccctcataggaggccccagccagagtcaaaggcagcttctgagcagccaggaattg

SEQ ID NO: 19737 - DNA, 600 bp, Bovine  MMBT11951
actaaaatccataaatcatacactttatgggtgaattttatggtatgtgaattatattttrataaagccatacaaatcctccctcccagggtaaatgaataatctcatttatatttaaataaaaacatgtgtatatccctggttgattggccaaaatgttaaacatagttatttctgggatggtagtgtttttaccttgttatggtggccttaggtaagtattctacaatgaacataacttttacaatacaactaaaaatcctattaaaaacaatcttggatacaaactgtaccaaaaasttaaaaatatctatctgcttttagacagaaaattatttttaaatgtctgtcaactacctcataacctagatgttctatcatgtattataaaatctgtaggttagtctgcattccttaagaatattcttaacaatttatatcagaagcactatttaacatgtttcacattttagtgttttgattcttctactgtaattctcagaaaaaaccttcagttttttgtcactcaaaaaattatccccatattgctgtatagtaattctacatataatagtaaaagtttatatttaacatctgcta

SEQ ID NO: 19738 - DNA, 600 bp, Bovine  MMBT12776
ttcaattattccaagcttatataccctcaattattttttcttcctagttcacaaatcttgatttttcttttaaataatgaaacaaacctgttcatactaataggatgataaatatttctcaaataaggatgtttaatctcatgtaagtgtttttcaaaagtacatttgcttctctttccttagggagtagagtttggcaaaggatgttgctgagatacggtttgaggcatcatctcatctgctaacagtctgctcctgatgacacatatttattccatttttcacatgtggctgaaactrtaccagcaaaatggggaactcagttttcctattttaaaaaaagataccatttggctgcatcatgaaacaatccaaatgtacttcagaagaaacagccaagatggatagttacatggaatcgctggagaacactgggaaataagtcatcagacatttcattgctttttttttctttctttctttttctgattaaccaaaatgccagttttagccaggctgcgtgaaggatattttacattccagtctcttctatcagaaactgttaaatgtggacagtaggtcaaatgtaccgaggctaca

SEQ ID NO: 19739 - DNA, 600 bp, Bovine  MMBT04805
gaaagaaagcccaaggatgtggaggtaagcaggccagcaactgtgaagtgagctaccaggtagggactaatagagattgtcttgttggggctgatgcccttcccgagagcctgaggaaagtgaggtaggggaaaggatgaaacaccagcgagaggctgtctgagttacagctctctaagtcacagagtggactgattttttaaaagaatattctctatgtttaggaatgagttttgaagcatgtaaaggatatttgaggggataatcttaagtaccaaaacatatttctatcrtcaatgraagtgaaaaaccttcagatagttttaaacagagcagttgaagagatgtgcacagtgcctggcacattgcaggtacttaaatgaacttttggacaaatagatgagaaatgtagagggccttatcacaatttttttttttcagtttttggtaggttgagaggagttatgtttatcagtatagagattctgtgtttgggggtwaaaaaagccaaagaccaagaatctgatgttttgcaaaactgtgtgctgaaattagcaagacttaatggagaaaatggagtgagggtgagaggtgaccact

SEQ ID NO: 19740 - DNA, 600 bp, Bovine  MMBT19085
ctagggggcattagcttgttgtaaatactttctacagattaagcagctttggggatgatttgtgatcctacatgctgaaattctaaaaggcactgtctcataatacaatgctaaaatccatatctgtataccattctttggggatcacagaaaataccatatatttctttgctttcstttcagcttaactcttgttaaatgtttccagaagaagagcatcactaaatcaaaaacaagcaccttctttaagcacccatggatgccttggtcttacaggttggtttctctccttgcaataakgcgggccacaaactgatggtggatcttcacttatcatttactaaggagtaagatagttcyggctgctgtagaaataatycctcaataaaaggcttataatttcactgttctcagtgatccaactggtgtgtcagtgcttcatatgatgtagaactatatagggagtgtcaaaaccaacaattcataaggcaaacaaaatgcarttctcttaaataacttggcagatgctttaatatgaagatctaataagatcctgtcactgaatttgacacagtaggagtgtagaccatagctgtttta

SEQ ID NO: 19741 - DNA, 585 bp, Bovine  MMBT19083
tgtgatcctacatgctgaaattctaaaaggcactgtctcataatacaatgctaaaatccatatctgtataccattctttggggatcacagaaaataccatatatttctttgctttcstttcagcttaactcttgttaaatgtttccagaagaagagcatcactaaatcaaaaacaagcaccttctttaagcacccatggatgccttggtcttacaggttggtttctctccttgcaataakgcgggccacaaactgatggtggatcttcacttatcatttactaaggagtaagatagttcyggctgctgtagaaataatycctcaataaaaggcttataatttcactgttctcagtgatccaactggtgtgtcagtgcttcatatgatgtagaactatatagggagtgtcaaaaccaacaattcataaggcaaacaaaatgcarttctcttaaataacttggcagatgctttaatatgaagatctaataagatcctgtcactgaatttgacacagtaggagtgtagaccatagctgttttaggaaaacagattttttttgggggaaaaaaaaagctatgtacttag

SEQ ID NO: 19742 - DNA, 442 bp, Bovine  MMBT01792
tccagaagaagagcatcactaaatcaaaaacaagcaccttctttaagcacccatggatgccttggtcttacaggttggtttctctccttgcaataakgcgggccacaaactgatggtggatcttcacttatcatttactaaggagtaagatagttcyggctgctgtagaaataatycctcaataaaaggcttataatttcactgttctcagtgatccaactggtgtgtcagtgcttcatatgatgtagaactatatagggagtgtcaaaaccaacaattcataaggcaaacaaaatgcarttctcttaaataacttggcagatgctttaatatgaagatctaataagatcctgtcactgaatttgacacagtaggagtgtagaccatagctgttttaggaaaacagattttttttgggggaaaaaaaaagctatgtacttag

SEQ ID NO: 19743 - DNA, 600 bp, Bovine  MMBT16976
ttgaagaactatcttactgaaataatcataatgcaataaatatagataggctacttttcctaatagtcattaagcaaaattagacaacccttaatatcatacaaaactgaaataaaggtttgaaaagtgatatacgacagggttttctcaattattacttttacagattgaaatcaaatttgaattaaactttcctgttcaccaatagacaagtgaaatgatgatttatgttgctgtcaaagcaaaaatatgacttcatatggcattttatcagtcatactactatgttaaagcaaactmcagttttagagatagtatggtcaactgaaagcttcaaatatataaaaatatctttggagagaatgtgcaaaactattttccaaatgaggaaagctggaaagaagtagcaatttattcactttcagagagtgagtaaagaaaaagagggagggggactctaatcaytgttaacaacatgacatgaggaggtcactttacaccactccaagttaactagattttaaccttgttccagtctgatgagcaaagcaagaaggtaattagtaatctaaatggtgactatatcatatcctgtgttca

SEQ ID NO: 19744 - DNA, 600 bp, Bovine  MMBT16233
tctaactgatgggcttccagaagcggacactctttgctatttagtctattaacatttataacaattcctcaaaatggatatcatcccattttacaaagaagggaactatggatcacagagattaaataaatttggccacaaatcatacatgtggcagagccacagcaaatgggaatgcctctgcatctcctktcttatcctttcttaacctttctggagcctccagtatgttttctgaagacttaaagagctttaattttctaattataaaagcaatttgttgttgttgtttagtcgctragtcgtgtttgactcttttctgaccctatggattacagcccaccatgctcctctgtccacggatttttgcacgcaagagtactggagtgggttgccattttcttctcaagggaatcttcctgacccaaggatagaacctacctctcctgcattggccggcaggttctttactactgagccaccagggaagccctataaaagcawtactggattataatagaaaatatgtaaagtaggagggacattttcacatagctgcagccgtacggtctgtataaktttgcrgctttttttcatgta

SEQ ID NO: 19745 - DNA, 600 bp, Bovine  MMBT05690
gacctgtgctcctctgagtgaaggaaagatattacatctgggtgtttgctcagcgcccctccagtcaggactcctgcttcagcctcatggaatatgtgtatttgaagtaggaaaacagagcttggaataagtatgaaaaatgagataggtagtgtggatgagacctaaatcctgcaacgagccccaccttggttcctgaaagccatggartcagaaatctcagcaggcctgaaggaatgttcacactgacagttatccactaagccctttttggaagtaggtcaatgggttcaagcagtkwcatgtatagaggagcctggctttcacttctaaagggtttattcagatttgaagttcatcggtgtcaaaagttgccccaagtaggggacctatttcagattaggcagaggaagctcaataaactttctaactctgtaaatttgactttgatagagaaattgatggcttcttcattcctctctggattcttgtcacatatttctggctgatagttctgaattctggccctcytataccctgggcattatttttgttgatagctttatagccaaacttgactttcatgattatcttctaaat

SEQ ID NO: 19746 - DNA, 600 bp, Bovine  MMBT13805
ttgtggatcttatctttttcctgaaaggcgtgggacagtgggacctaaaacaataatacctaccgtccgttgaggcaaaaaagagcagagagaaggtagcctagcaggaagccgatgaaaggcatcagggaggaggtggccagcaagtgtggtgtcatgacaaataagatgctcttgcccacgttgatggcggagagcactacaacagccacactgcacaraagcaggaggatgatccctccctgcgaataaggacaagaagaaaaggcagttagaagggtgtggggatatggaggagcrcagagagctagggaagcgctggtggataccgaaggtggaaaacattttaataaacatatttgaagtgaaagggagtacgcaagacctttatcatcatcttggatttcttacctgtagctgggcagcttgctggcggtcataggtctgattacctttttactgaaagctcagccagacatagtttctgatagacatctctgagtagcaggttttcagtgaagtgctgtgactctgaaggatgagactattcagccctccggcaaagtgggtattgtaaatgaaagttctctttacgcatcc

SEQ ID NO: 19747 - DNA, 600 bp, Bovine  MMBT16920
tgaaaggtgctctcttcttgctgaggttgtgaagctggtagactgggggtcttaaacatccactggccatcatcacccctggaagaaggactcaaaagagatggagctgaaaattaaacctctgaggacagccatgtcagaaactagccctactcttggactgttcagttatatctgctaataaattatttttattgcttaagctcatttgagtgttctgtgttgctttgggggttttggtttggtttggtttggttactttcagctaagggtccaaactcaccaatgcccaatagaaayaacaagccacaatatgagtggctcaaagaagatctcctgaacacactatggggttcttcgccctcactttccactgccaggcccaccctcagtgatggtccactcatgctgtgagtagcctacatcctgtgatatgtcagggagctctaatctgttcctttctctagccagaatggtttcttccttccgctgtcttgaattctcaaaaagcacactatggatmaagtcagtagttgggataagggtttctgggagcccttgggctcagagtccagggagtggaagggaagtgtagggtgg

SEQ ID NO: 19748 - DNA, 600 bp, Bovine  MMBT05445
aattgcaacctccaatacacttatacgtgaaactcctcccaatctgctttaattttctcattaagaaatatataaaatccaaactatactataatataaaaacagtataagttataagacatatcttgtttgctaaacagtstcatttaacatattgcatttttcatttacatatcttgttcatgaacataaccaaatctttgagtccagcagtggtatttacagagctctatagttttagcaatatcttggatggtactgcaattttcctgaaaaggagtgttacttctctacagtttraattgttttccccaaggaaatgtggttctttgtgaactgcatttgaaggaatgactgcctagagggaagaactctctacaataaagcaatttatatttattcyttgatggctaattctaaaaaaacattccttacattatttattataaatacatgggtatctattatttataatagaatggggcaaagttgcaatacgcaaaaaaatttaataatcaataaaatgccttaaggcaactttgttccttagaggtagaagggcaaaataatatttaatttatattttagtgtatrtccttc

SEQ ID NO: 19749 - DNA, 598 bp, Bovine  MMBT13300
  misc_feature (1)..(86): n is a, c, g, or t
nnnnnnnnnnnnnnnnnnnnnnnnnnnnnnnnnnnnnnnnnnnnnnnnnnnnnnnnnnnnnnnnnnnnnnnnnnnnnnnnnnnnnnagtacccaaagagttaatgatactgatgatttatacataatatattaagaagtggtgctccttcttgatggaaatttatcactatttttgtctggtcagataggatcagcgtcattaggaaaagaacaaaagttttcctgaaggaactctccagagttgagaagagagggaaagaggaagtgtgtgtgtgttgrgacwgggagkggggagatgmataaagactgggggccacaatgarttgtgagatagaasgttctggagagactccataaagacactgacacaagagaactgttttgttattctgaaccttttagatgtacgagggaaaagaagggacgtgtgtaactagttaggcacatcagcggggaacgtgtcagatgttcacagctttagaaagggcgcygactgtgctctcgagtgtctgaaggcacacctttgcagtgagtgaaaatgctaatgtatggacawacttgacatcttcttacttgtttgttctgtcctttctgtgt

SEQ ID NO: 19750 - DNA, 600 bp, Bovine  MMBT13913; identical to SEQ ID NO: 4730

SEQ ID NO: 19751 - DNA, 600 bp, Bovine  MMBT10118
gcccataaaagataattccaaataattttgttaatattcataagatgagcaaatttatcccattttagggaatgaacataaatcaaaataacattaatggtgaaatgtaataaaaataaaacataagtaaagaaagcctgattaattatgcaaggattgtacacaattcaggattatccaaatcctctgatcccttattttgttcccttactccatctctgcatattttaatccccagcttaaaccgttatctcctttccaaagtatcattctgaactctgccctccttccagccagcamaatttgttcttttctctcaatatccaaaatacttgactgtgtctttcttaaggcactcaaaacatttggtgttgcactgtgggtatcagggttttagctctacctgaaccatctctttgtaccacggaacacctggaatgcttttcacaggcaacagctgttgagtgaacaattattctgttatcccctggcagttgatatttctattataaaaaagaaaaacagatttgtagctatgtttattgctacaccagccaatgcatattctagtgaaccaaacaatataattcattgactcag

SEQ ID NO: 19752 - DNA, 600 bp, Bovine  MMBT13822
cactaaaagtcactatcagaataaaacatgaagtgctctttggaatgcacccgtcatggctggaaatatgcttagccctcacaagttacaaaaactgccccatctcaaaccattgcactacagcatgaatcatcttgggtaatcttgtccaatcttcgcttgggtagtttctaactcaactggcagaacaaagaaagtcagtgaatctcaacaatggcacacacagaaccacatgaaagcttgaaagccatgtgcagtggtgttattgcaagtaagagaccaaaactgattcactaaaayaagctcttgggttccaaatgtaatagctacatgtgaagttacagaaccacattagggtgaggtgaatgactctgagattgtctttgctgtgaacactgctagtcagagcacacaagtagtctaagtggttttggagaaggggctttcttacaaatggactaataccattcattctttttggatacaaatcgaagcagcttaaaataaaaaatgagccttctagttcaagaaatcaaatgatcaaatagcttattcctatgtatggatttgaaggtatttaaagttaaaacaaactgtttt

SEQ ID NO: 19753 - DNA, 600 bp, Bovine  MMBT07567
cacacgcagaggcaaggttcagaaaagtgacgtgacttgagatgggatcctaacgggagtagtctgattccagagcctgttcagagaaccactccaccgtgttgacttaaatcctcaaactcctttgcggtccccaggctgtgtccctggcacacaaatgctcaatgcgctttccccagaggggacaatggaaggggggctccagggtccaggcttgggtctggctgggatcactctactggtattaaaccccatcccagttcccacagctgtaaactatgagatgtttccagcttcttyatgcccagaactagcggtgccacactcttgagtctggctcacagtgacccttctaaaccaggccctgggggctgccgtgaggacagagcagtaaagggatgcatgcctttttcccaaacctggcttggcaacaccctccccagcagcaggcacagtgggcgaccgtagcacaccccatagggtacccagcccttgggccctctgtgatctcccagccaattctcttgatgccccacccccacaggtgggaggatgggcaagggcagggcaaagaggctgccaagcaggtggcagttgagg

SEQ ID NO: 19754 - DNA, 600 bp, Bovine  MMBT01911
tatcacattaatactcacatgacttttatttcaccttattaaagctttctcagccttgtcactactgacatgtttgatccagtaattctttgctgtggggggacggtcctgggcactgcagggtgttttgaagaatccctggcctctaccaactaaatgtagcagcaaatctctctctcagttctaataacccaaaatgtctccagacattgctaaattacacctgttaagaaccactaatcaactagtattatcctataacttttaaatagcattagatgtttgagtttcattctaaayattaatagtaattattaaggttttatttttacctcaattttgaacttttctctgccagtggatgcagtatccaaaactgcattctctcagtatcctaaaccctttagtaggcattgttgagttatgaaaaccataaccaaatagctgcatgagtatgacagtccaggtcatactggaaagtgaaagtcaactccagcatggtccaggcacctgccctgtagttcagtttattgtactggcttatatgatctgatcctagctgtcctcctctgtgtgtgtgtgtgtgtgtgtgtgtgtgtg

SEQ ID NO: 19755 - DNA, 550 bp, Bovine  MMBT20656
tgaccrgccgtctcctctgacagaagatacactccaggacatcgtcctgctccgttagagccccagctttccgaacctggcactgaactgttcctcgccaggggcctgttggatggagacagggaatgaagtgtgacgggggctcagagcaacaggggtctccctggtggacgagggccttcaccatctcatggacttcgaggcacgctcttctggcccctctccrtgacatctgtttagaattccacaagcagaggcctctccacttctgctccgtttcttactaagttttgaaattgytgagcagattaaaggattctttttgacacttttatggttaaactttgtagagtttaaactgcctcccttaactgttcctgggaaagattagaaataatttggaactggattggatttgccattctgtaagctcttcttatctaccaggctaatagcagacactttcctccctacaacagcccaggaggaaggcttattatctgcgttttacagatgaaaagtgagggtcagataggcgaaagctcatatt

SEQ ID NO: 19756 - DNA, 600 bp, Bovine  MMBT05390
agaaagcaccttattcaaaggatgaacctatgaacccagatttacactagacttcactgattctgaacgcttaagcagttatcatttagagaaagaacaaaatcaaaccatcttgataattgaaagcttcaaagttttctgatataaataacacactaaaaaacacactcttctttttacaaaaactattttgagtagttttaattaattcagttccgtaatgaaaacaattggctgtcattcttcaaccactcttcgttgtggagatcagatatcctgttgtcacttgagtaattcttyccccccatttctttctgcttctctggatccaattttgatgtggatcatatctcttttttaaaaatatttttttctgactctggtcccaccctaattcctctcctaaagcttgtggctcagattgtaacagacaacgaagcttaatagaggtcacagaaaatcccagttctcactttgcaatgcaccttgcatttaaagtacagaatcacacaaacttcctaattaaaatttatcatgtgaatacatattcttcaaaggcaaaggggtgaaatggctttgaaacaggcctctggcagtggt

SEQ ID NO: 19757 - DNA, 536 bp, Bovine  MMBT18565
gaggggcaaaaaataagctgcccctttcatatcagaagagactttgaacctattggtataagtgtaccacattattatgttgtgtgtgtaaattattcttggcatcagggtaagttttacccaggcatggtatgtggaaasaccagggattttggtgtcagaaaggactgggctcaaatcctagttttatgatttactaagctggtgactttaggcaagttaattgtgttaattaaatgcttcrcgtttccccaacastaacatgggtgtggttcctgcctcatgggattgccgtgagtrgtaacagagcacaygggaagcctgaagactggcctgctacttggtgctttcctgctgcatgtcacttgcctcccgctgtcttatgcgtgtggtctcgtgagttttctcatctgcaaaatggggatatgctgaacacagctggaggtggagaacaccagctctgtagccagggaaacttgggtctgaggcctggttctacctcttaccagtcacatgatcttgggaaattacttaat

SEQ ID NO: 19758 - DNA, 600 bp, Bovine  MMBT08925
tcagttactgttttacctgacagggaataacaatgtgtatccactaccaatcttttgactactatcttagtctcaagtctccatccataccctactttggatcaaggaggttctcatcatctacatctgacactaatggtcttgttaaagttaaaaaaaaaaaaraaagaaaccagcagagacactgatttcaacagatgaaggaaagtatttctatcaccatctgttgggataataggtataaagcttttcataataataatgccatcagtaacttccatcattaaaaagtattccccmaaatgctctacaacaatattttacactataaaatatttttaacaagattacctggcaataagcataatttccaagggctttatgagcttcatcgataactagacactttatttcagcagctgggcaagctcctctagaaagatcatttaccatgacttgaggcgtaaggaaaagaaccctcttactgctccagatttccttcctggtgaaagcctgagtagatcctgtaaaaaaaaaaaaaagtgacatcacacattctacacttcagactgttacctgtaacatgtaaacagcctagcc

SEQ ID NO: 19759 - DNA, 600 bp, Bovine  MMBT20583
caggcagattctttactgctgagccactggggaagcctgcaatttagaatctatgatggaattattccttgagttaatgtgggttatatgcatatgtttatgctagtaaccagttctatagagctttttccctttctattttcccggaartgatcaagttctcccaggtctgggataatgtgttattttgtggccaacaccagcaactacrttgtcccagatccttccctattacatttctacctcctcaagggaattaagctactacttaatgtctttattttcacctgattttctcasgcaggacacagttgattccttctgtagcaataaatctctgcatgcccctaccatttctcaaccaaatcactttgcaagtctcaactaacttaactattgacagctttctgttttaaattttctcctttcatcataaacttatgtaaatcactgtaatttccacctctgagataccagtttttcctttgatatcacacagaataaatggatttcctctttcagaatagcatactaagaatagaagttttagaaccagactgtgtctattaaattcccaatctgtgtctcttatgtctcctg

SEQ ID NO: 19760 - DNA, 600 bp, Bovine  MMBT03772
taactatkttaatagacaacatatatttaaaactcatctccaataaactgagttttatgaaactcatatgcactgtattataattagataaggaaatgttaatggtatcttcttagtttttaaatagtaaccccagaattaaatgtatttttgtattcctactcttgagttttttaatatacaccttgttatttccagcataatttaataagataaactatagggagaaggcagaattttccatcagatttcaattaactaaaacaagatattgttggygcttgaatgaagtagactatrwtacattccatttattgaccaacaaaatatttaaatgcgttttctttgtcctggtttgagaacagattttattgcaccgaatccaaacattgtgtgcgcttccctaactttccctgaggccttcctttaactataaaaccatttatgaccaaaaaaattaagcaaaccagttgttccattacttgctggttttcattatatcctgaaatatccattcagcatttttatctgctaatgtaacacaaactcatctgctcaatgagatttattacttgttttttttcccacatgttcacaaga

SEQ ID NO: 19761 - DNA, 598 bp, Bovine  MMBT16517
  misc_feature (1)..(136): n is a, c, g, or t
nnnnnnnnnnnnnnnnnnnnnnnnnnnnnnnnnnnnnnnnnnnnnnnnnnnnnnnnnnnnnnnnnnnnnnnnnnnnnnnnnnnnnnnnnnnnnnnnnnnnnnnnnnnnnnnnnnnnnnnnnnnnnnnnnnnnnnnnaacctgtaatggaaaagacacactactactggtaggtgtctttttcagggtttacctgatgcaaagagctgactcattggaaaaaccttgatgctgggaaagattgaaggcaaaagcagaaggggatggcagagaatgagatggttagacagcatcactgactsaatggatacaatttgagcaaactctgggagacagtggatgacagaggagtcacaaagagtaggctacgacttaagtgagtgaacaacagcatgcacatacatatatgtatgtgtgtgactgaatcacttttctgtacacctggggcactataaatcaactatacttcaataaaaaataaatgaattaatatttttaaaagatgtaggtctattaagaattttttacttaatcttataaaaatagaagatactgggggttttaagcaggagggaaggttttgagattgttttatttttt

SEQ ID NO: 19762 - DNA, 600 bp, Bovine  MMBT21739
gtgttctctgatgcctcactgtccatcagctcgtgtgtgtatctttcttttccccacccctgtttctgaaatgcctactgtgattaagaatttgcaagagattttcccaaagctgcctgcgtgggtgcatctttcagaatgttaagtaccccacttttgacatatgcccttggactgagtttttaaagatccctgacagttattgacagccagtaattagtctgtagaagcccgacttctgccaagagcctgacttaccacctctgagtcatcttctccatcagcctttccctccacgtyatcacttacaggaaggcaagctctcctgttctcaattccatgctgtgctcacccctggcccactttgaggatggctgcgtactgtcctcctgaatggaccttgagaatatcaacatgggagaaggaggctcasgccgttggcactatggagtgtgttagaaaagaattcaagccctgtattcagaactcatgagaattcaggtgagtgaagtgtggttatttttcaggtaccctaggcaaagtgcagttgcttaatttagagtccaaaccaggatagatcggagaaggaaatcgttcact

SEQ ID NO: 19763 - DNA, 600 bp, Bovine  MMBT00850
actcgacgctgttcaccactatgaggggcccctccckcgcaggctgtgagggttgctgaatgttacagccaccttctgtcaaaacagctgcacggcacaggaggcacatgaggttcatcatttaacttgaattacatttattcatatttgttcttgaccctaaacaccaaacatcatcgactctttcattacccctggaatatttcttaatttcaaaggaacaaagaaataaatttcttttaggtcatgggtttagactcagagccaggctgtggagccagttccaatcactccagtctyccaagataacatctcgttctgtccctgtccctccaagatgagtcaatttgctctggccattcccaggggaaggctagaccttgctttaatgaccatgacttcagctggkgcaacagaactctaggtcactgcaagatggcccagcccgtgttcccccctccccctactcccaccccgcgctgagtgcccatgactagggctttttgtgtgatttggcagttggcaccctctccctttcctgccaataatggtggctgttgtttctgagcaaatggaacaaatgaccaaygtgaactccat

SEQ ID NO: 19764 - DNA, 600 bp, Bovine  MMBT01345
gcctactaagtagagggagagaaatacagtacatgcaatgtaagttacagcttttttgaaaacatttaagggcacatagtcttgaaaaaacaaaaatacactgaacctcttcaacctcattcatttttcttatgtttctagtacagtgcccagatttgtaccccacatcatgtttataagaaaacaacatatacttgaattctttagagaactgactttattgatgttaatggaatatcagatgggagtttggggtgggaggtgctgtcctgagcagttcaagcctaaatgaagattggstttctgctgagaaaaggctccacctgggagaccagtatgttgaatagccagcaggaatagccagtttataaaaatgttaaaaatgttcttctcttcctaccacacctcgacctgctctgccacagctctttttatagtaatgaagmttacattaattgtttgaaattcagttgctgccttagaaacgggggcaccatagttatttaaaaagaaaaagaaaaaaatctgttgagtagagctgtcatttactggaaaattaaaaagaaaaagggtagagaagagagggatgagttgatgaga

SEQ ID NO: 19765 - DNA, 600 bp, Bovine  MMBT11412
agaaaaaataagaacaagcaatcatatcacaaagaatttcaacatgttatccagttctcaacatggagttaaacattaatcctataaaaactggatatcctagtgagaagcacttgaaatcattcattacacagctaaatgatggaaaatacctgtcatattgacaacgagtaaggaagaacaatcctgaaaatcagtcaggaacataattgccagtgcggtgggaaactgagttggtacagttttcagaacaaaaacaaaatacctgaaacaaaatcctattagagattcgttatttcrgccagcaaatccataatttgttagccaaagtaactcggttagcagaaggctcggtgtttgattctaggattctctgagcagttggtttaccataagattctgttcagacgtttgtaagttaaagctaaaggcaaaggtatttccctgtgagggacctttgtggtcgaaacatgggctagggctcaccatatttgggagtccttggcttggcttccagagtttagaggtctcaaagcttttttctcagtgagatcaatggcatcctgagacagagttcaaaatacagttctggtataaaga

SEQ ID NO: 19766 - DNA, 600 bp, Bovine  MMBT02787
tagctcttcgttttattttaaaaagatacttgtaacccagagttggttcatttgtgattcttttgtctgaatggctcagtcctttttggtgtggaaaaagggagaatcagctggaggagtctgaaattttgtttcatcttcattttttactttggagcatcaaacggattctttcattcagagtgattgtctccaggttttaaaaattaattaatgtatgtatgtatgtattcttattgaagtcctgttgatttacaatgttgtgttagtttcaggtgtatagcaaaatgatccaggttyacatatatatatgtatttttcagattcttttcccatgtaagttattataaaatattgagtatagttccctatgctatacagtaggtccttggtagttatctattttatttatagtagtgtatgtatgttaatcccaaactcccaatttatcccttccctacccctttcccctttggtaaccataggtttgtgttctatggtctctttcttttctttttaaaaaaaatctcttagatctgttattgaaacttgcagtgatcaaatgactttgacatgcatattacatttacatttcttatc

SEQ ID NO: 19767 - DNA, 600 bp, Bovine  MMBT02777
caacacttcacataaggaaattacaccatgaagacctagttacagagaactggtaaagatatttaatttccccctaatttatttgcctacatttcctgtttcagtcattgctaggaaaagacagcattaaccttcaccttaacatattgagcagaataattcttaattttgcatcactgtatgtagcatttataataggaaatttagcatccatgtcctccaaatgctaaatgctagtgttaatagcagctcttggccctggtcatagtagcaaccaaatatgaatccacacatttccaratgtcccyrtgtacagtatggggttgagtgraagaagtaataccactcatgaatggaaaccactgtaaatrtctttgcaaagacgtcttttcttgttatgtcattttctcagcagattcttaccttgttacatttaaatttatctggtgtgctgctgctgctgctgttcagtcgcatcagtcrtgtccaactctgtgcgaccccatagacagcagcccaccaggctctgccgtccctgggattctccaggcaagaacactggagtgggttgccatttccttctccaatgcatgaaaggga

SEQ ID NO: 19768 - DNA, 600 bp, Bovine  MMBT15055
ggactgtggttggcaggaaatgacatcactcacagccaatcagagcagctgtcccagcctcgctgcatctttggcaagcaytgggaattgggcatagagatacagaaggtcacgaagcagtctctcctgctgaacttagcactctcaaggaagagaaggctgggctctgtacagaccctacctgtcctgatcactggtggggaggggggtccctgtgacacttgtggaaacctggtgggccaggggaggtaggctgcttaactgtagcttctgctctggccagcagagggactcaagagycagggatccgattcaggtcctgcgacactgggccctggtatccatcctttcccacagggcgcggacagttccttctttcccctcagccgctcccaccctgctgcacagaatgtaatactttcacccgtcagacagacagacagacagacgcacaygccctcatgctggctctagaaaaataaacagcttagtgtcccagctcacrtttctgcaccccatttttctagggtccctcccttgcctctttctggtcccccaggaaaactctacagctgaaggtgttaaaatgactaactgaat

SEQ ID NO: 19769 - DNA, 600 bp, Bovine  MMBT09340
ttcccactctctaagggacsctccttctttgtctaaaaactcaatgaacagcctggtcaaagggatgccacgggacagaggcccctgggtggagagggcttggggcaggggaaggggaatcaacctggaggcaggaggcccagccccacctggagaggggcttccagtaaggcagggacacaggcacagctggctgtatctgtagacacctggcctgtgtgtgcaggaatctttgcccagactactgcccscaaggtcgtcaggccctccacccacacctccctcagacgggaagggagkgaagggtggcgagtacctttggaatggaaacatctctccagctgcccctccagtgccccgaagtgtacggtctgaggaytggatcatgaccctgtgctcggacccctcccctcctcaccgtagatgtctccttgagatcagagggctcagggcacctgcttcctactctctcttacctcctggtggtttgggtcctccctttgcacttctgctgagtctgctagggcctctcctggcccctggagccccggtgcctctgccctccctccggcaggtgttccccttgctgtgtccccaggt

SEQ ID NO: 19770 - DNA, 600 bp, Bovine  MMBT16128
gctatgcactgcaaaagtattatagactaaaccagttgtcttcctcattttagctacataacacaagagttactaaaaaaattcagtgaagaggtttggagtacaaaatatttctgccaaaaattaaactgctaaaaggaaaagaaactcatttacaaagtatctcagaaaatacccctgttagttaaccaaatagttgacatgatgaaaacattagccagtatccaagtggaactggaaatttaatcactctagttttagaattgagggaatctgttggttaaaagattcataaagacmaaatccaatctagcaactagaatcaagtttttcctgtattacccacaaactgacgaatatggcattttctacaatagagggaagagaatataatcaattactgggattcttctcttccccaccctcataagttttcatcctattgcaggacatacctgaaaaggacagtcaattaaattttagcctgtycattcacattaaggcccaaatcctgcctacaatttcacatatcttacccatttgtttactgttgaactatcctctcccaaatttgaatctaattatagaacctaattatag

SEQ ID NO: 19771 - DNA, 600 bp, Bovine  MMBT18962
tagtcatggttatcacctgtgcagcccagtgcaggttgtatattcattaatactagggtagagactgctacagtgttttatggacaaaattcctatcctgggtttccactgcagctttcatatgccaaggggagctaaggtctttcttaatatcaccctattcaggtgccaccaagacaataacagggcaagaggctgaaacatgggaaaagaaatgggttaagaccacatttgaggataaaaacctgagtgcaaacaatacactaggccaagtgtgatgcccttgttacayaaagtccrctatcctgtggagagagtggtgctcagcctgagaatcctgctactcaaagcccagacccactggtgaccttgcaacccctgggaggtggtccagtggccatgaattcccatcctygacctggccccacatcaacaatgtgcatgcgagtggtggtggtcctgagcggccctgaggtctccaccccttgagtctggggggcctctgacggctgtgacccacagagtgtcctcgggcttctgccctgagaaagcctgcttccacttcctgtcactggaacacctgccaggagccctgagctt

SEQ ID NO: 19772 - DNA, 600 bp, Bovine  MMBT18155
tttaggaaatagatatcattattccctaggtctcagggaggtttaggtggctgatccaatgttgcagaactagtgatgaggctgaaactaccgagggtgaggaggggctgaaggaggaaagcgggactgagaacaagagggaaagacagagaccaggaagaaagagggacagagatccagaaagaagggaacatagacctaaagacagagagggccagagaccagcgagaggtggggaagaattccaggagacagagattcagtgtaggacagggacagagactcagagaaaaggatacyaggagaccaggaagaggcccccccaccccaagtttactgttcccctcttggaaggtgtgtgggtggggaatggggctgtctggagctgtgcacatggagcccaatgtcactgcctcccatttctcccaggcttgtccttcatgcccttgcagatctggtccaaggtcctggccgtctcaggaatcctcaccatgggtcttgccctcctgggctgtgtgggggccctgaaggagttccgctgcctcctgggcctggtgagttcccctccacccttccacctctaggatcattcacatcttg

SEQ ID NO: 19773 - DNA, 600 bp, Bovine  MMBT07029
ccctttccatgcatcaagcactgtttcagacactcaacaggtaygttaaatcttttcattctcacagcagctatatgaacaagctattaaatctctccatttcrcaggaaaagatactgggcttactatcagagatgttaagtaactggcccaaggtgacccagttaatggtaagacttagatttgaacctagatctctctggctccaccaggaattccagctatgactactcactcagttttaagcacttcacctgacagatttcattgaattcgatcccatttccctttgacattttwaaaataattttatttatttattcttcgttgctgtccaggctttccctagttgcggcaagcaggcttctcattgcggcggcttctcttcttgcggagcgcgggctctagggctctcgggcttcagtagctgtggctcacaggctccagagcacaggtttaacagttgtggtgtacagacttagctgctatgaggcatgtgagatcttcccggaccagggatcaaacctgtgcctcctgcactggcaggcagattctctaccactgagccaccagagaagaccctccttttgacatctgaca

SEQ ID NO: 19774 - DNA, 598 bp, Bovine  MMBT05005
  misc_feature (1)..(58): n is a, c, g, or t
nnnnnnnnnnnnnnnnnnnnnnnnnnnnnnnnnnnnnnnnnnnnnnnnnnnnnnnnnntgactgggctactgccctggaaatgctttttaaaaattatactataatttatcattagaacgaaaagtcattgtgtgtatagaaaggctagaaactatggagtgggatgtctatttgatatcagtgaggtaactattactggagggatgatccccatatcttattttcttgcaaattaatgaaatgcgttggtgggtcctaaaaatgggaaatacaagttaaattacttgtgtaaggtgttrtgaatgagataatgcataaagaattgtctgtcgccttgctacaccacgtgtggttcctgaaccaagagcaccagcattaccagggaacttgtgaaaaatgcagaatctcaggctgcatgccagacttacaaaatcaaaaagtgcatttgaagatccccaggtgattcatctgcacattaaattctaagaaatactgatatcacatgctaagcccgtcaactagaggaaggaggaattgtctaatctctttgaagagatggaagaaatttcaaaacaaagagttgtgatcaattcattc

SEQ ID NO: 19775 - DNA, 600 bp, Bovine  MMBT05728
cctgttaattacttccgttagctcttaattgggaacagtgtggtctaccagaacattccaaacctctccctattggccacgtatctcatcctataagctttttaactggagctgtgacaatgcgcagtgactctgcattctttttcactccccaggtgaaggtctggactggcagttaaatgcccaaatggcagggaggaaaagacaaaagccaactccagatattttgatctccagaaacagtgagtctaggagtgaaggacttcagcatcattccactccatcccattcatttcctgytatttaaaatgaccaggtggacaatttctcgatgtgagtcaaggaatttaaatctgcctctgacagttctaccctgaactgggcatggaatacccacgctttggggtagctttaacgtcctcacagattcttatttcttctgtgccagctgatgctcttgtcttctgctcaggactgagggttcatggaggtctcagggatttattttctatatgtacccttcctagccaccgttttataagagtctctttgctgtgatccccatcctaacatttagacatgtggtgtctcccttgttac

SEQ ID NO: 19776 - DNA, 600 bp, Bovine  MMBT07250
tccttctccgcgatccactgaaggacgtcattcacagtgggcaccgagtcaaaccctcgctcgtcatcaccgctggctgcagagcaaagaatctgaaccatttgggagaggaatggggtcagggcttcacaaataactctttcccttagcttgctataattataatacaggggattactgacaggtgcagaacacacacggctttcccagtcattgtctcgtttgagctttgggaccactctggagagaaggaggcggggatactagcagtgacaggagtagtgtattgcactaggaatmgttagagtagcagtatactaatcgcagtagtgactaacatttactgaccacttattatacgccggacatcatgctgaaacccttcatgaacattttcccttttaaccttatactgtgaggtagaagtgattgtccccactttctaggtcaatatagttaaagtgaaagtgttagttgctcagtcgtgtctgactctttgcgacccatggattgtggcccgtcaggctcctctgtccatgagattctccaggcaagagtactagaatactggagtggattgcttttcccttctccaaggga

SEQ ID NO: 19777 - DNA, 600 bp, Bovine  MMBT00601
aggttaggaggtctaggaaaactgggtctggctctgagcaaacagacccctacttgacctctatggatggtagggagaaggccttgaggcaagggctagggatgagggttggcgaggaattcggggcaaggtcccagtccygatgcttgggatttcctctctaccccttcccaggaggggagcctcacttcatagtggcaggtccccctcttgaactctgatactttagctataaacctattttcatgtgttcattaggtatttattaatacttcttttgaaaattgcttattactatcmtttgcccattatcctactaggctgattttcagtacttttttaaagaagccttggtatgtttcttcatttcttcaaatctttaaaaaatatatctgttacaattgacccttggacaacatgggtttgagttgcactggtccacgtatatgcagattgttttcagtagtggaggctgcagtacaccgtgtcctgagttggttgaatttgcaggtgtagaccctcaaatacagagggaccacgtatagggaaaccgtatatacagagggctgactgcagctgcctggaggattggttcccctg

SEQ ID NO: 19778 - DNA, 600 bp, Bovine  MMBT08631
aagagcctggaggactatagtccgtgggatggtgaaagagtcagacacgacttagtgactaaacaacttttatgatataaatataatttaaaattatgcatttaattgaatagttggagcatccggatgagcaacttgtcactagtatgatggtgtaattccaggtcccacatttaggattgtcatcactccagtgaagggcaagtgacatcttgaagctttgcatgaatggaggtgtagccccaagtcaacctgaggaaagcggtgggggaatggagtcaacccaccacacaggatggygtgagcctgccgcactcacgaatgccaatgtctcaacactgtcattgtatttgcgctctgagttagtttcagcaaaatattactggtgccattactgtaatattgtttttagttttatcgacttttgaggtttggtttccatttaatttgtggccttttgctgcttttcagttatatttgcgttataagcagaaagcatttctgtctagactaatcttggtgtgtatttttaaatagcttcataaagaggttaatttataataaggtcaagttaaccctcagggtccaagttgccttctt

SEQ ID NO: 19779 - DNA, 600 bp, Bovine  MMBT21754
atgtgcaggcctatgtttgctgccaagtcgcttcagtcgtgtccgactctatgcgaccccatggactgcagcctaccaggcttctccgtccatgggattctccaggcaagaacactggagtgggttgccatttccttctccaataggcctatgtttattggcatccaaaaaaaggtacacaattcacttgctggaaaaactacttctgtgtaagacaatccttctttagtatctctctcttcctctcctttactctccagaatctcattctatctctctctctccgtatacttagagctrtatcgtgtgtgtgtgtttaagtccacagrtgattctatagatctggacagatagatgctctggatactggaaatatgcactatttctattctctactgtacatatttttgaaccatttgagtttgtgtggacatacattcctttcaaagtgataagaaaaaacagcagtttatttctattaaaataaaatcagacaatatctgcagttgacattaccctagaggatcaaaacatttcaaccgcagtttagttttcattatcaaggtcagaaacagaccccagcaaatcatgatcttggtg

SEQ ID NO: 19780 - DNA, 600 bp, Bovine  MMBT04536
aaatctcagaagcctcaactaactactgaggctttatatgcctgcctccaggttagctggagatggacatatcaacctccaaactccatggtggccccaagggtttccttttaagagttaacatggattgggccagaccctctgtgctgcatctcacgtctattaccctcaccgtcacacttagtagccacattttaaagaccaagccactgagattcaaaacaaagaacacttgaaagttagggagtaagtgagatgggcggtcagacgagctttccgtgtctcatgttgcctctcackcagstcttccaaagttctcrgaggatgggagagtgttgtagaaaaccattagccgccatcaccaatacggtcatcttaggattttccgctcccctttggacttcaattctgaatacacagacctcttcactgccagcttccagttgggagagcacctcaggttckcagatggaagaaggtagccctcatctgtttagttcaggagctggccaaggttttctgcaaagggccagatagtaaatattctaggctttggaggcacctgttgtcaccattcaacttttctgttgcagtaggaag

SEQ ID NO: 19781 - DNA, 600 bp, Bovine  MMBT21774
gttcccctccttccctttatctatttctcttggccctcttttacactgcctggacatttttagttggttttctctagatttttttccatacagctttagattatttcacacgtattgtttcacttcattggccaaagaggctaatgctttcaggggacattaaacaataactcttgggcccctttctgcccataatgtctaatgactggcttagatttttttgtcctttaactgcttggcccaacacttatgcacactgaccctcatagacttytgtgtgaggtggatccacgtagatamcgtgtagaggtcttgacaccatcacttcactcatgccactcagatgctgccatccacctcttctcccagaccactctcctctacagagggcaggtgttgcctcagtactgattcgaggaactcctgcctgagcttcccccacagctcaggaactgactgctgcctcctgcttcctggtggagcccccatgaacaacaagggctcatagaaccccacagggatgtgtgaccgagacgacgggaggagggaactgcgggctaagcagtcactgtggcagctcagagtggggtcctgggcacc

SEQ ID NO: 19782 - DNA, 588 bp, Bovine  MMBT02583
aagtaagacatataacagtttgctgccagaaaggaaaggaagatgctatgggcgttcagataagaaggtccaactccaagctgacctaagcagacagaaatcttggtgtaacaactagatgacctattagagggatcagggtcagggcaccatcccaaatgcctgaggacaaaataaggctaagcagaagtttttgagtgatgtcagagctagtagggactcttcagatcaccttacctttttacttgataagtgaggaaactgagagccagggaagagaaaagactaggtcacccaagrtcagcagcctagatgcctagataatggctaagccagggctgaaactcgggtttccggctctcaggtcaatgagttttctataccaccacccaccctcacaaggtcctgtcacaacaaagccataaaataggcagctttcattcccctgacgcatgcagcagtacccacgcaaacgccgaaaacgttcccaaaggacatttcttagctgggagtcctacagagaaccagaatgggacttggaaaagaactaaattccttcttggctatttcagccaatgggaatggagc

SEQ ID NO: 19783 - DNA, 601 bp, Bovine  MMBT17435
  misc_feature (1)..(1): n is a, c, g, or t
nacagaaaaggggcaagcrgaatgctttaaggatgcgggaggatctgcctcttctggttggagggataaaatgggatttcyrgaaaacatgacaattcagcaattttttttttcagtgataaattaaaccttgaaagaagtggagtattttgaaaaactcagttggagacacaaacattatagatagaaagaacaatagaaataaagatatttattcttaaggatcagcagactatgggttttggattaaatccagcttgttatttattttgtaagtaagattaattggcaccaagccatrtgtactctttgagtagttaaccacagggaccatgtggcccaaggagcctaaatatttactgcctggccctttatgggaaactttgctgatcccttagactaattcatgaatttatttggttttttcaacaaatacttcttaagtggatgctatatgccagaaatgtatcaaagcttgaatatagaatggtgagcaaaacaaagagtagaacagataaaagcaaaaagtagttattttggagggtgattttgactattaataatacaatatttgagagctgtaaagaaaataacaaagttc

SEQ ID NO: 19784 - DNA, 600 bp, Bovine  MMBT15283
gccctgtccatagatttcaagtgacataaagtgaattctttctttttacggctcaagttggcttgagttaggactgtatcacttgtaattgaaagagtacccgttaattcacccagatccataacatatctgaagcatctcttttatgtcccttcatgtcaacatgtgtgattctctcttcatgttatgatcctactctcatctttaaatttgttgccaggatgccctaacttggctactttgtgaacttgtgtttttagaataactgcaaccctggtcatagtatcttgctctgggtcrtgggaaaccagggtgaggactggaagtatgcttagggtggtctgtgagctactgagggtagagttaagataatgctgaaaaccagcatctgggctcttaagtagggtcgtatcaaaccaataaaagtgggaaattatcagacccaaggcaataagtagcccagacactggagcatagacagagagataaagacagttgatctaggatggtcagtctgaggatggagcctgagggctggggtctgtttagtgaacagaaaatagtgactcactaacattctcaggggatttctcaggagat

SEQ ID NO: 19785 - DNA, 600 bp, Bovine  MMBT01304
ctgtgtgcacagccctggtatctctttgggtgtccaaatttcctctgcttataagaaaatcaatcagataagaatagggcaccttgacagcctcattttaacttaatcatcggtttgaaggctctttctccaagtacagttacattctgatatactggggttaggatttcaacatacgagttggaggcggccacaatcctgttgaacacctttttggacgattgcctaatgataatcctgtggcgtaagcttcacttcccataggaggctaaacagctgtggcaagtgcctgtgagttaytgattatcacaatcttggactttcaaaggcagtccaccaggtatgcttcctgggggtttacagcacaaaatacaatatgagacacaaagaagaccttatttccttaagcagtgactagaagtgtagcatttctatgtttggttttccatcttttgaagttagaggtggagtctctatgtgatctacaggaagctcaggagattataatcttctctcttgtatgatcatccatgtgcaacttctagaaactatcttcaagcattggtcctctatgttgtaaaattttctttgagtcttttc

SEQ ID NO: 19786 - DNA, 600 bp, Bovine  MMBT03537
aagatcaatgttccacatgatcacggaaacaaaaagatttgctaaaagctagtcacatctgtagatctgtcatcagtaaggttgtacaggctgcatggtgaatgcaggtctcatttctgattctctgatatgtcaaagaacaggaagatgacttaagaaaacgtctgactccagatagaccagagttctctactctttacataatcccttccaccaagaactgtgacgaaaactgggtcttctgttaatggaaaaacaaagctcacttttcataaggtcttgttttttgtttccaggcargttgccatttagttaacatttacagaaagctttaattacacaataggttgcagcactattgctracagtaaatttaatttccatgacctcaaattagcttaactgttgatttcaccgtcattgaaattgacataatcctgttgactgaggatctttcactgctatggtaactgtaaagcacacagattaaaatgcaaattactgagttattggcagaaatgagcacatcattcctgcaagttgttttataaacctagttcccctgaacattttgaaggctaaatttctccatttaaacag

SEQ ID NO: 19787 - DNA, 600 bp, Bovine  MMBT06087
agttttaaaatatgtttaaaacatgtttctgaactgtcttcgcaaattaatcaaagataggtggaatattaatgttgctctgtgagttagactttttccttaattattaaatcctttacattttattataaaatttttagataaagccaaccatctgagcccagcacccacagctgaaagaacagtaggtttagtgtatttgaatctatttaacatgcagcagtttttagttcttagctctgcttctttcattcattaccctccccagcttccttatccgctgaaactttcctagagcamgataagaacgacatgcagcccccaacggtaggtaagaaaaagaaaaacaacctcattattcagacaggcaaagaataggaagatgtgcacaaaaagggagaaaaaaaatgattcttaagcaaatgaaaagtttacttaagaaaaacaaaagtgcaccagattaccattttttatttatttgactggcaaaaataaaaacacctcatcgcatacttgacaccaaagccaagggaaaccacggcctttcawatgctgagagcaggcgcgtgtgggggcttttcacccccagacccaaggagc

SEQ ID NO: 19788 - DNA, 600 bp, Bovine  MMBT18034
ggatcgcacttgcatttcctgcattacaggtggattctttaccgccgagccactggggaagcccctcggaggttcagaagtgggcctcacccttcctcacttctctgcttattggagtcacagcttctgccttgaccggaggatctgtcaagagccgggacagaagcttactggactgcacatcaggaggcgggttctccagccctgcctctggcccagggccatgccatggggggtgaccccctttccttggggtgactgagtcgtgccatctgtagggacctttgcaggtcccctgcrgtgctaattctcaccagagaccccaattctcaacagaaaccagtggtggctcctttcctttgctttggccagagcctttctaaatctgccatcgcaactcactggccaatcgatcaaaacctgtttacaccccaaaagggtcttattgcttgctctttccccatgaggtttttctcccagcacctggttcctggttggcagccggctgcccagaccagccagggtgacctggcagctttaccctgactacagaggaacagaccccagtgagtccgctgagctctggcacccgacgggcaa

SEQ ID NO: 19789 - DNA, 600 bp, Bovine  MMBT20922
tactctgcatgtaagttaaataagcagggtgacaatatacagccttgacgtactccttttcctatttggaaccagtctgttgtttcatgtccagttctaactgttgcttcctgacctgcatacagatttctcaagaggcagatcaggtggtctggtattcccatctctttcagaattttycacagtttattgcgatccacacagtcaaaggctttggcatagtgtctattacataaaaaacattgcgaatatactaacaaaagagcaattttttaaaaaacattgtaatacaactatgasaagacttccttctcttcctgaagacaggaatatggttacatttacatcaatctctgataacatttagaatatgaaattttctgaattatgtaagagtacacacacatttcttcacttcaccatgaagaatggaatcaaatgaaatattaacacaagactaaaacattgctgcctaaactctgatattataaagaagtcttttaataaatatctgtaattgaattttgttatctacacatttatgaattcttacagtcaaagaaatgggattaacatatatttgtttatattaaattaaag

SEQ ID NO: 19790 - DNA, 600 bp, Bovine  MMBT17616
atccagtggtccattggcaaacagatactcagaccttatgtattctgtgtgggggaataatgctcttggctatagtcaaagggaatggaaataatgctaatggatacagcatctcagagcacaacatgatcaggtattctgatttatctccttgcaccagtacaaaattagataaactggttaagctttcaaatatttccttttcaatggcaagtgatgtttcatgtactcatgttgtcttaaggcttcccagttattggatgaagtgtggatagcgaggtacatctgtaaacttgagcragccatacacattgaatgtctttacaagtcagtactgtaagccccccttacctacacattccatatccaaggagtcaaccaaggaagctcagactgtgttgttgttattcagttgctaaattgtgtccgactctctgtgaccctgtggactgcagcacgccaggctcctctgttcaccatctcccagagtttgctcaaattcacgtacgttgagtcgggagatgttctaatggtctcatcctctgccatctccttcttttgccttcagtctttcccagcatcagggtcttttccaatgaa

SEQ ID NO: 19791 - DNA, 600 bp, Bovine  MMBT07078
tgtcttttaaaggtcaaagatttaaagatttggtctttaatctaagaatcctttccctcctgcagtcatcactgcccacgctttctctctccccatgcccctctttctctctttttcccctcaccaccctttccctctccctctctctctctccatactgggagaaacagattctcccaattgtcactggcgccaggtatcgtcagttaaatctcaatcatttcaacagcattgcctgtagttcacacatcattgggcctgccagaggcagcatttcaaacacatgtccttattcagggsgagtcgggaataggagtgctctgaactgcacttttcaaaacctgttgtccacttgtgccaacagaacaggggaaatttcctttcagcactgccatgaagagcatccagatgttcccactgagctgaagtgcacctgcagtagaggctgcttgtaaccgcagctgcaggatcccttgggaaggcaagccagactgagagccacgaaatggtgtcatggacaacttggggccaagtctcaggggaaaggatgctggattttggatctgactttaacttctcatgctactctttcctggagaa

SEQ ID NO: 19792 - DNA, 600 bp, Bovine  MMBT07550
ttgtgtctttctttctctttttagtctagtggcaataccagtgtatgtgaaacatagcatcagtttcaaggagaacagttcttgtggtagatttgatattacaattggaccaaagcagaacatggggaaaactattgaaggaatcacagtgacagttcacatgccaaaagttgtgttgaatatgaacctgacaccaacacaaggcagctatacatttgatccagttaccaaggtacagtcacctaaaatcaggagtgagcaagtgtttctgcaatcctcattttgtgatctggggacatrggaggacagagggaagggtctaatatcttggttgaaattaaagctcttaacaacgtagaatgcagactgtgctgtgctctgccacaggagagaatcctgcatctgctgctaagtcgatgaacagaaaagtgagacattccttcttccttcagagtctgccttttcttatccattgataatccagaggttcactcactcttcaatgaggaagatgtaaaaactttttaaaaagagaaaagcattatgtgcatataataatctattaatggttaatagatattacaacatatcaattgttaa

SEQ ID NO: 19793 - DNA, 600 bp, Bovine  MMBT02242
taacaccctaaagctgtcttttgagatttcacacttcctgaaagtgtgataacaatttaacatatcactacttcctatgaatatttacactttaatgtgaaagtgaagactgtcaatgtataacccaaagtttccttagtagtaaaaaataaaatattttgacaacttgagagattttattactaaagggggttatcttcccattttctaaagatgaggttgactcaactctgattaatcctacttattctcagattgcctcagtctgcaaatgatgaaaacagaatgctgatttttttwaaaaatartctacttttattgatatataattttcagtggtgtagattgactctgattttaaatgtttctttctattatgatctatgagtttgtttcaggatgtattagacacttgagtaaaatggataattctcaagtttacacagggtacctttttctctgcaataggagaaatatgctaaataaagttgtattggcaaactgacttgtaccacaaggataatatgaattaaacccaaaacagtgtaataaaaagagaaggagagggaagaattctgggtgagtggaaagtttaacaca

SEQ ID NO: 19794 - DNA, 600 bp, Bovine  MMBT13733
aaaatttttcaatcagcataagagaggaaattttgagaatgagaaacggcttctaatgctgaccactaagaaatctgtggattagcagaaactctactgtgttggcaaatttttttcagcagcctaattcagatcctttgaaaacagtctcatcctttccatctgacccatttacttagaagtgataatgacagaaaataaagttactattcataaaacttcaagttcaaggagaaacttcagtcgtgcctaacacatagtagatattcaatgaatgtttattgaattgaaaagatggtrtgtgatgatctcaatattgtgtgtgacttgggcagatctggtattgcaagtgtgaaaggaatttaggtgatccattgaatgaattttgatgaagacatttattttagtcagttactggagtaaaataagggtctttggtgggttacacttactagaatgatatgtgctacagacatttgcagtcttttaaacattagaattacttcataccacatacaggaagggaatatgtgaactaatttccttatgagtctctagtggcctattaacctaaaatcaatttttatcaaaatttaattt

SEQ ID NO: 19795 - DNA, 598 bp, Bovine  MMBT10639
  misc_feature (1)..(37): n is a, c, g, or t
nnnnnnnnnnnnnnnnnnnnnnnnnnnnnnnnnnnnncacagataaacaaggagtgcacataacaacatattaaaaggcacagggacaactgtcctaatactcaaacaattattcataaactataattagaggggaaaggcacaggatgttcctacctgtttacaaaaattaacaaatctcagtcaaaccctccttcttttccttatcttcagtaattgtcaagcaagtccaactgcaaagctaaaaaatttgccaattctttctttcacgagtttacttctctctgtatacactgttcrttttcttcagtatttcatcagaagttccttagatctgcctttagataaattgcccctttttatttagctgcagcaggcctcacacacaaagcaaaaccaacatctatgaacaattttccttctacttttttcccatcaaattaagcaactggcctcaaaggagtgtgtcattctgtagatgctaaaaaagaggcatggcaggtgacctggctttcccaccttcaccctgtctatccatggtaaagttaaaattgccttccaatcctagaacaatcctccaatcccacctttcatccat

SEQ ID NO: 19796 - DNA, 600 bp, Bovine  MMBT04952
tgctgcagtccttggggtcacaaagagtcacacacaactgagtgaccgaactaaactgaaagatgaattagaacactgctgcagccaattgaaaataatttttacccatttctactcttccagattgcaaatattgaaatataacttcacccaacaacattcattgaaagtttgatatatctaaagaggtatttgagctcaaaaattgaaagtaagtattgtaaaaaaraaaaaaaaaacttaattacaatgcaccataatttcatcataactctcagggataaagcaaatctccatttmtagaacataggtatatgcatttggattactgaagtaaagactctctgtgttggtaattatatttaatgagctcaaatggatttgatatatagcatcagctaacacccaaaagattagcagaggttagtgctgatagttaagaatggctaaactagctctgagtgtgtaattacaattatgatttcttagttgcctcatttcaccaattgattcatccctctgtcttaaaacwattatttcctttagcatgattccctattcctgtaaagagcatttctttgacctctcatcctcatagca

SEQ ID NO: 19797 - DNA, 600 bp, Bovine  MMBT21336
tagtgagtcattactgctccgctctccaactgcattctgacttcagcccactcgtgcagctcaggagggctgtgccatatgttagtgccatgtagacagaatgtgactgggtttttttccctaaaacactgtcagagttactttttaaattaccttataatcttgatatctctgaagagtcatttctgtaatacacaaccttctggagatgactttataattattcttctgagtgctcaaaagagattcttcagcatttttagtccyatattccagatgagggaactaaagtgaagataycagattgagtgacgcaggttccacagccagccagtaaaatttgtactttctggagtcacggggctttatttggtaaaatacacccgtttgtaaaatgcgctttttttgcggggggagggggcacaatcaaaatattagtttgcttttattttctgaggtgattattaaactttaggtacagcaactacttggaattttttttttttttttaaactacttggaatttattggctgattcttgtgactggtctcatgacatccacctgagtaggtgaaagagaaaaggactgaatgagagat

SEQ ID NO: 19798 - DNA, 601 bp, Bovine  MMBT16473
  misc_feature (1)..(1): n is a, c, g, or t
ntggaacctgggctgccctgaaagaaaaataaataaaatgagctccaagttagcttgcaggagggtgttaaaatatcaagtgttgtggcgactgtaggggagaaaatccatcagacaaaatgattcacattcctctctcccagctagattcttttcagcctctcaagcagaaccaagcccagtttgaaacctacggtcaggactatttataatgaggctgagaaaaggtaaaagttctcatggtctagcaccgccctctagaaccttctgcagaggatggagaggttgtccatccacactstccagtacactagcccctggccatcgatggccgtcaagcacacgacaggagagcagaagttttcattttagttaacttgaataaatctgacatcctggagccagagccacggtgagacaaacaagataccaagggtacaacatttgggcaggcacccactctacatcactctgagaataagtgcttcagtaaattttgcaygccaggacctcactccagcctggaccctattacatccttaatgtgtcttttgtctgttgcttcatttgaaggcttcagcacttctcaccctgattacta

SEQ ID NO: 19799 - DNA, 605 bp, Bovine  MMBT07213
  misc_feature (1)..(5): n is a, c, g, or t
nnnnncattttccccattgggtccccccaccacccttgtaactgccacaagggagttcacaaatgtcccttaacttcttttaccagtcttttgttgacagatttaggtggttcccaggtgttttatttgctgttataacctgggctgcaatgaatcttcttctacatatatgtactttttgacaatatccatagggtacatttccagtagcgcaactgctgtgtcaaaagatttgagcatttaaaactttaataggtccaaactaccctcttcaaaacactttctctgtgttttaaatgatatamatctgatttgaaaacaggactcaaacaactaataagagttttgatgatttttcccccctttatgagtcctatccttagtgacccaggggcattttaaatgaaagaaaatatctatcatcttattaataactgtaagctgttcttaaaacacacttgggtgatctgtccttatcatagactactactctatgttttcaggtttaaaaaatgattttttacctcataaacaagtctgttatgactccatcagttttctagaaggaaccaaatttgtacttcttttccttgcactgttaatat

SEQ ID NO: 19800 - DNA, 591 bp, Bovine  MMBT07258
tgggtctgtgcatcatccatcacatctaaggcaaacttctggtgattagtattcaaagtacagtcttaaatttttcagacgtatgttgctgagagtcttcatgttttccagagtaggcccctcaatgttataaaactctctagaaggtttgatatagggtggaaaagaacaaaaagagcctggacaactggaaactttgatagatgctaattttttaaattgacgactctgttaatttcatttcattcattcattctgttaatagaaactcactattaattccttgttttcgagcctttktcatattgggatgcatttagagaattttactgttgtcatgtttcctggaggatgctgccggaggctgaaggctccccagggctgaaggcaactggttggtccagggctgtggtcactttaggacttgctctaccagcctgctccaagggtcagttgaaaactgtgatcacctttcattttcagatatgttacctttggtataattagattacatctttttgagtgattttatatcagttagtccttcaatccagtgttgcagtaaagtagatatcagtacacaaggctgaa

SEQ ID NO: 19801 - DNA, 600 bp, Bovine  MMBT07714
gcggctctttgtaatcagagtgctytgtggtttccataaaagaggaccagttcttctgaccatgggaagaacaaatatgaggcagtggttaagcatgcaggctgcacaccacttagacctgggactgaatccaagcactcacttattattagtgataacakgctactttacttaactttcccaagcctcagtttccttatctgtaaagtgggcgtgtgataacatcggtgcttttctyataagctttgggaggataaaygagttactgcagcacagtgcactgagcctaacaaaacttcytgctatcattgttgtctggtctcccagagccagtygggtgccctcctggaagtgaccttgactgcagaacttgaattcattgctctgcttcctgcactttgggcctccattcataatagctggttagatgagaacatcaacctctaaagctcagactcttctgatacgtggatgaaagctgtgaattttatacctaggaagaagcacacagccgtatgttttaagtgttcatggggctttaaagcccatrggtccatcggaccaggttttggaatccctggctcaaaggaaattaatcag

SEQ ID NO: 19802 - DNA, 600 bp, Bovine  MMBT18770
agatttctttacagctgtaaacagttggtcagtatttcccaccatgttggctctactctagaatccactcttcaataagaaagcgttggtgctgctgctagattacctgctgtctttccattgaatctctcaaatgcttttgaagtctttgaagttaatttctacttatggcattctacttactgagaatgtgwaagagagcatgrcctctttcttcaaggtagtcaacttgaaatgaatcttaattatttcacatatgctaccacagcttgaccttcagcaactatagaattttcttaygcatattctgaatggtggcaggtttcactgactgtgtcaccaatgaggttttaccatcttgaatgctgtactgttttctctctggaaaataacrcatgccatcattccaaagtggtaactaatacgttgtgtttgtattcaggtatctctgtcagttttcaaatctcttgttatggtgcccccaagttctactcttggttcttatttactgcatgtattctgaaaagaccattggaaataatgtcttataatttgttttaattaaaacctgtacttacagctagccatgtgtgagcaagc

SEQ ID NO: 19803 - DNA, 600 bp, Bovine  MMBT10279
cctaaccttgggctactgaaacagtgctgaggtcgataatctttctgtctgtcactctcctcaaaggggaggtaaccactggaagtggctttgctaggttgcagctgtcgactgaaaaaaaatgtacaatgtgagagttgtgggtttagttttatttggagcaaaaagaggactatagcctgggagacagcatttcaggtagctctgagagattgctccaaagaagttggggggtkggggcaatatatatgtgcttttggtgaagggagtacatgcaatcaagcacacgcgttttgcagmaggtttatgctagtcacaaggaacagatgtcaccatgaaagattttgatgcttttctagatatgaggagatgcaagaactgggctcataaaatcatctccagaaaatatctaaggatctgaaggcctgttctgccaggtttttccagatcacagagtgcctcctttctgatcttctttcaggaggtgttgaaggtcagcagctacagtggctcatagtttaacccttgtaaagatagaaagcaagtgtcaatttgtakgtgactaaggatacgtgtataatamtttgagtggatattgct

SEQ ID NO: 19804 - DNA, 600 bp, Bovine  MMBT11013
tggcctgagctgggtccctcttctttctcccaaagcccccaaaccccaaaggggcctctgctccatccctggaggagaaaccctcaggaggttttctctgaggtcaaggaaggtaggtcctgctgaaggagtcagttttaggcactgccgacccttttaaaggatccaaaagacagttgtttgaaagcaggttgagggacttccctggtggtccagtggctaagacttccacctcccaatacaggggcccaggttcgattcctggtctgtacgacactgtaatggtggatgcaagtcatyacacatttgtccaaacccatagagtgtacatcaccaaggaggaaccctaacgtaaactatggactttgggtgataatgaggtgtcagtgtgggttcatctattatcacagacatcccactctctggtaggatgttgatagtggggaaggctgtatgtgtggcaggagggggtggggtacatgcgaattctgtaccttctgctcagtcttgctactaccgtaaaactgctctaaaaaataaagcctaattttctaaagtatattggtgccctagtaatggcaccccactccagtactcttg

SEQ ID NO: 19805 - DNA, 600 bp, Bovine  MMBT12028
aaatgccactcagtactctgtaatgacctacatgagaaaagactctaaaacagagtggatgtatgtacccacatgaccgattcgctttgctgtacacctgatgctaacacaacattgtaaacaaactctagtaaaaagtttaagaatacaagtggctattaggaaatgttaagttacagacatgtgctcacgttctgttcctattgatgttgctgcactagagtttaaagggaattcacccctccaaacccaagtcttcactatggagcctaactgcttaggtacagaagagtccccatrtttcttaaatgcttctaagtgatgaaarttatacccaattgaaayatctgaaagtctctggattttgctcacttgtttctggatttttcatgttggtgggaaagaacagtacttcctacatgtgtacaaatatcacaggacatgctgaaccccaagtgcaccgtatttttaacgtgtgcgggaccttcagcccagtttacgagagaggacgtactaagtcctgagaaaacactcagcatcacccctgatgccagcagcgcattttctgccaagtgccccaagctgctgctacctgccctc

SEQ ID NO: 19806 - DNA, 600 bp, Bovine  MMBT22321
ctaggagtggagttgctggattatatggtaactatgttcaactttttgaggaaacgtcagacgggttttccacagcagctgcacaattttacattcccaccagcagtgtatgaaggtcctaattcctccatatcctccaaaacacctgtcattttcagtttgcttttaggggtgttrtctcactgtgactttgctaatgaccttttttaaaaatttattttttattgaagtatagttgaataaaatgacttctttttttttgaccagggatcgaacacaaaccctcatcagtaaaagcakagagtcctaaccacttgaccaccagggaattcccactaatgaccttttaacggaacatcttacttcctaacaaatatttctttgagtattatcacctaacaaatactattttgaaggcaatcatggctaaagcctttggtggtcgtcatagtagtcgtaagaatactaacagttactactactgccatgaacaccactgacactttccgtagcacatactgtgtggccaggctcattatactagacattgtatcctcacaataactggatgaactaagtggtattgttttctccatttca

SEQ ID NO: 19807 - DNA, 598 bp, Bovine  MMBT03404
  misc_feature (1)..(66): n is a, c, g, or t
nnnnnnnnnnnnnnnnnnnnnnnnnnnnnnnnnnnnnnnnnnnnnnnnnnnnnnnnnnnnnnnnnnattttaaaaactacaaggttaaaggatgaatgttttaagtagacatggcattaaatgaacactgctgtaaaacaaattttaatgtgatatttttctctccctctcctaaactcctatgttgagaggaatttaccagaaaaagggaaattttgttcaggcttctgtgtcctcattatttcattcatcactgaagtagtccattgcctgctgacaaacttcacacatcactacctrggaatgattgacagctgacattatctgcaagacttgattgagctaattgacattcacagtctgagcataaaaatgagagtgagggaaagtcttcctctttacttatgtgttcttgcttgaccttcatctgtgtttgcattgtgtggctttagattgtagagattatacttgcaaaatgttttcacaagtatttaggcatttttaggaatactcctaaaaygaataattctttaaagtttattctgtatatgactatatcaagcaaataattcttctgtatttaaaagctatgcctgag

SEQ ID NO: 19808 - DNA, 600 bp, Bovine  MMBT07931
agcacacaygcttgtcgtcatagttgcggtgtaacggaggggcgtgcacactgctgcatagcgrtcataggccattgctgccaagaggaaattttccrtagtggcaaaggctgcaaagaagaacatctgagcagcacacacattataggagatgaccccgcggcctttcaggaatccagccaggactgtgggaatgacagctgtggagtaaccaaagtccaccagagacaggttactgaggaaaaagtacatgggcgtgtggagatgcgagtccaggagcaccagcaggatgatgcccaygtttccaaccacattgaccaagtaaatgagaatgaatattataaagaggggaacttgcagatttttggtgctggttagtcctaggagaatgaactgtgtcacttcggtcgtgttctccatcygggttacttaagaatcagatgtctagagcaaagagaaacaaaggaacagagygtcaaatttagctaagattgcagtaacagcraaactgaaatgtttatatctcatgaacattttttcgttacagaaatgatacrtgcttcaagagtctccacatctaaagcatggacttatgagtga

SEQ ID NO: 19809 - DNA, 600 bp, Bovine  MMBT07229
tggaggatgcgatgattaagtggctgctacaggggtccaggcaagagactttagggcagtaggtgagtttgagagcaccctaggaggtaaccaggaccggagcaggtgacaggttggattgtggggtttaggggaagggaaatagcaaagacaccctgcaggtttctgccttgtgcagttggatggggtgatgtttccatttgctgagacaggaaacactagggggacaaccaggtttaaggattgaggctggaggacctttgagaccaccagaggaggtattaggtaagtatttggccstatgggggaatttactgggcttcttgccatcaccccatattaggaaaatgaaagcccaggggttgagatgacctaggtaatgggactcggtgagtccaggtctcgtgtatatgaagccatgacgtgtctttccagagtctgaagaagaggatgaggacagcccagaaagttccaacttgcctctcagctggctcccccagcaggatcctcaatcggacatgaccaaagaggatccaagtgaggctctgcaaggtcctgaggtccaggaagctggagagagctccccgaggttggggtatg

SEQ ID NO: 19810 - DNA, 600 bp, Bovine  MMBT00657
tggggtccaggccatggtgagctggcttgcggaaagggagagcggagtcgtatgcttggacccgagtccatgggggctgtgaacctcktcttttgctacatcatctctctgtgtcacctccttcccagcaccacaggtctccttactctgaaagcaacacactgcttctgtctcygcactttctcccatgctcttctctctgcctgaagggccctccccttctttatttgactaactgctgctagtcttttaaggctcatttcaggccctggggagacctgctctgacccccaggctggktcacagctccttctcggggcacctacagccccctgagcacccttttgcacagcctgcctcaccagtctggtgatcacttgttcacggtccatctcctccaccaggcagcagatcttgggcgtgaggactgtgtttactcctgtctgggtccctagtgcctttcatcaggcctggcacactggggaaagcttgtccaatttgattagtaatgatggtcccctcgtgtttgaaaatgtttgtttttcaaagcacgttcacgatccttttgagccacccagccgttgcagagggaggcaaggc

SEQ ID NO: 19811 - DNA, 600 bp, Bovine  MMBT13208
gatgtccaaattcttagcaaaaaawttttaatgttgtatttttatttaaatgcaatataaaaatttagtataagcatttctgcaccactggtacaaatactttataataactgccttctaattttttaatttcttccatttggtaacaagtatttcagttattacaacctaatgagcagatgscccactcctaaaaaaatgccattgttttccttatttatgaaaaaactgaaaccagagaacgttaagtaacccagtcaaggtgaaacagcttgtatatggcagagctgagatttgaaytagacatggtctatgttgaagcctgtactcttgatcattaaactgtactttcttgttacaggaatagactttctttttcatcttcctggttctcagtttcatcatctgtaaaatggttataatacatatctcataaatttgctcatgagtattaaatgagaaaattgtgtatcaagtgcttggaacataaacatagtaatgcttaataaatgttaactgttgtggttataattgtcatcatcattgtcattaccactattaaaaaaacaattatttgcaaggtgtatttcccaccttttt

SEQ ID NO: 19812 - DNA, 600 bp, Bovine  MMBT12703
tcctctgtccgtgggattctccaagcaagaatactggagtgggttaccacttccttctccaacagcacagcacaaagctagggataaacagagcttatgtctgaagtcattgctcagcaggccctagagtgagtcaccaagactctccacactctggatgcctgtctgtcaaatggagacggcactgcctgcctgcagtgttgacggcaggttggagttgaaatatttttcgttaaaggacctaacataccgtaatcactattcattaaaataagtaacatgtgaacagcacctacatgkgcagagtcctcatccatatccttacaacagccccaaacgagtgagtttactgtatatctgagaagaggggaacttctggggtcagagagcaaggcagcagtgcagcaggaattcaaacttttgactcccaacttcctgtttgttcactacactacactactctactactctcttccctgtgatacactgtcgtcttatatatttagaaatgaggaaatgcaacatggttcattctacctaaaggctccacctgtacactttatcacctccttgatacaactccacacccacagctccatc

SEQ ID NO: 19813 - DNA, 600 bp, Bovine  MMBT03589
tatgtttgggttctttgaccatgaggcaagtaggatcttagctccccaaccaggaatcaaggcagcactccctgcagtggaaggcgaagtcttaaccactgggccaccagggaagtactaaagagggaccactttaaagagttaacttccacaactaaaggtattcatctgtggttttacaaaatggtagttttaaaatttttatccctagaaatgaaaaatgttctaaatgtcctttggattcatggagtcaacactttaccagatagtaaattaccagatagtgaaatcattacttgmtstaaatgctacatggattatatgactatttgtaaagttcagcacctggttccccacagagagttcagttcagttcagttcagtcgctcagtcatatctgactctttgcaaccccatgaatcgcagcacgccagggcctccctgtcactaaccatttattagccatgaagacgcaaaaaagtcagttggatgtccccagatgaggagaggcctgtctcacagagccctgctgccctcagtgatggaggaaccgatgcacgatgctcaggccctcctacagcagccctgcaatgaacactt

SEQ ID NO: 19814 - DNA, 600 bp, Bovine  MMBT11107
attcgaaaacttgattaccatcactactgtcttttccccttctagtaatagtgttagttgtgcaaactacgtctttaaagagcctttctgttttttgatggatataaggacatttgtgtctttcctttactgcctgcaggacccagattagttctgaaaatacaggagggactgaacacattttttgtcactgattgatttattgagacttcagaatgtcatggatgttaaaccaaacacgggcaagtaattttgcaattctaaataatatgaaataattcaatggggacttggagttgrgggtggaaaggtagattttgagagaagtcaggaggaaaaaaaaagtatttggcttgaactatgatgaatggccaggagaaatatcaataacctcagatatgcagatgatataacccttatggcagaaagcaaagaggaactgaagagcttcttgatgaaagtgaaagaggagagtgaaaagctgggttaaaactcaacatttaaaaaaggaagatcatggcatccagtcatcacttcatggcaaacagatggggaaacaatggaaacaatgagagactttattttcttgggctccaaaat

SEQ ID NO: 19815 - DNA, 600 bp, Bovine  MMBT02941
taagggcaaagaatctggaagagaacatatatatatatatggatatcactatgaagtgaagtgaagtgtttgtccctcagtcatgtccaactctttgcaaccccacagattatagcccgccaggctcctctgtccatggaattctccaggccagaatactggagtgggtagctgttcccttgcccgcagattttcccaacccagggatcaagcattgcagtttcaattctttatcactggagctaccagagaagcccacacctaaaactaacacaatattgtaagttgattatacttcartaaaaactttagaaaaagaaattgccattttacaggccctattgacaaattggatctaggcaataattacaaagtctgctaaaacccctgggtcaaataataataataaaacataaccacaaaactttaaattaccttcacaaccaacttcatcttctcccgtgatacagtccagctcaccattgcacttatactgctttggaatacaaacacccgatttacagagaaaaccttcacctcggcagtctgtgcaaacacaaatagaagaggggattttttttcattcttaagatgcaataa

SEQ ID NO: 19816 - DNA, 600 bp, Bovine  MMBT03905
acttggtgctgcccatggattgtctacagaggcaactgtaaatgttttgagttgaaagaaatggttgtctcactaatcataggcgtggtgcttccctgaagttcttaaaagttgttctttttacctcccctctgaaggtagcttagtacagtgtctgtaaccctagagttggacataatgcacaatttcattcaacttactactttcacagattaagaaactgagactcagattttggtgatttgctcaaggacaaagcagaaaatcaggattaaaaacctggctcacaattcccagtcyagtcctctttctgttatgacattttytttttttttttttaaagcaatgggttgttggctatagaatgaagaaaaaagagcatgtgaaactttttttttgtttcaaaccatcaaactccacctattagtacatgtctataagttaacagatagctattctctgcctacaaaatagccaatatcttaaaaattcaaacacaaacagatagagcagtacttactttataacatatgtgccatggactttcctaagcagttctctgggtggactctatgcttctttaggatacaaacattgcat

SEQ ID NO: 19817 - DNA, 600 bp, Bovine  MMBT19231
taccacagaacattacattaccacacctcccacccacacaaatgtactcctttcaaatgtcttttaagaacctctatttccacaaaactcattactttggggaagcctttccatattagcactgaccagaggcaagaattctgtacttttctaattattatctaaaagtagttaaattttatatggacatctaaatctgcttttttgactgcttgtctgtctggctgtgaaagaagtgtttctttacttatgtaaataaatatatggtaaaaaacctagatatcacttatgtagtaatartaatttctatcatctatttaaaaatttctgtcaatcactccaagtaattatgtctgtggacctcctttatttctcacatcaatactctaaaataagtactgccatttccattattttacaataagaaaggagagattcacaaaggtcaagtaacttgctcaagggcatacaggtattaaatgacagagcagagatttgagctaatacaatctggtctagagtctatgtgcttcagcatttgctatatggtcttccatttgctatatatatatactttggtcaaacaaggtcttcttttgg

SEQ ID NO: 19818 - DNA, 600 bp, Bovine  MMBT01583
atggctccgttttctctgaggtagagagatggtgctccaaaaactagccttcttggcaaaaggaagctgacagcacttttcctctctactcgttcagctcaccaggttgaagcttcttgttgctacaaagccaagagcagcagctatgcagatgatgyccagcactgatgccagagtgtccaccaatgccaatgttatgggtatctttgcacagccaagaactcaggagctatctctcataggagtcaaagctgcagaagatggctgaactcaaagcccacrcagattttagcttccccsagttaaaaygatcaagctcatcaaatccaacccatgagtttgggcaacagtctgtgcatacttcagttcyttttttaggatgcatttgctttaggaaactctaagaacactgattgtcaaaatgtaatgtgtagtttctaatccagtagaatatgagggtggctcagtggtacagaacctgcctgccaatacaggagagcgggttcaatccctgggtcggcaagatcccctggagaaggaaatgacaaccaactccagtattcttgcctggaaaatcccatggccagcagagcctggtgg

SEQ ID NO: 19819 - DNA, 453 bp, Bovine  MMBT12541
cagagattacacctaagaatttcccttgtagtaaccccatgaagtaacactttccacataaatacatctattttcccctaggcagaaataatgttaaaatggaaattggcagcactccttgaaggatgatttagaccaaactacagtttgcataatccatgaaggaaagtataatagaatgatgatatctatgctgtcttgtttaacactaattcatttaatccataattatatggaatgtctaccttatgacaaatcctaatttacatattgacaatacaaagataaatcagacaagayccctayttataaggaatttatattctgctgaggaggcataaactattgataaaaataaagaaaaataatctactataagtaccagaaagaaaataaaacagggtgatatatggttgcaggtagggaaaacttttgatgaatgtcaaagagagt

SEQ ID NO: 19820 - DNA, 447 bp, Bovine  MMBT19793
ttacacctaagaatttcccttgtagtaaccccatgaagtaacactttccacataaatacatctattttcccctaggcagaaataatgttaaaatggaaattggcagcactccttgaaggatgatttagaccaaactacagtttgcataatccatgaaggaaagtataatagaatgatgatatctatgctgtcttgtttaacactaattcatttaatccataattatatggaatgtctaccttatgacaaatcctaatttacatattgacaatacaaagataaatcagacaagayccctayttataaggaatttatattctgctgaggaggcataaactattgataaaaataaagaaaaataatctactataagtaccagaaagaaaataaaacagggtgatatatggttgcaggtagggaaaacttttgatgaatgtcaaagagagt

SEQ ID NO: 19821 - DNA, 600 bp, Bovine  MMBT11269
ataacatcttgccccagaattgagttcagttgtttmaaaaccaggaactcgttcaaacaggcagtgcacacctggagcgcttaagggagargtgtgaggcaggggaggtccctgcccactctcgccygtgggattgtttcttagcctgcttwttttgcaggagtacctttttattcatgtcttccctcaccaaggtraccagcagtttgagctgtaggaaggcacaggggtgtcctcctgtccacagggaccttggcatcatccttggagggcagagacgccgaaacagaccccgaagtwcaggtgctggccaatgaagggagggcgactgtctgcacttggaacatctggccgatgagtgtcctgtggatgaaacatctgggaggttgcctgagagacttagtttccatccagatgttctttagacacagaccattacatgaaatcattagttgctcttggcaacacgcccaggagttccaaaccttgcagattcctaaatagactttctgtaaagagctggaggggtgtgtccatgaagatgacttacagggcctcagagagaaggtgcgatggagggatgaccctgccaagagccct

SEQ ID NO: 19822 - DNA, 600 bp, Bovine  MMBT03980
gtcatgttgctgggtagggtcacccaattcccagtctgaaagttctccattctacctggactctaaagagcaaaacaatatttaataagctgaccttgaacccagataatatcagtgggcacattcacaagacgagcacaaggttttatccagctctgcaccggcagaattctgaattctctctgattttccattttaacactgggcagtactttgagtcgtgagtggctttaaattattcagttgcaaataatacatattaaaagtaagtttttatgcatcgctctttgtgttctgggmataaacacctgtcagtgacttggttgtatacaggctgttacgggatgagtgggtcatatgttaccrctccagtaccactgctgggcaccagacagtgatgggaggtggatgccattgagggaagctgagaagcaagtgtctgtggttaaatattgatatgttttgcatagtccttgtcaattaagtgctccttgatagccagctagagatctgtttacaacccagtctcctgagcactgattatattttagtcattccaatgttgaaatactcagtctcaagtgaagaaagaaagaagca

SEQ ID NO: 19823 - DNA, 600 bp, Bovine  MMBT04765
gtcagatcatttatttcatgacatgattctgtgaaagcaaacaatgtaaatattagcctgaaacataaaaataatgatagctatgggaaaacaactctattttctaaatgaggaaattatatgttgagaacatcatgtttttagaggtataagaatacagcctaatgctattgcttatgtcacaccagaaaacaacaattctatcacaaatatgattaaggtctttattcttcacatgggatcctgaggctaagtgactcagacagtcaaacccatcacctgcagttgatttaacaaggrcaatactaataaaggacttacattcatactgctcactttaaatacatgtctctagaggaactcacaggcagaactggattgataaatatttcaaatagcctttatctaggagttctgagagtttcttattgacaatatcaaaggctttagggaggtgctctgaataataaatgtgcaaatacagttatagaaaggtctttgaaggacaatgctttttaatttaatagatgggttataggatgaggtagtgagcagttagccagggaatctaaytctgatgaaagagtgccaactctatga

SEQ ID NO: 19824 - DNA, 600 bp, Bovine  MMBT03089
gaccctgggtggagtggggaggctgataaaggagcagagatcattgcagctgggggggctcccctatctcctctggaggactatatctacctcttctttgatgtctcctttcttcctctctggtctcttcactttctcaatctccaaggtctcttcccttttgcttgtgagcactcacttgccttttctcttttaaagaaacaactggcccttctgcagcagaatcactggatttctcaacttccttttactaccaaattcctcagcaaagtcattgacattcaccatttccttggctcyccttaactccctgcagtctggttcctatcttcttccctttcccttccccctactgaactgatattgtcttcttcaaggtcacagttgcaataaccaccccgccaccagtatcaagatggcagcatttattgagcgcatccttgtttcaggcctggacccaggcccgatcagtagccatcatccatttgtagataaggaagctgaagacctaggaggtacttttcttgctctgcctaaatcaatggctgagcagagatgtgacccaagcctgtggtgctcttgctgttaaacactgtgcct

SEQ ID NO: 19825 - DNA, 600 bp, Bovine  MMBT07874
atcagctatatgtatacataatgtcctttccttcttggacctccctgccagctcccccctcaatcctacccatctaggtcatcaaagagcactgaagtgacctccccgtgctatacaccagcttcccaccagcgatctatttcacagctgctggtctgtgtatgtcactctctcccgattcatcccaccctccccttccccctctgtgtccacacaccccttctctatgtctgcatctctgttcctgccctgcaaatatgttcatctggaccattttttctagatttcatattcatgccrcaatatacgatatttgtttttctccttcygacttacttcacagtgtatgacagactctaggtccatccttttaatagtactttctgggaagaactccagaagggctggcctcacttccccttcccctcccatgagtgtccaggcaggagagttgatcccttgaaggacmcaggtaagtctctggacccagcccagcatttcagcaaggagctgatcacaggcttgttttcaccccaggtttcaggctttttaaaaatgaaccaggttctacttaacatcaaaacattttcagttctctcc

SEQ ID NO: 19826 - DNA, 600 bp, Bovine  MMBT12947
atgcaataaacatttaaacatatgtcatattttaatatattttcaaagctcctaactgataatttctattctttgaattaaatcatagagaagtcttgtaggtcaaatccctcccaaatacaaattcttgcttctttacaatccaatatcaagtttctcttttaacactgccttttaaaatattttggttgtttaaagttccttcttaattattgacctaatctctttctttgaaaaatctgcctctttggtttcagttcttttctctgtgattttaaggaaatgcttaaacatttcatrtgttatcaagacttactcatgaggatttatgctggagtgttaaccctgggagaagattacctcacagcatagtgaaatagttattgaaagcgaggttcccttctgtgtttgcgtgttcagatttgtttatactggattaaaaatttcatttggtgtgtgtatatctatacttttccaattcaggagagcctgatggactacagtccatgggttcacaaagagtaggacatgaaggaggactaagaactcatactttccaattactaattgcagtttatgtcttccttctgcccttctcat

SEQ ID NO: 19827 - DNA, 600 bp, Bovine  MMBT13817
gggaaagccagccagagtccaggaggggagcagccggatgaagagagggtgcagccaacttgaacggagatgaactgartcttggggggaggctgccttctctaaaaccaaggattgtttgtagacttcatcccttagaaataacgaggggcttaaaaatgaaacccccactctgccattggcagtttggaggctgtcttcttatcacagatgatgataatgccacgaagtgttaaccttgggttcagattgcggattctaccttccttctgaagcaaagtggatggggtggggaaataygtttgcagaagccttaatattcaagaagtgtggacttccgtcagccccatgtatcatataatgttcatggggaacatcagtttaaattgagtctttgaccctgacttatcctgattcctctagaatccacaatctgtaagccagcttgggtaagtcaatcacagatcttggcagggctacatgggtaacctactgcagacgattatttcatatggagggtatatcagtgtgatcagctaaactctctcttccacagaaggatgaatgtaaaagacgaaaaagagtagaaagtcttggagt

SEQ ID NO: 19828 - DNA, 600 bp, Bovine  MMBT22770
atcccggaagatgatgatgttggatgtcatgggtcccgggacaccatcgactctcagggatgctggggcctggtggcatcatggctgaattggctcctgggaggtgatgacagcatggttaaggtggatcctggggcatgaagacattgcggttggagtggatcctgggagatgatgacagcacaattgtgggggtctgtgggaaactggggcatcatcagtcctagtggatcctggtagaagatgtcaccatcggccatactggattctggaaggtgatgacatcactggtcatggtgsgttctgggggatgatgacatcatcagctgtggtgaatcctgggagatgatgacaccatgttggkggagaatcatggatgatggtgacaccattggctctagrctaccttagaaggtgacactatagttatgatgaatcttggatgagaacgagaccctagctgtggtggatcctgggagatgaacacgccgtagatcatagggaaccctgggaaatgatgtcatcaccagccatggttaccacgggaccccagstgcaatgcggccatgagtggtggaagtcttgtggtgccgatgatgt

SEQ ID NO: 19829 - DNA, 600 bp, Bovine  MMBT22771
ggtgatgacagcatggttaaggtggatcctggggcatgaagacattgcggttggagtggatcctgggagatgatgacagcacaattgtgggggtctgtgggaaactggggcatcatcagtcctagtggatcctggtagaagatgtcaccatcggccatactggattctggaaggtgatgacatcactggtcatggtgsgttctgggggatgatgacatcatcagctgtggtgaatcctgggagatgatgacaccatgttggkggagaatcatggatgatggtgacaccattggctctagrctaccttagaaggtgacactatagttatgatgaatcttggatgagaacgagaccctagctgtggtggatcctgggagatgaacacgccgtagatcatagggaaccctgggaaatgatgtcatcaccagccatggttaccacgggaccccagstgcaatgcggccatgagtggtggaagtcttgtggtgccgatgatgtcagtagcaggcacaccccaccccccaccccaacaggaggccaggactctgcagagttgatgatgtctgtagttgtggcagagagatgtggggccgcctaaga

SEQ ID NO: 19830 - DNA, 600 bp, Bovine  MMBT09461
gactgagtgtgtatatatatgtatgtgtgccatatctgtcagtggacatttatgttgctcccatatcttggctattataagtagtgttgctgtggtcatcacggtgcatggatccttttgaattagacttttccctggatatatctcttatgagtaagatttctagatcataaggcaactcaatttttagtgtttaaggaacctccatattgttctccctagtgaaaatcagccacatttaaagtcatttttcaattgaagacttcccccaagaggcagtctttttatcctgctcacctstgatctatttattgcgttgcctgaatactccagtcatgctgccctaaaccatttcattcatatctttgctttcaaacactgtctatagtatggctacagcagagaagttgctccttcactggttttaaaacctttgggttgtccaaagagggaagagaaagttcagttgcacttgcttttgccactttctaaattgatgcattctcatcaactgcatataccccatgtaactcagtaaagcattcagaagaatcttttctgagacagatcactaaaatccttcttagcagagagggcagt

SEQ ID NO: 19831 - DNA, 600 bp, Bovine  MMBT00837
tgaaagccttactgcaaagtgatgactagtcagatctagaactcagggtttatgactcttaatcagcgttgttatcactaaaccatatccccagtcatggccagccataagtaagaacagatagaaaaaatgtacctagagttcccccgaaaggccattagacaccagtctatagagtttcttctacacaccaggagctaatctgtagattcagttttacatctcacatctcaaaacttagtaaaacagccaccaaggttgaataaatgggttattattacagcccttcatctccctgcsgcaggctctcaaatgcctcaatcagagctgtgtgttgcaagcatgcctttgttattagcctgtttggtggaggttgttcactcttccacgtttctttgaaaaggacagaaacaatttggaatatctttccttcagcactcctaggcttgtttcaggtggtgaaggtagaggtcactttattaataaaaccatcaaggaaggctgtcatggtaacacattgccttgattccttgaagtgcaggagacaaagccagaaagagaaactttcaagtctataaatacaggcccagcattgctcaa

SEQ ID NO: 19832 - DNA, 600 bp, Bovine  MMBT21532
ttcgtgtgccaggcatttcacagtgggttccctcgcctccgtgatggagaataaacctgtgcttcttgcaggctccctgcctgtgcctctcagcctgtcttcccccagcgttacctttgctgaatttacctgctgcctctcaatcccagtttggtttctctgctcttttacccttcctgccctatacatttgcatagtagccaatagctactccagagaacaggaggtgagtttactgaagcttgatattagggcaagaagcagagtatgtaggctgcgtcttcaaatacaaaatgtgtrtgatggcttgttgggggtggtgcatgcgtgctggtcacttmagttgtgaccctgcgaccccatggactatagcccaccaggctcctctgtccatggggattctccaggcaagaatactggagtgrgttgccgttcccttctccaggggaycttcccaacccagggattgaaccctcgtctcttacgcctcctgcattgcaggcaggttctttaccattagtgccacctgggaaatccagctgggggcggggttgtcttttatttgttttctctttgtccttttgtcggttttctctctct

SEQ ID NO: 19833 - DNA, 600 bp, Bovine  MMBT03495
atcaaactgctctcatttcccccacaatatctttcattttcagggaaatttgttgtgcacattatattagattggcaaacatattaggtatgtaaattttggttaggccaataaggaaattactgtgtaacacagagttattgaatacaaaattcctattcagctgtatacaaaacaaagacttcagtgaatggataaataattccataaggttttcaaaaataatttttaactgcttctggaactgaacactatctttaaaaacaatagagggtctgaaaacaaaattaactgggtttmattttaatacatgggaggagaaaaacacaaccaaaaaaatgtgtgtctgtctgtgtgcctataaaaatttacctttattttggttgtatttgcttataaaacaactaacaaagacatactttgtttcagaaaaaagtctcagtttagaagtatataaaaagttaaaatccccccatcccttcctcagttatcttagttacctctcttcctcaaggataactattaatttgataaacattacaacagtctgtttctcatatacatttacaaacacacatatatatatagtgtgtacatgta

SEQ ID NO: 19834 - DNA, 600 bp, Bovine  MMBT03186
acttccaaaactagcacacaagatgcaaatggtttcaaaaaatagaccccaagccaaattgaacacaaataccaarggaagagaagcagacagacagaaagagctacatgagagtctaggcatacccagggcaggtttaattagctctgccctgcagactttctctgacacacacacaggtatcccatacaaaaaggcaactggaggtcttctagtatcactggaactctgcagatgcttccggatacttccaaaaacatctagataccccacacatgtactctttttgagagcagcaasaaggttcaccaaaggtgtgagacagtctgtggctggaggattgccagacatttattaagcacctactgtgtgccaggcatgtgccagccaggtactgtcacctacctacctactgacctgaatgcattcatttcccaaagtcccctgaggtagattgttagttctgttccacagtcgaggaaactgaggctcagtgtttatgatttatacactgcaaggggggagtctaatcccctgagctgcccaattcttagtttaatatacttcccattagccacagacatgtatgtgcaaatgtta

SEQ ID NO: 19835 - DNA, 600 bp, Bovine  MMBT19809
taatttcctttcctttctggcaatctcaagtatattttaagttcaaytgagtacacgtcctcctttctcaatgaaaccatttgacagttctcaccatgaaaacctctctccattattaattctcaaaactcattttgaacttcttgtttatttcagtttaacaattaagaatgtattactgraaaaaaaaagaatgtattactggrtttcctgaattacacatattttctccaaaatactgtttgtttcaatacagaaaccgtscccttgtcttctaatatgcctaagtgactaccatamgcatacagwgaaaactcagcagatgcttgttttttgatagttgttaagttggtgaagaaatggtggctccattatcaataacttaatggtcaaggactaaatgctactttaaaaattctagcttaatcttgaaatagaatactctgtatctggacttacccaagaatcctgccatgtattataaatctatttttatgaataattatagatgaaattgtagataaatggctcttgtgttcggttgttctgggaagtgcttaacattttcaaataatgctatttactttttcattgtataac

SEQ ID NO: 19836 - DNA, 600 bp, Bovine  MMBT05187
ttagtgttatttgtgaagaaatttggtatcatactttgcttagaagtaattatctggggaaactgaaatttcattttcccaaatctattagttactgcaaatttaagctaagataggccatttctgtttaagtaaattagtcaaaagccaaaagagaagttgagctcaatgagagattattttcagaatctctttgtatcatattcaaacattacaacttaattaacaaaggctacagctctaaaagcgcctgtaaattccgtttcttcaatgtacctctctccctgtgtccctattcayctctgaaaagtcaatactttctagactgtaacatttgctgagacttkaatttccaaataaatttattcttttcagttcttcattttattgaaactgtaagttgacattcaagaacaattcaccctaatgttggaaaaaaaaatgcttttccattattgctattttgaatracttccaggaaagaaaacagattacaacttttgataacatacgaagaaaatattattatcacagcttgaaatctgttaacagggactttctaaggaacaaacattaaagtacaacagaaatttaattaca

SEQ ID NO: 19837 - DNA, 600 bp, Bovine  MMBT05729
atggcaaatggtccagaagcactctgggcctgaccaggaaaggctgtgctgggatcccagacatatgctcatttttgtattggctttggtgggaaatagggcaatgcttattaattctaccactgggaagaaactgattagctttctcagttccaatgaaaaattaactataaataaatagataaatgatcagatgctagtgctggaatcagcaattgtgactagggagtggagctgtggtgggatcttggatggcaacaccttggcagtgatggaggagcagttcccagaaacagggaygtgttctcagaatgggcatgctctaaagaccaggtgrtaagtttccactgtggcaaagttcactgtccctttttattgggaaattaattctggcttttgaatacagagctattttaggcataactgatatggaaaaaaaccttgaactttttttccaattcaacagaaataggcaaaactttccaagaatcagtacaaatttaaaattatttagaattacactgggaaatatttggaatcatcctgtatagcacacaaaaaggtaaaataccatcaaatatcactgattccagcaaacct

SEQ ID NO: 19838 - DNA, 600 bp, Bovine  MMBT05035
aaccttccacctcctaagcagatactaatcagacaatatgtgagattacagaacagttaagtattgatgaaacattttctgagaaagtacaaaataagatttttttmatttattttcagtttcctggsgttgaataaaatcatttggaaagaatttatcatactgcagggaagataaagaatgaaaattatcctaacagatcactaaaaatatccagtcaatctcacaaacagaactcaagagaatatttgtgtattatagcacattaaatggtaggtgtttctttttgatgattattcyggtgactatctcaaagaaaatgtgcgttcactgagaaaatgtcctcactgcaaaacaacagataattcaataccacagttctgaaaaataatgtatttctgttttcaaaatgagaagtrggagattatatttcaagtttcttaactccttaaaaactatattatctgactgagtaggtgaaagaattataaatctacactcccaattcattctcttaaatgcctctttgcaaataagcaatgaagtattggcaaagtactaaattatgccatttattaattgcctaaaagcatactgaaa

SEQ ID NO: 19839 - DNA, 600 bp, Bovine  MMBT18041
ccagacccaccctcacgggcccccccgtagctccttgtgcagggcggtctccgggcattgtgccacacccaagcaccaatgtctccactcagctcctgccagcagatctgcccagtaggtgttgttaatgtacccattttacagagaaagcaactgaggctcagagagaaggcaatgactggtcgcagggctcgccgccagtgggaggcagagctgaactcaaactctgactcactctgggccccgcacctcacgtccaccagcacgtcctccaaggagccactcagctgctagaaatcycaaatctactgtgaggcaggtgtgtgcagagccctgtgtgtttcccatctatcctcctgacaaccctgagacaggcctttgcagaagcacaggaggaggccctgccgttgggtgtgttctgaggctctgtcctcgccgcgtcctctcctcctgcgggtccccagaaccagacagcaagctcccgggccgtgtggtacccactgagcccagcacaaggccaggcctcagcaggggccccctgacggcccagggtgcacgcttcactctctgaggaagcacccggccctgcattcgtggggc

SEQ ID NO: 19840 - DNA, 600 bp, Bovine  MMBT09035
taaagagtgctatacaagaattttaacacaggcagtctctttccactacatactgaacacctactatttgcaaggcatggttgaaggtgctgggaatacaatgtgaccaagactaagttcctgcctttgcagagcttacattttaatgggaggagacagataataaataaaacaaacgcatataactttaaaatcacaatctttatatttacatctcatttccccattaatcactggtacgaccttgagccattactaaccccctctgaacctcaactcataatcatatgtagaactggrctgatgtgggagcaaaataagaatacttgtaaaatggcttttcataccatctgccacatgctgctgctgctaagtcacttcagtcgtgtcygactctgtgtgaccccatagatggcagcccaccaggctccctcryccctgggattctccaggcaagawcactggagtgggttgccatttccttctccacataacaggggcttaataaatgttaatggttgaatctggatcccaacaaagtacragccccacgaagagaagcgaaaggagttttggaactggagaactggttgaaggagt

SEQ ID NO: 19841 - DNA, 600 bp, Bovine  MMBT10015
gcaaggcttctgaagaatgcatactgcattgtacttctatatccaccccctgctcattttattttgataaattttaacttaaaggcataataccttagaatgttctgttgacacatggagtgtttatttgtataatcaccatacaatttggcattgactacgtttacaacatgattataaagcactgtagggctagaaatgcaaatgccattaaatcaagaactgtaattttggttctgtctccacaccattgctttgtccaagtcccccattcagagtgacaaacaagacatagatggytccaattagtcatcaggcttgcactagaactaaaaacaatctgaaagggaaacaagggggtgctggatatggaacaaagtgtgagtttgacaggataaaaaaatccataactaaatatttgttgtcatgtgaaaagggcagcagagaggaatcagattctgactctgtgtgcccttgaacaaatcatttttctactctggatcttgagcttctataaaactaaggaatgggtttaatggactaaagtaactatacaatgactaaagttttaatagtcgaatataatgctgtttaaatagt

SEQ ID NO: 19842 - DNA, 600 bp, Bovine  MMBT13346
cagccctctttgagttgctagaatctgatgagcctttgccctcaccatccsctctgccctaatgtcctttctcccactcttcctggcaaacaccgaatagccttcaagtctttgcttaaatataacctccttggagaaaccttcccctgccatcctatctaaaggtgacctcctcacacttcctcagagcgccctgtatttttccttcagggtgcttattgtcagttatggttacacctttacttggggggttgttggttcatgtctgcctctctcagaagactgaaagcaccaccaagrgtgttgggtttaacatctgggttattctgcatccctgcgcttagcatggtgctagagaaataactgttgtgaagaaaagaggccagtgcggaggctgtcctgctgccatatttccagcaggtggcgttccagggccgaacttcatcagtcccctgactccaggagggctccccgccttccattctccaacctcctcccaccccctgcctcggagccctctgcactctgctcacgtctttgagtcttgaggttgcacatcatggttatgtttgccctcatctcctacagggggctagtggc

SEQ ID NO: 19843 - DNA, 598 bp, Bovine  MMBT06578
  misc_feature (1)..(191): n is a, c, g, or t
nnnnnnnnnnnnnnnnnnnnnnnnnnnnnnnnnnnnnnnnnnnnnnnnnnnnnnnnnnnnnnnnnnnnnnnnnnnnnnnnnnnnnnnnnnnnnnnnnnnnnnnnnnnnnnnnnnnnnnnnnnnnnnnnnnnnnnnnnnnnnnnnnnnnnnnnnnnnnnnnnnnnnnnnnnnnnnnnnnnnnnnnnnnnnnntaaaaataagccttacaccccaactgcaattggagattcaataaatcacatccaaagattcatttcaagccaaagctttttccctgactaggagaccttggattgtatragatggatgtctctattaaggcattatcacagagacaactgtacagcaatgtgttaaggagaagagtaagagaataagacgtgccctgcgagaaagtatcaacagactaaaaatacagtcatcattgtcatccttttaaacagtatgatctgaacgtactcaggtcagaaacacctcctagctgtcactggtaagcatacagatggcctctgagtatatgcatcactaaagcaccgagtttgcatgcccatctcaaaacaacatagccatggggaactacgataaagctgaaattttc

SEQ ID NO: 19844 - DNA, 578 bp, Bovine  MMBT12498
agattagaycatgaaataaataattttattcatatgatctgggagagaaaaagagacgaagaaaggacatatgcttagaggttatggaaagactgaaggaggaaacaggttctggaagaaaccagaaaatttgtcagttcaagacatggggaaattggctccaaaagctgagacagagaaagagaaaagagataaaaaatgccttacattttattgcagagtatacttcccagagcatctggcaaaagctgtctttcttcattcctacttccaacactagattttcaaatgaacctatcyccttccttactggaaaatgtctagaatctaaatataaatgacctcagtgatcccactgacctccagtcaggcattcagaaggccctctctggagaggattactgagaatgggggcaggagagcatcatggcctaggagtgtttccagagttggagctcagtgttaggcttgaaagaagggcaaagtcagggaggaggtggacattctggaagagtaaacaacataaacaaacactgagatggaaatatttcaatgtgcttacaagacagtgatggcgg

SEQ ID NO: 19845 - DNA, 600 bp, Bovine  MMBT07957
ataaagaatccacctgccaatgtaggagacaacaggagatgtgggtttgatcctcggatcaggaagatctcctggagaaggaaacagcaacccacgccagtattcttkcctgggaaatcccatgaacaaagaagcctggtgggcgacagtccacagggtcgcagttggacaygacttagcgactgagcatggatgagcacgcacacacactatatatatatttcttaaagtaaacaaaactactcaaagaaaagcatcttctacagctacatccttccctagtaaggcagargggcaggyargkcctcttaccattaaaggggttatctcctccaaagaactcatggaaaactttttctgggttgccatggaagacgtaaccagttgtccatggggtctgcgatccaaactccagaggaattccgcccttcagaccctcctctccaaacttgtcatagatgcctcttttcacagctgtggatatgtgtcaccttgagaaggggccagcatgggggctaagagagctggagggctgggaagccagaggatatggggcagggaggaagaagcagggtgaagacagccttatttctaaagtgc

SEQ ID NO: 19846 - DNA, 598 bp, Bovine  MMBT12839
  misc_feature (1)..(33): n is a, c, g, or t
nnnnnnnnnnnnnnnnnnnnnnnnnnnnnnnnnttcaaatgggaaaatagcaatattagcacagttattaagagaaaaattgcttgctcatattattgcaaaatgctctaagaaataaattgttatgatatataataataaaactgtctatgctgagaggctttggtgatattttaaattaattgatttctaaaatgttatctttactgtaatagatcagtttgttatagaaatctctgcatgatgtcttaaaagaagtgtgttgcaattatacatacaataaaccaaaccagtaaaagytcatagtctagacttgtagacactgtatgatgggaagacagcattgaatagtggaaagaacattaagttcaggtatgaactttggtgtaacctgattgtgaaattatcaaggtgatgaacctctcaacatttcagtaaactgacatggaaaattaagatattaagtctagttacatccaaaaaaatgcatgaaatacagcagatacttgacacttgagaatcatatgtccctcctcccgtccactacttccaacaccaacataatatttcagtcctcttgcaagcaagaggcaaccac

SEQ ID NO: 19847 - DNA, 600 bp, Bovine  MMBT04294
tccaatgcatgaaagtgaaaagtgaaagtgaagtcgctcagtcatgtctgactcctagygaccccatggactgcagcctaccaggctcctccgtccgtgggattttgccaggcaagagtactggagtrgggtgccattgccttcaccgtgacagtcactaaactagtcttttcccagaagccaagaattcatatacatataaattgttctttggagttattcaaggtactatttgcccttttatttcactgagctataattttcataagcttactttctagcatggaatggcgactcctygtttgttttcttcactagttaaaaacagaaaaggaactctccaaaactcaccatgaaacctcattagtatttgcaaactttattcacacatcatttaatttagtcatatattttgttggagcataaaatgcttccaaaggcttttggtattttggtcacattatattaggtgtctgttgccatacaacaaactgcccaaagcttaatatcttaaaacaacaataatttagtatttctmatgatcctctggttggatgagcagtcctygtctgctttgcctggcctcactcgtgtgagttt

SEQ ID NO: 19848 - DNA, 580 bp, Bovine  MMBT23268
acactcatcttcctctgggtttcttattatgtgacaccatagctctccttatcattttagccaatttcaggcagtgttgtctgttatctatggccaaaaccatgataactgaatgctgctgctgctgctgctaagtcrctcagtcatgtccgactctgtgtgaccccatggactgcagcccaccaggctcctccrtccatgggattttccaggcaagaacactggagtggggtgccattgccttctccgaactgagtgctagaacacccaaatctcaaaccagaaaaaaatcccctatakaaattctatatccagcaaaacatccttcagatatgaaggagagatttaagacattctcagataaataaaaagtgagagaattggtcactagcagatctgccctaccagaaattctaaaggtggtctttcaagctaaaatgaaataacatggactataactgaaatcaacatgaaaaaatagagtactggtaaaggtcacgacataggtaaacataaaagacagtttaaaatagttctctagttgtaactctcccatcttgttggttgtaacaactgcatg

SEQ ID NO: 19849 - DNA, 600 bp, Bovine  MMBT09003
ggaaaaggacttaagggaagaacactttactaatagaccttgcattaccctggcagcggcatttgcaccaaacactgatggaaagagatcctggggcaggcgaaaaaaggataaaccaacttcacgttggcattgcccccagaggtgcttttccgtaaatgaatagattgtgaatgtttcagctttctcatttgtcattttatctattcagcactcatctactcgtctggtacccatgccccattttcctcttggggaatcccaccgtgtcctctgttctcagtccatgagattccaggkcagctcaagacgaagcacatgatccaggcttaagccaatcagtgcagtccattctcctggggatagaggttagtttaagaactggcagctgatcaatcaaattcaattagataccttgaggttttctctaggatttctgggaaaaagattcactctttctcttaaacctcaaatctgggagatgtagggcctggaactcggctattttttgatcatgtgaaaactgagtctgaagccagcagagctgagagatggaaagtaatcacgtcctgacaatggtcctgaatccagttgtgtctg

SEQ ID NO: 19850 - DNA, 598 bp, Bovine  MMBT01602
  misc_feature (1)..(87): n is a, c, g, or t
nnnnnnnnnnnnnnnnnnnnnnnnnnnnnnnnnnnnnnnnnnnnnnnnnnnnnnnnnnnnnnnnnnnnnnnnnnnnnnnnnnnnnnnatctgtctgaggagaaaattatttgaactgggacttacgggacatgaaggagcccacacaggtctgtggccgaagtaaaccagaaacaaggaccaggggatgcaaatgccctggatgagagcctgcccggcgtagtggagtgacagcggtcgccactgcggctgtactgcagtgagaaagacgagagggaggtagaggccagtggaagccttrcagatcatggccacgcgtgcgaagggctagggaaggacttggtctcaagtctgttttaaggacattcctctgctaagtgcaaaagggactggatcagaatgagactcaatcaggaacatcagttgagctcttgaaacaatctaggatttagtcttgaaaggtagtaaaagaattagggagaaggagagaattatgtttggagatggaattgtttgagcttgccctagaggaaaagagatgaataataagtcattatacgtgttctcttggttgtaattcattttgattgagaaatagt

SEQ ID NO: 19851 - DNA, 600 bp, Bovine  MMBT04144
gcagaaaatgaggagtcctgttctctgactccacgtggaaaagagagccatttctttttgctcctttgaacacaagacatcctgtacatctgtcacgagtgcatttggcttcaagccacagaaactccaagtaagcaatggattaaacaatttaagggattttccttctccttgtgtccaactgcccatgatggagtagctccataatgttgtcaggtacggggctgcttctactctccgattcagtcattttagtcggtggcccttaccctcatgcttgttacactgtggtgacaagayggtgctgtccaagcagaaagggcatagagaaataagagaaaagcaaaaattcatgctaaggaagctgtcaccttaaaaatctttcttgcccaggaacttccactcatgtctcattggccaggatgatgctcatgaccacttcttgcagcatgggaggctggaaatacacttttttacctgagcacattatttccccttgctgaataataagaagaagtgtgggaaatggacaggcggcaatcactgtcttccacactctggtaccaacagtctgtggcatccactaccaaaagctgacag

SEQ ID NO: 19852 - DNA, 600 bp, Bovine  MMBT09787
gtgttgttgcttccaagttagaattctttcagtttctccagctgaactaagatctgtcaccttaggacctgtgcacacggtgtttccatgctggtgccattcttttcctcattctaccagctcctccccaccccaacatacatactcgacctgctgatcttggggtttcagatgaaaggttaggtctctgggagatctccctaacttacttccctctagactaggcgcatctactatgggtgtgtgcctccctcacttttcttattataactcgtatcacagtttattctaattgtctayttaagtctttattctttggtagactgtaaacttttagtttggatctgtcttgttcacattttcagtatacagcatataataagtgctcaatgacaatatttatggtacatttctgattttgtcttttctccttggtgtgaggacatttatacccagtgtggtagtgctcactcattagtcatagatcttgtaccatcgggtattatgtgcggtgagggatgtgatgtcagaggcacctctggaatgttgtcactcagtggtggttttcactctgggctttgtagttacagatgcctaagg

SEQ ID NO: 19853 - DNA, 600 bp, Bovine  MMBT09103
tggtgataagtccatataagcaatcatcaccactttcatacccactttccacttgggttgtaggacaaccctatcggttaagaatattgttcacattttacaaaagcaattaagatgcttagagaaattgtagtaaaaggaagcctgagtcttgaaagatgcttgcctctgatacagcttgcttaggcagagagaaggaccatcttgcccttaaaaacagtctcaaaatgttagagatacacctcccaacaccaactccctccaaaatatccattttcaaacactatcgtttatgtgctrctgtgtgctgatgagtctattgacctgtgagcataatttagagatctttgaatttataaaccaactctccatggctgtcatctcctctttgatagcaraaagctgagggattttctctcccagtagttccaacttccttggggattttcacaggtatcagtgaagcagactttgtctttgttcaccagctgctgtggctttatagagcaatttgctgttgttcagtcactgagttatattcaaccctttaggaacccatggactgcagcatgacagacttctctgtycttcgctatctcc

SEQ ID NO: 19854 - DNA, 600 bp, Bovine  MMBT09500
tccaagaacattcctcaggtaagattttaaagttttttatatgaaactagcaaagcttctgtataatggaggcaaagtttaataattttttgaagcatttctattagaagagtaatgcttgttccttgtaaagtgaaaacaaaagtacttgaagcataaaaatgaaatctccttgtcgccactctgccaccagagcatagttttatccatttgttttgcttttggctgcctcaggcctcagttgcgggtgtggaataattttccttgcggcacaggggcttctctctagctgtggtgctygggctcagtagttgccccttggcacgagggagcttagttccccaaccawggattgaacctcatcccctgcctcattataaggtagattcttaaccctggaccaccaggggagtcccctatacaattttctttttattgctataatgtatttgacatatgtatgttgtattttctctgaaagccatttgtctgtttttgaaatactgcagtacagaaattttcaagcatgtcctccaggtactccacagtgacttgtctgcgcctctctgataggtgccttttcgcttttatttttttact

SEQ ID NO: 19855 - DNA, 601 bp, Bovine  MMBT04832
  misc_feature (1)..(1): n is a, c, g, or t
ngtataacaaaaaagtacaagtctgcaaaatttcttctacatccaaagaatctttggaaagtccaaccccctgtgactcatttgtcctaccccataagtaacattattttgaaatcatttttagcatgaagaaggattttctccaagttgaaatgagaccatgagagaatgaaagttaaaaaaaaaaaaaaaaaatgaggcaggaaatgtttactccatgttcagaacatatagaaatgcttagagagaccatggataccttcaaagaaaaggaacggaatacaattcaccaagactcttycctccttcttagtacagtccaagaaacagcccattatggagagctctgactctgattttcaatttgtgtcatgatgttggggagagtcaatgccaagattttttcactctttagatctttgcagagttgtttgcagttggatagatagaagtgtttgtgacattaaaaggcagcgatctgtcctggactacagcttatggcaagtgactggtctgaattgccttctactcaggcaagcaaaagggaaagttgaaaaagaagttcgaggattaagtttccatgtgtgtctccattcacaac

SEQ ID NO: 19856 - DNA, 600 bp, Bovine  MMBT04543
ccccctggtggccacgaggagcggcagcgcccacactcccacgtggaccatacactctcaccttttctatggagtatatcaccgcgccggccgagcctgtgtctttgtccgtggcctgcacagataacaccagggagcccaccggcaaggtctgtaacaaaagaaagtgaaagtgaagtctctcagtcgtgtccgactctttgtgaccccgtggactgaggctcctccatccatgggattctcaagaatactggagtgggttgccatttccttctccaggggatcttcccgacccagaarttgaacccaggcctcctgcattgcaggcagatgctttaacctctgagccaccagggaagcccctctaatacaaaaggtttcatcaactctgagttccaatccattttcttcatgcccaagcacatgcccccacctggagttccagggcccacagccctaccacggggatagtgacagaccttccagaacctgaagcccagtgttccacaggtggcccccttttcttcgcccgggctgggcctcttggggcatctgtacatcggcaggaagcagagttcccacttctcctctccctgatgg

SEQ ID NO: 19857 - DNA, 600 bp, Bovine  MMBT06181
ctttaagttaatttaatttctgattatttaatttctttttgctgctgttcaaagtcacatttcatggttgttttgtagtcttaactgctggagcttattgacatcaaaactttctagcattggagacgaaagcattggcagttgtgtgaacacagtttcctaagaaatcagtgcttacatagtttcctaattttccttctctgtcttctccagatttggctgacagctaaatatcaaggcctgaagacaggcacatttttttggccaggatcagatgtgaaaatcaatggaattttcccrgacatctataaaatctataatgkgtatgtataactgtactttttctaggacctataacacagaacagtttattttcttatcacagcctgagttctagcatttgaatgatatgttatctgaaaaatgagacctatcaaaataagaactctatttcaaagagttttaaatggatggtagatagtaaaactagatgaggtgtttttttttttttttctggagtttttctagaaagcactggtggtaacatgttggagtttgtgttcagatctttggataggaataagaattgaagtcctggtg

SEQ ID NO: 19858 - DNA, 600 bp, Bovine  MMBT06253
accttgtttttacccatcttctgaaaatgtgttgaatagtgtatttactatttaagttagtagtgctgaaagtcagtgtcttacatacaggggtttcaaattcaaatggacactgaggtaattaaaaaacaagtgaagtggaattgcattttctttaaaayaccttggggtagcttttagttttacaaagaaagataattttcattaaatatgtggcccattgtttatcattttttatgaagatcctcttcttttagcagagaaatagtataatgataaatggcatatattgtgtggccrtaggtcrtggagacaggaggaaatgatgaggacgatggtggggttcaattttcacaatgtgagaatcgaacccaaggttcccaggtcttatgaatttgcaagagaaaccatgagcctgttttcttatgttgaaatatcctacattttatttatttaaacaatttttaaaattaatttttattggagtgcagttactttacaatattgtgttagtctctactgtacaataaagtgaatcagctatacatacataacccctcccttttggctttgcttcctatttaggtcaccacagagcac

SEQ ID NO: 19859 - DNA, 603 bp, Bovine  MMBT12383
  misc_feature (1)..(3): n is a, c, g, or t
nnnttgtatactttgccactgctgtatttttatttttgcacaatttttgacagcgtagcatgaaatgtttttagaggactattgcatattttctgtacatttgttttatgccactgaactgagattatcaacgacacccactcttagcacgtgaataagagcactgtttgtaatactttgtgtactgcaaggtacaagttgcattcttgcacagaggctaatttggggtttgtttttttttttttttctggggattttaaataattggttttgtgttttctgaattatcaatctttcaagaaygtttagaatcttttckttcttaaaaatagtctaggagcaaactgaatatattctgtgacatttaaaaccttcatagaatagaaaaaagtgttgacttttaaagcttgttggattttaaaaggaattggctatatttttcaacactgtattaccttaacgaaagaaagttaaaactctaaacaaatggaaagtactataaggcagtattgtaaagaaaaggcattacttaattaatttggtttttttgttgttagagaacaggcaagagagaggtttcttatttcagtgcaatacatctcc

SEQ ID NO: 19860 - DNA, 600 bp, Bovine  MMBT03198
acaccaagaattctgtggtatgccacagtttatgaccttttgatctctcttcagggaataaaccccagaaatgacaagagtaaacaaaggtgtacttcctatcccccgcaaccctgaccccaagatcctattcatacttgaactctctcctaygctaattagacactgctttcttccagattggataggcatattatggtatcaagaatatgtatctactgtacacaagtacactttaattggcttacttggaatcaaaagtcaatgaaatgttagtaacagctgagaacagtcttatastgagagatcatgtttagcttgaaggtcaacaaaggcagtagtttgaagatgataagtatcaaatttttaaattcagaatctcacatccagggagttaattaaacagacttccatagcatcttaggatgtgcatgcttagtaacactgtatattattagctcttgacagtttttaaaaggttgaattataggttctttcacagaattcacctaatcatctttcagttccaaggaaatagtctggaattgctataaaccaaacaacaacaaaaatcccattgacccaaagagtgatttcatt

SEQ ID NO: 19861 - DNA, 600 bp, Bovine  MMBT07176
taaaatgagagaatcagaccagacttctgcttcttaactttttggctgtgatccctttgaaaatagtgaatatctgataaaaacctttggactagtttaccaatttacacactctaactttctataggagatacaagactatcaatttccctgagttgggcaccagcagaaggagttccagattaaccaatatatgatttcaaatctctgatatcactttaacattcaggtaacttcttcacagctgctgctgctgctaagtcgcttcagtcgtgtccaactctgtgcgaccccatagayggcagcccaccaggctcccccatccctgaagccttcctaaacccttaaaccagattctactagtataagtccttttagcaccctgtaatttttcttcaaaatacttatcacaatcctaataagttatcttttttattatctatccatttcaacacactctcaacaccatgatgtcaaaagtatctgtcttatgacaaagattttctccatgaccaaactctagacaggttcctccaaaccctcttcttgactagggctcaaccatgggctgtaaaagctatagactcaacacaaatgatt

SEQ ID NO: 19862 - DNA, 600 bp, Bovine  MMBT13166; identical to SEQ ID NO: 4532

SEQ ID NO: 19863 - DNA, 600 bp, Bovine  MMBT00717
taatgggtttcccagacttgtttgcatagttcatatgaagtatgtattataaattgagtatctattagccctgtgaaatgtaccacctggcttaaacatttttaaacataggaatgcaatattgacaaaaatctggtataaaagcttacaattttcttttatttttaactctaaaaagtgttattatttttatataacaatgttggacacatcagacttaaaacaatttcctaacattcacctgtccccctgcttaagcaaggtctccagaaatggtccccaaggacaatatacacatawaagtgattgattaagaaagtagccagggaagagaacttctcagtcagataaagcacatccatgggtaaaattatacttaattgttaaatattataaagtatctcaaagattgggaacaaaagatggatgtttaaccacttctatttttaatttgttaaattgaaacatagttgacttacaatgtttcaggtatacataaaagtgtgtatatatatctatatacacacatagtgtgtatacactatgtatatatataaaagtgtatatatatacacacacatagtgaagtgaaagtgaagt

SEQ ID NO: 19864 - DNA, 602 bp, Bovine  MMBT13797
  misc_feature (1)..(2): n is a, c, g, or t
nnattgcccaaggggagtttagtttgatggtctcaaagatccttcccatttcatcacacctctctgaaaaccaaggtgaggccctcagagtctccattcttcctctggaatctgccttcagagggcatgttgtctgggcattcttcttgtgaacattataagttgccaggcaaatatttttaaaatatctgtgtattttatatacctttacataccacatttgtaaaaaaaataaaaaagtccttctggattacttccaggaataactggagaggattctggttttgcttaactttagaacyaatttttctctcaagagtaaatttctttggggacaaaaatagagaaagcgtccactgtagcccaaaggcaacactgcccaggtgtgatatatgttcacgatgccatgtacctgcaacacattgacaggactgaagaagtgacygtctctccgtgctcctacctgcctctcacctgtcattcccacatctacagagagaagacagggagcatagtagcttcagcaacacctgaaacttgaataaaacatcaattctcaggctacaacacagacttactgaattgcagattttgcaagtggg

SEQ ID NO: 19865 - DNA, 598 bp, Bovine  MMBT03077
  misc_feature (1)..(157): n is a, c, g, or t
nnnnnnnnnnnnnnnnnnnnnnnnnnnnnnnnnnnnnnnnnnnnnnnnnnnnnnnnnnnnnnnnnnnnnnnnnnnnnnnnnnnnnnnnnnnnnnnnnnnnnnnnnnnnnnnnnnnnnnnnnnnnnnnnnnnnnnnnnnnnnnnnnnnnnnnnnnnnncctgaaattctatacattattcacaatgacatttacaatagcttgtacacatattttagcagacttctcttactttatttcttcaccctgggtggtttttagagaaaaggaagaaagagaggatatggtttcaaaatgaagasaggtctcatgaaacaaaccataatgttcccagcactttaccactaaaaatgtttaagggtaatttagagagaatatttctaaatgtgatttctgatacatatacaaaaataacatacacataaatacctaaatttcataatggcaacatgtrgcatgagggctttttccttttataacaaagatggataaaaagaaaacaaaggttaagagaacaatagcagaaaatgtccaatattttcccttaattggtttagagttctagaacaaaataatagaatgtttattactaagacacag

SEQ ID NO: 19866 - DNA, 600 bp, Bovine  MMBT07462
gcctgacagggtggttgttactattaagcatttatatagcactttacattggccaagtgctcccaatcatttattagttaattctcccagcactctggagccgtcagtggactctggttgccatttctccaatctggagacgaggttgctgaggtcaggcgaggccagatgcctcgtgtagggttacctggctcaggtggcccgagtcactggctctgcctttgacccttgactacctgtgggtttcacgtcttacaatcttgttgtcaacccactctaatctccagtgaggtgccctgygrgtggatgctcagttgctcagtcacgtccaactcttctgtgacttcatggtctgtagactgccaggcttctctgtccrtgggatttcccaggcaagaatatgggagtgggttgccatttcctactctgrgggatcttcctgacccagggatctaacctgtgtctcctgcatctcctgastcggcaggcagattggatggctgaaatgcatgacctcagtgacactccagaggctgctgtcaatttacagcctcatgaagggatgaacactggcttcagagtcaaaatctggttgtataa

SEQ ID NO: 19867 - DNA, 600 bp, Bovine  MMBT21057
gaccaatgaaaaggaaagaagaaagagtacttgaagaaagaattactctgcagacaacattagagtcatgtactggtggcctgcaaggatgagggcagctgataattttacaaaatattttaacatggacggcatctaaagaaaatgtaaagacatgtggaatgtatcttacttatgtaagatataacaattttttctaattgcattagaggttggcacaaatgactttccataattgaaaacataaaatattttttccaagaaagatgtactcaatgatacaaaatccaagtataagartaacaggtagatttgctgctaagatgtaatctgtcaataatgggtctgaaaaattactgaaagtacattgcaaagacgagtacaaaatgcttgattaaaactcaaactctaggtaaactatatccaagaattackgagtctcacatttttaactgtccggatgttcactgaagtgcacatataaattttgatagtcatattctgtattttagtatttatgattattaatcccttcagtcagcctgcactctctaatccattagaattttcccaaaygtgggtttagccaatatgcagaac

SEQ ID NO: 19868 - DNA, 600 bp, Bovine  MMBT10450
accttttacagcatttctgtggtaacttcagtcttaattcatattaaacagtgaatggtatatctttaacaggaaccgactgcaaacartattgtctgttgacatttattcctaagaatcgttcctaactgaaattcttgaagaatctttcttttcatgcaggttataaaatttgatctcctgacgggttttgtttctggttagcttcagaaagttaatttggagaacattaaatggtagaggaacttagacaactactcattaagttttattttctgtctctttctcctaaagcataayggatgataagatatattcaagatgatgtttactaatttacattttcccttttctattcttttgcctttaacagttatatttcttgttgtggttaattctatgaatagaatttatgtcctatgtcttaaagttatagtttctaaaactattttaattttatttttaagtaaattactctatctcttgaatagatacattttctgcaaactagcccaaaaaagtacagtattatttaaggtaatgttccagcatttttctttataagatagtaaactcaacttatttttaagacccttgatg

SEQ ID NO: 19869 - DNA, 600 bp, Bovine  MMBT02119
attgtgttgaaaagcaatggacagagcttccccttgggagaggctggtgccctggcactcttctgatggcagctgtaggactcaacactgcacccctgccttcttctctaagtccttatggcctcatcagggatgaaaaagcctgagaagtaagtagcaggagaaggctttttgcctgagtttgaaagaatggcagcctgaaacaaaaatggaaaatctctctagaagtggttctgtgaccaagtacagattttttccaccctcgattgcttgtagatcagttttgtggaaatccacctrtgccttttgaagacccaccttttaagcttcaggatctgctgtggtttctaatcccatgttcctctgagtgctccccacccaccagcatccccactcctaagcttgtgtgagacgggcctattctgggttccttaccatgtatagactgaccagcagtgaggtcacttgagtgtggagccaaatgatgctgcaacttgtacttggcttttgacctgtcctcccacaggaggagtccctgctctactcattctggggatctgccccagagcctgtccccttcctcccctttccctaagttgg

SEQ ID NO: 19870 - DNA, 600 bp, Bovine  MMBT11616
tgcctggcaaatcctatggayggaagagcctggtaggctgcagtccatgggctcactaagattcagacatgactgagcgacttcactttcacctctcactttcatgcattggagaaggaaatggcaacccactccagtgttcttgcctggagaatcccagggatgggggagcctggtgggctgccgtctctggggtcgcacagagtcggmcacgactgaagtgacttagcagcagcagcagccaattaactaaaactgattgctgtagagctcagtcagctctatagtcagagaaaagayggcagaagccctcatcccagccacgatgcctccctgggaagtgccaaggagctttgctgtctgcacaagctttcccttaggtaacagctcactctgaagttttagaagcctttgtcattcctattttcaagaaatcttctgaagtcttattactctcttacaagtgaatctaatcagtaaactttctgagagtacacagtgctatggaaatgtactgtatgataaagatgacactagagatcagtggggagatggtagattgcttagaagatggtgctgaaaaaccagccaatttcagga

SEQ ID NO: 19871 - DNA, 600 bp, Bovine  MMBT11268
taccccaggtggtgagactgtgacccactattacaaccagactggtgtggtctagagttttggcaaatattaagtgtttgtaaagacagctcactgagcatttgctatgaatgtagtgygatcaggcaatgtgttaccacttggcactaagacatttaatcctcataacaaactacacaggagggctattcttaatctctttttatacaggtttagagagttaaagtaacttgtacaaggtcactgacccaggaagtgagaacatgtcacaataaacccaatgtctggcttgaaagtccktgtgcacaacggcttggccgccatctatccatccccaggaagactgacagctggaagcagtgtgtgcgtagactcatggtttgaatggtggtaatacacctactatgtgccagcattstgcagttcacatagttcatttaatcactaacaaggctcgaggtagttagcaatagctgccttttgcagataaagaaactaacactcagaaagttcaggtcatttggtcatagcagcccactaatgtacagctggggttcatattcaggctgtttggcataaaacccctctctctttccagcc

SEQ ID NO: 19872 - DNA, 600 bp, Bovine  MMBT04005
ctcatacaagattcagaatatctccctttggcatacttcacatgtctgaaaatatgctgcaattttcagggacaggaaattagttcaagtactttaaaaaaaaaaaaaatttgtacttatatattctttttcatattcttttccactgtggtttgttacaggatactgaatagagttccctgtgctatacagtaggaccttgtttatccagcctatagatataaagttagcctctgaaaatccctaacagtccatggggtcacaaagggtcagacacaactgagccactaaagtgaatamctaaaggccattccttccgtcctcaaccctcccacccccttggcaactataagtctgttctctatgtctgtgtagctcatgtacttttatgaaaagatcgatctattcaaaggcaggtagtgtcctgaagttctaattgttttagagaaaagggggcaatcgtctctcttttggaatgctgaatgacctcgattggtactgtaatccccacagagcttttgaacagatgaatggaaattaccacatttctcccagcttagacataaccaaaatcccttcttggagtcatcagtaaggaat

SEQ ID NO: 19873 - DNA, 600 bp, Bovine  MMBT09597
gaggcagcaggatgcatactccctatttcttgattttgtaaaggcctaatcagatatgatgaggctatgggctctactgggtcttcccatttgcattattgatctaaaaaaatataacttacacaggcaaattctgaatgcaaattatcagaattggtgcagacacacgtgaggagctacaagcacgactgtacaagcccctgccttatactgctgcaacacgcgacatgggagcgcacaggacgtgctgcagaagctgtggcgctgcaactgtgccctcaagatgggatctgagagtcrgagcttycaagtccccttattcaacagcacgcagtttaaatgacagatttttcttctggagttagaaggccaaatgactgcaactatggatataaaactacataggcagttgaatgtaaaataaaaggcaaaactaagaatgggggggaaaccactgcataaggggagtggaacttgggcaacttcccctttattctttttctttcatacagttgcgacatcttttgaagatgaagcactctcttccccatctcagccatcaattacgggatgctgagtctctcgggaggcattattaac

SEQ ID NO: 19874 - DNA, 600 bp, Bovine  MMBT06543
ttggatgccatcactgactcaatagacatgagtttgagcaaactccagaagattagtgaaggacagggaagcctgacatgctgcagtccatgggataacttagcgactgaacaacaacaacattactcactattagagaagtgcaaatcaaaaccagatcatgatatttttgagaagatgaagcaatataggtataaagcatagagctattcagtgctagggaactgtgagttttcctcttctttcttcaaagagaattttatttgaattttaaaggaaggagattttgagagcaaatawtcatcctctagcagctactgagattgcagacctaacactcaggagcagaatccactgtatttgcaaatccaaaagtgagcaagtgtcagcaaatgcctcttttcttgctccctaaaaggtccmtactatcccctaaccctgtgtcaactccactaacttctcactctgcatacttcctaagtaggatcagcatggagagagtgagtccaccaactcaatgcctttacccgctggtgctgccctcaggcctggcctaaagtagatgctcaataaacgtttgccaaattgaattttcttctc

SEQ ID NO: 19875 - DNA, 600 bp, Bovine  MMBT08911
gatttatcatactgaatttctgaatactgaagacaaagaaatcttgaaaagcagttacagagaaactgagaagttatttacagggaaataccaattcaaatagcagtggacttcttgtgtgtgacattatggaggccagaaggaacagacctaaaaattttcaagcactgaaagaagaattatcaatagtgaattctatattaaatgtaactatccttcaggaatgaatagggaataaagacattttcagaagaaggaaaactaagagaagggtcctggttatttgtctctacctctgcycatcaaaatagaattcacagtgaaaataagacacagtgaatattcagacttttwaaattattaatactatgttagtaaaaaggaaggaacttaaaaaaagaaaaatccagttatgggtagctaagctttgcaaacaggtaaagataacatgggatgggcagctatgtgtcagagtgcagaaaatccaggataaccatggaatattcttctgaagtatcaatttcaatcagtgaaactaatttgaaacctccattatgtaattttcatggtagatcaattacttccacagagttagtggtt

SEQ ID NO: 19876 - DNA, 600 bp, Bovine  MMBT02002
taggygaggattgtgaatataaacgctgtcgattttttttttcaggttcaagttttatcttgacttagcagccatcatgattaagcaaacatttttaagttcaactcatcttgagtgaaaccagctgccgtcattaggcaaacattagatttgggacatctgtcaatacaaaaatcatttgctctattgattgccacaccaatgtagaacaaagtctggaccgcctgagtctatcagaatcagcttgtttcatcctcacctcgagggctccctccccttcaaataccctgtccaccagasaaaatcctcagttcctrtgggtctctttccttctccccaaggactattatggtccagaaatgtagacctcacaccctttacttcagaaagtgttagtcgcttgggttgtgtccaactctttgcaaccccacagactataacctaccaggctcctctgtccgtgggattctccaggcaagaatactggagtrgatagccatttccctctccaggggatctatgcaacccagggatcgaacctgggtctcctgcattacaggcagattgtttaccatctgagccaccaggaaagtccactta

SEQ ID NO: 19877 - DNA, 600 bp, Bovine  MMBT13034
tcctaagccagcattgcatatcgcgttgcacaacactgaaacgcgcttgctttaaatagtcctcatgatgcttgccgttatcagctgggcagggcccaggacagcccactcggacgagcccgttcatggctgagctccagagctctggcctggccagctctgttctcagatgtattcctttatcaggaggacccgagggactctagctgagcccagcaatatggttggcagcctraacctagttttttcttgttgttgttctgctttgatccggtttggtttttattatatcatgataaygttgtcaaatgattaccctgccagacaaaactatcaagaccattcacaagattgatttaatggcggcgtacttgaggttgaagagaatattgctttccagagtatataatgaaggttttaaagactgaacagatcaagcttgttctatggaaaaataatatgaaggaagtattaggcagggtccctagtagaatttagatttatgcaaatcttcagtgtcccataatccaaaattaacaaactcagaatgacacaaatttgttaaaatgtaatgcaaactaaacatcttaatgcatcttt

SEQ ID NO: 19878 - DNA, 600 bp, Bovine  MMBT22276
agacacgactgagcatgcacgcagtctrttttgatcttgsgggagtaacttccatggggacacatgcttatccctgaagaccctacagcaagccctgggccccctgcagaccaaccaagtttgagaaggtacacggtgaaaattctagatgcagacagatttaaatccgcactcagtaattgctacttactggttatatgaccttgggcaaatgccttaatctctaagcccttgtttccttttctgaagaatgaggataataacaggatcatggtgcaggctgaatgacctcatgcatgyaaagtgcttggcacaggaaacagctctataaatgcctgctcattttaatattaaggcaagaacgagtcccagcctggggtctgagtttccagctgtccctccggggtcaacccttctgggtagagagaaccagccacaccaaaacctcctcttgaaaaatccacaatccaaggcgaccctggtggttcctctgatctgcttgcaattgtcactgggcctgagacggatttctaaaaaccactttacttctacagtagaaggcagtgttccttcccgctattcagctgagcagttaggaac

SEQ ID NO: 19879 - DNA, 600 bp, Bovine  MMBT08259
agagaaaccaagccttgtaggccacaactgccgaagccctcccaggctaggccccgcatgccacaacttactgagttcttatgctgtaactactgaagcccactgcctagagcctttgctgtgtgaaagaaagaaaccaccacaacaaagaatagcctccaactgccacgactaggaaaaacccacatgcagcaatgaagatccagcacaaccaaaaataaacaaataaagaagattttctactttattttcattcatcctcataaacatagttcacatacacagtatttattcaagcayttattacaataacaccaaagatttttccaaaattgccagatatttagcatctgccacttgtgaaatcaacttttacagctttcatttcttcctcttcactttgctcccaacttctatctctatcgacactgaagagttcctacttctgcctgggttatggaaaatcctgaaataaattgacactggatgctttcaatcagaaatcttggccggtttcaacaggcctttaactaggaaataattcctagagttttatcattgtagcctgtagctcacaatttagtactcatggttcctagt

SEQ ID NO: 19880 - DNA, 430 bp, Bovine  MMBT06633
ttcctaatgaaaaaaggaagtttttatcaatgccataaatcatttgcacatggggaaaataacaatattagaaaaagtaaagaagactcaccacttcttcatgtctgcattttcttacattaatcccatttatctgcaaaggaaagagagagagaatttgaagagcatactgtgaactgactgtatcttggtgacacatggaaaataatggtaaaatgtatacctggagaattgcgtccccaataaagagcagtcctgacagttcagctgtgaatggagaaggagaattgactatgcctygtctactttcttcacacagaagtaagagttcttaattcaataaagccaaaactgattgagggcaaaggcaaagatggaggaggattaaaggaaaaagtaattaaagcaaaaagtaagatggtctataagg

SEQ ID NO: 19881 - DNA, 598 bp, Bovine  MMBT03132
  misc_feature (1)..(41): n is a, c, g, or t
nnnnnnnnnnnnnnnnnnnnnnnnnnnnnnnnnnnnnnnnntttacacctggttatgtaggaaacctcaaggtgcctgcagcatgaaaccatatccgttgttattttagtggtggtgacatgatagactgctagtgacagaaggaagaaagttaagctaatagaattaagaaacatggtataatttgttatccatttcagagttcatgaatgctacgtttatcctgtggcgtctctgtggcgaaatccacagaggttcttaatctgcgatgccaccaactcttgttttactttcacggcrccactgaatacatagaccttattccagcattaagtctttttccttacttcctaaaactctacccagataaattcctcattctccagtcaatagtttatactcagacttgcctacatgtttcattaatattgcttcctctccctagaatgccttcctttgccttgtgaaaattgtatccatccttcaaggcccaggtcaaagtcataccccgtccttaaaccgtttcctagctcagcagtcttacacatggggaggctggtgtacttcagcttctgccttttgcatattaccatcttgc

SEQ ID NO: 19882 - DNA, 600 bp, Bovine  MMBT05606
tctgtaagaatcttcaaagaaatttctttttttgtgtgtttgttttgttactattgttgttgttgttattttggccgcactgagcagcgtgggatcttatttgcctgatcatggatcgaatccatgcacctgaagcggaagtgcagagtcttaaaccctagacctctaggggagtccctaaagagatttctcagaaactgttcaagttcctaagtgcataactattctttgcctagacagtcactgaataaagttaaaactattttaagaatatcttctgctcaacttgtttataattcrtaattttacctgttcagatggaactttctagtcattaaatacatgatactttcatgaaatccagttgcttcatataccaagactgtaatatatagtctgtatatttaaaaatacacatggttttgtaatcacgtgtttggctaaatgcttaactaaaatttacaraatgtttacctgtgctttatttggataatcaatgtcatttaaaactattccacataataactaycctaatttaaaaggakaaatgttctttaataaactgaaacaagtaattataaaaaggagatacatttttct

SEQ ID NO: 19883 - DNA, 600 bp, Bovine  MMBT06223
cgccgatggccccaagagccctgaggttccgtcgggatccgacttctgtctcaggcacgagtgcagcagcaggggcgcggcgtcgcgtggacggcggccccgcggattctccgggctcctggagcaaacggccggccgggggagactggtggagcgcggaccggggtgccggccgtgtccgttttcttggaagaagccgcggggatttggaagcagcgtctgggctcctactgtgttgcacatggcaggataaacatggccccgaaagagtctattagggataattaatcattctcgccygagatggtttctggaagggctcctataccttcactgcaggaggaatttctaaatgcctagcagaggcaccatgcttttttgtttttaaaaccgttcaacaaggactgcttcttcagaaagcattttctatctaaatgcactgatggctggacctcaagaaatgatttaaatgtttttctcaaaaacaaggccagcatttttcaaygcaactgttttcgggcagaacacactgtgctttttgtggactgggycttgatacttacagagattttaaaagaaaatatttgggctgtggtttaa

SEQ ID NO: 19884 - DNA, 600 bp, Bovine  MMBT08050
ttcacctcctttttaaactatcttgacttaacatgaagaattctakgtttgaaactctgaagtcctgagaaatatttttttctataactcctaaaaataattccaaattacatttttttctttagaaatgtgaaatagatatatcatgattgttttcttcctgattgagtttcatttgtgtgattgacactaataaaaatattctaacttaattcagttcattaaagaggtaaggatattttgcacaatgaagcatgatatagaagacttttaaactttctggagttttaaaataaaaawtttaaaagtgtacataatttataatctgtgtgtacgtatgcattgattctccctgccccccttcatctaataagcccctcttttcctgttccatcttgtaaacatgagttgcttatggcttgcatactgaaaatgctgccaggaagtagggtgagcaaagcttcttttcccatgaccctcgctctaatgttgttccaagggttccgtacttagaaatgccttgataaccacattcattcctgacataccccacccccagcacactcaaagctgctgagtgccatctgacccagagtccag

SEQ ID NO: 19885 - DNA, 600 bp, Bovine  MMBT07678
tttctatcatgcacatttcattcgtaattgatttagctggctacttttaaaaatgtcatgttcaagtttgaatttcagagcaaatgaacaaccattcatttcttccatcattcattcctctcttcctgccatcatcttcacacccactgcaagtgctttttattcctcccactccattgaaaagtttcaagatcaaggtcaaccattgtctatatgttgacaaaattaacagtcaagtctttgactttatcctacttgacctctaggcagcattacacatgcctagtcctgtccacctayttgaaacatgttcttttctagacttcaagataccattcttacctgtgttttcttgtattttcactgtcatctctcagtctacttgcttggctacacagtctttgctggttaccagacatttgaatagcagtacccaaggacttgctgtgactgtcttctctctctgtttacacccactccctagatgatctcaacttcttttacagcttaataccatctgttactgactcaaaattctgtccaatctagtcctctccctatgagcttgagccttatggatgcacaaagctacttaattcc

SEQ ID NO: 19886 - DNA, 600 bp, Bovine  MMBT11375
tgatggtaccaaacactgttataattagaaaacaggtttactttgccttcattctttagtaatagtcatggcagagattttttaaattttattttatattggagtacatttgattcacaatgctgtgttagttttaggtgtgcaacaaagtgamtcagttaaagattctggtttcaaaagcagggatgtctctaactggacacayacacaaagttctaatgatttctataagttatgacttttcctgagaacttcaggctccttatggcatgagacaggagggcaacaggaggactcacsattctggcaaggataactgacctgggttatcagcctgatgttacacaagagggacagggaggaaaatgtttggctccagctgattcacttcagtaccttttgctatttccttgctcaactttgacagtaaatggactaaggtagaaaaacagcctaaaaagggtaagctcrgatcccacaggaatgagtgtcacagtcacatcatctagtaagccacctagacaaagagaatcagctgaggatagaaaaaaactagaatgtatcaatagtataccttgtacactttgtagtatatagagt

SEQ ID NO: 19887 - DNA, 600 bp, Bovine  MMBT17406
gttgggctcttctgatattttgttttctggttacaatacaagatgcaccagctcagagcaggcaggacagtgggggacagtaggctgggggtgatacagacacattttctgtgtgccaggtggagtggcatcactacagtcctgtgcttcagtgcttcagcacagaatccatatatttctactacattaaaatcttttaattacttgcatacatttagtctaacatatttttctgttttggattagcacaaagcagtaataatcccccttcaattgttttacttaatgcccttctctacrggtaaatggattaaaagtataagtatacaattatttttttaaataattcttataaagaacttggaaatgatacccagaggagaaacaaactatagttggaaaaacattagtgttaatacatgcaattctctgtttaagactactcattcagaaaaggcatcccctcccctgcctccacccaatttataaattcacagatctggcaaaaagggagagttctgagggggtagctgactacaccctctcctttttctcttggcctcacaccattctctggttccagaaagaactgaccgtggt

SEQ ID NO: 19888 - DNA, 600 bp, Bovine  MMBT05186
tttgggaacacaggacatatttgatgatgatcatgaccatgctgatgatcaattttgaagacaacaaaatgccttcatttcttagcgtacaccatctggttttcatttcttttgaagatgaaaatgccctcctatggattggctcagcaggtgtgttgtttcctactactactttaaaaaaaaaatttactcagtaagtgatttcattcctgaatcaggaaaagaagatagatgctgctagaaatgacaatgtcaaactcatgacagtgattatttcaagctcagaatgaatcacttttmagacaggaacctttggtttatttgttttgcggctattaggcatttaatacttccactgagacagagtcaactttctaaagataaatagtaaaaaaaaaaaaaaaatttaaattgtcctaaaataaatgctaggataaaaaataagtatgaaaatgctgattggagagaaattgtctcccaggagaacttccacatgatcactttatatccatatggaatcttcaaagaatcctagtaaatccacagagctttggggaaatccttctgaattaaaatggtactgaattgttggggaagacc

SEQ ID NO: 19889 - DNA, 600 bp, Bovine  MMBT02537
agattttaaattgaccattataactgttgacttttcaaatcatttttaagactstactgatgattcataatcttcatttcaaaaactaactgttgccaaaatgacagaactatcccagtgggagacaaaagtagatttcccttgggaatctcttgaaactcactgtctagggaacaaaaayrttttcataaaattggttcatgagtaagccagtgtcatcaaaattgatatcttctttcttgcctttctttctgtactttggcctgccatggttttaagctgaatgcattatatggaagwatttgcaatttgtgattttctagcatattaacttgagagccaaaatcttatttgccttattgcatcattttacctagcattatttttgttgttgttgtttgtttgtgggaaatgagttcattggagcctttagtacaaaagtttttgctttaaaggctgttcttttactcatgattttctwaacagcagcttgtgtkccccccsccccccaatttttaagatgaatatgtgtcacttattttacatactttttgttttttctctcacaaggactcatactttaagttttcaaccagttgg

SEQ ID NO: 19890 - DNA, 600 bp, Bovine  MMBT04293
ctcctcattgtagagaatggatccgaagcagctgggcagcacccaggggcaattcccaccggacttgagagcttgaacttgcaactccgccgtgggtttcctgaccacctctgagcgtttggcagtcacgttcctttctgccttctgtagtcctctgacctgcctgccactacacagcatcctcttctgactcagtctgtacactagaacagacatggctgatgggatttaactgagagaagctgtctggacaatattaagaattgtgaggccaaagttgtgaaacacctccagtagccygtcctgcactacagtgaagaaaagaccatgggtgaaaactggttgcattaagtcattgtcttacaatgaacagtattcttggtttttagtgtttctttttcctctgttcttcattatttctctcttgatgaaaatctagaagcatggtgatcttgctattgaagaagggaaatcaagaaatatccaaattctggactagtatgtgttttttatttagaaacacttaggcaatgtgtataaaatgccaagatttggaaaaagagcagcaaaagagattaaaatggtatgccctttcccttc

SEQ ID NO: 19891 - DNA, 598 bp, Bovine  MMBT10698
  misc_feature (1)..(4): n is a, c, g, or t
nnnnctgcctaggaaggcaaagaaaagtcataaatgtaatagcaccaaccaaaaatattttgccaggaatggtaagactaaaagggatgaatgggcttattagctcagtgaaactttggacatggtagcatgtgacaggagagatcgatttttaaaatactgtgttactaggttatcaaacacttatctgtcatcttttatactcaaaactagggccagggatcttctgagagatggaactcacctggaataattatagcagctgacaaatgcactcacgctgcccgtggtctacttgcyttatttgctcaaacttttgatttttaggcaaactgccagattctcatggtaatatccgtgtcccagcggagactctggtgtgcacaaatctttattgtgacagctccctttggtgcttctgtggttcaatgaagtgaaaataatgatgagagatttcaagattttggaaagtagttttgactatttaaaaagtgactattttagtttctattttataggatttagagcttaaagtactgaaaaaaaattctggaaactctgacacccttaattttattttttcagattctgaatagga

SEQ ID NO: 19892 - DNA, 600 bp, Bovine  MMBT12533
aaattgaaaatcactttaaattaatgtcagctcagcagcttcatctccaggctgttgggttggagtgctgaatttttaaatatcatttgaatcatttcatatgatcgtaacaaaacaagacattttattagatcattaataagaatacttaccagaagtaagtgcccctggatggaygtaaatcagccttctggggccatttataactgatgagagaattgcactgcttgactttaataattcacccaggaacagagaataaacagcagcaaacattaattttattggacagtttcatayggtttatgttttgaaataaaagggatatgacttgactcctgcctgaaaccaaagcacttagaaaggactccctcgtgctgttggcatctccatgtggggaacttgttctcagatgcctttgttaatcagttgggcacccttcttgccataaataagaagccaaaatataaacactttaagtagtgactacagctttgtgttctatcatgtcctttggcatatggctatgaaatcctttctaaccaatcatcttacttgtctacaacagaagccacagtatctgagaaaggaaggagcctg

SEQ ID NO: 19893 - DNA, 600 bp, Bovine  MMBT21755
gaaccccttctccctaagatggaggaattcataatttaccagaaacacactgaagcgaatattctcacgctggtcaccagggaatttttgaagtttgtgatagatggttatggaaagttttgggaagcaagtgttcccggtccatttgatgcacaaatatttgccacatcccttccgcgtgtcaaactcacccatggaccctcagagagcacccctgcccacctccgttcctgctcrgcacagagcggtggttcagatcagggacctggtgggccggcagacctggtttcaaagtctcaygcaaccacgatgagccgtgggacttggtaagtcactttgttaaaaaaaattgagctaaaattcatgtagtgtgaatgtcacctttttacagtacacgattcagtggtacttactatgtccacatgttgtgcaaccatcctccccagagaaacccagcccccatgagctgtcctccccatttcctcctcccctgcccctggcaatcactaacttaccttctctgtggatttacctatcctggatagtccgtataaatggagtcatataatatgtgaccttttgtggctcaagtgatgtcac

SEQ ID NO: 19894 - DNA, 600 bp, Bovine  MMBT05200
agtgaaaatgagaagttaggacaaactcactaaaccctgttggcctgtctttctgctacactgatctcatctgcactctaatttaccttcacttaagaaggtagctcttgagaaatctcagggattagggagtggactttcacttcagcttgtcctctactcttgttggagctgtcacttgaaaacaaaactacgctgttatgtacaggaacaagaaagtcctcataggtactgttaccatagctatgtagtcctatgaaactctagaaacaccattcctaaaatacacatctaaaaccysagccatagggtctttcaaagaacgtgcccattctgaacaccatttcacaatrctagatgagccaaattctttgaagctctattatggaaggtggtaaaatttgcaagggtgacttaacayggcactagagacaccttcaggctttgtatttgaaacccataaaatcccatttttctaaatcaatcaagtcttgcatgacttttcacttacctggtgacccaaatgttactgtttgcctattgccaaatccaaatgaaggtgttgcttgattcactccatcctgtaaatcggacagctat

SEQ ID NO: 19895 - DNA, 600 bp, Bovine  MMBT23209
agcattctctgctgcacctactgcaaagaaaaaaaaagtcaactatcatgttattcaactccaaaattacttcctttaatgagagggagacaaaaagagaaataaaacagtcgcccagtgcaaatggatccacaagctcacacacatgctgccgtgccaacaaatcccttttctttaaaataaaagccctttagattttaacacaagagtatatcccctgtygctgcaatcaacattttgacagagcaacaacacatttctctgtagcgattacaggagcactcaggttccactggttasctttttgcctcccagctcgggaaggacagggaasggaagccctgggcaacctggaagctgcataacacaacatygacccttccttaattacagtctagtaggcagggctggtagcatttacagctcttcctacttacagtggggttaagtcccaataaatccattgtaagttgaaaatatcctgaattgcaaatacatttgtgctcagtcgctcaggggtgtcagagtctttttgaccccatggactgcagcccaccaggctcctctgtccatggcatttttcaagcaagaatactggag

SEQ ID NO: 19896 - DNA, 600 bp, Bovine  MMBT23210
tttaatgagagggagacaaaaagagaaataaaacagtcgcccagtgcaaatggatccacaagctcacacacatgctgccgtgccaacaaatcccttttctttaaaataaaagccctttagattttaacacaagagtatatcccctgtygctgcaatcaacattttgacagagcaacaacacatttctctgtagcgattacaggagcactcaggttccactggttasctttttgcctcccagctcgggaaggacagggaasggaagccctgggcaacctggaagctgcataacacaacatygacccttccttaattacagtctagtaggcagggctggtagcatttacagctcttcctacttacagtggggttaagtcccaataaatccattgtaagttgaaaatatcctgaattgcaaatacatttgtgctcagtcgctcaggggtgtcagagtctttttgaccccatggactgcagcccaccaggctcctctgtccatggcatttttcaagcaagaatactggagcaggttgccatttcctactccaggagatcttcccaatccagggatcgaacctgcgtctcttgcggctgctgcac

SEQ ID NO: 19897 - DNA, 600 bp, Bovine  MMBT15493
cacagcaacacaggtatgtgggctggtgtracagcaagggcgtgtgcccgcacacgtgctctcctgtgtatacttgtcatctttgctactcacgtgctctcacgccccctttctgcacggtcatgctgtgtcttctgctcgtagcccacgttggctgcacccccggcccccaccttgccctgaagggccagaccgcagccaagaaccacagcccaggtttctggcacacacagggcatctacagggccagcactggggctcccatcctcctctctgtaccctgggagcagacgaagtcargcgtggggcacccrgtctgctctaggctcggcgtctcagaagccaaggtgtggtactagggcacagtgaccggcaggtgtcaggcagaggggcagtggtgacctccgcacaggctttccgtgcaagagaaccaacaatgtgtcattggctggtggcctcgggaaaattacttaatctctgtaatccctgtctcgtcgtatgccggatggaaatgaatagcataccactgtatggggtgtcagggacactgagtgtcatgcgactggcatggacaccgggtcgtggctggactggctccac

SEQ ID NO: 19898 - DNA, 600 bp, Bovine  MMBT11649
gctcagttcctcactaaaatttatagcaaactttgcaaagcttttgacctgtagcatcttattaaacttttatgaaaaatcaatgccgctccatcctacggaggggctgttcctcacgccattgtcaggggtgactgaagcctatttacccccggatctgacgagagagattgaaactgcaggaagtcttcatctcacaggccaggtggccataaagaggaaattctcatattcttctaaaatatggcgtttccagaaatgccaccttgggaaaatgagtctggaaagaaagcaaaagcrtaagtttttaatcatttgtcttctttttattgttgttttgatcgcatcgttctcccccagaatagcatctctgggccccctggctcccctctgggttcctcgtgtgggacacaccagaccctctggacaaggacccgaccccaccatccccctgctccacagctattccagtgacacgccccaccggtcagccggtcagaaacccaagaactggcccagaaacctcttgactagtaaatggttcttgattctgtaccctggctccaatccactccccagcctccgctctgtccttacgtc

SEQ ID NO: 19899 - DNA, 600 bp, Bovine  MMBT01458
cacagatcttggccttggtgcttgctattgtttatctagggggacaacatgcaacatttcacgtgattatattcccctgggcttatttaggataattttccacctctttaccctattctgaggaagggacacttaccctgcctttttaacgaagaagcaaccacaggcttcttcaggccacttttccttagattactgctcactgtatctggaggtagcagggaactgttcgtctgtgcacctaaaccacaatcatcatagtgtttaacaagacgtctgcagagtataaatcaattcaaygttaatttctgaagtctaaaacatataaaatgcctgttaatttctacattagcttagcttcagtttctaaaaggaattagcattagcctttatatataacatttaaagtgtcttacactctttacaggaagttggtggggggactagaagtgaaaggaagaaaataaattcaccctttgttctacgtctcagacaatcactatcaattttctggtgaagcagtgttcattttcttttttataaatagtttattttgctggttttgtgattttaaggacctgtgattacatccgccttcat

SEQ ID NO: 19900 - DNA, 600 bp, Bovine  MMBT03498
ctttcgtaattgcacaactgagcgaccaagttctctaagcttctgttcaggcctgaagatttgccgtatttggcatgccttgtgctttccgtcatcatcctgattaaactaagtttatgagacaagcctcttatcactgctatcagcacttttgtttccccattttctgctcattttccctaaataatcagagctaagagctcttaaatagtcaaataatcactctaacagtcactcacataacactcactaacacattaagcgatgtggaaaatggaaccgtggatgagaagaccctawtctctcatcacttgaaccatccattcaacttctcatgaacataaacctgatttctgtgtgtgaaggattatgtgggggctttggaagcagaaagcatgaatatgcagatgatataaattcatttatttattcatccactctataaatatttattagatacccactctatgctctgtttcagggactggggatgaagccacaaaccacctatcgggtagtttcctttgtggagcttccagaccagatgcggaagatggaccataagtaagtgagcaaatctataaataaggtaaattcaaa

SEQ ID NO: 19901 - DNA, 600 bp, Bovine  MMBT07062
acaggaacactatccagcatgcatgtctaggctaccacttcagtctctacaatgtccattaagaagcatgatgaaacctatggctgatccatgttaatgtttgatagaaaccaatgcaatactgtaaagcaattatccttcaatcaaaaattaattttttaaaaaagcctgctgagctaaaaattggtgaatgtagtaaaaggtattcactatctcagtcttccaacttttcaaggagcttgaaatttttcaaaataagaagttggctgggaggtggatagacaagttgaaaaaattttraagttcacagtaaagataaaaatccagatatccatgtagtaaacaagtaatattttattataaaaagggactcagtctaatgatcagtggtttaagatccaattaacttaatatcaggccatgcaacctgatattagatcttaaccaagaagttgtaactttaactatgctgatatgatgatctttttttcttcttttttgggtggatgtgggaatctgatgattaaaaccctgaaagtaatcaaaataattttaaagtcctaggaagtaactaaaataagcataataacaataggaaat

SEQ ID NO: 19902 - DNA, 600 bp, Bovine  MMBT12968
ttagtagtatttatctctctctccccatgccctctcataattgcaagtataaatcaaccccagggtaaattgtggctgcaattaaaatggtatattagcttaatcacaaataaatagcccttctgctgttatctcaagatggaatgtatgtgattatggctagagtaccttttctcctctgtgccactctaagctatggcggcaggctgaaaagtaactgattggttaccatggtttccaaatggaggcaatgtagcatgtaattattgcatacagctatcattactaaattttgtatgrcatttgatgtaattcaataaataatttgagtcatagctctagaaggaggtgcaactgcttaaagggtaatgttttaggaaaattacataaactatttatatacagctgtgaggggcgctgaggagtaaaatttggtactggttctaattgatttgctcctatcacaagaaaaattggataaatgaggtttcaggtctgccttgataggtaaagtagtgttgattcaggtaagaaatgaagtaaaacccttcatttggtttttagcatggtacttagtgaatcttatttccctgggtttgc

SEQ ID NO: 19903 - DNA, 600 bp, Bovine  MMBT11478
cttgagacgtgaaatgtcaggcagaaaccacgtgtcagaccccaagtgaggacctctccactgagtccgctcaaccttagagctatcaggccactaagtcttggagcagctggttacacagggacagacaatcagcacattggcctttcctccagtgccgtcttcccaatgctaccccaatctaraccttccttggtcatgacacccgactgtcttctcctccccaggayacctcttccacctctgactacttataataattgtttgcaccaattatgatggcttgagatccctggaccracttttcttttaaaacattaaaaaataacctgtaaacagaaatgttttattatttctgaaaatggaaaacttgccatcaatagaaagcaacaaaataaattagatgaaacagatcaatgtcattctagctggacagtgttacctcccaaattgtctggtcccaaggcaggtcttctgtttaaaaagatggagtgagtgttgtagccagactctgagattcagaatccaggyagttacagcagaccagcgtctggatccctggatcacatgaccgtggtcatgtatccttaaattcagtag

SEQ ID NO: 19904 - DNA, 600 bp, Bovine  MMBT08017
ccccctttaatgcgccttttgcagacctgtccttccagaaaccatccagtactttgaattgttcttagacccctccctatggaaaaacgagacagaaggttctgctttataactgctcagacccttctgctccaattctacagccagaacccatgtatgtttaacatactaagtgggatcagccctctgartcccmaatgatgtccacagcgcaattttgtgtttccaaattttctcttcttccamgtatttgcattcttcgcaaggcaagtatgaaataggtgagcttaatcactttgyagtgcttaaggggctagacggacgtttggaggctctgcttgaggactggagtttgcgtctcctctttcctgcgcctttttctctccccgcccccactgccccatcgcccccaccttctcgcgacccagggcctttgaggcaactctatacccttctgatttgacttgcttctggtaaacgaattaaagtgtgagtgcagccgggctccatatttcctctcttaaaaggaaagtcaaactctgaaaaatcagtccacaggaagaggtaacttcaaaaataagggctcatgttccgcaagcc

SEQ ID NO: 19905 - DNA, 598 bp, Bovine  MMBT08880
  misc_feature (1)..(224): n is a, c, g, or t
nnnnnnnnnnnnnnnnnnnnnnnnnnnnnnnnnnnnnnnnnnnnnnnnnnnnnnnnnnnnnnnnnnnnnnnnnnnnnnnnnnnnnnnnnnnnnnnnnnnnnnnnnnnnnnnnnnnnnnnnnnnnnnnnnnnnnnnnnnnnnnnnnnnnnnnnnnnnnnnnnnnnnnnnnnnnnnnnnnnnnnnnnnnnnnnnnnnnnnnnnnnnnnnnnnnnnnnnnnnnnnnnggtccttcttttgttgactttaagaaaaacactgactttaggacatgaatagctcggtgccatagtcccatgaagktttagcacatttgaaaattattatcatgatgacagactattggatgccatgataaattaggaagttcagatgccaatttatcatgtagtgagatttaaaaagaattgctatcagaactgttgctaccagaattccttttgtgaagagaactgactgctaagttccataaggataaggactatatctcctttctcttctttgaatacccaatgccaagctcagtgaggggcacaaaataggagctcgataaaaatttattggaaaaaatgaatgcataaaaacctttaatgggccattt

SEQ ID NO: 19906 - DNA, 600 bp, Bovine  MMBT08311
tccatgggattttccaggtgagagaagcatgcactactttagtcgaactccttatacttacctactttggcaaaaaatatctcagtactattaggaaacggccttgggtgatacataaattgggtgaaagatacccaggttatagatgcaagtccctctccctctaggatttctaaattactttacaaactcagccctttctccactctatcacttcatcctgatttcagaattgggagtgaaggattaatgtaggtttcatttaaaaggttaacatgagggacttccctggtagtccakcggctaagactccacgcacactcccaatgcagggggcccgggtttratcgatacgttgcaacttagagtctgcatgcctcgatgaagctcaaagatcctacgtgccacaactaagacccagctcagccaaataaataaataaaatattttaaaaataaaaagataatatgagaattagattcaaggcagctggagtggacacagcagcaaactcagagttctcaacccagttctggttgagaactggggtccaacactggaattcctggtgctgaacttcaytgggcagtgtctgttctc

SEQ ID NO: 19907 - DNA, 600 bp, Bovine  MMBT18941
aagatgacttatgtgtgtggsgacagcccaaaccatgccaacaaggcactcactaaacatgagtcatccagaacttagccccgccgtggakgcacccactcctcacagcctggtgccccctgcacccaccccagcagtsagccatcyaagcccattyaaacaaaactgattgttttttgtagtgaggggtgtggataaaattctgaaatggattgcctgagaagtcaatttgacatatgatcacctaaaatctcactttctcagaagaactataaaaaatttcattaacatcacaccaayctccaaggtcctcctaccagcatcccrtcatttaacagcatcgagtctcaggtggtttatacacaggaagctaaaatgactgcatcgcrgccaaatagtgagcaattacacgccaagtgtatcgtgtgctgctgtcatttaaacttaagctgcgttccacaggaaaggtattatgcattgcataatccaggggagtgccagcaacatgcagttatatctacccccactttgttttctacaaaagaaagagaatcaagtttgcttgttactcttctacactgttctcccttacgcaccaca

SEQ ID NO: 19908 - DNA, 600 bp, Bovine  MMBT18940
ccaaaccatgccaacaaggcactcactaaacatgagtcatccagaacttagccccgccgtggakgcacccactcctcacagcctggtgccccctgcacccaccccagcagtsagccatcyaagcccattyaaacaaaactgattgttttttgtagtgaggggtgtggataaaattctgaaatggattgcctgagaagtcaatttgacatatgatcacctaaaatctcactttctcagaagaactataaaaaatttcattaacatcacaccaayctccaaggtcctcctaccagcatcccrtcatttaacagcatcgagtctcaggtggtttatacacaggaagctaaaatgactgcatcgcrgccaaatagtgagcaattacacgccaagtgtatcgtgtgctgctgtcatttaaacttaagctgcgttccacaggaaaggtattatgcattgcataatccaggggagtgccagcaacatgcagttatatctacccccactttgttttctacaaaagaaagagaatcaagtttgcttgttactcttctacactgttctcccttacgcaccacacacgtggtctctggaagcccagagctt

SEQ ID NO: 19909 - DNA, 600 bp, Bovine  MMBT12939
ggaattggagagtacagtgtgggcagtgtttatctaatgctgtgctgaagagtctgaccttagcttctgaggaccagcaggattatctggttggtaatatctctagaatggagagcagttcatcagctcattcagggggcccagcttttggtagagttgatgaattccatgtgaaagacagggccctagcagttctcaacttttaagagtcatttagaaagaacattttaaaatgtggattgctagaaacaacatccagataatgtaaattcataggtcttgtaagactcaggaatttaygttttaacaggcttcttctggaccacattttgataagatgagatgcataattgaagtggctagaataaaaattaaataatcagtgacagtatcacccttaggcccagaccaaagggattctgctttggggtcttaggtttagaggagcctgctctgcccctgtgatgaggaatcagtcgacttaaggggatatacgaccgagagtctaggccaaactttctagaccatgttctgggtaccgggcccctgaaattttctgcccagctggcactgagctgcctcccaggttctgcatgaagt

SEQ ID NO: 19910 - DNA, 600 bp, Bovine  MMBT09927
agtagtttagctaaattgctgacgattaatccatctcagactccaaggccaagttgaaagagctttaaagtcttacatggaaacatgatagatactgtgtatcaccataaattaagctgatggatttttttcccccagatgattgccttttttccagacaagaatactggagtgggttgccatttactactccatgtgatcttcccaacccaggaatcgaatcctcatctcttgcatctcctgcaatggcacyccactgaaytgatcacacccactcatcatttactgaacagttasaayaagcaacattttaaagtgtacccrttttaatggtggcaattgaagaacttttttggtaacttgtttttctgttttgttcttcacagaaacgctccagaggccaagtgctgtttgataaagtctgtgaacatctgaatttgctagagaaagactattttgggcttacatatcgagatgctgaaaaccagaaggtgagtggttcaaagctatagagaatcttctggcttcagctgcccttcactgcaagaaagtgaactgacactgaatcggtagatcgtcttctccacctacccctcgcac

SEQ ID NO: 19911 - DNA, 600 bp, Bovine  MMBT13310
ctcttcatgcactaccagcagtgtgttcagaaagcaataaaggagaagaagattcctattgaaggactggagttcatgggccatggcaaagaaaagcctgaaagctcttcttgaccttgacagtcaccttgagagtggactcctcaaatcaagaaattgaggtctccggatcgtgtcaattaaaactgaagatagcattgatttgatgaattcaggagggaggagtttcctttcctccttgctatttttctctcattttaaaaagatgatgaaccatcactttgctttcagatttctggytttgacatctcagcaggaactccatgttctaaataatgggattatttgggattagggttgcaatacttggtctgggatcagtttttaaatatatcttgtaggaaaacatgcataagcttgtcaggatgactaaggttgcctgaccttgagtcattctttgaaggacattacatacactctaggggttatttgttcatggaagcaactggttaagatctcttttctctgaggaagctaattctccagaaagagtccccagcacaacagttccagtcaatgcttgggaacacagttttattt

SEQ ID NO: 19912 - DNA, 600 bp, Bovine  MMBT06398
ctttgtggtaatacccatgatattttaaaaagtaatgttttttctcaaaagtcaagagtatacaaatgataaagatgggcattatttactcagtgatgtgatgaaaaaagataagtgggacctttaatcctatatttagtggttttatgaaaatgtttttgatatttatgtggtcttctttattagaaaagattgtgtggtaaatgtcaactttttcaggtgtaataatattaattcaataggttttgtctcatttctttttcatagcatgattcttgtatttttttaatgagaaagtartttatagaagagaaaatttcaacactcttttggccccttagattagctttcctatctagcagtttttcttttactggaagagggaaattacatgctactaaaaagaagatcattacctttacttgctaggaaaatgaaactttaaagatagggcaagtacaasgcaatttaaatatgtttatttttcttctaagaagtttatttgtgagtatggtttcattctttctaaactctgtttatataagaaagttgtcttgttttaagctttaattgtattgggtgatggacagatgatgtatt

SEQ ID NO: 19913 - DNA, 600 bp, Bovine  MMBT21066
ataaaacatctctatctcagatccactcaaagaatatcactctctctaaatatgaatcctgaatcttttggaaaaagctaaaaggagatctgagcttgttctagcttggcaaacatccttacatctggagcaatggttctaaagctttactggtatgcatggaacttatttggagagcttttcaaaacatagactcagcttcttcacgaaagagtctcattaaagtcccaagtaactgagatgtaagcagtctatggactactcctcaacaaactctggtctaatggtttcaccccatgsgtcaggtgccacagacaactctgagtagacctctcttaaaagagaacctcataaaagcagaggccccactgccttctgctggggctctagccggctctgttgtcatctccctggtgtgctgcacaccctgytcccccrgatcacctggcctcagagctgcstaggcctcagcctctcgcctgttcctgctctgctaacgtgacccgtgttacccaggccatctgtaacacacgtgacatgctcaccagtctgaagctgttctggggaagctggctcttgttccaagggccacagtggctc

SEQ ID NO: 19914 - DNA, 600 bp, Bovine  MMBT04046
tctaaaaaaagtctacaaagacttgaaagttatatctacrctaggaaaatgtaaatatcacaaaagtacaaaaaagaaggaaagacaaaagttgatagtgcatactttatctaagaccaaaaattgttgactcagtttgattcactkaaatgagcagaggtgcacagctggctgcagtccatggggtcgcaaaatcagacatgagttagtgactgagcctgcagcatgcacctctcatattccagcaattcttcctttctagtaatttcctttyttttttttttttttctttctttttcrtctcctttacatcagacatgtttgccatcagtggcttycgttgttctttgacttacttttagcatatacaaccaaaagcgccatcaacactaactgggttatgtgtaggcttatgaatctccattaaactctgcatagtaaaggtacagaaaagaaaatcaggaatgcactggtctactttattattagatacatttgatagttaattgtatgggtcaacttggctgggccatggtaaccaaaacatttggttgaataccagattggatattattgtgaaggaatttttaagatgatatt

SEQ ID NO: 19915 - DNA, 490 bp, Bovine  MMBT00839
tttataacattcctacatgtggaacaattatcctctccattttacagataaggaattaagctgaaaggataagtaatttctgaaggtcacacaaccagtacaggctgtgctgggtcagcactcctagtcagactgtctggcttctatgggcagcagtcagtggctgtccatctcctgtactgaaatgaaaagctcaggtccttttattgtctgggttcacagttctggaaagtgtgtaggaagcagaatattcaggagatggtatgcagctggcattagtagaatgagacacagtaggawtgatatcaagtactaaaaacacagacaatatattctcctgatctccaaarggctctgcagcaattgagccccgccctgtttttctgagattgtcacatctgtagttggtgctgggatttgggtgcatacagaggtgtcctgtgcaaggatttcatcttgacacctcttacggtgggcagttccttcactc

SEQ ID NO: 19916 - DNA, 600 bp, Bovine  MMBT00640
gtgataagcctacagtctagtgttaggggtttagaaatagttctattttaaaatacacagaatcattctgagaatcaagtggtagaaacatactttcagaaataaattcatattcagatgaaagatcataataacatatgtaacagattctattaatataacagytactgctgtcatcatgattatctggttgtattgcatcytaaactaattggcatgtttgcttttgatattgtaaagctaatatgtaatgagaggcagcattttataacaaaaagaaggctgcttttggaatagggragactaaggtgtacattcctgtcgtgccaggtactatctgtgtgagcacgggtaagtctttagtctgagttttttcttcatttcttaagtgaggattcaagtacttaccttgtagagatgtgtgaggtatataattattcatataaaatacccygtgcaatgcctgtttataatgcaccatcactgaatggttactatggctatttgtttggcttataactaatgaagacactgactttgttattactaaatcaatccctttaggagactgaacacaaatgaaagataatagaggtcttt

SEQ ID NO: 19917 - DNA, 601 bp, Bovine  MMBT01579
  misc_feature (1)..(1): n is a, c, g, or t
nagtggggtggctctttggaatccaagaaaatgctctgagtccagaagccagtgagsggaaggattgrggagggagcggagratgggggagggatgggagagaaagggtgctccactgggcggcccgcagggctcctgtccagagcgragtgaccactgctgggctgagcctgtattagctgattggaggtaaaggacacagaacccgacagctgggggaccaaggggtcataagtcccttctactctcacctaacctctccccccagcttcaaggcaaggttttttccatcttggggaargaaggagcccagatgtcacctggatcatyctattgagagtgggttctcttttcaccccctgtttgggcacagagcctgtgccctgaggtgttgaaggccacgggaggccaggggagagcctgtccaagggggacagggacagcacgagtgtcacacattcagcccctactcaccataatctggaggctcacagcctagtctcaaatcctaactaccactgaccagccacataactctggtccaaaacttcacctggctccttgcctatgaaagaaggaaataagacggataagttttctc

SEQ ID NO: 19918 - DNA, 600 bp, Bovine  MMBT01113
ttctttatcttacttctaactcctttgtttagagtcagaagaaaaaaaagagacatatgttgtacacatgtgatgtatatcttataaatatttgtggtctctatagcactgaggatgagatggttagatagcatcactgactcaatggcttaaatttgagcaaactctgggagacagtggaggacagaggagcttgacatctatagtcaaagggttcgcagagagtctgacacaacttggcaactgaacaacctgaaatagcactgagcatttgacagcttctccagagttttatgtgcrgttgggttgctttgggagatgaggctcatgaactgctgcagagccagattgaaacaaaccatcatggatgcaccattcatgtcaagccctactttttatggcctctaccattttacttctctcagtccctaccttgggtttgcaaggtaatcagattcattgtaataccagagataaaaggttgatgatacagactacacagtcaatgtcttctgttctcactgaaggaactgaagtaaacataatttccaacatcattaatgtcagtggccttactacatccctaaagtgtgtgatgtc

SEQ ID NO: 19919 - DNA, 600 bp, Bovine  MMBT09738
gaagagcaagcagggagggaaaccctaaagcgggccctggagggtggaattcacgccccacagactgcaaatctcaaagataacaagacaaggagattagaacataaagatccataattagattctaacagggtaatcccactcgtggtacctggaatgcatcccctagcagtgatgatgaaagtcggagatcatcagaccttagcctatgacatgctaccaggcacgggaatcattaactgtgattaaagtgctacctactaagtggtgagtgggaggaaggggccagagcctattacyggtgccctcagtctctgcaggtcacagccaggtggatgctcccacctgagctcgtgcacacagacctgtgagattacatagactctcttactgcagacagtcagagggctgctgatgttgccgtctgtctgtctttygacagaatcttctcttgtcatctcaccatgggtgggagatgayggaacatggggaacgcaaggctggagagaggtcacaggttattcgaagttcaaagtgctccctgccatagtagagatgataaggaatttcccagtagtctattggttaggaccccgcgct

SEQ ID NO: 19920 - DNA, 600 bp, Bovine  MMBT12376
cctctgtagccaccttcttctcttgccctaaatctttcccagcctcagggtcttttccaatgagtcagctcttcacatcaggtggtctaagataggcttttaattttcttctatttctcactctcattatcttttgtttctcttctttctggaaaacatctgctcttgggactctgtgaaagtttaacagagtttcttaccagcagccagttattcccaccatatcaggatttcacatcgagataactgattttaaatgttgatttttwaaaataagattaaaatagtttcacataacarttcctactgtgagcattatttggacaacacctctaaaatagttgtcactcaggataatggcttttttactactgattcaagatctctttgtaattttgacttgtactgtgcactggccagagtgatgattacataagttaatcaaaatatttaacagtgcccacaaatataaaagtatccatgacaattagcttgaatgacccatttattaggaacataacacaaattctatatacacatgtcttggacatctctatgtaccactgcggatccacttggccttatccttcctcgcagttg

SEQ ID NO: 19921 - DNA, 600 bp, Bovine  MMBT08597
tctatatgtttgaacgtagaatcattgtagttcattgctatggaggcaattcatcttgtaaggacaaacacgactctgtttagaagctccaaaagtgatttctcacttaacaatctcttgccaactccaactgagccatacaaaatactgcaaccaattacagttggtgacctttacagtaaaagtaaccctgaaaatgtaagaaatttttttttacgagaagtaaaaatgcatattctaaaggctcaaaacaactttaagttttactttagatgtagaaaaatgcctgcaaaaatatgyttcttgatatttcacatgttataatatgaaaagatactccacagggttactggagaagtgctatcaaacagtgttatagatttatttatttctatgtatctcacctttggacattttaagatgaagtgcttgtccttttaattaatcaaaagtgctgttcccttccagttagctaggtcactcagatctctattcaacatttccccccagttctttggtttacttctagtactgaagaattaggtctggtaattaaatccaatatcagcagagttttgtcaagtttatttaggttccatg

SEQ ID NO: 19922 - DNA, 600 bp, Bovine  MMBT03308
ttggcaggctacagtccatggggacgcatagagtcagacacaactgaagtgacttagcacgtatgcacacataacttaggaaaaagatctacagaggaagcatacatacaccacatttaatgatcccaaagtaacagaatagcctgaacagagagcagcaactcctcctggcacagcgacacatactaagcaggggctccagaaacaaagaacaaagaggaagaaccacaggcactcccagaagtaaacctaattgtcagcaatccttagctcggagagctcagtacttcccacagatgyctatggcaagctaaaggtatggtcaaaagtgggaaagaaaaagaagaaaaagggtaactygtaaccactgagrgaaactagctgaagggtgaacagaaacactctgttactatttttgccacttcctgtgaatatataattattccaaaatgaaaaaaggaaaaagtgaaaaaaatgcacataatgtggacaggcttaagttcactgaacacctaacgtgccagccaatctgccagatgctgctgtcaatgagctccgggtccactagggagggaaagacaagtgaacaatctatttcaa

SEQ ID NO: 19923 - DNA, 600 bp, Bovine  MMBT17206
agcagggagatacaccaaacatagttataaattgtgatgctgtctcgtctgtgattttctataaataaaacaaataggggactcagtcgagattccctcttcctccttttctagagcaggggccattttatttttattttcatagaaatgtagaccagccactgggaaaagacaggataaatcattcatgacaggaggagacacgtttgcaagaacacagatttgttgtccacccataggcaattaaatgtcctggagaagagaaaaagagagaggggaaagcacagaaatgcagaggcytgtggattctgagtgggtttcatgtttgtaccactttccagttctggaacttttcatctgccaagcctgtctaaacattgagcacatctggcacttttaagattttagtgtcaaactaattttcttggagcccaagccagactcttctggtaactaagtaacatcccaaactgtgggtaacaagaaactcaagccaatgtgtaaaatcctgtttttggtctctcttttgcattattacttttaaaaactcaagagaagagtttctctggaagaraaaaacatgagaaaagaagaagatac

SEQ ID NO: 19924 - DNA, 600 bp, Bovine  MMBT14475
ctggtgggctgccgtctatggggtcgcacagagtcagacacgactgaagcgacttagcagcagcagcagcagcattttgaatgtactgtatattttatacaggctgaggacaaacatgggtttctgaaacaggaggtggtagagttgctaaaagttcacttcagtagccttgggacacagatctgtagcaagcacagaagtcagttaaggtgggaaaatttccccatcacatggtaggagtgtggtaccctggcaggagtgagagcttggggcttagattgactgcttgaatcctgtctscactatttcccagctccttgaccttgagcagcttgttatgcaagccaccccccragctttggtttcctcacttgaagaaacggggaatggtcttacctacctggcagggttgtgtgacgattgaaaaaataatgaaatgtcaagttctgggtatataataagcacacagttaatggtcactgttctgtagcttggataatcacttggtgagggatctggaggaggaattctttatggtttctgtaaaccccgagattctctgacctcagtgcctccttgagaagctcttggtaaggttta

SEQ ID NO: 19925 - DNA, 600 bp, Bovine  MMBT06720
gaaggggatgccggggagaatgtgagtgtgatgttgaatgaggttggagagataggcatgagctggtaaaccaagcaatttaggttttattctaggtgcaaagggaaggtcttggggtgatttaacatgggtagtgacataacctgattcatgagttacaaaaataagttagaaagagtgtgagaacgaaaacaatgagaccagataggaaactaatgtgaaaattcaaacaagaaacagcagtggcctgcaccagtggtgtcagtcaagatgaaaagatatgagtggattcagattacwttttggagttacaaacaccaggattcatgtgagaatgagagtgtgaggtggtggagaaaaggggaaggttaaagggtgttgttggattttctatttttggatcaagcttagagaagctccaccacttggttttaagcacaatattctaagatgttttagacaccaaatagaaacattaaataatcaaggaaatttacaaattctaaaggtcctaagcgattcttctttcctttttatgagattaagatataagttaaatgagaacatctgcatcatttcatcaaaaatgaaaaattaaag

SEQ ID NO: 19926 - DNA, 600 bp, Bovine  MMBT09416
agtgggttgccacttcttttgccagaggaatattacttctcccagagactgaaccctcatctcctgcgtctcctgcgttggcaggcaggttccttaccactgaaccacctgggaagcccccacctcttgagctctatatattaaaacgagcaaagatatgaaactcatgatacctaaaaygcatgtgtacrtttatgtctactattgaaagaaagaaataataggccagttatacttcaatatagaaatattacccaaaacacaattattattttcatatctattgaataaatgtcctaycccagtccaagaccatagacccatatatttacaacatggcattaatattacccaggtcattttgtgttctgctttgttcatttcataattgatcaaaaatatttggcatatttccacccagttttcataattatcrcttttaatatctgcaaaatatcctatcrtattgatggaggatcattcagttcatgattcccctatggatggacattttaaactatttctatgtttttgttgccattgttgtcattggcaataatgctgcaaggactaataaaagatgtgaatatagaaagtctg

SEQ ID NO: 19927 - DNA, 600 bp, Bovine  MMBT15257
aatgttacatggtgaagtatgataatgcaggaattgtatttgaaaacatgataattctaaggaaactccagataatctcagaagtgttagagtgatggtacagatgagtgcagtttgtctttctgcatttaccaggctagatttacatagggctcaaggttatcccatggacagaggagcctggtaggctgcagtccacggggtctcaaagagtcggacatgaccratcgatcgacttcactttcactttcaaggttattttgcaagtatgttgttaaagtttgtagggtaagttccatrtaattctgacaccctaatggtgaaatatcttatctagaactgatatatttacttcaccttagcttcccaggtggcgctagggataaagaacatgcctcccagtgcaggagacataggagacctgggtacagtccctgggttgggaagaccccctggaagagggcatggcaacccactctggcatttttacctggagaattccatggacaaaggagcctgatgggctacagttcatagtgtcgcagagtcgaacatgtctgaagcgatctaccttgcacacacagtacacattgaattgtt

SEQ ID NO: 19928 - DNA, 600 bp, Bovine  MMBT09431
ttaatgtgtccagggccacacagccaatgaggatttagaacaggatggcagatttgccaaggcgagggttgcttgcctgctctagtccattagtggtagctgcctggggaaggcagtggctctgtggaggaggattccaagaatgggtctgagctcattgagaaaggccgtgattgattagctatgtctgccatggacacggtaatggggagtggtggcacgagtgacatgcatttcacagtcctgctttcgagacttctggtggtcagtttacctatggaaatgctgcgctggcactckgatgtctacatstgcacagagggtgggagyggggcacacactgccattaagtgagatggtctcaggtgtgctgcyaagaatcccttctggctcccctgctttcagaaagtgggagctctgagactttctaagatgaagaccacctctaagcctccagaatctgaagctgtggttaggaagctaatgtgtcctttaggggaatgtggcgtggaggaatgaaggtgcacatctcrgagttttagcggctgctgccgaataaataaaaatagctgtaagtacttctgcagctcttctattcaa

SEQ ID NO: 19929 - DNA, 598 bp, Bovine  MMBT06780
  misc_feature (1)..(36): n is a, c, g, or t
nnnnnnnnnnnnnnnnnnnnnnnnnnnnnnnnnnnngggcagcactactgatggcaggtggccaagctccaggcctcggctcctgcgtcatcgtcataatcactcgcgttgaaacggtgctctgtggttaacagactgctccaagctcagtagccctttagtcctcacagcagcagaagccaaggcctctggggtttggtgacatcccaggatcgtgtgaccaggaagaggaaaggctgaggtttgacctggccttcctaacgctgaatcccctatccgttctttctgcccttgcagggrtcatcaaggcaaatgctctgggggccaggtagctaatctaaatgagagaagctgactggagtagaagacattagggagtagtcaggactctggggagtcagacaacaagctgtgcctcaaggcatctcaaggccaagcatttcgaaagcaataaaagccaaggccatttattggatcaccttttcagtgttcaggacatcccttctcgtggttttggtggaggtggaccgcactttatcattgagtagcactgacttggtggcacgaataagcatggccttggtggcagtaagtctcc

SEQ ID NO: 19930 - DNA, 600 bp, Bovine  MMBT20942
tttgactttttcatttcacatacctcatataagtggaaccagggttttttctgattgacttattcactgagcataatgtcctcaagcttcacttgtgttgtccaattttgcagaatttctctctctgaagtctgaatggtattcttttgcatgtycctgtcgcatcttctttatctgttcatctgtcgctggacatttaggtcattccacatcctgactgtcrtgagtgatactgtaatgaacactggagtgctaagacctctttgagattctgatttcaattcttttggacaaaaaccsattggtgggcttgcagagtaggattctgaacatggaggagaggagcccactggggggtgtgtgtgcagtgctccctccggttctaaatgctctgccggccctgtactgggagcacaggaaagtgggtatcaggtggggatatttttgtgtttgcaaactggaggctggctgtgtctcctgggccagggagttagccagtgcacctcgtctgctaagtcatcccctcttttcgcaggagacagtcttataaatttggctaataactcccatttcatttccccaaactccattagagggaaa

SEQ ID NO: 19931 - DNA, 600 bp, Bovine  MMBT03463
catccttccacctcctctgatgacctcagttactctcaaacaatcaagtactgcctgttggaatgaaaacagatgccactaaatgctactgtctggagcatggcatattttagtcaaccagtgaactgtacacagccaaatgcctctattcaccacaccaagaaaccatcttgcctactggacaagcacatatggtagataatttgacaggggaaggggagagtgggaccatttgtcatatgagagttcagttaggacttggaatttaattgctcactaagacttaagagagtccacacygggtgttacagaagatactagaaactcatgataacctaamggacattgttttaatgcctgtacatgtcagagcccggtgctttgaattaccacagtgtttcctggaaaccgttttgccaaatatcttgaattcagtccaagcatttccccattcatagccacatggtggggtcagtagtgaagggtgatgaacactgcagtgtccttgcagaaggctcagactatgcaatatttaaattaaaaaasataaacaccattctaggcacattccgtgccacatcagcacgacccagttcctgt

SEQ ID NO: 19932 - DNA, 600 bp, Bovine  MMBT18083
atcacagtatttatccctagaaataatgacaccatggcaaagcagcaatgtgactgcattgcaggaccaagcagtgtagcaagggagaccctaaaggcagtgcttcatatccagatacaaagggattcacaatgaacacatcaccaattttaataaacctgatgaaagttaagtagattggatatgaaagtcaactatacttgagatcccctgcttgtcttagagaccctctttaaattaagactttgccaggtgattaagaagaayaccagtgcttcaaagggaatcagagtcttgttrtctgtggctccacgggcgaccagttctctttcccttcggtccagacggaagctttgttctcccgaagttgttcaggtgctgagcctgtccaaacaagggaatcgagggaggctttacgaccctgcacctttttgaaaagcagtgccactccctcggctcgaaggccccgaacatcaaatgcctccctttgccaggcagcttggctattccccaggcattttcaatctagttgggtaaaacaaaaattgcataatttgtcattattttcaaggaatgagatgtgccttctacaatcccttc

SEQ ID NO: 19933 - DNA, 600 bp, Bovine  MMBT09287
ggactttagtggacttgagtggacttgagctctctcaagggaaggggagcagaccaaaggagaagacaaaaataacagagcctcatgcaatggacctacatactctttaggtgcatgagagatactccaggtaaatccagaaatagttgctaattgggaagcaactttgtagttagttcctgagttgcagttgggacaaattagaaaaatacagtttatcatcatcaaagtgacctatataaatcacaaactggaatggcatcagagaacatatctacaaaaggaaagagtgaacaaatkaatgattgttgacatacacttgtttgatgtaaaagacaatttataggtaaggaaagaacactttcactaagcacctctctcttgtcatttcccaaacgtttttcaaatctaaacctttcctttcataggtacagaagggtgcctgaaaatcagccagtttatttargagcagagtctaccaaagatatgagctgtgtattctgaatccctcagcaggttatctttttaaataagaaacacactccatgtttcactgaatcgaaaataccattgtttgtaagacttgccattgttttatgc

SEQ ID NO: 19934 - DNA, 600 bp, Bovine  MMBT00622
aaggaggccagagggctggtggcctaggagttatagctgtaggaaggtgcctctgctggccccttggtctcctgcccccagagctaagcctctgctggagctcgtgcctcccccagcgactctgggacagtcttcctaggatccccgtccgctcacacaggaacctgaattgctgagggctgccagggggtcagggtcccagcttcctgggtagggggggctgattctggctgtgccctagaccctgaccaactagctggaggagcaaaggcggcctgctgctggccacctcctttctcrgggccgaggtcacggcacggctgagactgatttattccggtcttaatctggtggttggtttggtgagagttggaaacacgttggttttcccttcccaagtgtaacaaggcctgtttccgcctccgcggccgctgctgcagtgccacgcggtgaagtgtccgggacgtgacaaaagggctcggttagctgcccgccggtgagaagatgaacagctcgcagcgctgcctgccctcacattcctcttgcccaggcgctggcctctccccttggccggccgctccctggggccctgcatacccc

SEQ ID NO: 19935 - DNA, 600 bp, Bovine  MMBT06074
aagagtggttctaagtactttattaaaaatgaagaaattgaggcctagtcaaactgcaatatcttattcagtacaagaatttataccagaatccaagtgggaatagcatgacttttttaacataatatataaaaaggatttcaagaactacaaagcttcgttttaactttgaaactgttggcaattaaaaaaaaaaatgtgaaactaggccgaaagctctatcaacatttgaactcttcctagtgtatggttattgtcattggtgagcagacatacaggtgagcaatactaagcaggttytgcctgaaagattaaaaaaaaatgagaagtatggttcccatctttccagttaactgccctcccttagcaatcagtactcttgtagttcccttaattggtactgtaaagggcttacagtggatgtctatcaagtaagtttgatttttgaacaaaatgagatacatgtataaaatagatggaactggatacaaaatgtgaacctataatattcgccatattgctcatcaagttactcagataataatacacattttacactatttactaaaatcaaacagttatatttggaaaattaccttt

SEQ ID NO: 19936 - DNA, 600 bp, Bovine  MMBT08209
ttccactgtgtgaagttgagcagtgctctctcctgttggatgagtttttcttgctgcttcattatagtagtggacatctgaaacacttcaaacaataacaaccattcctgataaaatactgacacataacaaaataagccttcaatctagactgaagagaactacatattactcattatatttgtgattaaaagctacaaaggatatctatytaggtgttctkccctttttttttattgtgttgttcgcttttttatattgagctacatgagctattagtatattttgaagatcaatccycttattggttgcttgatttgaaaatattttctcccatccttagggttgtcttttagtctcatttatgtatttctttgctttgcaaaatcttttaagtctcctctgtttattttatttttttcattactctagaaggtgggttaaaaaagatcttgtgatttatgtcaaagagtgttcttgcctatgtcttcctttaagttttacattgtccagccttacatttatgtctttaatccattttgagtttatttttgtgtatggtgttagagaatgctcttatttcattcttttacatatagt

SEQ ID NO: 19937 - DNA, 600 bp, Bovine  MMBT02227
ttgctgcagtcataccagcctccaccaaccaccaccctgatcagtcaggaggcatcaacaccaaggcaagtccttcaccagccaaaagactgcagctccctgaagcctcatagatcggttagaattttttagcaataaggtatttatttatgtatttatttttggccacactgctcagctcgtgggatcttagctcaacaatcagggactaaacctgagttygyggaacgaaagccccaggttgtaaccactgggccactagggaactccctgcaataatttttaattaaggttaagacrctcatttcaaaaaataaagttatttcacactcaataaactacagtctagtataaacgaatcttttatatgtactggaaagacaaaaacatcatgggattcaccttactgcaggatttgcttattgtggtctggactraacstgcaatctctgaagtycgccgctagtggtactactgacaattgtctccaaaacgtagtaaattttatgtttactattttaattaatttcttccctttyactttttycaaacaagaaacaattataataaaagctttaagagcaactgaccctttttgtg

SEQ ID NO: 19938 - DNA, 600 bp, Bovine  MMBT12841
actgtctaatataagaaaaaaaaaatcggataatgttttgtgacctcagtcaaatgttttgatttgattcgaggggttatccaaacgacaaagacaaacaagcacaaagaggaggcgagttaggtcaaacaggatgggctggggatgaaaatcgtgcctatcagttcataagctgcatagaagcagtgataggtccatcagatactgaaaatattaatcatggtgtagaaaatgaactcaagacrtgtgcttcgtaaataaagtatatgtcttgtgttaatttaagaaatgattaatccraaacagtagctctataatgaattaatcatagccagaaaggactggcagtgagcttcaaagtacattaaatactgagagataattctcaaccatcattttaaatatggttgcaaaattgattaaagtgtaagtacattatcttacaaacaatgccttctattattaaaaagaaaataggtttcatgtcctcattaactatagcagcctatgaaagataaaagaaattttctgtgataaagtttagtacaagaacatcttcaaaaagctttaagcagttgctgatacaagtagaatttgatt

SEQ ID NO: 19939 - DNA, 600 bp, Bovine  MMBT03430
ctagatacaatggaatttgacaaaaatggtttagataagttccttgatatgaaggaatttatgtaaaaatatttttttcccgccaggacactgttttctttctattccaaagccctgtcatgatgttacagttaagtccttggaattacacagaggtttccatttaaagctggattttgaaaatagtaaaacaaacaaaaaacaagtaagtttttctctggctgtttttgttttggcagttcaaagtgtagggtttgagaaaatgtttgctttatggacctatgtttctgcaaagaatckatggtgtctatattccgtgaacattttgaaacatgtgttttgctttgcaattaaagaccactgctaggcatttattttctttttttccctccctgaatactcttaaacaatcttgacttttaattcatacatcatagaagaagttactcacttggaataaaaagtgattaatgacataaatggtcaataaacattctatagtcatccctagggaaagaacacattcagracactttccttctattttcctcacttgaaaagattgacatactgtgaaagtctagttaatagttgttagca

SEQ ID NO: 19940 - DNA, 593 bp, Bovine  MMBT04554
gggagcccccgaaggctgggtgaatctgtggtcacagggccagatgaaggccccataaaggtctgtcctgcagacccagccctcacttgtggagagcctaactgttcctgttcaaaggccgctggagagaattccgtcttaatattaatgtcctgtgccaagggggtctgtgtggcagaaccagaagactctgggtccttcttctcttcaaagtcctcattgaacagatccttcatgtcttcatcaggaactgacctgttcagctcctcgatgagctccttccactcctgctcattgagrttgaggtcaggcatgaggttgccttgagagatggagcctccggcccctgcgatcatgcaaggcaggtcatccatgggctcctgtttcagttctttattcaggctcaggggaaatgactcactagtgttgctgcctccgttcaggtggaggctcgagtctgccagacacttcttgctgatggagtccagccccagtgcatgcttcccagtggcctgcagggcttcagggccaggcttgtcgggctggccgagcggggaagccgggggcaggccgttggaagagacgacggctcc

SEQ ID NO: 19941 - DNA, 600 bp, Bovine  MMBT09072
gggagttaaactcatgttacagaggagaaaactgtgacttctcccaaggcgcacggctgatcagccacccaggcgagtagacccagctgacccctccctccgcggccctgcctcccgagcggtggcattggattgcactgaagaccaacccagtcaattcctttctgccccaagccggaccggctggccttatgatatcaccaggatagaattaaaaacaaaagtagactgagagttgagctcagggggatggagagcaatgctaacagttcattcgccatcgcttgctgcagctacagsaacttctggattccgtcaagttcagacccttaaaaagagtggaaaaaagaaagcacatactttccagggcccgggtgctgcactgcaggccagctgggcgtagcaccatggcaaaaaggtctcttcagtttcagaaattcgagacccagagcttgcatacagggctgtggctgcacccgggcctgatctggcatcgcttctgcctgcggttctctcagacgcagctcctgtgggaagcccattagtgtctaaagaaagaaccagccctccaagttgacacaaggagcaggctgatgtgtg

SEQ ID NO: 19942 - DNA, 598 bp, Bovine  MMBT19132
  misc_feature (1)..(61): n is a, c, g, or t
nnnnnnnnnnnnnnnnnnnnnnnnnnnnnnnnnnnnnnnnnnnnnnnnnnnnnnnnnnnnncttttctgttagaagcataattgtaggcactcaaggaagccatggatcaattcaaaacagttaacattagaatgaatttgcaagcaggacttgataactaaatatactarcatatacttcctctttatttaatatcatttcccaacatatgtttttaaattctcttgcatatttaaaaatacagtgttctgtacaaattctactccttattaaatgtttaaactcatacacaatgtcayccttgatcaatctgttcaatctgtttctcactttttcagggtgtgaaagcacaaacacattttataagcttccagagagttcaaatygaaacactgcctgaaaccataacaaaaatgcaataaaaagaaagaaaaagacatgtttgttttatgtcccatcccccartcctcagggttttttttttttttttttccattttagatgtgttgcctttgtaattggacttattycctctaaactccaggcatttctggccagtctagcatgttgttttgttattttactttggagcaccat

SEQ ID NO: 19943 - DNA, 600 bp, Bovine  MMBT13385
gctttgagaattcctgtaatctgtgtcatcctgtctcatgctgtcccatctcatagttgtcctctctctgcagtgctctatgcccaggtctctgtggctgggctgctccagcctggcggacagcatgccttcgctgcgatgcctgtataacccagggactggcgcactcacagctttccaggtactttctctgtctctgtgggttatttgtgggcattagtatgtgtgtgttagttcattagtgtgtctctccttctttcccatcctttacttaagttcgcttttctccttcgtgttgcytgtatttcacgtcactcagttctcctttaatttttaatgtagatccagactgatccactcttgagacatttttgttatgattggtttgccaaaattgacagagcacaacttgatttgttggttttcatgtttagtagaagtatgataatgagttttaaagtaatctcaataaatagcattcaatatgtaatgtttgctctggacctacataaaaccaattaatataatcaatcaatcaattgcaaccagttgcctgggcactttcttatgtttttcttatgattactaaaaacataaagt

SEQ ID NO: 19944 - DNA, 600 bp, Bovine  MMBT11022
ttaaagcagtttgctaatgttatagtaatgttaaataacaatagtaataaaggcataattaatggtacataaaccagagagctaagggattcaaatcttaatcttagaccatttcctttgtgagcttcactgagttatttttgttactaattagtaagaataaatagcattatcgagtggaagctaatattatgaggcctaacagctgcagagaagacaggctacagttggccactaaatgtgatgacggtgagcaaatgactcaacttttattgtgtacttgatgtgcagtgcttcctytttatacaaacgttagccacctcaactttatcacaaggatatgaaaatagtttaaataaatatgcacaaaatttgttaaaataacaaatttaaataaaaaagacacaaactgtctaaagtttgtattagcataataaatagatggttattccataaactatactcaacaccttctcccgaatgttaacaattaccataaaaccatttccttgtacttagatggctcttcacttttttcaaagcactttcacaaatattagtcaaagattagtcaaagatcatacattatgtatgatctaa

SEQ ID NO: 19945 - DNA, 600 bp, Bovine  MMBT13193
ttacaagaatattttttggtagagcctaatcattttctaacagctgtgtgctctatacagtttttgaaggttagtacctgaaagaaaagttttcacttaaatctggtaaatgttacatcttagcaaagatgtctttaaatgtacataaccatttattctggcttaccctgtaataatcttttctcagactaggtgccattccttaaagaactgaataatgtttattaagttttagttaaatgtatgacctggtcaggtagagttattttggcaatataaatgtggagaaagagagagaayggaaaactggcagaaagcaatgatctgttctgacatgtgactttatcaagtttatatgagtcatcgtcatcattcacatgttttgtgaagagatggtttgttatttcaggagactgattattaattgaaaaagcttttgatgaactggtagaaaagagaatttacagaaaaaggaagggagcacacacagaggtatttgaacaaacctacaaattgaaccttgaaatccaagtgcttaattgccatttagtctacttgaatacagattgaggggatgcaatcaccaaatgtaattctagc

SEQ ID NO: 19946 - DNA, 600 bp, Bovine  MMBT10299
gagtatactagaggaaagttataagacatcccagtgccatatgtcagaagattgcctgctaatatgactttgctacagagattctcagcctctgatactactgtttaaatttcaaatctgattggtcaaactacattaagcaaatgagctataatgtggctggatgtgtgggggsagaaaaattaggaaatgggcaaatctcaaagtgtaggtagttggggaaattttctggactagttaaatagtaacttgcaagaccaaaaccatgaagaatctttgaaacatcatgtgaacataagkacrtttacatttactcacatataaatcatacacccacactgtgtatttgattgtaagacaactatgtttcacattttagttagctatgaagtcagaggtgtagtttataactgataactatgttagcattagaggatagttttaatacaaaccatttctttgttgtttctctgtgtcatataaaataatgaaacatttccagtttggcattttagtaacttatgcacagtgcaaaaaatactatttgttcctgaacctagtgtcacttatggatacattgcatatctggaactattttgg

SEQ ID NO: 19947 - DNA, 600 bp, Bovine  MMBT18312
cttcagtctggaaaaacagctaagaagagtcaatagcagcatcaacaacaatcacaatggctaaaatttactgagtgcttcctgtgtgtgagattattttataaacaatttgtaagtatcatcttgctcaatcctgacaacaatcttatcaggtaagtactattattattcccactttacagatgaggaaacagaggcacagtgaagttaagtaacttgtccaatctgccagtatttaaacccaacctgtttctgggggtgtggccctaaactcacctcttccataagcacaccgaaatyacaactatttgtgtggcaactattgatgagaaagaccagaaggctaatagaaaagatcttctacaactaaagatataaagaaggagccccaacgagacaggtaggaggagcagagatgcagtatagtcaagaccataccactgggtgggcaacccacaaacaaggataattacaactgcaaaggaagaagcaatgagtctgagccccacatcaggctccccagcctgggggttctgcacctagaagataagctctcagaatgtttgtctttgaaggctagtaggcttacttttgggagag

SEQ ID NO: 19948 - DNA, 600 bp, Bovine  MMBT21914
atatgatattaagagttcatagagttccccaaagcttatccatgtggactccaggtcaagtgactcttaacataatgtttttcttttttatcctctccattgttacataaagatgagtggaaaaaaaaataacacttaaatagtaataagtaataaataaaatctatcaaataaaagcctgcaaaagttctttggtggcttaaaaaaaygcatttaaggaatacattcccttgagtaactttaccagtaaccgttgcaacatcagtacagaaagcttgttgattaagactgcttgtttcygagtcgatgtgtagtgtggttagactagccacctcttgctcttcagcactctgataatggccagaacctgaatccatgtcagcagaggatgcattcccagtatccgctccaaaaccaaaatctacaggaagacgacatgctagtgaacagacattctgattacataacaaaaatatttacgagasagacagagctactttatcaaaataattaaatatgaacatcccccctaaatctacttcatatttacataccgttcaggcaagtataaacaatgttaacactttgaagtttataatt

SEQ ID NO: 19949 - DNA, 600 bp, Bovine  MMBT04280
atcattgtgtttatctgtaatttagtagctttgtttgaatacggtagtattttgccttaacagcattcatgttgaaactccagtgagtcatgtctttcagaagaagaatctcttttttcctagtatttagtatgggagcaacttttggagtgaaatggggtgttttttgagaggtcaagcctccattactggagacagggcagtaattggatttggagacattgggcagcttaaggaatagaagtattgaagatcaccaagcttatttattgattgtgttccacaaaagaaggaaaaagrcagtaaaagagaggtgattggaaactaaagcaacctttgaaagtttacctgtgaccacagtgtcaataactacctctgtactatttaaaataatttctaatgctatctctggtggcattgtttagctgaagacaataatttaggattgtgaacagccttcctacttctctctactctttttttttttttttaaggaataattacagttggttagcatttattcagattaatttgcatttgattaagctatatcacttttgttgataatttctaagattggtgtaccaacagactaaggat

SEQ ID NO: 19950 - DNA, 598 bp, Bovine  MMBT21240
  misc_feature (1)..(90): n is a, c, g, or t
nnnnnnnnnnnnnnnnnnnnnnnnnnnnnnnnnnnnnnnnnnnnnnnnnnnnnnnnnnnnnnnnnnnnnnnnnnnnnnnnnnnnnnnnnnctttgtaaggagtggcatctgcatctcaaccttaatgataaccttatgtagggaaaaaaatgaacttcagtagacctatgtattgtctatgtccactcttcccattatctgattctgacactcttgaagctgtcttgctccttgaagttgtagacaatagcaatgcaaaacacctcccttaccccaaaccccagcccacaaaaaactcarcttgggttccatatgcacatgcattttaatgttcctaatccatgaagctgcctgttctttgggttctcattaataagctaaaaaaactcctgttaatacatatttatatgtgtattagaatcatactttttcaactttggaaatggccttttaacagttttgggggtcctccattaaaatgcataatgcattcatctgacagagccaggtaaacctcatcaccaaagatgtggttatgctcaggcacatctctccttgactctcagaggggaatccaaagtgacaaggcatctttgct

SEQ ID NO: 19951 - DNA, 600 bp, Bovine  MMBT01894
atgctattgacccaaaatgctttttaarattctgaattggtcattgtcctggatatcttctacatgctcctgtagattcactctccaccattctccctcctccagttatgctaatttggatattccatctgttttctattagcaaaactgatgatatgattatcaatatttaagaattgagagattttgcatgaaaataaatctggattttcagattctcatgagaaattagaagatctggcaacagtgttggcaataatacactggcaattcccttttccactgggcgttagctctcamgttggccatgcttcactcaattactttaccaggctggtctctgcggccatctgagaatactacccctatttctcatgagatgatgtgatgagctaaaaggtccagatgcttggaaatctcttttactggctgctgtaggtgttgctggtaacagctcacgattgcaacctcttctggagtagtgttctatccttgggacaatacttgaagccacttggcttgggagtgcctaggaatttgcctccttcccaagacaagaccagcaataaattctaagatggacacctccatcctgcaagg

SEQ ID NO: 19952 - DNA, 600 bp, Bovine  MMBT13718
aattaagatcaaagtagtgagcaaaatacaaattagtgctaagactgagtatatttgtttttatattaattatttcatctaaaatttattctacttattgtttagggtgatgaatttgaaaagaggggagaatcttatgagaataatgtttgttagagtgcaaatttctatgacaggaccctgttaagatcttttaagaagataaatacattaaatagagttttgcttagattacagtaaatgctatagaataatactgaaacatgaaaaggsaatagaaacttttaaggacaggaaaayaaaatttaactgacttggttagaaaagacttcatggaaaaggtaacaacaaattatgacctaaagaatgaaagtatgttatgaagctgtcctcatttatctttcctgtgttatgttccacaaaattttacaatacatttcaccttgtttcacaatcacatttcaaaacatgataatttctttttcacattagtacttctcttacttagactgttcttcagaatttattgaaattatactatcagctatatctgattttatattttaccatgtaatgttattataaaaattacagccaact

SEQ ID NO: 19953 - DNA, 600 bp, Bovine  MMBT01848
taaattgattacattkcccctatatgtcttcctgttaagctggtattcttctcccatttttcagatgaggaaatagggcctcagaggcactgactgcctcagagacccacagctcatggttggtgaggcctgcacttgagcctccacagcttgtcttcaaatcctatgcactttctactgcataaataactgtcttcagcaacctgtaaaacaggtgtggtcatggaactcagctcaatgttatgtggtaggctggatgcgaggggagcttgggggagaatggatacatgtgtgtgcaasrctgagtgccttcaagctcacctgaaactatcacaacattgttaattggctgtatctcaatataaaaagttaaaaaacaaaacaaaacatgtcattcatcctgttgccaatagagaaattgaggctgatggaatgcaagtgatttgccactttcccaaagttttgccactgggaaatagcaaagctggaacttgagtgttttaactccaaattcagcactcttcctctgacccttgcagcagccctgggttgctggcaaattcagaaaggatagaaagctgagttcctggttcctccagg

SEQ ID NO: 19954 - DNA, 600 bp, Bovine  MMBT03836
agtttgaagtagctattttgtcaacacacatctgcatgatatcaagagctacatggtgcaattttacaatgcggttaggggactttcatttggaagagtccagtggaatgtgaaaaaggaaaatgcctctcaataagaggcataggatgtgctctggaagaataatgataactttccacgttagtgcacaataaatgtccattttattactgctttacaaacagtaatgaagagattagctgagatttgagaaaatagactgtagtcatggaagtgataaaacaaaggtttgcataagayttaaaatcaactttttccttcctaaattcacaatttatttgaaatgagtgtaggaatgattgctaaatagtcattagtgattaacagttagcaaatacttcattatttgggatggtagcaaagagtgacagagacagtagtagtaggagagtcataatttattattccataagtagtgttaatacctgtaaaaaaaaaataggtagttgcctatagcttaagtgcttatagcataggttaagttctatggaagattttttatattcaaagataaaatttacatacaagatacatctactg

SEQ ID NO: 19955 - DNA, 600 bp, Bovine  MMBT05771
ttgaacatatctctcagtgatacttacatggaagcctgcattctaatcaggcaaagggctagcagtcctttattaaataagtggggttttgtgaagtgggttggaaagttattctctgttactgcctagctttttttagtgtgcaaaggggcttcttccatgttgctaaattcatgctagtttctttcttgtgggcttaaggaagtgctctttctagtttagtagtttttggagaaagctcttctgagcatgcccatcttacacatgtctgcacgcagcagccatcacaagtgtgtcacrtgtaataccagcaggatgccaataggtagattgtaacctgtcagtcccaaatgaaatatgtgactggctcaagctgagcccaaattcaytgtcaataagtcagcagttaactccaggagaaatgaatagagatgaaggcatcagcttccttccattttctataatccactttgagtctactttgcttggactgacttaaattgaggtgtgtgtatatgtgtgtgtgtgtgcgtgcacgtttgtagtctgagaagaagttggctgaatgctatttgaaatgagattagaaagcacygtaat

SEQ ID NO: 19956 - DNA, 600 bp, Bovine  MMBT07219
tgtgtgtacttagtaagcaattcggggtggggagggaataaaagctttcattggccactgagtcaataactttttgcctaggtggacaatgcagtcatcattcttttaaataaatttttttcacagttgattgatagagattcagatctaaagtgaaaaatgtatttccagatgttaactagcatttctttttgcatgtctagtgttttgggtaacaagtgcccagtggtacctgggttatgttttcaaagtcattggtagaaattcagccacaattgagcgtgatggtaagattctcaygttcatttcatagaaaaatactaccagatcaaaactgcctgttacagctttcctccccaattccacctagtggtactgccctcatgtggctggtttcagttttatatacacttccctagtggttttccatttggcttgaaacttaagacaatttcctcccagatgctcctatatattaagaatggttttgttttgtttcagaattatggcaaaaagcttgaaggagggtgacatgatgatgggagagcaagtggccaggtagtgatatccttttgtcccactgcttggaaaatatgtctc

SEQ ID NO: 19957 - DNA, 600 bp, Bovine  MMBT08949
ttatttcacggctgcagtcaccatctgcagtgattttggagcccaagaaaataaagtctctcactgtttccattgtttccccatctatttgccatgaagtggtgggaccaaatgccatgatcttcattttttgaatgttgagttttaagccagctttttcactctcctctttcactttcatcaagaggctcttcagttcttgtatgtatttagtataaatatttcaaagtttcacaagaaactgatgattggtttatggaaatggaatgggaaagctaggatgggaagagagaattggargtagacttttcactcttcaactttgcagatactttttgagtcctacaaagtgttaaaatgtgcaaaataaataaaatttaaaatagaggtaagattataggtttagagtctaagaattcttagctctattttctaaaatatatatagtcaaaaagtttggtaactgtaaggaaaatttcacttcccagctttaagatggcattaagaaaggtaatatttagaaaaagataatatttagtgttacttcactaagtaacaattaatctttatttgttgattgagaaaaccttatgtaacact

SEQ ID NO: 19958 - DNA, 600 bp, Bovine  MMBT11901
ctgcttgggccaaagagaacttctgttcaccaccaccaccacctcccaagggccctacatagcggcgagtggaggagtcgtggaagagtcgggaaacaacttcaacagtgaacacaaggtctctatcctcagggaagttacaaactaatttttttttaaaaaaggacacactttccacccccatccctctccaaatataacggaagaaatgttgcaccagaagaccaggactccatcctggatccatctttaatcatggacaagtcttcaacacatttaaacttcaggatttkttctttyccctgtaaaatagaatatattaattttggccatgccttctatacaaaggttatctaaaggctcatataagatgtggtggtattttagtaaactgcaaagcactccacaaatgaaagytacatgggcccaatggttgagtatttaatcacatgctgccttatcattgccattaaaaaaaaaaagacagttataaacacacaaattcagaatccggcattgttatgtccggcaaacagtaagaaaaggggagaaaaggtgtgtggttatgacttgaaagtaaagcagtcttatggggcccca

SEQ ID NO: 19959 - DNA, 600 bp, Bovine  MMBT19061
ggtctctatcctcagggaagttacaaactaatttttttttaaaaaaggacacactttccacccccatccctctccaaatataacggaagaaatgttgcaccagaagaccaggactccatcctggatccatctttaatcatggacaagtcttcaacacatttaaacttcaggatttkttctttyccctgtaaaatagaatatattaattttggccatgccttctatacaaaggttatctaaaggctcatataagatgtggtggtattttagtaaactgcaaagcactccacaaatgaaagytacatgggcccaatggttgagtatttaatcacatgctgccttatcattgccattaaaaaaaaaaagacagttataaacacacaaattcagaatccggcattgttatgtccggcaaacagtaagaaaaggggagaaaaggtgtgtggttatgacttgaaagtaaagcagtcttatggggccccagagagctctggcaatttttctgtgaatatctgaatactccttgtaatcgttactccttgttgaaataacttccatgagtaaccacagagatgactactcctcaaacaaacccagatt

SEQ ID NO: 19960 - DNA, 598 bp, Bovine  MMBT02918
  misc_feature (1)..(30): n is a, c, g, or t
nnnnnnnnnnnnnnnnnnnnnnnnnnnnnnactggaaagaaacattttgatatcacagggggcgatcagccagttaaccagaatttaacaacaaaccaataatcaccaaaactgacttctaaggtctggttaacctgtgagctttttattctgctaaatggggggtgtcaggcccagcccacttgcttcgttttcttctcttccccccacacacgggcgcccagcactttccactgaactaatggaagtaaatagttaaggatacaggtttgaagaggcacctaaatataagcctgcccrtgtgtctccaccctgccctatttataactctacactatggactcaatccaatatagttaaaaatatcaggagaaagaaggtgtgaaggctaatgtagttgcaacacttcaacctgctaaagttcaacccgctaacaacctcagggatggctgacgaggcacaagactgcttcctatctcccagatccttgaaagaatcagcatgttgagctccagggggtaatcatctaagatacattttttctagaaaaggagaattcagatgttaaatatttcctatttcttgaaagaagcaaatc

SEQ ID NO: 19961 - DNA, 600 bp, Bovine  MMBT19032
tcaagttgtgccttttgtgagtctgtataaagtccaccttggaaaccttccatgcctttgtttcttcatctttaaaatggatgcagtaactattgctgtgtttaccctcccgagctgatgtgaagatgaaccatgagaccacacacatgaaagaatcttgtaaaccatataatgctttatatcaagtcacttgtcccaacacaaagataccagacatgaaaaatggggaaagaaataggatcttcaagatctgattccatgaatgttggaaggtacttgttcaggaaaggtgtgtatggytgtggatgtatggagtgtgagttgcagtaaaacatccaaatcaaagaacactaagctatggagagaaggcctgagagcctgaacagtagggtaagaattgaggtacagattttggagtcatcaacatgggagaagcaggtgaatccatgactttggaaaacacacctttgaaaatttcacctcccttttcatttttgtagccatataattctcataccaatcccagctgtctttcgttggggttatcaaaatgcacaactttattaagaaaaaaagattgctttcattgctgcaaaatgt

SEQ ID NO: 19962 - DNA, 600 bp, Bovine  MMBT00582
ttagcaargttaataaactacttgcagaggggctgtcttaactccagagcaggccctcatagcctcagctgagctgcctctgatgtctgtcggcttgaagcaggggggctcaggcttccgtctgtaatacagacaagtcagagatgagcatgtacagactggtgtcactctgggccccttcgggcccttagctaaacacagtagagacattgagagcaagcgatgggggccttccagctcaggggagcacccagagctcctgctgtgctcctgccatctcgggcgtctgtcccgttttcrccttggtgccggtcccctcgaggcccctgaactgctgtgctctgtggggctgatggatggcagtgctcacggcaggtttttgtctgctctgtgtgcccctcctctccagctctgtcccagatgggctacaacctgagcccccagttcacccagctcctggtctcccgctactgcccgcgctccgccaatcccgccatgcagctggatcgcttcatccaggtctgcacccagctgcaggtgctgaccgaggccttccgggagaaggacacagctgtgcagggcagcgttcggctcagcttc

SEQ ID NO: 19963 - DNA, 600 bp, Bovine  MMBT13885
acgtcacctctacccagttctgaagcattttcatcaccccaaggaaacccactaagcaatcagtcctcttactgctctctggtagccattaatctttctctcrccatggatttgactgttctggatatttcataaaagtgaaagcatttgataaatggttttttgtgtctgacttctctcacctagcataatgttttcaaaggttcatccacgttgtagcatatattaatgcattattttattttatggcagaattttaaaattataattttttaaaatgtatgcagtttttttcctatyctctaaaaataaagcagcaaatccatctcgcatacttctttttgacaattaatggatctccacatggaacaaaactttattttgatgtttaaatctttatacagtatatcaaataatctgatgtttaacatacttgccacatgatattcttgccttgatataatcaaagttaaggtcttatacaccatggatcactgttttggaggccagggattagcaggaagtgacaggtgtatccaaaaccaaaattctcatggtaaactcagcttcactggactagaatgccatcactgtacactt

SEQ ID NO: 19964 - DNA, 600 bp, Bovine  MMBT13537
tatttcaaatgagtgaacttcctacttggccttaggaatcttttgtttgatgtagattgaaaaaaaaaaaattattttttattagagcacctattctagatccacattcatcttcagtttccatcttcagctctggagattctcacatactcctatgctctggcctagtcccttgttattaaaagtgtggttagtgcatcagcagcaagggcttcaactggaagcctgtagaaatgcagactcttaggccttagcttgacttattgtatctaagtgatttgcatgcatatcaaagtctgmgaagcagagttctakccacattgaacttcttaaaattctctaaaggagtcatgaagcctttgtacatgctggtcttcccaaatgggaaagaccctcttccccatatgctaggaaaattggcttcttatttagtctccttatttaattagttagtgagggaaccagcaagatggtaagtygagttcaagaaggatacaggagactggtaaacacatagtctatggaaaaaagattgctggaataagattgaaaattaaatacaacactgctttttattgacacattgtgcttagtcactca

SEQ ID NO: 19965 - DNA, 600 bp, Bovine  MMBT03027
tttgtttttctaccttaatttcttgtttcagttttcagagtgtatgtttacaattatgacattttcagtacttcccggggtcttactaaggtgtgcaatactgaatatatctgttttctcaggacttcttaaaagatttgctctggaagcctgtgcatcccacagtcccccactgaaatgccacctcttcgatatgccagtttgtgtcttctccatcagaaattgagattcttccctggccctcacttttcacattggtggcaccttcatttgatgaaacamcacctttgatgaaactgyacttcttccattagactatgatcttcttaaagggagtaattccatttactcactttctcagggagaaaacttatgcagagcagaaatatatacagatatggaaacaacatagctggagtgaatcctgtgaatcaaatctccttattggctatgtgaactctgggcaggtttcttgatttcagaaagcttcatctgtacataggaaggtcatagcacccattagggctgttgtatgagatagatgaaaagtaatgtatattaaaatgttcatcrttgtacctggagcacagtaggtgttta

SEQ ID NO: 19966 - DNA, 600 bp, Bovine  MMBT03496
gataccttctttgggtctggtattcagttctttatgtacctgacagctaacgtttatttatgtccttgtgccactcaaggcattcagtgttacacacattatctcatgaattttttacactatccagaatgccaaggcttcagttctcctctcttactcaggaggaaatggggctcagagagaaaaagcaatccactcaaggtcagatttgctcaagttggagcccacagcctctgccgtgatctggcatgcctgctgcccatcactgccagctgtctgccccagggggctaacccagtmtgttacggtcactgaagtaccctagattctgtccaaagtgcctcctcctggaggcaaatgactcctttcagggtttgcaagaaattctacctttgagacgttggagatgaaaggaaaatatatcccaagtaacaaactgagggctttgttagaacacgtcacacttaataaaaagcagagagtgttgatcctttttcaacgacactctcccatcattttccgcctcaactgtttgttaagcctaattaattgtgataccgcaacccatctgggcaagataaaacaagagagatatatcag

SEQ ID NO: 19967 - DNA, 547 bp, Bovine  MMBT11238
cctccagaagatcttccagattcagagatcaaacccgagtctcctgtgtttcctgctggtyaggcagattctttaccactgagccacctgggaagcctattgaattgtacctcaagttaaccagattaatttagaagtagctttaagagtcataacactttatttaatttcctaataatrtaggagccataatgcatgaacatcaatattatttaatttattcttgtttcaaggcttaaatataggaggatagaaatgacgtttgtagagaagatcccatgttatcacttagaatcaaaygaactaaataacatgactgagaaagcaaaggagcccagggcatctcctggcctcagcaggagataagaaactgatacatgttgaatatttgctatatgtctggcactgttctatatattttaaagatattttctcatagagtcctcaaaacactatcaccaagtagggtgatttcaaagacaaagaagataggtaaagagaagtaccttgcacaaagtcacagagatactaagtagcagagttgact

SEQ ID NO: 19968 - DNA, 600 bp, Bovine  MMBT01253
aatacaacagtttaggggatcaaaagagaggccttaaaagtggttgtagacagttgtttattttcctctgaaatatctgagacacatccccacagccttgtttatgtgataaatttactctgtgaaatttgctttataaactaaaggtcagctgtggttgggctcctcagaattaatgagctttggccagacgtaggctgttgcagggtgcctgcttagggctcaattgtctattagatttttgcttgtttatagtttttacatgcaaattctggttgtaattacagctttttttttttmtcttttcctgagctcgtgtagattttagagagggcagggtgtgggtgagggtgtgatctggttagaaatctcagcccagttggtacaagcttttggttccttgaaactctcaaatttttattatttttgttctaagattcctgtgctgtttttatatataaatgacagaggctttttgcagcactcaagtctttatcacttgaacttctaagttcaaccttaattatctgyaaatatgcaccataatgaggggtgtgtttttgagtggggcagtaattgcatttccctcttgtaatttta

SEQ ID NO: 19969 - DNA, 600 bp, Bovine  MMBT18589
tctgttgtttatttaaaagtactttaagagyagagatttccttaagaaatatctaacawataatatgatgtcataaataaccagacatttagaaaatcattattaaaggctgaggggaaaagcaaaggattacagtgatggtcagaaacaataaattatgttctcatttgctttgatgaacttggttctgaatataacagtatattgtcactcactttgaacctaccatccatgaaatgaagcaaagggaaatgcatacagttagctacttgcttgaaatcctctctgatttggtaacayaggtttcttatggtgttgattaatggtgagcagaacactgtccaacaaatcaggtgtcccattgttgagcaaggggaccacctctcctaaccccaactggagctaaatatccagttggagagtgactgaaggtatagcaatgaaaaagacaaacagctagctccccttttgacttctgaaaagctggcaaccaaaataattctgacaaaataaaagtcattttaccgttcatcatacttccccgtgtttgcagttttgaaatggaagagaatttcagcaccaaaaacattcagcacagac

SEQ ID NO: 19970 - DNA, 600 bp, Bovine  MMBT09654
cgcgcggaggtcatgcagacgggggaggagggccgggagaggggccacagtccttagccccctgccggcagggtcggctgttggcatgagggcggtgggcctttggaggcgcgggatgagcgtgctgccgggcggccctgggcgcatgcggggggctcaggacgcagcctcgtcttcttggacaccgggcagctctgggcttttgcctccttcgccaaacccgtctttcctgttcaggggacaccaggggcagagggacctcagaggtcagaacatgcatgcaggaggacacgctcatayacactcataggcatttttatccacatctctcaaatcccccaagctcagctcagtctcgccaccctgcactgtggtcccttgctggttmcccacccatagtctcagcccacmaccctccatggctccctattgcttggaaaggaagtctagacttcccaccctgacttctggagccttgccagatctgaccagacatggcctggctcaggccccatggtccagggtaggagggctttggttttgctttttctttgttcacaggacagattctacccatcagtcttgggattctgtcccata

SEQ ID NO: 19971 - DNA, 600 bp, Bovine  MMBT20631
atataaaagatacagtatgttgaaaattacataagcagttgtgtgaatcactattttatarcaaagtasaaaaaaaaagtatgcctttaggaaagcatgaatggtctcagattttgttacgtatattgttttagaccggtctttaaagatctggccctttctttcagtatctacctgtgaaaaggttatgatgaccctcgctagcatcaggaaccatttccacttgtgttactgatgggtcttggcattgatattgaaaaccagtgtccctcccgaataaaggacacaaagacctggtgrtgattctcctggagaagtgaccatatttgcagctgataagaaacagttaataaggattttttgaatgtgcctataaagaaaagygggcacttggtccccacggaaggcttccttgtgcagcaggccgggtgactgatgaagtgggttttgtgwaaaatgtaaattcacattttgtggaaactggaagttcatccgtctaaatcatttctgttatagtctatgacggcttctgaaaattgccagggtaggtcttttatttgatctttcaacattattggaggtcatataaacaggattata

SEQ ID NO: 19972 - DNA, 600 bp, Bovine  MMBT20634
ctttaggaaagcatgaatggtctcagattttgttacgtatattgttttagaccggtctttaaagatctggccctttctttcagtatctacctgtgaaaaggttatgatgaccctcgctagcatcaggaaccatttccacttgtgttactgatgggtcttggcattgatattgaaaaccagtgtccctcccgaataaaggacacaaagacctggtgrtgattctcctggagaagtgaccatatttgcagctgataagaaacagttaataaggattttttgaatgtgcctataaagaaaagygggcacttggtccccacggaaggcttccttgtgcagcaggccgggtgactgatgaagtgggttttgtgwaaaatgtaaattcacattttgtggaaactggaagttcatccgtctaaatcatttctgttatagtctatgacggcttctgaaaattgccagggtaggtcttttatttgatctttcaacattattggaggtcatataaacaggattatatgaagtctttcactgtcaattagtgtaattctaaatcaacattctgtcaacgaggtgcagattttacagcacaaggaggaagag

SEQ ID NO: 19973 - DNA, 475 bp, Bovine  MMBT09187
atgtcacaagtcatggaaactgggtcaggtcactagaatggaattcaaagaaatagcctgtaatcaggaggggtgtgtatgtktaagacctgcggtgcacaactggaaatgttaagtctaaggagagcgttgtctggtggtggaacaacagagaaaagcaggtggtgaagactagaaaggtcaggatctgtataaagattagctgtggctttctaatcaaagcttcagagttcacgtgaagggtaaggatttaaaataaaaatacagaaaggaattattgaggactactgtacaagtctrtaagactaaatsattccatttacttaacggagtttgtggctttcattagatccattggtcagtatttctgagaacttttgcagaacgtagaaaattgatgatatgactcartttcattttgggagaaaagaataacaggtacttctattcccacgatttagtgttaacagatgta

SEQ ID NO: 19974 - DNA, 561 bp, Bovine  MMBT14993
tagaaaataataaaagtgccccagtattgtaaaataaggcttgctggctggtaacaacagaatgacttattaagattggaggtttattaactcaacgattcatttattcgttcaagtttttactgaccatcctagccctcttgaagatgttagggatagagtaacaaaacaacagcacaaaaaattccctatctttaaggaatttgtatgttcagttgagaggaaacacaatggatataataaacatgcaagtacataaagtgttagaaggtggtaaactgcagagaaaaatcaatcacrgtaatttggatggacagaggagtgaggagcttaattctaaatgaagtgcatgtggtaggcttgcctgagaaagggatatttgagcaaagaaaagaaggaattagtaaaaagcccggtggacaagtatagatgaaaacttcctggcataagtaatggacgaacaataagaaagccagtgtgactcaaaagggaggagctgagcagaggaatatgtgatgaattcagacaggtaaaggggagggggggtattgtttgggagga

SEQ ID NO: 19975 - DNA, 600 bp, Bovine  MMBT04626
gtccatggaattctctaggcaagaatattggagtgagtagctgttcccttttccagggaatcttcccaacccagggattgaacccaggtctcgtgcactgcaggtggattctttaccatctgaaccaccagaggttgatggtatgtatactgtgggacagtcttcgcttccacgaaacagagaaagcaggaaaattctcattactggatgctgcccccgattcttcagcatatgagtaatgagttagtactatttacctagaaggtttataatgattatttcatgttttaaattcaatcytgatttttctgcaaatgcagcattcagaggaaaagaaagaactcagctgtctgtacaaacatatggaaatcaatgataaatgggcagagattgcacagtatatttattaaccaagcttgtataaatcataatttttcaaccatttattaaactaataggattgttttgggaacatcaaagaaatctttattaggtaaataatcatgtttatccactcagttatggggaaaagcaaatcattcacactgcatttactctgcctcatcagatttcatttctcttaaatgtcagccgttgata

SEQ ID NO: 19976 - DNA, 600 bp, Bovine  MMBT08728
tatctgactccctcaccctcattctttctataattaaaactaatgttactttttttctccacaaacatataatttattggatgatcttcaaaaaatttctatacttgaataatcaaatggacttagagtcaaagtttctgattcagaagtatatttttattcatctcagaagagttttgagttgatacagaaaatgcctatgttctgtgagtgtgtttaactgataaactggcataacaggaacgattatgtcagaacaccttagtcctgaagtgaagtgaaagtgcaagtattagtcaygctcagtcatgtctgactctctgggaacccaaggactgtgtagcccaccaggctcctttgtccatggaattctccaggcaagaatactggagtgggtagctattctgttctccagggatcttcccgatccagggatcgaattagggtctcctgcattgcaggctgattctttaccatctaagccaccagcgaagtcctgtctcaagctttatcctgatcaaataatatggcctctttatatctccgatactgtagatacacaagcaaccctatatagtattgtatttttcaattattggg

SEQ ID NO: 19977 - DNA, 600 bp, Bovine  MMBT01761
ttctgcttttgagaaacatttgatgactccacaccaattactcaatgaagcccaagctccctactttcaaggccatttatgacctggcttcaacctagcttttcacatctctatctctttgccccacaaggccccaccaaaaacaaatgcaagccttatgtttaagtcacatataacttcatggttttgctcaaacatgcttcatagaagttcatgcatattcctttcacaagaaacatacccaccttgctacaaatatctctttacctgtctgcctcccacatgggacagaactattaraggacctcaccaactatctcggatagagcacattgagagataagtactccaatacctgcttcattaacagaagctcacgcagcaagcatccgtgtttttgcttactctgctttccttatctgggacacagaaaggaatcaatgatgacccagagtaatcagggctgggtgaataatacagtggtggcttttatctgctgagatcagatcagaaaaggatagaaaaaaaaagaaaatgcccaacagctagcaggagtaggggaattttatataaagaggaaacaaatacactcgagtctct

SEQ ID NO: 19978 - DNA, 600 bp, Bovine  MMBT06680
gtgggatgcatgcagaaatggtaaaaaggaataagagggagtcaacagtgtctgttaaacagatgatcctatgttacaaaaatgtataaaaatgaaatctggagttttcgatagcctggcctgcagtgcttcagaggacaactctcaggctgctggggctacctggctgcaggcgtaaaaagtgggaaggacctgaggggctgtgaccttcttatacaccctgagacagtcaagtgattatgtggtgacagagtatgaaccttcaacacgtaattcatattccagaggtcttctgtaggrctaggctgaagcccaccctttgggagattcttcctgagatcagtctctttccatggttttctcccccactgactggtttttcccattcctttaatgtttcccctggaagttcctgcacaggagttctgcttccaaggactgcgatctaagaagatctacagtctcttataatttattttacttaatttcagagcctaagttctcatatctcttcttttaaacaacacatgtaatgatacactgttttttgctgttgttgctgacaagatttcctaaggacataatgctgaacattcattg

SEQ ID NO: 19979 - DNA, 598 bp, Bovine  MMBT20077
  misc_feature (1)..(103): n is a, c, g, or t
nnnnnnnnnnnnnnnnnnnnnnnnnnnnnnnnnnnnnnnnnnnnnnnnnnnnnnnnnnnnnnnnnnnnnnnnnnnnnnnnnnnnnnnnnnnnnnnnnnnnnnnacttgcttatggtggatgaaatacttgcaaacatggtccaagcagagacttgaaaataacttgcctattgtgtctttctctattcatgctcttggactttttcatttaacatgtggacaagcccaggctttctggaagataagggaccacagaatgtgcctccagtcatttcaagacatggccatcacaaaccaacmaactccagccaactcacttgctagcagyagatgcatgaatgagcccagccaagatcaactgagccccttctagtccagtagaacagcttagttacacccagttcacagcascaaccacactatcagggctaaagaaatggttattgcgtaaagccatgaaattttgaggaagtttgttacacagcaaaggttaacagaaactgttttcttagcctgttttgtttgacttcaaaaaacagataaaatgaagaaactcttaaaattctcctacctcaaatttttcaggtgccagcttgat

SEQ ID NO: 19980 - DNA, 598 bp, Bovine  MMBT00594
  misc_feature (1)..(41): n is a, c, g, or t
nnnnnnnnnnnnnnnnnnnnnnnnnnnnnnnnnnnnnnnnnataatgttacatttcaaagtattataatttcaaaagaaatgctataatggaatcacatggaagacacagaatataaatattcaattaaatatgtaagaaatacaaaattcctaaaatatcaacagcaataaaggaataccttgataactacatattaactctgaatgtatctaattaccagttctattaaccaagaaaaataccatttgtattaatgaaatattgttgatcagtaacaatgatggttgagcttaaaatmagaactgttttttcttgactgggttaaatcttagaagaaccagtttcaaggtaactagaaataataatatcactcatgatcctataagtaacttgagaaaagatgatatgataattgtcccagaaactaggaaagactttagaaatgccactgttctagtcctaagtttttctcattattgattttgtccttaagagacaaaaatatttagctttaaaaaaaaaaaagaatgcttatttatagcataatcttcactgaatgggaaacaagctactttctacaaatacttcatctacaa

SEQ ID NO: 19981 - DNA, 600 bp, Bovine  MMBT11273
cttccaatcactgcagtggaaagaggggcagcttgcacaaagtacagatggttaatttattggcactgagcaagtcacctccccttctggatggcaggcacttcatctgtaaaatgggaggattgtaccrgttgattttccaaggccattctttccacgtctgagcgcttattattctgtttaaatctgtttaccatcttatcataaattgaagagcaaatgtgtgtatgtacacaagcattcatatgggtcaatgtggcctgtgaaaaatctgactcttgattcctgctgaatatccaytagatcactttaaaaagtaattccaggacttccgtgatggtccagtggttgagagtccacctgccmattcaagggacgtgggttcgattcctgatctggaaactaagatcccacatgccttggggcaactaagcccatgcaccacaaccactgagcccatgagctctagagcctgtgcgcagagaagccactgcagtgagagcctgtgcactgcaatgaagaggagccccygatctctgcaaccagagaaaggccacgtgcagcaacaaagacacagtgcagccgaaaatcaatattttt

SEQ ID NO: 19982 - DNA, 600 bp, Bovine  MMBT07602
gtgccactaagaatgagatgaatttatactttatagatcaagttacccaactgcatgagaaactggaacaggatgtaggctttagcatcagacccctaatgtatttcacaatatgatactatgtgaagaaacttcttttggaattagaaatcttgttctgatgttgatctatttgataataaagtgcttatttgaagattaaaaaaaaaaaacctgaccatgtctagagtgaattattttcttttatctcaacgctctcttaatctcacgtctaatcatgttttcctctttgacttggtygctaggatgtgcctttagcaagactatggttatatgtttcatatactgatcctacttcactgacctactcctgactacatccccctttcctaacctggctttttgttgttgttgcttatattgattttttcctctttactatattttgggttgttgcggtcttacaccaatctttgtaagacacttagaatcactccttcgaacaagatagcatgtgacaaaagactctcagcacaacctagtcaaatggaaatacgcatcgtcaaggacacacgatacactggaaaatttcaggccctt

SEQ ID NO: 19983 - DNA, 600 bp, Bovine  MMBT18750
gttctgcttactacttttcaaatgttgaaaaattacataatcaaaggaaaaaattataaaatgtttagtagactatgcaaaacactttgctattatgattttacttacctaaagtttcactgaaagacaaatttttgtgtcttatttgcacacttatatgcacactcacacaaacacatataaaccattatttattctatccttaagctaaatcacagtgtaaacttttataatgaatttggcccatctattcattctttgtgggcttcccagatggctcagtggcaaagaatctgcccrcaatgcaggagatgcaggttcaatccctgagtcrggaagatcacctggaggaagaaatggcaacccactccaggrttcttgcctggagaatctgtggacagaggaggctgcctggctayagtccatggggttgcaagagtcggacatgactaagcacacacacacacattcagtatctcaaggttttcatgttctcaaagccaatctgtccttgttgaagagaagaagactatggattgagtccacacacatttactgggcgaatgcacggtgctgagggccaggaccagggcaaattcc

SEQ ID NO: 19984 - DNA, 600 bp, Bovine  MMBT02030
ctcctgaggaccgtgcacagcatcctggacacggcgcccagggccttcctgaaggagatcgtccttgtggacgacctcagccagcaaggtggccgcgggcttcctgcaggctctcttgggagggcctggaccctgagggcctccgtgcacagactggagtttggagcctatgtaggcgggagtccccgaagcsgtcccgcagacggggattcgggtgcaggagactcatccgggaagagccccagaggctccgccccctgtgacacccccagagtgtgatgctggctgcaggcgaggaaycagcagctggagggtgactgtgctgctctctcgttattggctcttttgatcgcagtgcagggcatgtgggatcttagtcccatgcccctgtattggaagtggagggtcctaaccactggaccgccagggaggtcccttgtgctcaccttttttgtaagggacttgagcactgaagcrtctgcagattttggtgtctgcagtgggtgggcggactcctggaaccaacgccagcaccccgactctgaaggatgaccgtacgttggtctttccatctctgctagtgctcatctgggcgctctc

SEQ ID NO: 19985 - DNA, 600 bp, Bovine  MMBT02072
gtatggtggccttacagtaactcagcatcagggggcagggaaggagtcaagaatcagcattgcatagcctttcaacaaatctctgatgcacacgccaggccattcacagttgagacaggtgacctcatccccactgagaaacaatgctgaacggcacgtagttactctgagaaatgcacccagaaacaaaataccctgcacaccaggaggaaagccttcagtacctaggggatccaatcatgcattcactattctgcacaggaaaataaaatcccggcttgtcttgaaaacagagtttgmgtgtgcaactaactcactataaactgacttgtcaccccaaggagattagttctttccatcaattttaagyacattagagctttcaagcagcaaaacacatcctgtgtcatcaaggacatcattagtcragtgtgtcaagccctgaaatgtcaaaaatgattctaacatcctcttagactgttcaaagtcctgcatcactttgtttactgataatggtaaagaacagtggggaaaaaacaagctaaagaggtgaacatataaattacaacgatatgtgtttatttcatttagggcttgaag

SEQ ID NO: 19986 - DNA, 600 bp, Bovine  MMBT08903
cactggctcttttagggcaatttgatctgcacatctgattcattttcctatactggtagaaagggaaagaaacacaaaggaacatagttctaactccacatggccccatctgtatgcacatcaccaaagagaatgcaaaacattcacaacatcaataatgtcagagttattaaagcaagtaatttccttttcctgatgccattttcatgaaccttgttgaaacagtctcttgcacatttcttaaggtcttttttccaagtgagttttccaaggaaatagcctcccatgtttatatagatmtcttccagttttgagcagagaagagctcaggggacaatctttgggtaaaagggtaactgtacaagcgatccttaactacttccaaaacttcactttgcagaactttctcattgtgttttccatgaccattattttgccaggaccctaaggatataccattctcctttttaaattctggcccagatttcaattcaaacaacatatcttttccttatcttttttttttttttcccagacatcttaagctgatatttgtaaagttctttacacaaaaattagaagaaacaataaaaaaaaata

SEQ ID NO: 19987 - DNA, 600 bp, Bovine  MMBT16809
aaagcaggatatgattaatgtgaaactaaactgtcatattcatgccctttcatttgacaatccatcatgtaaatgcaacagaactaagatacagaaatttgtcaatgttcatggtgtttggcttggaacttctttacagacccaatacttgtaagatctgtttgatgtttcgaatcactaccaaactcccaaatctttaagaaaggcaatcaagagtagggtagtcatacctgatctattgattttcacattcacctacaaagaaaggttctttgagctagtcatggtctatctttaccyaggctctagtacttgcataagagagattaaattacttttcagtaagtgacttaaacaggatgaaaaatacatayacacacattatgcacatatgcatgtatatatgcaaacatatctacttgcatgtacttatatatatatataaacatacatatgtatatggccattaaaaaatgacaagtctttgcctaataacaattttaagtgtttatatgagcaacaagccaaatggtacaggtgtcatcagcagtaaacaatctgatcctcatcttacttctccagcatggagacatactgacc

SEQ ID NO: 19988 - DNA, 600 bp, Bovine  MMBT02170
tgcattttaaatatagaaaataatataacttgcacatcaaaattgctttctgggtaatattgcttaagaccaggctaatttaaacagagaattatttaaggaaaagtatcaggtaaataatgttacaggtgacatgcaaatatgggaagagttataaaggcacaatgcaatggttgaaactttggaaacactgcataaaaatctaaagtgtatattcattcatacccttataagtactttgcttctcacttagatcccaaattctaagaacatcataaatatacctcaagtgagggtttkgggctataagcctaaacaactgagagacaatatgttattatgtacaaacacatatggtctttgtattgttgttgctgtttagttgctcagtcgtgtctgattttttgtgatctcacggactggagcctgccaggctcttctgtccatggcatctgccggggaagaatactagagtgggttgccattttcttctccagggggtcttcctgacccaggggtcaaacccatgtctcctacattggcaggcagattctttacaactgagccaccaggcaagtctagatgtataagatgtataag

SEQ ID NO: 19989 - DNA, 600 bp, Bovine  MMBT04033
cttttgggagtctcttggtatttagggtttgaaatattaatgattaaaaataaactaaaattggaaaatgagatattcctgatattaaaatgacctacctcacaaaaggtaaattaccaagtttaagctcttggggtttcatgtaaagatgctaaatttttcatggacccatgcaagatttgttcatttaaatgttgaacatatatctgcccttgcacacctgtgtatttgtgtataactgaagcttacatgtagcatttttctagttgtaactgttcatttctataataaaatagttcwttggacagtaaaaatttatagaactttttcagtcataatatatactaatatatagatagatagatagattcatggtaatatggaggaaagttgtagttcaaatttgccaaagttttctataggccagtgtgaatgggctagtttagcctgatgtactgtgatgtgaagcattatgaagtttctcttaggctgagttaacactgcagtcacttagattaatggttctactaaaagagaagaaaaactagctgtgtgtttactggtcatttgctaatcctattagggtatggtaattttcac

SEQ ID NO: 19990 - DNA, 600 bp, Bovine  MMBT00526
gtctgggcactggccaggggtccagccccccatccctgcgcttcccacacttgactctctccaccgccccactagcctctcctgagtctcagctctatttattgctcaagggtttctcctgcagccaggggtggctcagtttcagaggaagtgcagataaagtgtccacacttggacagaaacgagggctctggatctcggtctctggcagctcccaggcctgtctgggctgcagctcaaaccgcggcctgaaccgctgtctgcgtcaatcaagcatcaatcaattaccaggtctgggcyccygcccccagggggacagtgctggccgcagtgccggaggatcagccaccaaggggaggtgacagagagcagggagaagcaggtgctggagtgggaagtggggccccagaggtggtaacactggaccccctcccccctcgggggagtggacctccaccatgtgccctgggctctgggtcactggatcagctagattcttcctgggtaaaccctggaggtttgtgctcacagcacctctgctgagactgacccgagtccaagccccagctctgccatctgcgggctaggtgaccctgttca

SEQ ID NO: 19991 - DNA, 600 bp, Bovine  MMBT09276
tggagtagaagggtttgtagccacaagagttgtaaccaaaagagcttctaatcatttagaagacttggttccccatggggcttccctggaagtccagtggttaggactttgctctccaatgcagggagcatgactttgattcctggtcaaggactaggagatatggccagaaattaaaaaagaagaagaagatttggttccctagaatattccacggaattaatttctcctctggagtcctcttactacgtagcattgaggtcactcttgctgttaccttttattcagttatcacctctrtaaaaagaccaaatcctttaagaaactgtggctcgtgtccttttgtcttcctctccgttcctggtggagaacggtgacaggaaagtggagatcatccccattttacagatagagaaggctgtagagaggtgcagagaagggtgcagctagcttctgaccgtgccagactggagtgcagagaggagaggtctgcaggcattggtcctgggaagttctgtcactgggggtggacagagtaccacttggcctggccttgcaaagaagagccagctcagctgctccaaagagagccaggccagt

SEQ ID NO: 19992 - DNA, 598 bp, Bovine  MMBT12406
  misc_feature (1)..(4): n is a, c, g, or t
nnnnctgttagttcactgcctcactctaaacaaataataactgagcaactcttatcctgattcttaaacaaataataaatgagcaacacagaggcaaagtactgtgagtaattcagaagcaatatgtcactgtgcccttaagtgggatttacaatctggacagcagaatccaaaatactcacaataaaacacacacacacacacacacacacacamaaacaagcaacaaatagctcaggtaaaaggagtaatgaatctgccttctagtctttgccttcaaggtacagaatcaataagcartttctgaatatatggtattggcaatattctgtgctagatattaaatgtaccttctcaactcyagttttgttccttttcactttttctctttttycccttctttctagaactgaatatatctagtcagtgtataagtcaagagacaaatgcaaaagaaaccacactgtagaatggatattttaaaaggacatcttaaaatatctattttattaatgggtaaactgagattgagaacactttgaaaatttgtccagggtcagacagagaatgagttagggagaagggatttaactccagt

SEQ ID NO: 19993 - DNA, 600 bp, Bovine  MMBT01750
acaaaatctaagttctctaactgaatctttcaggtccttttcagattggctctagctgtcttttctggtggtaattcccaattttctgcttcatacaatttccaaatttccctgccaccagactttatttatttcattgcttctccattcctttgcagctctatgtattagagctgattctaacacatccttcaaagtttaacccccaatccacttctgtacagctcagtattaggagttaacctgctggtaaactctaacaagagttttctttctataactatgatatctatggacaartcttccctacttgaaatgcwtactgtgtttagagacacactgcgttttgcatattctagtattataattgtccagtataattccttgaataaacaagtatgcaataaatatttgttgagaagcctttgatctagtaaaccacaaaagtgtttgttaccttattgctgataatggctggagttgcagaaacatacatattcaataatagtaggatctttatatcaattcttgtttatctctggttatcttatttagagaagtattatgaaactttccaaaattctatttagtgaagtcgct

SEQ ID NO: 19994 - DNA, 598 bp, Bovine  MMBT01307
  misc_feature (1)..(101): n is a, c, g, or t
nnnnnnnnnnnnnnnnnnnnnnnnnnnnnnnnnnnnnnnnnnnnnnnnnnnnnnnnnnnnnnnnnnnnnnnnnnnnnnnnnnnnnnnnnnnnnnnnnnnnntgagtttattgtagatagtccaagtttcataattggacattttgtagtcattaagcagagataaaaggtgataaatatacaatacacatgtattaagtgtatttagagaaacagttctaccataaatctgtatctacagatctcagaatgtattagacacactggcaatcatcactgatgctgctgctgctgctaagtygatctgagttaatgcagaaacagagcaacaattcacactgttgtgtcctacagattcctctaattctctctacacatggaagcaggatacacattcttcagttcggctctggtagccacttgtaagaatcaagagagatctaacgctggagaaagggcggcgggtgagakgactgccagaggaaactgctcacttgaagaactgcttggtttcggttaagtcatacatttctttgcaatggaaaacctccctgtcatttctgttctaaaaataatcaggctagttgaaaaaaaccctt

SEQ ID NO: 19995 - DNA, 600 bp, Bovine  MMBT10133
agcgatttctcaagacttcctaacatttatccccatagatcagcatgtgagccatcaatcctgcgaaggttaaaagggacattactcaaaaactggcatggagaggcagcgtttcaagaggctgttatgtcattgggtttaaagctttaaaggggagaggagatagttattttaaagttgataccaattgcttcccctgtcattccccccaatggttttataattgtggatccaaattcatctgctggattctctttttcatttcccaatttttacaaatgattctataatgagtccacrtaagtacaagtctttttgttgttgtttagaggttcttatagaattatatccctgtttgaaatggaaataacaagtcttcaacttcttatatgcatttggttatttctgatcaaactaaaatcacaaaaatgtctgcacgtaatctacagcagatgttcttcttatccaggaataaattacagcggctactaggcagaaaattgttttgttgtgctgtttccccaagaarggtccttaatggagaacagcagcaccttttggktcctttggatccagagttcttttttgatctttagcctt

SEQ ID NO: 19996 - DNA, 600 bp, Bovine  MMBT12990
aatcatttttctattgtaaattatattttatttcaatgtattttcatttagagtacaggtgttcaatccttttttgatctcataccatgttagctaaagaaaaaagcaaccaattcatgtttataaaataattgcaaatgattatcattgtgatatatatacacatttttttaagacaacagcaattaaaaagtgagataaagatgaaatggacagtattttaaaataatgttgctattatgatggctttcttctatcattagcttgaggcactgggcctctcaactatggccaattagsttgaggcactggccaatctcaactatgattgcctacaggggcttccctgtagttcagatggtaaagaatctgcctgtagtgcaggagacctgtgttcaatcccctgggtctggaagatcctctggagaaggaaatggaaatcctttccagtattcttgcctggatagaagagcctggtgggctacagtctggggttgcagagtaggacatgactgagtgactaacactgcagtacaatattagactcttttacaatgctttttaaaaaaatcatgacactcatgcccttctgcagttaca

SEQ ID NO: 19997 - DNA, 600 bp, Bovine  MMBT07866
ttactctcttgcaaaggagggaaatggcaatgaacaggctgcattttgttacatctttacttcaaaacaattaagcagccagtcatgatcttaactccttcttttaggggtgtattcatactctgggtctgggatggaactgatatgaactttaattaaacaaatcaccaaaatgcctgtgaggtggcattcctagtggagatttcatgttcaccccccactgctttgttggtctgtttttttttttttttccctctggtggcccctctctccatctaaatcttcaccctgcttggagcygcctgggaattgggtgagccagtcctgagttcagaggtgctgctgccaactggagggaagagaggcagcccagggccagctccccaagctggagccccaccagcaggcccaagactgtcaaggattccaaagagagatgaattccagcccagtattcactgtgaggtttgctttttttaccatttcttttttttaatcatctttttaaagagaatttggttctggcaacaagcatgttgcacttcatcagcctttgatcttgccctgggtcctctggcccctggctccctgggcagtcat

SEQ ID NO: 19998 - DNA, 600 bp, Bovine  MMBT21328
aacacttgctagatgtacttggggaagaaagcaagatgttcttttttttttttttttttggtcctacacagaatatatctaacaagcctccaccaaagttttttttcacataatagtaggtcagtatctaataaagattaacataaaggaatgacaataatcagaatgggagacctacttaaaccattctctccacggtaagttaaatgtcatctcaagcctttaatacaggtaacaaggcacatccagcaactttaagattctctgtcacacactctcactaacatgctttgcccccaycttctatgggtaaactatggagtttaattaacacagtcaacagcagcctgccacacggctgttagatatttgccactaacatatactcatgggatactctagagactgatttcaactgaaaataaaaatagataaacagagctcaaaaaaaattaaaactgagtctggctgcccacacttactttcacacatgaggaaaaatagcagttctcctagaagcctcgagcagacatatctttagaacacaatgttaaaaatatgccccccctcctttttcccctacctgtttctcactcaaag

SEQ ID NO: 19999 - DNA, 600 bp, Bovine  MMBT09533
ggttaaaagctcagcctctctggtcacacagagtaagttcaattctttcagccccagctctgcaattactagctgacagaaccttatcaaattgcatataactcccataagctacttatctgtacttatcagtgtactacttatctgtaaaatggaaataatatttatcccctaggcttatttctagtactaagtgaaatayataaaaataattacccctttttgagctctttctaaatgctgggctaattgttgaaggtaaagtaattaataattaccatagtgattattattgtaaamtagacaccattgcccatraacaagccaaatatatatatatgaagtgatttagcaagatatttttacacattttaaaggagtatttttcaacttagcatttatggctgccctggtacaaaatgggcatacatctaccagagtgacacacacaaaaatcaaatttmggttgctggtaacacagcttccaatgtcactgaatggtttcagttctgcagaagaattaacagattgggtttctttcatggggcagaggaggtgacataaggccttggttaaatagaacgaaagaatagctcctga

SEQ ID NO: 20000 - DNA, 600 bp, Bovine  MMBT02288
acaatggtaaacttagttaggtatgaatatggacatattagatattttttccttgaaaggagtcccagtttgggtgaatattggtaacaattggttatggaaaaatactgaattcgcttttataagcatacaatattaaaatactaaccagatatagaaaaaaaactactaaaagaatagcatgcttgtaactcagataacactttaattaaaatagaataaaatcggactgtcaacaattttatattttgtagttttttttctacagaaattgggagaaattctaaaatggctttcccytatttttcccatgaaactatgcttctttagtaggcttcttagactaaaaatcaagattatggtaagaagcatcctattatagaaattttgtatattttattttctatcctgacatggtccaatgttagtgtgaggtatcccttacataatttcaatagaaattaaactgtgaataatcataagtataaaaagttaaatggtcaaatcttaaacttaatttaaaactgaagtaagatacatattaattcacctttcagtaagacatcatctggttaaaaagaaaagtgggaaaatgaacca

SEQ ID NO: 20001 - DNA, 600 bp, Bovine  MMBT03354
acagctggattctgaataatttaacttgtgtatacagtgttggtttcagtagcttccttaccatgggagaaatattgatatctgcagcactggctgtttccttgacatgagagtaagaagaaagaaggagtaagagaacaatgaatacgggtacagggtggacaaagaggcaggggattgcttggaaatactaggatttaggggtcaaaatgatctctgggaaatagtacctgaaaagaattctaacttagatttcatcacaatttacatatccaattcaaggaatatttgacagtatcytatttccaataataagaaaaaatagatttcctaaaatgttaatttggttgggctacattctcattcccttgccctcatctcagtgttcaccctcagtaagaaaccttgctcgggctgagaaggaatggaatatgagagagagagattgacaaagattgaacatgtctgaagcaactgcacgaagccagtagttccaagaggactattcactgcttattagataacatctctgtgagttaaactataatcttcttctgaaagacagtgatagggttgtgcccactccttcctccaattctc

SEQ ID NO: 20002 - DNA, 600 bp, Bovine  MMBT16381
agaactatatatattgtatgattctatttagagcatgttgaaaaaggtaaaacagaaatcaggtcagtggtaccaggggatgagggagggaaaggggactgactgcaaagcgacatgggtaaacttttggggttggtgaaaatattttatatctttattatggtgttggttatacatttatcaaatgtatgaaatcgaaaaaggataaattttattttactaaaagaatagcaagaagcctgattcagggtttccctggtggctcagtggtgaggaatctgcctcccaatgaaggagacrtgggttcagtccctggtccaggaagatcccacatgctgagaagcaactaagcctgtgtgccacaatcattgagcctttgctctagagcccgggaaccacaactactgagcagcaactgcagagtagctgccaccagccacaactagagaaaagcctgcacagcaaggaagacctagcacagccaaaaataagtaaaattattttttaaaaacaaacctgatttaaaaaaaagggcaaacaaagacaaaagaaaagtgataaactggggaaaacattcataatgaatattacaacaaaggg

SEQ ID NO: 20003 - DNA, 552 bp, Bovine  MMBT03466
tggaaaattcactttttgaaaaactccagattaatcaagagaatttcagaacaatgctcctctaacaaatgagatgggatttgttgttgttgatgttactattgttttatttccattccaccatgggctgatattttagtaaaatgttatataaatgaattatttwaaaaataaaataaaaagcaaagctcaaacatgcaaaccctatttagttatagtactagattaaacagatattaaattattttgccaaccaaaatttccagctcttcactctcaatctctgcatctatctctttstgtattggtgacaaataatacacatggttggaaaaatatgatggctaggatttaagaatagatgacctcagtccaatcagctgaatatcattgtttcaaggaaacatagtttgacgcccactattaaagtacaacactaaatgtatcatgcgtacataaacaattccaaaaataattccccttaaaatactcttagttttataatggtctttggtattgtattggttttatggctttgtttttaagttgttt

SEQ ID NO: 20004 - DNA, 600 bp, Bovine  MMBT04277
ctaaacctactggttgtagattattctactcctgatggtttgagaacaccacaatttcttcccaaccaaatgattactcacccaaataatttgcttgtaaaaattaagtttttacacataatttcttaaaatgttctatacaaggtttgttttctttttttctgctttctttgctgatgaactgcttattaatctagaatattcatcctagtttcttcatgatttaactttcttgtccatgcaatagataaacagctaaatgtaaatctcaacaaaaataatgtactttctcctttttawgctaatgagtggtaaattctggcagataaaagatgaaaatggagagaaaaacttgaagttggacttaytgaacgtttagcaaattgttgacctgatagagattagaaattgaggtagggatatagaaattaaaagaaagagaatttactgctgagaatagggaaaagggtgggaagtggctataaaatagtgagaactgctttccataaaccatgtaaaaaccccacctcattaccgtatagacatggggtacacacacaataaaatctttgtaatctgacatttgagaggaaattaggt

SEQ ID NO: 20005 - DNA, 600 bp, Bovine  MMBT11271
gaaggtttttaaccttcagaaagttcagaggttcagtctgaataagcacaaaaacttttcagtgtgcttctgaattccttgaatttgcagaactgctcagaatcccaagagaactaccttgcacgtaggattcaggccccgctttgtagctaaaaggcagagctgcagttatgagaaaggagcaraattaaggaaagagggaagaggaatcagagaggggraaaaaaaagagtttggtccccatccaggctaagtttcagcctattcagtttcttcaattcaaagccatctgcttcccaygactctcagataacgtctcccctgccaggacaccctgttcctgcttaattgaaattagtttccaagaatagttgtccaatgcagtttccagtggagggactgttttgaaagtcacaataggagtcgaagctttgggatgcagatgtccacacatgagccagatgtttgaaaggcatcacacggtctatagcagccttcacatttccaaagccaggagttctctcagtggcctctgccactcgcaaatggctcctttgaaactgccaccatctctccatcagggacctgtaatcccacaag

SEQ ID NO: 20006 - DNA, 600 bp, Bovine  MMBT08380
ctcratctcttgtcctaatgattgttcctttcaacttagaagtcagagcctataggtaaggctctaagggctttcttttcacctctgttttaaccatcaagtcttcatcctttgtttatttgcatcaccctgcccataggtttaagacttgtaaagccaaacataagcaaaggaaagaatgaatgtgcccattcttaaacaagcttaaacaaagtatcttcagctaattatcactgctggacatacattaatgggtaaatagcataaattcaactcacatcttgggagatgcttctagaytcctcaaatmcccacatccgtgattgccatcrtgctgtgtgtgtgtactcagctgtgtctgactctttgtgaccccatggactgtagcccgccaggattctctgtcagtgggatttttcaggcaagaatacaggagtggtttgccatgcccttctccagtggatctttcagatccaaggatagarcccaagtctcgtgcactggcaggcatattctttaccactcagccaccagggaagccaccatttgtaagaggaggaatacctaaatgcccttcccagacactcttaagagaggagg

SEQ ID NO: 20007 - DNA, 600 bp, Bovine  MMBT22342
caacacagccttgaaagaggtgragggtgcctctgtataraactcctggtacagaatcaacactcaatattattaggatgctatgtggtaactcattcttagagttagtagagaacatcaccatggttgtctktctttcctgctgtttatttactggaaacatcttggaattcagagaggaatctcttcaagttgcaaaattacaggttaacagaatttgaagtaattttggcttaaaaaactcaagtgtgggcagagaccaactgatgaggctctctgctgactctcagaacaaatgcrtataatctcagctttcatatacaagcctgaaactcaccagatccacctgtctcctgagttacagaggcacggttgtacctccagccagagtcatgctcaggtaccacagagcattattgcttgatggctgtatacacataggcccttagaatagcacatgtcctacagtaagtgctgagtaagcattagctagtattgttaccataagcattaccctactctcatcacacccactagttatgtctgctagatcagctttcttaatatacaaagctagaaagattctcctgtccagaatga

SEQ ID NO: 20008 - DNA, 424 bp, Bovine  MMBT20495
taaactgcacttaacagaaaacatgaaaatatgtggtgctgttcttttagaaatgctttttaatttttccctcaattaaaaaaaaaggcaatgagcatttaggatctatttcacctgtgacattttgattgtattccaatgataatacattaaaaataaatcaaataccttttaatgagttttccacatgtattaaggaagcaaaattaaatttatggtttatggttggctaaatgctgaatgttggggcaaatactgaatgcagtgtgttctccatacagaggcttcccacctatggcrtccttgtgcctgtcggacgtggtccagtggcttttcaccaactgcgggaggccccagacggaatgtcgacacaagtccatagaactcttctataagcttgttcctttgctgccaggtatggcga

SEQ ID NO: 20009 - DNA, 600 bp, Bovine  MMBT06404
acttccttaaacttcaatatatgaaaatttcctccatcaggattaccatttattttgaagaaacagaaaccctcacaagctagcttatggagaaatttttttataaagaatcatgtatcacagaaacatgcaagaagaagacaagcttatgcagacagtggtgagaaacgtagtgtttacaaagaagctctaagtgcaagatcaacgctgccattccctgggatgtagagttttcctccaaagcgtttaccacatgaactgctccacagaaatggcagctagaacttagcttctgagtcraggtattgtcctagctcccgtcttccttctttctttctttactggccagaagtgtgggtgctcagtgtgccataccgaggacatttaggggacatcatctggatgcgtctcattgcccagaaatactcaactacattttgagtatttttgagtattagaagatagtactgtcatctgttttactacttcatgactctcaaggctgttgtcccattaattaatttgatcacttcagctagttagaacccaccatttttggtgatgttgctgagtttgacaactggagaaatacacaattca

SEQ ID NO: 20010 - DNA, 600 bp, Bovine  MMBT13483
cacattaaaattgagaccataggcttgcctttaagagcataaacatgtaagacacaccaaggaaagatgtatttacagtgaatatagctggtatacctgaaatacatgaataattaccatatatttttwaaacaagtcaggcaatctagtgaaaaaatgtgggcaaacgcttgaataactattggttatataaatgtcctgaaaatattgcaaagttgctcaatctcactagaaattggcaaaatggctggtaaagttccaaagcagcattagatttgcctttttcagtgaaacatctcycaatttctcatggaaaaatctgtatatacagtagaaattcttcacacattttgattttcagtgatttttttttgtccgtattggaaaaagacactaattaaaatgatcacaatgtcaaataaggtatcctgtggaaaattctctattataatgaactttagataaacagttccagaaattttgtcatcattactctgaagtttactctgtaaatagctaaagaaggaggtaagaaaaggattcaaacacagaaaacaaatattttgatcccagaggattttwaaaagcatttagaggcag

SEQ ID NO: 20011 - DNA, 600 bp, Bovine  MMBT02214
aaaaaaatgcctttatttttatggttttctaagtctattttaccaaatgtacacttactggattaaagatattaataatatttgtcaaaataataatttatacctaagccgtgagctggggctttaaacacattgcttttaccaggcttcccacaaattaagacaggatttatgaatttagacttaatataaatttgaattacttcaaaaaaaaatacatccctattatttttcactgttggttttaatacagagccagttcctggtcacaagatagtacaataaatattttaaaattcrgacatctcacactgaagtgaatgtggtcttcagatctgattttaaacttgtcactgatgaacatcttaatgtgctagtaaaattacatactatgatcataattttatttggcattcctaaagctacatctgtcttaattcttcttcccctttaattttactgatcttcaattagtaaaaaccaagtaaaacaattttgagaaatagggtcagatttttttcacctcttatcttacagcttttaatacagttttcagtttcagtgtctcagtggtttttactctaattgtttaattttatt

SEQ ID NO: 20012 - DNA, 600 bp, Bovine  MMBT07101
ggtcctgactttgtctggcagccatgctttacaaacccacggtccacttaaggataaacggtggggaatgtccatctatggccacacttaccatagaagcccagttagtcaagacacggcttctccctcaaatattgcagaaactcgtcagatgacatgtttggggggaaacaaggctgtgaccctcactccagagacattcctcccctgggcccctaattccaccaataaaaactgctgtgcaggcatgttctagacgattctcctccagttagcaattgtttgcaagaaatgagcccwaagttctgttgactgaagaaattcctggggttgcaacttttcagcgaacacagttttagaaatggaggctttaagtgattcggagccagcctgccctctgcttacatatcggctttcaggagccgctctgaggagggttcgcgttgaagtaggccttttccttgtaacccgagagctcggctaatgaccctcgagtgtttctctgagagagaacagcaacctagaggagcctttaaaggatagcttgcacattaaaaattgatgcaacacttcaaagtttaatatctaaacaaaatgctt

SEQ ID NO: 20013 - DNA, 598 bp, Bovine  MMBT19934
  misc_feature (1)..(51): n is a, c, g, or t
nnnnnnnnnnnnnnnnnnnnnnnnnnnnnnnnnnnnnnnnnnnnnnnnnnntctgttttgttcctgaagtctagcctctaccctggacttgacttaagttctaattcattctggcttctgccctgatctgtgttctgctggacttcactgattccagtagcaacctcttgcaagcaccaagcttagtctggaactgataaccaattgtacccaatgctactttcactgtggttttaataagggatagcctgttccctggrtggtttccaacaacagtggacacacttgtgcatgtgcgcrcrcacacacacacacacacacacacacacatcatattagactgtgcagccataaggtttgtatttttagatggatatttgcataagcacgtttgaacttatgttcaaaatgtcagatcttgctttatgatgatctaaccaaaaaaaaaaaaaatcagatctacagatttctctaatttagacacatgcaagtatatacagaagcttrtagcaatcagtacaaaagaatacatcatcagaaaagacttgaagaaatagagaacgaactcaggagatgctgtctaatgcctagtctggcc

SEQ ID NO: 20014 - DNA, 600 bp, Bovine  MMBT09545
gaaaaaggacagagaggagcagattcacgggaatacaaactcacaaagcacccaacatggaagtcttacatgatagatgtgctttttaagtcaaagggccatggccccatctaatctattcaactaattgctgatctatttttgcttcctctggcattgtgaaatataagctagtagtctttcctgcctcatctccactcaccccttccatatgtctactctctgatcaaaacaggtgacattttcccaaaggcccctctgatttacccttctgtttcctcactccagtatctctgtttrgattcccggttatatgcttgttggttaagtacaacccagaacttactgcttagatgccatttcttttgtrgctaccctcgactatctgtcaatcagtcttctcaaaagaactgcctgtacacgctgtctccgtttgcttatgtccttgtcacttcaatccacttggatatggctttgccatactgtaccactaaatgtgtccttacaaagtcagtaaagtgtccatgctgcccaatgaatggctttctctgtcctcatcatactagacttttcagtagttttcaaaagagtgaaccatag

SEQ ID NO: 20015 - DNA, 402 bp, Bovine  MMBT03515
tttaatctttctgattctcagattttccaccttaaaatggagataatttttctatcatatattaggaattattattaatataaaactaaaaagacatataaaaacattttgaatataactattgtttatacattatgtttcaagatttggagtaggtaaaattttcatttgcttctctttatgaaaatgtctcaggagtctagataaagaagaaaaacaaagaacaagaggctcatcactcccataagaagtcaccccttcatcagaagagggggaaatacctcctgaaacacaacgtgmtgaaagactctttctaaagctctgtttagaataccatctggtcccaacatgcttcataaaacacagagaggatgatggggtttggcacatctataactctct

SEQ ID NO: 20016 - DNA, 600 bp, Bovine  MMBT22805; identical to SEQ ID NO: 4693

SEQ ID NO: 20017 - DNA, 602 bp, Bovine  MMBT08175
  misc_feature (1)..(2): n is a, c, g, or t
nnctcactgcagcctcttggagacagctgttccaaggtgatttcaaggtcactcgaagtggctgctctgtcactttagccaaagactcctgcagcaggagtggccccaaccacacggcctgctgcagggacgcgggcgtgtggcccagttctaaggcccctcatagctaaggatcccactgtaacctctcgctggggccttgatcagagctcccaggaggtggtgatcaggagggacacactgcctctccacctccactacattacctctccttcctctctcccaggggccttcgccgtggygccggcctgtgtcccatgcmaaccccayatcagactaaggttggagatgccaacaagcagggtcctcaggatgtttaacaggaactggccctctggtctgattctctcccagtggcttttcagatggtcaaggtcacagtgaactgccacccacaggaaagctcacagacgaaacatcacaccaacagcactgacagctcgcagaccaggcaggcaaggcgcatggcagacacaggtgggtgacatgcatcggggccgggctccgagacgccgggggttgggggaggcagtggggacgtt

SEQ ID NO: 20018 - DNA, 600 bp, Bovine  MMBT16344
gtgggaggaagggtgccagccatgtgaagattatagaagagtgttctaggaagaaagaaggattagtatgaacactccaagaaggaatttgtttgtaaagtcaaggaaacaaactaaaatcagtgtgaatatcccctagtgcatgatgaagagatagacatgagacaggttcagaaaggtgaagcaaggaaagattacaaagsactgtgtaagtcaaggtaaggagtctgggttttagtcaatgcactcctggaagacattggaaaatttaaacatgggagtcagatgatcaaatttttstttaaccaacaaaaattctggctcctgccaggaattgaatggtgggagaaccagttctggaaggacagaggccagcaaggaaagtagggcgatgtatggctggccgtccatcacacccatcacccctctttccttggcacacaactggatagcccttctcagtctcctttaaagtgagatgtgactgatttctgtttggtgtaagacaagtggaagttatgagcaccacttctatctctcaaccctaatgctttctatatgcgacaatctatgcttttttcccactccgttggcttgata

SEQ ID NO: 20019 - DNA, 590 bp, Bovine  MMBT09548
attgaaacttggtagttgttcatataaacaygaccattccaggtacattcrgacaagaatattcagagagagcttgctagactaaggacctcarggagtatatgggaaagtttgggaatatgagataaataaggtagatttgggtgccaatttttccactgtaggaactaacgctctatttggaatgacttcttccatctgaaatatttaatagctgttcaacaagttggaactgacagtagacaaaatgttttactgccatgtgtcaggtagcttgatgcacttcatgcctggataaaygcaaaatggaattttagctgaaggagatggtatggcaaatggttctttacagagaagggagtaagggatatgtctcccatggagaaactcatggtgacaatgtgtctgattcatattttaattgccagaataaaatcaaatatccataagttcaggcatgctaatgaacaagaaggagaattagatttttctctgcctattaaattttctaatgttgagagaagcaaacagagcactgtggatccaaatattaccctggaggtgttataagcaccaaaacttgaagatta

SEQ ID NO: 20020 - DNA, 600 bp, Bovine  MMBT12182
agaagattggagaaccctgtgagccacagggactttggagggccttgccatggtcttcactctcaggcattcatatttctctccctttctattcgcctgattttgggatttgtttttactttgcttctctctgccagcctccttcctttactatttcttttatcctttgaacaggaacactttggaaaagacaagtcagcagaattccagctcttctactctcctcatgggaaagacctgytatttacagatgctgccattgggtttttaagagtcccacctaagatggatgccaagctrtacttgggatatgaatatttttcggtcattcagcatctggggagaggtgtgtagctcctgggaagacctgsagagcttgggcatagggcagggcggggccgtggaggctttcctgggacctgcaagccccacctcacccaacccacactggcctgcagggtccaagggagggccaactgtgctggattcttgtggggatgttctgctgaacttggggaaaggcctgaacctcgggttcacaaaagggtttgaaagaccttcagattacaggctacttaagtaataacgggggcttccctc

SEQ ID NO: 20021 - DNA, 600 bp, Bovine  MMBT01463
cttgcctggaaaatcccatggatggaggagcctggtgggctgcagtccatggcgtggctaagagtcggaacgactgagagacttcactttcacttttcactttcatgcattggagaaggaaatggcaacccactccagtgttcttgcctggagaatcccagaggcaggagagcctggtgggctgctgtctatggggtcgcacagagtcggacacaactgaagcgacttagcagcagcagcagctgcccaccagaaaaggcctcctctccccactgctgttctaatccctctcaccagccmcctcagagaagctcccctgatgatctagtccacactgaccctgcaggcccagaatcccagatcttggtgtccctgctaagtgagcattcacagctttgccatcactctcatcatctcatatggatccacagtaccaacctcctgtttctgcccaccagaggggagacttcccaagagctctctcttcctctttacccttcctcaggccacacacatccccccacccgagtccctggagactccaagaggatactcctacccatggtggtctctcagagcaacaggaaagggtcaccttga

SEQ ID NO: 20022 - DNA, 600 bp, Bovine  MMBT09393
agataccaagctccagccgaggagctgccataacgctgggcccttctctctgagccatgtaggtcctgaggtccccatcatgactgtgggctgaagcctccccactggccaccttgtctcggagggacagtacccagatctccgccttctggtccgaggtggccagggtgcycagactcctgcttaagtgtttccaggcctttctgctaacacatgaatctgcaggcccccaagacccagccctgccgtgaggacaggtccactctgcccagaggcccagggtctgcacagcctgcccascctggatcccctggcctctccgggccctggggctgtctgccggcctgcctggcctcagtccctgccagccagttcagcaaaggacaggccaatcgtcagggccaaggactccctggcctggccaagtggggccggttttcaggactcggggattttgaaccagctgctgtggcaggtgtggccggcccagctgagcagaggcaccggccgcccggagagttgccagccagctgctggagggtgcggggcagccaggctggcccctcgcccgggcagcaaagccaacagagggcggacggg

SEQ ID NO: 20023 - DNA, 600 bp, Bovine  MMBT17971
cttgtaacctctatttttacctagatcatcagcttatgtttacacgttactgaatgatccctaaccatttccaggatcttggcagtgacctcacacatctaagtatgcttaaaccactgattctgtttgattcttcccagttttcctcccagatgttagccttgtgaccatatggtcttcattctgagagaatgcaccactcactggctttttggctaatcacatttttcagaaagagaaaaggtcttcgttggaccacagagaaatgcatgaaggaactaagaatcagaagggaaggasggagatgtaaaatgttggttgcttggggaaaaggtctgttcaaagttttggactttttatttcctcctgcatgttgaacagagaaaaatacattgttattacttctggaaatccagattttcccgaacagtagtcagtaggcattttcagctccgtggaaactttcttctttayttaggcacaattaactttattcacagtatctatgacaacctatgctcactgttttgagatagactgaaaagtagcagcccacatctgtttgtccattttctcccctagtaatacatataggcccac

SEQ ID NO: 20024 - DNA, 600 bp, Bovine  MMBT04110
gatggaaaaaaaaagaaatataataaaaaataatttggaaattagtagagaaaaatttttaagaaaggactatttctcaattatgtataaggcataacaactggctatgtttgggaagtaattttatcatacagaagtagccaaaagggtaacagattaagaaggataaaggtattaattgtacattagaatatgtccgaattccaaaataaatttagaatatatacatagtgatcactaacttgctctctgacacttttgcacaaattttaattacacctcaagagcatcttacattcktcaagagaaatccatgaacaagatggtggttaacagaagcagattyctcctgaaattctgcatctgagcttcagccgagggaaaggctgttctattaataacatctttagtgaaatctatcacatttctctgaagaactgcaaaggcttcattatatctgacttctccattaacttccacagtggtgcattcycccactttaatgtttgagccatactccccttagcaaccgagratttattatgttgttgtcattgacacagttcagctttagaaaaagcagcactgaaccaacaaaag

SEQ ID NO: 20025 - DNA, 375 bp, Bovine  MMBT05912
agagttcagagatgttgggttcaatgtaagaaagaactatatgcaatgaaagtactaagagatattgtagaaattaacaaaaggagggattatgtgcttgagaagatttggaagctgtcttcccaggtggtgagaaggtggtcagccatcttcacagcccagtttggaccactttctgcctctcacatggcttgttcttaatgaattattgcagggtatttattactaggaacacaagcagtattttgacttggagccataatgcaaacccaaatttggcacaacatcactttaaactcrggaaattacgactttaattaaagattcagcataaagccaacaagataataaatctgaaattgattcttcggtatg

SEQ ID NO: 20026 - DNA, 600 bp, Bovine  MMBT16799
gtttaagaactctgaacttcgacttagtatgttttgagttctagccaaagagatctctctctgattcctggactccttctatgacagctggctgtagtgtcacacatttattgaccactttaactcttggattgaaaggaccaaaagatgtgacccacactggtactctgccaattgctagcactggtatatatggatccgggggctgcaataaggaatgatcagtcagagaaaatagcactgtctctagttcctgtccctgtcccttggccacacaataactattttgtcttagctggkaatcccagcctctgcctaaatcacggtctacttactggctgatgatggaggctttccaaatcttccatctgactttggaaatgtcattgtgctactcattctgtttaattgctccctcctgtggaaacactgtgatgtccctgctgctccttcgagtggagaataacaggtctttaggtttttcttggctctttcttgctgaggaaggagatgataaatgctcggtgctgagggggctgctttctgaaccaccctgaggcgacaattgcttattcagacttaagaaaaggaggcaggcat

SEQ ID NO: 20027 - DNA, 598 bp, Bovine  MMBT16749
  misc_feature (1)..(105): n is a, c, g, or t
nnnnnnnnnnnnnnnnnnnnnnnnnnnnnnnnnnnnnnnnnnnnnnnnnnnnnnnnnnnnnnnnnnnnnnnnnnnnnnnnnnnnnnnnnnnnnnnnnnnnnnnnnagaattgtattgaatcccaaatcatgaaaagttagtgacctgatttttccaggaagcaagcattatatttttattttttttctaattaagaaaaaatagaatgcaagacatttttctaagttgactgtaaccaactatggtggaggaacatttctaccattggttaaatggcaaagtgtatgggaaattgtgtayatcatccttatcaaaattcataagtaatcaataaaaacttagtacttattattatgtggcttttaataagtctcatagatgtaatatgtcacattttaaagcttcttctgctttaacttgtgttttatgtttagttctctgaggatctaaccctgggcacaacggggccttttctgaataacctgtggagtaatacatgctttccacaatgagaaaatcagggcaattctgttttttcaacagtccccccagcaccctgacatcacaggaataaactccactcttagagatggaaggc

SEQ ID NO: 20028 - DNA, 600 bp, Bovine  MMBT16711
gagattagatattaatttgtgactctttgtcacaatattccattaagtgttcttgattgttcttgcacaataaacaatgtctttcttccaatttttttgaaagttttatttatgttagttcaaaatgtctttaggagttgccaaaatcttcagtagccatgagacatttaacacaatattacatattccacctatttgttctaaataactcaaatgaagcagcagttttccagtagcttcccgcatcacttggctttttttgaaccagggtttatagtaacaaaatgtaaattggataayagttattaatggtacaaaagcaacattggggtgagcttcctggtaatattatgtcagtaacatgaaaagatgctgtgttgttttggtttggaacttttctgggttttcaatcaggctcagcagatttgagtaagtaggcagccattatggttttatttggttgttgtttttttcctcttttttgatcatcaaggcacatacaaacattaggctcaagcctaaagccctaaaacaagccattcttttgctggtgaaattctaatctcattttattacattgtcaatgagctgcagagattc

SEQ ID NO: 20029 - DNA, 598 bp, Bovine  MMBT10089
  misc_feature (1)..(16): n is a, c, g, or t
nnnnnnnnnnnnnnnntaattgcaccaggtgagataacagttggaatgcgatttcacccagcacaatgccgcatatcaaaggctttcaccttcggaggacatgaggatgaattgactaagagtcattatgtttccaagatatacacaacactgctgaagagtttatatgatgcataaaaccattaagacgaaggtttatgttaatcatagtgggagacatttctaggtcaggcccacatttccattgtcgtcttaccatgttctagatgaagctgtaagaaataatatacacattgagasaaaagggagatgcacagtttttagtcaatttctttttttttttcctccctccaagtttagttccttatcagcttgcgaaaagctgctggaaagaagcagggattttgctgccaggtccgaactgcaggggtgggactggcagtaggaaaaccaaaaagatcgagcaaataagagatagtatagatcgtctcctgttgtgtctgttttcaaattgctgtgtttaaatgaacttcttttttagcaaactgtctttagtctctttcttcctggcctccagtgacctttaactgatttttta

SEQ ID NO: 20030 - DNA, 600 bp, Bovine  MMBT12365
tacccttcttcagggatttgaggggtgcttttgtggttggycaaagacagacgacagttgtgagtgtccgttgtgagagccttggtttcagtcatattggttctgtgccctaaggaaatgctttggactttggacaatataaatattgtccatctctcttcgcacaactcttcttcaataaagtttttttaatgattgggaccaaatactgaattactgttacatttttaaacaatcgaatacttttctccttcttatattcaaaattcacattagcatattttagtgttcttaataatmctaccataaagaaacccatatcatttaattgaagacacttttttcacaggacacattaggattttgatgaacactaatatttcactattaaactaayrtttcatagaaaaattagtttgtttagtgattgtctcctagttatgcctatcgtttttaaaaattagaaatatacataaagggtaaataattgttctgagttaaattgttctgattttaaatgaataaattttcttatttacagtcattgaaaggagatagttcatgtttttcagatttactgttttaatataaagtatttgg

SEQ ID NO: 20031 - DNA, 600 bp, Bovine  MMBT04479
ggcaaccacaggccaggcactgcgctgggaggtgcagtgcagtgtcctkggtggtggagaggagacctgtcctgaaaagtgtctacacggaaacgatgtgtttaccgtcggagcaagtgctgtgagggacgattgccaggtctggagggaacacctgtggtgtggtcttgagggtgggggaggacctccctgagaagggggcctgaaaactgatcaggaactgtcctcatggagaatcagggacagctgttccgggctgaggggagagcacatagtgctttcttcatttgttgtcatggwagacagggattctcaccctgcaaggcagtttagaggctgaaaggaggtaagacatgaaagtgaaagttgctcagtcrtgtccgactctttgcgaccccatggactatacagtccatgaaattctccagaccagaacactggagtgggtagcctttcccttctccaggggatcttcccaacccagggatcaaacccaggtctcctgcattgcaggcggattctttaccggctgagccacaagggaagccccaagacatgtaaagtaagagctaaataattggtttgaattatgctaatggg

SEQ ID NO: 20032 - DNA, 600 bp, Bovine  MMBT01369
tcccttaggcagggcttgagtctcctggtttgccaccattcaccatcccctcactttattttttttaattgaagtgttaattagtgctgaaaagcaaagtgattcagttatatatatttttttcttttgatattccattacggtttatcataggatattaaatatagytctctgtgctatacrgtagtascatgcccaccttcctgttgagccccaccctgcctcctccactcattwatgtgcaccatcacaacctcaagcacttgtggtccaggtaccacagcactggcattatctggsaggtggttagaaatgcagaatctcaggcttcaccaaaaatctaacraatcagaatctacattttaacaagatctccgggagattcgtatgcagattaaagtttgagaagtcttgctggaggggatctccaaaggtcctcccccctccacacacacaagattctgaatgttgaccatgggccaaaccctggacttttcactttgttaataggtacagctctccgttttaggtgggaaatccaaataaaatcctatattaaagtaactgcccttataaggatggatatacaaatgaataaca

SEQ ID NO: 20033 - DNA, 600 bp, Bovine  MMBT18390
ttatcttacattcacaaaggataacagtctttaggctttgtcttatgacaaaagaaaatttttgaaagagatgccatcagtcacaaaattctatagaaatataccttttaggagtcaatacactacatcgtaatgcaaatctggaaaatccacaatcacttgagtccttgcctaaacaggtggtcaaatcctacagctctagattcaactctcagtatctgttaagcatctggaaccctaactttggacactggcgagctcccgtgacagttacaggggtttcatgtcactcaattcctkgactcacaaaacccacggcgagtgcgggcgtaggtgcaaattatcttctctttgcaatttaagatcaccgaggtgaagttgtacgatcaagcaacttttcatcatattaacaaatagtcacgctgacactgaaaaaagtccactctggctgaccgtgtcgatttccgcggaaacataagacaatgaacagaagttcagaattttagctatttactagcccccatccctccagcaccgttaaccgaaatttcacagtcgaatctgtgaaaatcgctttcttgaccttcgggtgtcaacccc

SEQ ID NO: 20034 - DNA, 600 bp, Bovine  MMBT04704
gggacaaagaaccattcccaaagccagaagatgtgggtttcaggggctgatcaacagcttgggtataggaaccatttctgtagaagtacacaccacagcccagggttgggcaggctgatagacccaagtaagataggctagggccagagaagctccttggatcctaacattcaaacatctccagactgcaagccagggaggcactgggagccttccaaggaggccctagagactggtcagtagctgtcatgggtagggraaaagaccatgccataccagctatcagggacaccccctcaycattagcacttggagctatgccagtgagagatggacaactatgctatatggacccaaagcccatcatcccctctgaaaaggtaccacaatcactgtacattccagaactgactcagccagaccctcacacctagagttggcccaggcagaggagacagctgctcctttccccatagcccatcccgaagaggcagctggggttctcctaggcctccacatgcggctatggggcactccatacctgagatgaggaggaggctggagacttggatcctggctctaacactaaaatcccatttg

SEQ ID NO: 20035 - DNA, 600 bp, Bovine  MMBT10252
cagcagggctcggggcacctgggctctcctcactttttgggtctgacccagtagtttggcccctctgagcctcaggaggtaccaaggtccccaatctcgcctgcttcttagggaaactgacggcagagggaaagaccctaggcggttagccggcttcagctctccctgcaatacaggcccaaagccacagggcaatcgggacatgggcctggtagccccgcccagtggccattcatggaacaattatcctaacatgagcaaatacttatacaatgaggaccggggcccccgagcctgtgytcatcccaggtatgaacacgctacccgtctcagtagcctgatgaggcagatccattttacaaacgacaaacctgaggaactgagaggtgaagagacctgcccaagttgcacagccggaaaagggcacggccaagagggaagccaggcgtgggcagggctgccccaccctcacgtactcactcttcagcaggacacacatccagccctgtttcaagacgaggagaagccagggctcggacgcactggcttcatgcccaggtcacagcaggcgcgcaccagcccgggcctgtctggccctgg

SEQ ID NO: 20036 - DNA, 600 bp, Bovine  MMBT19670
gaatcccatggacagaggagcctggcaggctacagtccatgggtttccaaagagttggaygtgactgaaacaacttagcatacataaaacatgtaactaaaaacctgctgtatatcacagggaactggactcaatactgtgttctgtatgacaaaagaacaagtggatatatgtataactcattcactctgctatacacctgaaactaattcaacactgtaaatcaactatactgcaataaaaatataagaaagtattaaaggaaggccagtaccatataaacagcatacacttaaatamaaagatgaatatttaacatamagggtaatgttttttttttttccccactaataagctaaaggtccatttcaagatgtttctttctttagtatggttaatttgttttattagcaagcaaagccctataaaggatggcatcatctagtccttagactcagattcatcttcatcttgtctaatctggaagtaacgaagctcataagtctccttgtcagatgcaaccacaggaagccaatcatgaagactgttctttttaaggtatttcttggtaaagtacttcaaataccttttagagaactg

SEQ ID NO: 20037 - DNA, 600 bp, Bovine  MMBT07139
aagctaaaaagtatcaaacatctaccttccccagcccttctgccagccccttcaagtatgttgttatcaacattatgggttttttagcacaaaaaacccattatagtaaaagagtatgcatgggatatacatatactaaaaaaatgattttgtttagttgaaatttaaattgagttgagtgtcatgtttctttgttcagcctggcaaattgacagctatgcaaaataagaattctatccttactggttttgttaagtgcttcctagcagagcaagacaagctatgatggttagcctccaytcccccactccgcccacccctcagacaagactcagtccattcgtgaggaactggaaacattccagctctgaacttcccacctgccaggcaccaggcgggcacccctatgctctaggacctttcacctctccaagggcatctgactcactccgcctcatggggggataaagaagctttgtcaaggccaggcctcatttgccacttcagagcaccatgtctgttgacattgcaaaatagcagaagaattcaacaagaggtcttttcagaatgttcattgtgaatgcacaaaggacagtccca

SEQ ID NO: 20038 - DNA, 600 bp, Bovine  MMBT08405
ttttttactttgtttctttgtaaatattgttccctttatctggaataacctttccatcttctccctctgaccagtgcctgtctatcctctaagattcaactcaggtaatttatcatctgctcagtttctctccaactggcttccatctctgtgcatttgaacatggaggacacttctctaatagctctttagtgtttggtcattgcccgattgtgtcttttccccctggactttgtgacacttaagaacagaactttgggtttattttttaattatccttatataaagatacatgttttycaataaatgttcagtaaacatttcttaattttaataaacacttaacatttaagaaaatgaatttctttgtattttgagacatgcaatgcatgcttgttatagctgtgagtagtttctctctgtaaatcaaaatgtgactctcaagcctgaaacactggagataaggtagagtgaggggttagaatggcagagaatagaaacactgttggtcaccaagactgcaaggctctcagtgactgactgaatcaggactccagtccaaggctgctgctgctgctgctaagtcgcttcagtcatgtc

SEQ ID NO: 20039 - DNA, 600 bp, Bovine  MMBT19910
tgtggggcaaccaagctcaggcgccacgaccagagagaagcctacacactgcaacgaaactccttagtgctgcacccragagctgacacagccggataaaacagcagatacataaacagagcgaacggcaagaaacacggcccccgagcgtgcgtttatgatactgttgctgtatgccctgcaccgtgctaggcactttgatgcgtgctatgtttctccctaatgcctacaagggcatatagcattcaacaatcaaaacatgactgttacaggatatctaccccagcccagtgaaacacracacctccgaatctccctctaggccatcctattgttgtcttctggcaggggattaataggtacagtcaactggccttctggtggcagttataccttacattttctttgctccaagcaaagaataccatctgtgaaaccccccagctcactgcagagccctgacatgtccttctaacaaatagccacaaaggcccaccgagggctgcgacccttgaacactgataggtacacagagccacacagagagagacagacacggagacagaggtgtgcagggctggacaaagaggaagcagagaa

SEQ ID NO: 20040 - DNA, 600 bp, Bovine  MMBT05336
cagtagatgagaaagcaatgttttcccccaaaaatagaagtgttctattggagagacattttgaaaatggacgttgagaaacatttccatgattaatgatttgtagctgaaagtgctggagtttgatttataaaaattcatatctgcacacttcaaaaacttggaaatggatctgtctagtcttttaaacattttccaaatgaagaatttcgacaggctttgaacctatttgttaaaaatattaaaatatggcacctttcagttagtttacaagaacaagtggctgacatcatgaaaaayggaaatttacttgctgaatttcaacaaaaacctttgcataatacatggatgagattgaaaaatgagagtcataatttagtaagcaccgtcatcratgaacttcttccagttggctctacacatctcaaggtaccttttcagctactgagcccaagaataagtgaattaaaaccagacatttgaattactgtaacacaaagtattaaatcaagattttgaaaacagtaaaatatatcgcctcacactgctctgattgaaaatatgactagtcatgatattttaatgagaacaaaaaggcct

SEQ ID NO: 20041 - DNA, 600 bp, Bovine  MMBT13658
acttacaggtgacacttcagaggaagtagaacaaaggggtcttcaaactgttattacttattttaccaaacaaaacaacaaaatacgtgtatccatatggataaatctcaaatagagcaaatgcagacaaatacataaactataatatgccatttatggccaaaaatacttaaatattgtctacagatagaaaactatcattcccgtgtatgttttctatactttcactgaacacccagtactgaatccagaatggtgctttccttggagaaagaatggaaggggaggaaagaggaagayaactagaacagctggtttttagcaacaaaattgttttaaaaactgaaaagtttcatagacaagcagcaaacgcaagcatgacacaatgttaacatcttggtgaaaaatcagatgcaaggaagactatgggagatgcttcatcaacaagctgttctcagagaacacatcaccagtaccatctcacttcaggcgaggttttccaagtgtgtgatagagtacggcgtagttaggtcctaaatcggcttttagaaatgtgagatacaacacatacattttaaccatggcaaatacgtcccctgt

SEQ ID NO: 20042 - DNA, 454 bp, Bovine  MMBT12784
tcagtgtaatagcagtagaaacattttcttaygacaatgcagtttccgtatcctatgtacaaaatttcagtaaaagaaatatctatagaaatatgaaatcaaaacttagaatagcacatgaatgggacgatccaaacacctgtcttcagagatgagatacaatgcctgattagagactttatgttaatgattcgacaatatccactgtgtgtttcgttaaaacgctgcactgatctcttcccaattcccatcatgtatacaaaatgacatttgtgatttttttaagcagtagagcaatayattctattcactaatactgtaacaaaaatgaagaatatattacttttaaaattataaacatccataaataacattgactcaattttacagtgccaaataggctactttggagagcactcacttagccatctacattaacactaaaatcaccatt

SEQ ID NO: 20043 - DNA, 600 bp, Bovine  MMBT04925
tcttgcaagaggaaagattatcaggaaaagaaaaatgaaggggagtaaagtcgaaggaaagtaccaaataccaaagctttgggtaagaaaatatttaggcaacaagcacacaaccacaccctttctgggaagatattactggccttgaagttgggttagtggatcccaaaatacacctcacaaaaagcacagttaccctcccaaaataggccctataattaaagtcttttcaagtggattgtcctatatcacaacttgacatatgttgctttaatctccctgcttcggcaaatgtagccrtatcgggctacacaagctcacaacgactcccagttaaaccagattgtactgtcactaggaaattgatgcaaataaacagccctgagtaccaaaatacccaatctcaatcatctgtaatgagatctctctcctccctaagcacattctcatcacaccagaatcacacccttgattcaaaaggatgggctaacccagattgaaatactgcctcatctcagaggtcatctgaagacaaacacatctgaagaagccgggctgaaatttaaaacacgagccaatctcttttgtgtgaatgccgga

SEQ ID NO: 20044 - DNA, 600 bp, Bovine  MMBT12859
gcaaagaacccacctgctaatatgggagatgtaagagacatgagtccgatccctgggttggaaagatcccctggaggaggacacagcaatccactccagtaatccttgcctggagaatcccttggacaagggagcccaatgggctacagtccatggggtcacaaggacacaaatgaagcaacttagcacacacgcatgccaagtgctcatggagaggcatagcacagtgctaagtcagtctctggacactgaagccagttttcctggggtcagatgctgactctagtacttactagctgygtgaccttgggcaagcaacttaagttcttagtctctcagttacctcatctataataataatagtgcctgtttcataagggcttttaggaagattaaataacttagtatttataaagcaattagaaatatacctagcacctagaaagtgttctgtaaatgatcagtaaatacactggaactcattttctagtgagggagtcagacaataaataaatatgaaaattacagtcgagtcatggggacaaacaccaagcaaacaatttacgataaaatgaaaacacacccagtcctgtgagtggc

SEQ ID NO: 20045 - DNA, 600 bp, Bovine  MMBT05906
cagttaggacagagcacaaatgtttagcaaaggattccaaactcttagcaatacttaagcaatactaaaagtatgtggaatgtaatcttagtttctcaattgcacacttatttctaaatataaaatccttctaagatttttttttctcragggttcgattcctgtaatgaagactgtagtttagagtcacacacagctgcaatgaaggctgggcgctgccacgctgctgtgtgtagtgacaggcacgtcgtctggcagcgtgaactgtccaggtattagtttcctcacctgcaaagtggrattagtggtaataccctttgggttaatttaaaaacgtaaagtaaaataatgcattccagggcttagcagaatgcacctagtaattcctaataaattgtaggcatttttctttgttactaccaatcattctttgtctccaggtcttgtttccattcaaaacaatttaatatttttatcaaccttaaattctgacagtttttgtgctttctatttatctaaaatcaactttagtggaatataatttacatacaataaaatgtatctattttggtatacattttgacagatttatacacacct

SEQ ID NO: 20046 - DNA, 600 bp, Bovine  MMBT12864
tgaaattggagggtccaaaaacagccgggtgttagaacagcaagttctgccrtgcagtggaagctgtttttaggtactgttaagattgaaatgagttacagcaatgtatggcataatctaatggtgccaccctttattccttactaggctcatattggcaacttattaacatcaaaattcttcagttacaaggattttgacactttattgtatacatgtgcagcagagtttgactttatggagaaggaggtaagatgggatytatccttttctttccttaggttttggtccattcatttytcataaaggtgctcctgttactcagattcttaccgctgtgctcrtatctcagtttgaaggaaaaggaaaaccttgcagcttaaaccragatgttcctgtttacattagcacagcctcatgaaatatatgatttcttctgattttgataatttagaaacatgcattcagtctagcaatagtttttaggatgagtaaacacagaagcatttcaagttgcttcctttcaagggtagtattgattcagtgaaactctcaagcttttcagtttccacttgctttgtgattatttgtttgaataat

SEQ ID NO: 20047 - DNA, 601 bp, Bovine  MMBT08819
  misc_feature (1)..(1): n is a, c, g, or t
naaaaaataaatgtactcaagagtgtgcagtcatttttatgtcatatgtatttgcttcattcccattttcatttaaagagaaaacatttttttttttttacattctctcattagaaaagtatgccctagtaatgggatggaaacccaagaaatcagttcttggtacataaatttgcaaatattgttgattttcttgagaagaattattttatttaagcttatttcttcatttttcagagcagtgtttcagtgcagggttacatgagacaggcattgtcgacctaaatcctgagatattttkgggcttggcatatcttccccaaatataatttctttttactattttttgctctgcaaatagggatatggacctacagcttgattactaggatgctaaaatctagcacttttaaaaggctttaaaggggtgttttttaatactctgggggagtatgttgaaattgattatactcgcctttgaaaatcctcactgttcctttgtttcattgtcattgtatatgcagtaaaaatatctctggaagcatgttgtaacaactgattctgaggatgaaatttatgcttggagagttgttgggtgcat

SEQ ID NO: 20048 - DNA, 600 bp, Bovine  MMBT17298
ctctcaaagctccatcagacacctgatcatcatcaagaagagacccatgttccaggtaatgaaagaaaccttaagagacagtggctgttgggaaggattgggctatgattattttcctctttgtatgggtctggcaaaaaaggggcatcattgggtgggtacattcatgtattagaaaggaagaataggggctatataactttctgagctgacttctagcactaagattctagtaagcaggagaaacacaaggaaataataaataattatatatatatatgatcatgaaaataccsaatratggatggtgtggtaaarcaagtacagccatatatgtagcacaaatatagtgtaacttttggaaaggtatctggcaataagtagcaagaactataagagtgtttattctgytgactgactaatcttagtctttggatatatcctaaagcagcattttggctgcttttgcagaaccctaggccttgagacagtgatttaaacattttgtacaccacggatccctttggctttctgatgaaactctagacaccttcttagactaaattttttaaatacataaagttaattacatatgattac

SEQ ID NO: 20049 - DNA, 600 bp, Bovine  MMBT18174
agaacgtccctcccctgggctgacattcagggtattccaaggaatcctttgtacccagacaacagcatgaatgactgctggtcttgggtgtccttcgtgcattctattcacattgtgtgcccttagaaagcaacagggctccagatagagatgctctcagacgttctactaaacatctttctgttgctggagggacaatgcctctgatgagaaggggaccgacttctgctgcagtctgtagatgatgacaccaacatgaggaactggggctttaaggcagaagctaaaatttaatcatgyttacactcacctcccccagggctaagaaaaagcaagctgcagagctgcaactaaaaacccaagagatcgtctaaaggcataagggtaaagcacactgaagtatgtgcatgcatgctaagttgcttcagtcgtgtccgactctgtgtgaccctatagattgtagcctgccaggctcctytgtccaggggattctccaggcaagaatactggagtgggttgccacatcctcctccaggagatccccccgacccagggattgagtctatctcttacgtctaacctgcattggcaggtgggttc

SEQ ID NO: 20050 - DNA, 600 bp, Bovine  MMBT10524
cttatgctgctgtctttactgaggccaaggaagtagttcattcaaggttacttctcagttatacattctcatgtttccagggaaggctctttttaacaatccagatttaatttttacatttgacgggaaatgaaatattctgtgccttttccttggcctgatttagtaataagctgctttatagcagaattcatgtgtgctcattccaaatgcctactgtaaactcttaggtgttaatgacaagtaaatcagaattcattctgtctgcctcctcctgaaacatctcagaccactaactgsgggtctataacaggcaagagggggcagctgtaggtgacttctgaacttaatggaagtttttctgctctgttaattgccaagagtcctgcatatrtgctctgctgattttctgaagcctaaaataaaacttgcttaggtggagagaaaaatggagttgtagattcaagagaatcttttgaaaatgaagggatagtcatggatcatgtggagggctccccttgtgttacatgccttacaggtgccttccccaggaatcctcaaaagggccccaagttcttacccccatctagtagacagcac

SEQ ID NO: 20051 - DNA, 600 bp, Bovine  MMBT21370; identical to SEQ ID NO: 4845

SEQ ID NO: 20052 - DNA, 600 bp, Bovine  MMBT07808
accttcagctgaaatttgctccaacagttccaccctgattgaaattaatctattacctctcccatacgtattacattttatacctgttcagcaatcctgggatgaaaagagaaatactgaagacagaagaaatccaacatttggaaaccctacagtggatggttatattatgttcccaactatctatttccactttttgacatatgacttccagtgcctcccagtagatggagtgtatttccctgccccrttgtcaggattggacaagcgacttggccaatacaataagagaagatgtgrcatatgctatatccttatggaarctttatttgcacctacatagttttgttcggtcttttgtactcttggcctctgcaatgagaatagcatgtcccagatagaggctgttccttcaacctggatcacaaattgaaatgacatgtggccaaacagagacaagaacagccacagccaatctgaagaccatgactgaaaaaccaacgctcattattgtaagcaactgtgactttggaattctttgtaactacagcaaagctgaaaaatacagaaattggtaacaaatgatattacagttgatcc

SEQ ID NO: 20053 - DNA, 600 bp, Bovine  MMBT08623
tagcaggcttctaagaaatctcatgggatggcattaatttggtaaatttgtcaaggtcctcagtctgctaggctcaaaatctgattttatccttacaacagagagcacacccgactcccaggagaatgttaaagacatatatttttatctatacataaattgatatataaagccagaactgcaatatattacattgcaatgaaaatggaaaatttcatatagactacatgatatatggtttctatatcagcattttaatcagaaggagacttgcatggaaagctaaatccttatcagaargctgtttggtgaacctcmtcctctgaacaggaggataaattacaggaattctctataagaaagaagatattaaagatgaatgggaccagataagtcaaaagtctcttagtttccttatctccttcctacacaaggcttagatgggaactgccagcactggcttattactgagattaaacaatctatcatttgaatgatgcaatcttttttctttttttttggatatgttgacggattcaatcaagtgctgttatgaatctccaagtcccagagttattcggtctctgagttgtctctgcg

SEQ ID NO: 20054 - DNA, 600 bp, Bovine  MMBT21326
tttgacattttaaaggaagagggagtcaaggagagctttcctttctttacctgcgttgttacgatggcatcttggcatctggtggaaagtctcgtactcagatgccttacttcagggcaggaarctactgatggagggaagctgctgctttttatccatcccctcttccttcagacatttttttgttttaatttgtttaaaccatttgtttcttaatccagcaaatagacttttttaaatggaatgataaaggtgccttgttcatgttttattggcaaggaactcatgagccagatcctstgatttaattaggagctgaaggcacacctctctgacccttgtctgctgccagcacatggagttcccaggccctgtggagtcttcagaggaagcagagagacccttggaggagctggcttaaaaatttccatagaatagaaagtgggctggacaagccggctgaggcagttaccctggtggttgagtagcagtgaccagtgtttggggcctaagatgtatgacatgactgggctgagacacagggtgtcctgctgcttctgggcagtctctagagaaggaaacaaagcagatgcatttttt

SEQ ID NO: 20055 - DNA, 600 bp, Bovine  MMBT05634
caaataccgtatccccacagctgcagtaccatataggcattttgtacaagtgatgtaagcatagttcttcttctttttttattttttaagcaacagtggggaaaatattttatactttcactgtatatgaggaaaatccttctaggttgacaacatattgagaaaccaagaataaaagaaagaagggaaggcaggtgttagataatatttgagacatttatagagttgatgactggctggttaatctgacttaccccttttcctaaaactcgctttgcatagatttgatgttgttcagtygctcaggctcagtctgtctgactctttgagaccccatggactgtagcatgccaggctttccctgtccttcaccatctcccagagcttgctcaaactcatgtccattgagttggtgatgccatccaaccatctcgtcatctattgtcctcttctcctcctaccttgggataggcttccctggtggctcagaggttaaagtgtctgcctccaatacgggagacccaggttctattcctgggttgagaagatccccaagagaaggaaatggcaacccactccagtattcttgtctggagaatc

SEQ ID NO: 20056 - DNA, 600 bp, Bovine  MMBT11014
acatgactcttgtgtcttcctttttcatgtaaaagtgtgttacaaacgttcttccgggtcagtgtgtgtgtgtgtgtatgtgtcctttgaatggctgcagggcgctgcactgggagcgccatggtttgtaatttaaccacccggttcagcgaccgtccaagttttcagcatcctaaactatattgcaacgaaaacctttcctcacactatatccgtctgtaacagcattaacagcctaaatgcttgtcgggaagggctgattaaagaaactctggtaccarctaagtggaacacagccascaaaggaaattaataaatggtgaaacaggcgtgtacaatacattaaacacgcaaaaaaaggaggggaaacaggcgtgtacaayacattaaacamgcacaaaaaaggaggggaaacaggcgtgtacaacacattaaacamgcaaaaaaaggaggggaaacaggcgtgtacaacacattaaacamgcaaaaaaaggaggggaaacaggcgtgtacaatacattaaacaccaaaaaaaggaggggaaacaggcgtgtacaacacattaaacacgcaaaaaaaggaggggaaacaggcgtgtac

SEQ ID NO: 20057 - DNA, 600 bp, Bovine  MMBT01922
gggaagatctcctgaaggagggtgtgggacccttctccagtattcttgtctggaaactccccacagacagaggaacctggcgggctacagtccatgggggtcacaaagagtcagacacaactgagcaactaagcacagcaccctatctgattagatacaaagttttatattgggcaagccacatggatcaacactttagtaatacacaagtctgagaaaggtaaccctcctcacttcccagtgcttcgtggtcacagaatccattttccacctctgcagctcacaaatgagatcttcccygtgtggacctactcttacctggcactactgcttccagtctttgtcctcacggattatgtccgctacaagccagtcatcatcctccagggcataagcttcatcatctgctggctgctgctcttgtttggccaaggagtcaggaccatgcaggtgctggaattcttctatgggatggtcaccgccactgagggtggcatactatgcctacatttatagcatggtcagcccggagcactaccagaaggtgagcggctactgcaggagtgtcacgctggtggcctacacggcggcctccgtgct

SEQ ID NO: 20058 - DNA, 600 bp, Bovine  MMBT07867
ctcttgaccaatgaagtgagttgacactgtcatattcataaataccacagtccagtaagattgtggggaaggcgagatgctaagtgtgtggtttgtctatttgggaaagacctgagaaagtgtcctggggcctctgcctgaaatcagaggacaagaaagttgagaatgaaacccatcaggaatatatctgccagagacaggaaattgaattggaggtgccttatcagatgcccatcttaaccctcaaagagaagcaccaacaacccaagatacagatccgcagataaggttccatttacractggaggcttgatagctccagacccctgggtagcttagaaccccctggtgaatctgtaatgtgtctgggtaataaaccaactgscagaaatgtcccagctctcctgattggggctctgagtaccaggcttcagtaggtctggtttctgagggctggaggctccatagcattagctggtcacagggagcatcttgctttgcttgctgcccccagattttcacaagcactggcacaagttgctgacagaaatagcaggcaggccaagttgatttcaggccttagtaatctttccggctgta

SEQ ID NO: 20059 - DNA, 534 bp, Bovine  MMBT19285
ttctctattcccctcagcctccagcctcatgtggggtttacaattaaacacctacacatcatctctttcactgtggccataaattatagcagaataagggcaatatacagcaaaaggaatgagtcattctaacagctggctttttgggacagcacgggatgtggagagatacagagctaagcgagggagagagggggaagaagcaacaaacttttgcctctcggatcgaaattagacaaagtcacgtctggaagcaagacaatgactggaagcttaaatgactgtttacaggctcttacrtagagataggctttgccaaggagcacctgtcatctcaaaggtcaccaccctgatataagcgttcatcttcctgatgaaagttttgctttggcttgacaagactggaacctcagcttcgaccctgcctcatctatgtaaaaacaacctggaaagctaagagaattagctttgtccaaatcctaagaaatttccctttgggggatgggatttctttacctctattctattctttgg

SEQ ID NO: 20060 - DNA, 600 bp, Bovine  MMBT07449
gagggaaggaggacactggagccgacgccaccgaggagcccccagcctgcaatacacagctctggtcagtgtttaggaggagccaggggaccacgaacaccacctcctgaatggcgctgggcctgctgctgcccacggctcagtgaaccrtgctcgtgttaggtccctacgagccaaggcaagaacagracaagcagcattcttcttttctcagatgaaggtaaaactgtagtcaagaatatctgagagcgtggagcagcagcatccaccttgtatggattcaatgggcattcatcttcwaagcagctaaactgaaattactcgtacagaagccgagaaaccgagcaccacaggtacaygcaaacacaaaaggaccgcgaggcgccttccctgcggccttacttcccccagctggcactctctacccccgtgtctggggccatcctgtgccctgcrgccttactcscccggccggcgctctctacccctgtgtctggggccatccttgtggaggttggcaggacacaacagccctcaccacttggcagtgggtccatgaacccccaagcccctgccagcgctccttacacagaggggaga

SEQ ID NO: 20061 - DNA, 600 bp, Bovine  MMBT13257
tccaccacatctgcgcttgcctcagccagggggtcctgtgtggcggccagcaggacggggcagggcccaccacacagcccagggacacacctggcgcacggtaaggactcacttatcacgtgtggaattataaagagacacacagcttcagcctggccgggcccagacccgagtgctgtctgcctccctgcaggaccgcaagctgggaagggacgatgctcctccgtcctgcgtccctctcacacagctgggcacaccccccagaggggacactagggctgtgacgagacgttcaccaaygtctcatctttgctttggaagccatgtcttctggagtccagccaaggtgagagtagatagagctcctggcatctcctgccttcaatcaaagtggcgggattccaagccrgcccacaaacaacgatccccaggacttttattaaactgagaaggagagattcggcagcaagaactaacaaagccaaggcttcctccattcccacctgcaggaggcctgcccccctttgaagcccatagccagctcttccctttttctgggttttcaaggtcagagtcacattggctgcaagggttctcttt

SEQ ID NO: 20062 - DNA, 598 bp, Bovine  MMBT05515
  misc_feature (1)..(100): n is a, c, g, or t
nnnnnnnnnnnnnnnnnnnnnnnnnnnnnnnnnnnnnnnnnnnnnnnnnnnnnnnnnnnnnnnnnnnnnnnnnnnnnnnnnnnnnnnnnnnnnnnnnnnnagatggctggatggcatcactgactcaatggacgtgagtctcagtgaactccgggagttggtgttggacagggaggcctggcatgctgcaattcatggggtcgcacagagtcggacatgactgagcgactgaactgaactgaaccatacttcctaatgtggcagaaacccttctcagaagctctccagattaattgaatyggtttgaattgtatccacatgtccatatgctattgtaatctcactgtaattaaaatatattattgactatttaaagatttttctgcaactaatttctcataatctaatctagaaattggaaggatgaagtgatgactcctcaaattcattagccttagttggtatacacttaggaaagcaaaatttaggatctttagaaatcaaaaccaaagttcacattgctagaaagttgtacctctgtccccgccctcctccagaatatcttagtccacatttttttttaaacaaatagatttaa

SEQ ID NO: 20063 - DNA, 600 bp, Bovine  MMBT23233
gcctggttcgctattgtccatggggtcgcaaagagttgggcacaactgagcaactaactctccttttcttctttaaagccctgttccttttgacattcaagttttcattgtactacatttttcatgtaagaccaaatccagaactgcattttacagttttttactgtttttttcctctcagtgctgctaaaaagaaaaagcagctaacattttgaatttacaacatgccaaaaatgacacagaaattattacatttatttttgttcttgttaaaactctgtgagcaacatttaccaagayagcatgttaaattactggcattctctgggtactaaataaaaggctgcaactctctaacattaatgtatatacacaacattccctagcggtccaatggttaggattcttgctttcactgctgagggcacaggttcaattcctggttagggagctaagacccaacaagctgcaaggtacaaccaaaaaaatatagacatagaacaaaaaagaaaaaatactaaaaaaataaaaagaacaaagtactgatacatattacaatgtgggtgactcttgaaaacatgctacatgaaaaaagccaga

SEQ ID NO: 20064 - DNA, 600 bp, Bovine  MMBT13631
ggcatcactgactcgatggacgtgagtctgagtgaactccgggagttggtgatggacagggaggcctggcgtgctgtgattcatggggttgcaaagagtcagacatgactgagtgactggactgaactgaactgaagcttcccaacagtttttctggctgtgcatgtacaactgactgatcaaaaatcttaagctgaagatcatagctttaacaatgccaccttgtacctatagctgcagctttggctcaatatgtccaaggaaacaacaccgtatgttcaagccctgagctgtctgccrgagcagatccaagattacatggatcgctgccactgaacacttcaaggtcagaaaatctcccagagccaacttttctgcttcagactgtataattatcttgcatctcaggtcagcttctaccttaaaatgtgggttgagcaatgcccatttctaaagaagcaagaggaaatgcagctgttaatcagccaccaaatgttactcacccactaaaggacatcttatcttgatttttgttagtttatatgtatttaatgaacaattatgcctttctaatttcacaatgatatgaggtggcttgct

SEQ ID NO: 20065 - DNA, 600 bp, Bovine  MMBT02436
aattttgactgttaggtatgtcatagtattagcttctctgccttgtggttctttaccacgatctaacacatacttctgtgagtaaagcgaaccacatatttaggctatgaggtgtttccaatgatgtggatcttcaaaaaagcctccctgcttagatttaactggtgtaaggctttttgatacttgtatctaaaagcatcccaacagatacacctgaggatgtggctcagtcatgtgtcaggagactgtttctcagtcataggtggtggtggatcttatttccctactctgatcatactrtgyttttgatgtgaagtccattaactgtaggcaaataatactatgaaaatttatttatttaatgtgagtttaggagttactatgtagtagacccttaaactaccacatagtgtttgaaggtggttatttcctcactaatctggtggttctcaaatagtaccccaaagacctgacttctggtttcaccccaaacatgcttagaaactgttactgctttcctcacagtaagaagaaaatctgaacaaactggaaatcgataactcttctgagatccatagagaattgaggtgacagggcaaa

SEQ ID NO: 20066 - DNA, 600 bp, Bovine  MMBT08936
tttggccacctcatgcgaagagttgactcattggaaaagactctgatgctgggagggattgggggcaggaggggaaggggatgacagaggatgagatggctggatggcatcactgactcgaaggacgtgagtctgagtgaactccgggagttggtgatggacagggaggcctggcatgctgcgattcatggggtgcaaagagtcggacatgactgagtgactgaactgaactaaactgattgcattttctactcattcattatattgatcaattccaaaattctgtttggttctctatcrctatttctatttctctattaaacatgtttcgttcatgtgtttttttcccccccagtggattgtttttctgttttgttttgttttttctctcttgtagtttgctcagcttccttaaaacaattaccaggcaaaattaaggtcttgatttctttggggtcagttgctgggaaattattgtgttcctttggtggtgtcatgtttcctttatttttcatattcctttaagtcatctattgcagcctttgcatttaaataaggagccacatcttctagtctttactgactaaatttaggagaaag

SEQ ID NO: 20067 - DNA, 600 bp, Bovine  MMBT00787
gtaatttatgttgtttctcccaaagaacttggtgggctttcttgtgtgtatctggggtcttccctacattcccaaagtaactgaagagggagacagatattattggtgtcatttaacaagtacagtctcaaaaggatttatggaggttgttatgagtcatatattttaagccttgaagaactggcaagataagactgtagttaacttggatgattccaggaaagatgaaggcatacttttaattcccaggtgagttccttaccacctaacaccggcctagccagctgcttctttcctctmgtttcaatttttttgttttgctttgtttggccacacagtaaggtttgcaggaccttagttccccaaccagggatcatacctgtgcgtcccacctcaacagtggaagcacggagtcctaaccactggactgccagggatttccccttatttcgtatccccatggattttgtggcaataatagtttttttcaacttgtggcaataatagatttttttttaacttgagcataatagatgataattgccctgaagacagcactgacctttaaagttcagcaatctctagactttcaaacttttt

SEQ ID NO: 20068 - DNA, 600 bp, Bovine  MMBT11777
tgattccaactcaacttctacaagtataaaagcaatataaccaaaaacatgccttttggcaaagaataaaatataaggagatgcaattccgccagatggcaaaatcccagactaacaatttgtcgacttattgatggacataactaagcccctaacttactaaactataatggaaatatagaagaattctgccattttgtagatttagctgcatcattgaccaaattgcatccccacaacatgacatcagatagagaaattctgaaaaatcacctttacctcaccacaytggtctcctgkgcatgctaatggcattcttactgatttctctgctttccatttttttcttctccaattccmtgtacatttcaaccatgttatgtttctaaaatatacatgagaggattaccgttaccttttttaaaattttgcaatggctccctccaatggagacagtccaagctccgatgtaaataaagcttttcatggttaagacccaaacctgacccactagctttatgtctattatttcaagcatggccttggccctaggatgacaccatcccgttctttgtttggtccacaaacatggtaaacaac

SEQ ID NO: 20069 - DNA, 600 bp, Bovine  MMBT02912
tttttcaaactaaaaccttgagtatatattttaacaagtcattttatgtaacttccaagtaaatgcaacaacttgggagacatagtttagacaccgacatactagaatctccaaaacatcctaatactacatgtagacaactgaacatttaaatcagaagcagttgctcctcccaaaaagaaaaatgggagctatacagtcaccaaagtttttaacccttagaatcctggaactgacaggaattgtttttaatttaactgcatatgaataaaacattctttctgaatatcaaccatcatwcttctggtttcacaactgtagcaagtatctgaaattgacaaacgctgaaaggtagtatgtcataatctccaggcagctgttaacataaatctcgatttctactcatttttctcttttgcagagacatgcagaatttccagctgcaagggataaatgttcatagaaagtcagatagaccatcttttaaaatagagttgactatattttgctgtcaggcaaaagaacagactagggaaataaaaagaaaaacacaaggttccaatcttccctataatggtctcaaaaggaatccatccaatt

SEQ ID NO: 20070 - DNA, 600 bp, Bovine  MMBT13986
cttgctctgccctcaggccatcattatgaaccactattgatactggtgaggcctgggagatagctaataaagagatctggtcaacagaacacaggaaaacagggagtctgctgtttttagacatttatgtcagggtgtttccctttcaattttgatctctttatatccccaaggaagcttacagctcactattccctttcctgtctaggccatagcatggttacatcataagaaggatttctcaagatttttcattcaaagattcttastggcatctggagtcttctccttcactatcaygtattcagtatttttctattaaacacattcacaataatttttctccccattctcctttttyttcttcttcttacatgtggtcgcagtctcaatatacaactaaacagaatccttagaaaggatctatttgtgcagaattataaaaagagaactaaacacgacctgtgtcttctaagaggtactatctcagatgtgctgatacacgtacacagagaaaggctgtccagaaattctagagactgtctaaagacttcaagccagaggaaagtgccagcaaggagctagatgatatgcactagt

SEQ ID NO: 20071 - DNA, 600 bp, Bovine  MMBT15157
tctgcctctgtttacttttgttttgtgttgcttgaattatctgaaagcaacttaaartgttcagcaagattctggaaactctgcattatcagtctttataacagtagacacactaatatgggatcaaaactacttcaaagctcatggaggagctatttccaggatatgcaatgattgatttgaaataacatgrtgtgagagattctactaaaaatcttaaaagatgactgagtgtttttcaagcttcatgtaatttgatgaaggtgccttgtcaaggattgctaaaagcttgctcatgasaactccttaaatcaccagtgagaatgcagctgctgctttattgtttttgagtagcttcttggcagaatgaggtgacactatctgtttggatacaaaaaaaaaaaaaaaaacctaagtgactattgtgtgtactgtgcttgttagccagacatgtcatgtcacctcagacagaatagtatttacagctgagtaggatttaattttatttcaatatacctagattgcttttatcttttcattgtgtttgaaatgattaatagccagcagcaatccttagtaaaggaataacaaagactgctg

SEQ ID NO: 20072 - DNA, 598 bp, Bovine  MMBT11002; identical to SEQ ID NO: 4686
  misc_feature (1)..(210): n is a, c, g, or t

SEQ ID NO: 20073 - DNA, 600 bp, Bovine  MMBT05952
aagtttaagtatatttttwaaaaatgtttagcatttgaagaaaagaaattcaattattgtcttctgscccaatacactctatcttagaaacaagaaaggtactctgtaagtatcagcttctgacaaaaaacttttcctatacrctgacttttttccttttaatataatattttgtagaaggaamtggcaacccactctagtattcttgcctgggaatttccatggacagaggagcctggtggactacagtccatgggatcacaaaagagttggacacgactgaaagactaacaygcacastgccctacttgcaggacctcagctgcctgaccaggggtcaaacccagggcttggcagtaaaagccacaagtcttaacctctgaaccaccagggaaatcccttaacctttttaaaaaagaawgattcagaagtcagcaatcttcagtcaaattactgcctgatttgaatttcatgtcattttatgaactgaaaataaataaaaacatttaatgcttcatgattacatcaaattataaaaataactacataaattatgaatatccaacaaagttattgggggaagtgaatttttaagaatta

SEQ ID NO: 20074 - DNA, 598 bp, Bovine  MMBT08188
  misc_feature (1)..(74): n is a, c, g, or t
nnnnnnnnnnnnnnnnnnnnnnnnnnnnnnnnnnnnnnnnnnnnnnnnnnnnnnnnnnnnnnnnnnnnnnnnnnttgtgtgaaaagggggcagggggaaatgaagctaagtttggctgtgtgactaaacattatctctagaaggaggcgcttaaccactactgttgctgctccatgggaagggaactacgtggctagaaagcaggcttggaagagatttctcatttttaaaaaacrtatcattaaagaatgtatacatgtgtataacagttactctgctgtacagcagaaattagtgcamcattgccaatcaactgtatttcaattaaaaacatatatatatatatagtttcccaaaggtgaactctaaacctaatgggtcacgagagaatactgcattctttctcatacttgtaactagctttggctagcaactgacggatkcgtccttccacctcttcgggggtctctgtctccgcaacgccctcagacatcccctctccttcctggggaagcatcagcagctgctgcagggtagctttcaactctggcagcatggcctcccactcctcagcggggtctagctctgcggctgaacg

SEQ ID NO: 20075 - DNA, 600 bp, Bovine  MMBT21510
gaggcgcttaaccactactgttgctgctccatgggaagggaactacgtggctagaaagcaggcttggaagagatttctcatttttaaaaaacrtatcattaaagaatgtatacatgtgtataacagttactctgctgtacagcagaaattagtgcamcattgccaatcaactgtatttcaattaaaaacatatatatatatatagtttcccaaaggtgaactctaaacctaatgggtcacgagagaatactgcattctttctcatacttgtaactagctttggctagcaactgacggatkcgtccttccacctcttcgggggtctctgtctccgcaacgccctcagacatcccctctccttcctggggaagcatcagcagctgctgcagggtagctttcaactctggcagcatggcctcccactcctcagcggggtctagctctgcggctgaacgagaaggtttcagactcttgccttgagctccccactgtggggaaaagggtgtcaaggttgagagctcccccagagcccctactcacaaggcgctgtggctcgcctctgggccctcatctcttgtaatttctgggtctccttctgca

SEQ ID NO: 20076 - DNA, 600 bp, Bovine  MMBT22314
gaccatttactggaaagaaaaaggggcagtgactctggatctatcagatggaaaaggcttgaactggtcctgtgcaatccctcctggtatcagctgcacccttaggaatgagttctgcttgggaacacacataactgaactctgatattgctgaaagtgagatacgagcttaaaaatgagggtgtgcaattcctctcatcaaaaacaaacaaacaaacaacaacaacaaaaagacagagcagattggtcaaaatgctggagcagcaataaagtacaaccaaatggattggaccttggtcraactgtagggtccacagaaaaaaagaaatagttattctggaaagggcagtgcttccagaagtgatgaaatacctgaggcgcagcatatgtcatctgtcaattatttttaaaataagagctttgaagagagataagttgattatatttgctgtcatctgattggaaggctacacttgctttcaaatggctcttaactttgctccaaatactttcagaacttccctctgaaatgagtttcattactttttccttcaaatttgtaggatccagtttgatcatccatcacttctacatatatgg

SEQ ID NO: 20077 - DNA, 512 bp, Bovine  MMBT18944
ggccctggcctgctcagcccacttcacagagcgatgagagtggctcgtgctacagaggcaagaaacccagggccagacgcaaaggacactgtggagggttcgggagcaggacccgatgagtcggcctctggacgtcaggtcggggggctgaggagctgatggggatgggcccgagagccccaccaggggctgtgctgcagcacgcgcaacacccacagcagggcccccaccacagaaggaaaagccaaggagaacaggcgcccctaaagcyctgctcgatgggcactgcattcctgtccygactacagtctcttccccagtgcgtgaaatgactctagctcactgcagtggggccaaacagacccygcccaccatttcctgggcgtgggcgctgcgggcagatgccaggaggaatttaaaagaagctggctattttgggtgttagaacttgccagaatgccaaggcagcaatatgtctgcctgagtgcaattcctgctctccagacatggag

SEQ ID NO: 20078 - DNA, 600 bp, Bovine  MMBT21553
atgcattacatgattcatcagcaggtattctgggggaactatttgaatctgtcatgttactgaactagttaagtcagtggtgaatttcatttactcttgcagttttaactatcattacttccagtaagtttttgctaggaatggaaactgaatatcctgacttgcccagctacacagcagtttgatatttgtaggaaagttttattgcaatttttttttagctcagaaccaacactgaattttctctgaataggtatcatttttacctattattaatgaaaactgaatagatttgaaaaytaggtttgcagcagatttgacrtttcttagtaaatcaacttaaaaattgtaaggcaaaacagcacttatatgtgaaatttacacttgcaacaaaatcattatgacaaaactaatcttgtttaaatcacaagtaatgtcaagccactttatccacttcctatgctgtcaagttaaaacaagaagcaagatatccattcctacacaatttgcagtgggtatgtttttcaaactcaactgctgtttcagctacatttttggatccacttaactgtacaaatgaggagcatccatctaatcttc

SEQ ID NO: 20079 - DNA, 600 bp, Bovine  MMBT02532
aaaggtccttgccagaactcacccgtcggttcagtcactggctcctctcatcttttgtttgtgtaatattactactacttgtcagttttcatatagttggagggagaagattttaatggtgttgagccaaagctagcataatttgccattctagtaagtttctgtttaaaatgtgtcttgtattaaatgattatgtttgagtttaaaatataattatgtaattttatttcatttacttgtttattactcaggaggcagttattgagttctaaactaggtgcttaatgaaatattctatgytgttctgactttttttgcaaattcaagacatttttctgtttacttcaggggtcttttgctcatatttttgagatgttgtagagggagctgtgtttgccaccagactcctagggcaggatgtgacaatttagtcctttgctcctatctgaaatctgaaaaatgttaacaattggagcacctataggctatgtttaaaactaaatttatataagaattaaaggcttttgatacaaaccttgttttaactttttggaagatgaacttttttttataaaggcaaccaatcagaaaaatttgttt

SEQ ID NO: 20080 - DNA, 417 bp, Bovine  MMBT23329
cctatgctgcattcctaatctttgtgcaagggacttagctgaaaaatagacaatgctaattttaggtgtttaatcattttggggatccattcattcaaaactagtacaccaaaaggaaagtctaggaactttaaggaagatgcttatgtattttattttatattccacacaccttatctcccaattctgattgcattttcataggagacttggaaggaaatgctgttttccagctgcacagtctggtactcttcagatgcacaatttaagccctttttggcagcttctcttcctcagtarggtctgtccatattttatgactgcttttcttttccttatgctcgtttgaaaagtgaaagtggaagttgctcagtcatgtcagactctgcgaacccacggagtatacagtccatggga

SEQ ID NO: 20081 - DNA, 600 bp, Bovine  MMBT08304
gacacggaagcaacctaaatatccacgtataggtgaatgaataaagaagttgtggtacatatacacaatagaatattactcaaccttaaaaaggaacaaatttgagtcagttgaaccaaggtagatgaaactagagcctgttatacagagtgaagcaagtgagaaagagaaaacaatatcatctattaacaatatcatctatggaatctaggaaaatggtattggtgaacctactttcagggaaggaatggaggcacagacatggagaacagacttgtcgacacaacagggaaggcaacrgtgggacgaactgagagaagagcattgaaacatttacattaaccatatgtcaagtggatagctagtggggagttgataacacaaggagctcaacccggtgctctgtgacaacctagaggggtaggttgggtggggtgggagggacattcaagagagaagggtgtatgtccacttatggctgatccacattgccatacagcgggaaccaacacaacattgtraaacaattatcctccaattaaaagaaaaraaaaaaaaacaagcagaaatctggtttcagtgtaactgggaggaattaag

SEQ ID NO: 20082 - DNA, 601 bp, Bovine  MMBT07499
  misc_feature (1)..(1): n is a, c, g, or t
nggcatttcatctcaccgcaaaactgactaaataagaggtcacaatgccaaaaaagaaaagagataaaaatcacaaggccaataagaaaagtacaagatcaaatgaagtgccccgccaaagttgttctaacagagatcacctggagcctatttgctaggtaggactggacttcaagttattgtatacttaaygtattacaytgagagcctcccacatcatattcaatgtcaatagcttagtgttaaaaaaaaacaaaggtcacattaatgaagcacttatgtctccaaaactgcgttaggygcattacaagtacaatcttaaggctgggcccactaacctcccagtaagattaaaatgggttatattcatctctttttataagagagaataagttatttgaggggttttaagagttttaaaaatcatatttttttgctacctccctttacaactagaaaaatgaactaaataaacaaatatgtgtatgtagataaaacraattacttgaatcaagttggacagatgcttcattcataaatgtaaatatttgctgacctcaaagaaccagattctccacacatattaaaacagccacataca

SEQ ID NO: 20083 - DNA, 600 bp, Bovine  MMBT17990
gaggctggggctgtgccagagaaatgatggatggaagcaggggagacagcagctctgcttccgggcagacagccctttcctccaaagggtgactcatggcaaaggcagttttgccccagttacaaaggtcgtcccagacctaatcacgaagggctgatgtttgtttctgtgcgcctacagcttagacagatcccgttacacctaggggaaatagaaccctctgtcctacttcccctctgctttttcttctcgtgtcatgcaaggtttcagggtttggtttgtcaaggagtttagatgacygccttttcaataaacacttgtttatgtttttaaagcaaacctagaacaaggaataaaaacattcatccattggtatccacgggggattgattccaggaccctccgtgggtaccaaatctgaagacgctaaagtcccatctcagccttccgtatcctcatctccatatccatggattcaaccagctgagtattgcataatattaattgaaaaaaactccctttgaatccacacaattgaagcccatgttgttcagggtcagctgtataaacatgcaggcaggacataagattcatctaact

SEQ ID NO: 20084 - DNA, 598 bp, Bovine  MMBT17062
  misc_feature (1)..(102): n is a, c, g, or t
nnnnnnnnnnnnnnnnnnnnnnnnnnnnnnnnnnnnnnnnnnnnnnnnnnnnnnnnnnnnnnnnnnnnnnnnnnnnnnnnnnnnnnnnnnnnnnnnnnnnnntgcagactccccaagagtgtaaatcactttattttataaagtaatttgatctcttacaaatatcatttacgttcctctgaggagccctgtgagtttttcccatgttggaaatgggactgtcatatgaatgttccagcacagtagcgagggcttgctataacaataaaaagtaaaaagccactcttgaagaatttgttyagacacagagaaagttttggcatcgatcataaccgacctggaactgtaggcgatttcttgttttatttaggaacaagggagtttgatctaaaamccgtcagattctgccaagttgggtactgactctgatggggcagcaaatacttggagagtttaacaggaggccggctttctgttcaagcaagaggcaggcctaattttccatgcaaacgtccgggaaactcttagcacaaacaactgtgtccattatttccctaatgtgtcttgaatttgagccagggctgtgttaaggtctcca

SEQ ID NO: 20085 - DNA, 600 bp, Bovine  MMBT06122
tgcttttataagaagaatataatctttatagcatttcaaggattcatagatttgtatttattaattttatttttgccagttgtcacttacaagttgttcagaaagatgttttcttttctttttcttttgcaaatttgattatttgagaagtttcctatgagaaaatccagttgtaggtagtaccttgtgccctaagaggatcttatttttatttattggctctttgttaacctccttctatttatgttactgtatggttgacataattatatttggttcaactttataaagtctgatagygtctagcaagacttttcccaggtaattatttggctctcaagaagtgttcccaagatgatatmtgcatttattcctaattaccatgaatacctcttatgaaaatgtctcctctaattactttgaaaagtcatctttcattaaagtyacttttcttmtagccactcagtggtagatatccataaagtcatcatttttgatcatcttgaatatgtaaatgtttaagcagatactgctggtttttgtttcctaattctagcctagtgtcttctgtgggatgtgactcttactcttgtgaaatat

SEQ ID NO: 20086 - DNA, 600 bp, Bovine  MMBT09678
ttaartggctcccttcattctacagaagatgtcagaaaacgtgaaatgcagttgtcaaagatgttcaatgaaaatgattgaagtaagaaaaggtttccacatttgaagggcaagcttcctaaacaggcccattcaaaacagactagctcctgagacatcgtaattgtggagaattgttagaattataatatttcatctgcacatgttctcttgtgttagaatataaggaacttgagagtggggactggggggtatatttctggcttccgtgatacctaaamtagcctggctttcacagtrgcaaccacmtgttgtcatcgtcataatcacactcaagtgtcctcagaacaagcctgcagactggtcctgtgcttacccctactctgtggctctatgagctccctcctggctaggcaggactacatttcccagaattcccttcacagagtgtttcctgttgggatgggtcacagggtttgagggcagaagtgaaggagggtctgccattttgtttttacgctcccatctagcactagccttgggggagcctgagggttcttgtggctgctgtgcctttccctggaccttctgccagctctg

SEQ ID NO: 20087 - DNA, 600 bp, Bovine  MMBT12568
ttttaatgggttttcagtagatctgaccagttctgcaatagtccttcgttgtacaagttcagcatttttggttattgactcattgactgacatctattaagacctactcagtaggagtgctaggcttcacattcagaagttactggttactttcagtcttgaagtggacgtaagggtgatctgactgtgaggtctgtctccccacacataggtgagttgaccacactttatctccatggttgagatagacattttcccgccaagtccacacgagcatttcctgaagctgtcagaagagaracgtcattcccagatggatcactgcttcataamgtgcctgcacgttgtcaagtgcaagcactggaagtagagtttggtgtacagtgtatttrtgtccattgaaagagcaaaggagaaactaaatatatagaagctctggaagagtgagcaagaaaatgataacgtagaattcttctgaagaagggattctggcagcttgggagtcgggggaagaagggaaatttttcactgtttgtacttttgtaactttggaattttaaattctgtgaatattatggcttaaaaaaaaaagtaaaatct

SEQ ID NO: 20088 - DNA, 600 bp, Bovine  MMBT11325
gcaaagtaagaggttgtacggcatgcatcaaatagggtgcaagtaacaggcactggatatataaaaagcttcttcatccgagccttggaactttaagaacaagggtttatactcaataggcaaaagtatttacaaaataccaatctttgtgaataggtaagggacaagcatcaaacctacaggagagtggcacctagaaatatgaattttttacaagatccctgacagactctaatgtgcaaatgtgtttgggaaaaacagaaaaagcaggcaacataatgttatatatttatacttttsaaatccttgctggctaaagcatatcatttgaacagataatccttcctttcattaacttttcctacatttaagtacagtaatttttgtaaggcttatgttgaaaagctattttttaaagtagaaagcagagttattttaagaataagcatggccttttaattgtgggggaaagaaagaggattatcttccagtttaggaataatttacctttaaaggtgctaaaaagaacattcatatgattaatttattaaaagtaataagaatcagaacactttggatattttttaaagtacttagaga

SEQ ID NO: 20089 - DNA, 600 bp, Bovine  MMBT08742
ataacactggaggacccagyctggctttatcatgatgcctttatgtctcactctgtgtatcccactactttgcaattgtgtttactgcccagaactgacagaacactaggattttccccagaaaccacttatttatcctgaatttatatcttgcgtcttcccctcttgggaacttttctttctcacactgttaattcccatacagtgtgttttatagtgcattttacctgccataatcagagaactgtaatatctttattatactgacaaattttttttccctctactttgtcaattcayggggcctgtatcgctttgtattgtatcttggaatatcacgtagtattcactcaataaatagttaattattttatgagtttgtgctatcctccttacatgtcatatactcctatcttaaagtatccatgcttttgacacactgttatttatgttatgttcatttttcaagtacaagctcacattttcctccatcactgaccacttcaactcattattccaatcatccttgatgattctgtactgtatttttagatgtatctattttaaacattccagtgcttagcatttatacattatcgt

SEQ ID NO: 20090 - DNA, 450 bp, Bovine  MMBT01802
taccataaaagttgaatcatttcatcaagtgcttgaataacataatatgttttaagtaagtatatactcaaatatttttcacatatagaatgatttgtcaactggaaaatgcatatcctttgtgaattgttatgcttcctggctaagtaaacactatttcttcttttatttcactttcgcaatcagtcttcatatcctcttaggcatcaaacccgttcctaaaaattttctatgccgtaagtgttctggttggattctactgagtaaactacctgatgataaacagaaaaaattattctyacaaatccattgtgttgtttgctatatttccacaatgtacatttgctaaaagaatttttaaattaacaatatttaatatttgttatgggatattttattttcttatgatcaggagacacatttaaagtgaaatatatcagatcagatcag

SEQ ID NO: 20091 - DNA, 600 bp, Bovine  MMBT14449
gagctgggaagagagatgcaatattgttgaaatttcttttaaagcacctctgtaagtcatatcttctagttatccaaagtcaactagcaaattagcaggtgaaatgaatgttctgaatttaatgatgcctaagatctctccttatatgaactctaattccagatatgaaatcagttctcatcttacaaaacatcatcccttctttcastcttctaggttctcattttgatttggggactaaattaggaaatttctctttaagtgactgagatatatttaatggcttatgagactttgaamaacagatgttattctagggaagaaaagaaatcctcaagtttaggcattttgcctatgattctaagttttttgaatatcatgaaagtgaaccacagcatttatttatgattatgtcatacacatatggaatatggcatggctgtgttatcaggttctctatgaattcttcttatgatcttgcaactgtatctgattacctaagttagaatggcctacattaagcaggaaagaagtccacgaaagggcagcgagaggagagaaacgtgaagtggcatcttcttgtttaagactgaaattttg

SEQ ID NO: 20092 - DNA, 600 bp, Bovine  MMBT01754
agtctctaatgtaatattcactcgtgagcattattaatactaaacactgaaaattcagtttatatacaatttttaatacacttacatattctayagttttttayactaaattgaagtatactttctattgatctgtcaattccctttttttttcaatattatactattaataattactccagttttgttttaatatctggtaaagcmagtatccattctttattttctttttccaaaatatattgaatattttcccacattycaacatatagatgatattggaaaagtctcaagggtccrttgaagycccttgatagctctattgtatgcatgagtgctaagttacctcagttgtgtctgactgtgaccccayagactgtagccttgccagactcctctgtccatgggatttccagacaagaatactattgtgtatttacctttaaaattaacatgagagaccaaatgaaacattctaggtttagtctaaatatttcacttaatcactagatttaaaaatttttattcacatggcacaaaatcactttaatatttgagtcatttaaaatccacatattgtttttgtatgtgctatacctt

SEQ ID NO: 20093 - DNA, 600 bp, Bovine  MMBT16448
actgtttttgaagaaaatatttgattgttaatgtcataatttagtaaagcattcatttcttttataagtatcatcatcgtatcaagggaagaaaagaagatatgtaatttaggtcagaccaacacatcttaagcattaaaagatgtgtgtttgaaagatgtcagtctccacatgttctggaaataaaaaccagacaaacaatacaataaaacttcatgcatcccatagaagtctgaataaccaatcacttaaaatttcaccatctgctcttactgaagcagcaagattgaggcgttttcyggccatgatgatcagaatgtaacagaatgagaaacactaacaggattccctccacacaccctttcttatttactgctgtggttcttaatgaaaacctgagctctacaaagaaaaggggaggatgtcccccgccccatctcctaattgagtgcgtatagccagtaatagctttttgctgccctgggcagcatgacattacctcatttggcctcgcacagctattatttcaggaagcagctagtgaagtgccccaatccatctgcttgcttttcatgggctgatgcttttcttgatgttgac

SEQ ID NO: 20094 - DNA, 600 bp, Bovine  MMBT08740
tagatgcctggagtatctacagtagtgaatcatctgaaaacattactacttttggcatttgactttagaaacagttatagctcctataattactcttgatatataaaagaaacttaacactcgtcccaaagttgtttaactataaaattaatctctagtgtattacctcatgaagacgagttaaccctgtttatctttctgtgccgagagataacatgagtgagtagccaactgaatgttaaagatttaaaacagttgtcaaacactatattcccctcatctggttagggattgctgaamcatcagcattagagatcatagatcatttattttgattttaacattcatctgggatarcattcatgattgacaatcttataattgctgaccatgttctcagttttcttcctacaaccagaatcacatcattgtgttaacagatatcaggcaaatcacttactttgtagacttggtcaaatatcattaatgcttcaggtataatatttttacagccaatttccttgtaatccctgggatgtaccctatctggtcttccatatttttagccacacaatattgtagtatcaaatccctcttcct

SEQ ID NO: 20095 - DNA, 598 bp, Bovine  MMBT17449
  misc_feature (1)..(31): n is a, c, g, or t
nnnnnnnnnnnnnnnnnnnnnnnnnnnnnnnattgactttctgaatgtacaaaatcccagaaacaatataatcaacctggcattttattatgctatcatatgatggcataatgtaccatcaccttttttttcaatgcaatattggcttactgcaatatgtgctcactcaacaatatcaatatttttatctcaaataactcattcaggaagataagcaatttaaataagccatgaattgaaacatgcttcctccaccacacaccacatagtatctttgtgatttttagcccattgagaagygggttggactttttccccttcactgttctaaatactgtttatacatgcactgacctctgtctagctttctgtgccaccttaagtcagagactgtaatgaaggaaatttcacacaaaagctatgtaasccacacctttaagaaaagtgacaagaactggtagttagcccctttagcatattattagtttaaatatagaaggaagagaggttcaaagtgagctagaaagtgaaagagccattttataagcacaaggagataaacactggctccctttctttctcaaacaaaaagcacagt

SEQ ID NO: 20096 - DNA, 600 bp, Bovine  MMBT02470
tgtctgactcttagtgaccccatggactgcagcctaccaggctcctttcattcatgggatttttccaggcaagagtactggagtggggtgccattgccttctcctattagatacttagccataccattattgttgagagttgaaaaacacaaagactatagaaatgagactggttttcgtatgtgatttgaggtactagtttctgtcccttattcatggagaattaacacagttctctctaatttcctaagtttctaatttctctaataacctgttacctcccttagcccaaaccatacytggaatatttaattataaagaattcttttatttccaatgaataattgaaaaaatgcagtgcattaaaaatatttcacaaattatttgtttgtgattatgacattcattggaactaaaagaatgagcgtagtttaaaaccaaactcaaggaattatctttttaaatgataaagtatgaggagatgttcatattgttttacaaaaggtttaatagagttagagtaaattttttccagaaatcagaacatttgcagagcagaaatgcagagaaggatggagcatgtttatcaaataatgcaaa

SEQ ID NO: 20097 - DNA, 600 bp, Bovine  MMBT00915
catcatgccctcacctgtcgtcctgtgttcacacaggaatcccrgtgtctggagtkctyctggagacacagccccagagggaccaggtggttaaaggggagacgctcgtccttgtctgctctgtggccaaaggcaccgggaaaaccaggttctcttggcacagagaaggcacaagagagagtctggggcagaaaagtcagcgctcccagagagcagagctggagatccccgttatccgggagagccatgccgggcgctactactgcacagctgacaacggctacggcctcatccagagcraggcagtgaacgtcactgtgagaagtaagtagctagttctcctaattagccggagagtcccaactgcaattggtttccttctgtgacagtgaggatgttccaaggataagaatcagggccgtgaagaggttaggaaaccattaacatgctaggattgttattgcaacgatggtggcagcggtagcagtgacaacaggggcagaagagccgaaggacgatggcaaggggagacaggaagaaggctatgaggctcggtcagacgtatggtctccagaattcctccccggaaattgtcaaagc

SEQ ID NO: 20098 - DNA, 600 bp, Bovine  MMBT05984
gttacaacaattcatgggggcaggcagaggcgcttgcttagcccagggtttggtctttaagctccatagttataaggtgccatagggaacaacagttgttataacacaatggtgactaatgaacttacccaccactcttaaaaggtgtcatgcaaatacctcaaccctaattaaaccagcctgcttacgatgcaaccgccgcctcctcttagtcagtaatcctccagctgatttccagtgtgctaaaaatgccaaataagatgcagatcaaattcactttcataaagttggagggtaaayccactaacaaaggagctggcagaactggagcccattaacagcggagggaaaattgacaaggatactgacatagactcttcaaaagaagatgatttgaatatcaaagatgggagaaaggccctagcaaactgatgaaactctgaaatatttttgcaaaaatattcctctttatcttcctgtcattgaatttaaaatggaagacatactgcattatataattttatcaaacagttcatgcccaagaaacacaactcactcttttggttagtctaagaattagtgcacaattacacaagtata

SEQ ID NO: 20099 - DNA, 598 bp, Bovine  MMBT15396
  misc_feature (1)..(17): n is a, c, g, or t
nnnnnnnnnnnnnnnnngcttccctaaacctgcccttggatgagaagacccccatgcccctgcccagattctactgtgctcaggatctgtgtgggtggaaggaacgagcactcacgctctttcttaggcaggcactcgagggctcgctgcatcacacggtgactggcctccgcctttcccctccgcagaaggaaggcgccgtatttgacccagacagctttctcctgcctgaaacgcttcagcatccggttgtagagttcgccagcttcctgtgggaagaatgatgtaagctgagagagyggatgagagcagagggggcaacgacagagacagatggctacgctcgtgggaagctagccctgggctcaggggctccctcagtgaccaggccctgatccactatgtgaggggaaagggcaggcacccgggatgacgagagcatgtgctggggagtctccctcctaatcccatgccgcgaggaggtcgagactagaagagcgcgtgagcacgatgagggcgaggagagacgaaaggggcgactgggctacatcrcctcccgtctgtgacacctctattggtggctcaagggtgggggaaa

SEQ ID NO: 20100 - DNA, 598 bp, Bovine  MMBT02318
  misc_feature (1)..(24): n is a, c, g, or t
nnnnnnnnnnnnnnnnnnnnnnnnaaacattattttcccaatagttttaatctcactctggttaatatcatattaagtgttatattaattatactattatatatcattatattaatgatatttcaaattgataaattttgagttttatcttttctcacctcagataattttctagatagatatttagagatttatccttaaaaattaaaataactgagtggtaattacattttccacagcagtgtttagtagtcaaacaggctgaacttccaaatgagtttgctacaggaatggcaggcrgaaataaaaataaaatrtttaaccaaacctctccactccccacaaaataccatcaaacaaagcccagaaacagttcaaacataagatcatcctttacttttttgtggttatttactttgccttctggaaatattgcacaatctgttagttttttctctttagatgtttgcaggatatgggatgtactactaagttttttaaaaatgaattgattctcacaacagtacctgtgtgtacttgttaaccacataactacattattaactatagttgcttcacaaatagtaaaataaaatga

SEQ ID NO: 20101 - DNA, 600 bp, Bovine  MMBT07748
gagacaacaacagagagctgtgtgcctgacagacactgcccttccacagccctaggaccaaagaaccaaaataaaatcctgccaaatcccagatttctcttcagctgtcttactggcaggtgccccaagcaaagcaactccagggacacaagggagcggatacacagacagacctttgtgggcagagatccccggagggcgatttgacctaagatgagaaggtgatgagaaggtgctgggctgagggcatggccagcaccacggctgacagtctggccacttggagctggaaaggagccrgtggcaattctttaggcatgcacacactcctccagggcccacacgcgaagcaggacacaccatgcagcccgaggtccgaggaggatcaggagccactgaccttcgaggtgggcaccaggccagggggccccatgcctgctgtgtggagtcccagcctctgcagctccctgcttccctctgcaggccagccttcagctgtactgcctccggggacagtcctggaaagatgcccacactctgccgtggcagctgtgagactggccattgccaaccccacctgaggcctctgacctttccttg

SEQ ID NO: 20102 - DNA, 600 bp, Bovine  MMBT12240
aagacattactaataggggaaactgagggaggttgagagggagtattatgggaactctcagtactttctttttaayttttatgtaaatttaaaactgccccccaaaatagagcctaaaattttttttaaggagagagataaagataaaccaacgggggactataaaatctaattgtttatctgttttggcatcattttaactgttttgtataagtttcctctgtcctaaaccctctattttttctctacacaactcccaacctgtacgaatgaggctcacatctctctgcacatctccaytggttttttttatttaacactcacttattgagtaataactttgtgccaagaactatgataattgttagagatatgaaaagaggaataagatcagacttgaggatatcacagtcgagtgatagagacatgttaattacagtggaacaagwtattaagtgccataaataaaggtaagaaaaaaatctcttggaaccacaactcagtactttgaactctatatggcattattaaactataataaagtcacatcatctgcttttgatactgccctatcttacttttgccaatatgtcacattta

SEQ ID NO: 20103 - DNA, 600 bp, Bovine  MMBT01806
ccatttctcatgatgtactctgcatataagttaaataagcagggtgacaatatacagccttgacgtactccttttcctatttggaacaagtctgttccagtgaaaattcagagttgatttcctttaggattgattggtttgatctccttatcaaaatacattagagtttttaaaacaaacaaacaaaacctcaggaattcaattaaagtttgtaaaaaggctcaagaattgctcagaaatacatttttatttgtctctactgtatttattaatctaagaattaaggtgtcatagttttaytggatgaaacaatgctaatttggggcactagaagataaatataytcaaatttctcaaaattcrcttagttcaaaagttattattgctgattctgtttgctaggtactatccaaagatcaatgcaagtgggaaagcaaacttatactgagatttgagagattctgatactgcttttcttaagctgtagccctatagggcatcacataatatgaaacacataatcagctttcagtatatatttaccttcattaatcataaactgtaggcaaatcctgagcttgaaaatttagacactttatt

SEQ ID NO: 20104 - DNA, 598 bp, Bovine  MMBT12903
  misc_feature (1)..(12): n is a, c, g, or t
nnnnnnnnnnnnccttaagaactcttaatttatccgaaaaattttagcatttcagataaagggaaattattttaaggtacattaaaattatagacaaaagaccagaagcatctgtaagcccatagaaggatttactatttactattcaagtcatgcaaaaaggtttttaaaaatcatcatttgtgccagaaataattggcagaggaactaatcaccattcaagaaacatttagtaaatactaatgcaagacatggtattaatgctgctcaacacaggtttagtttctcttcaagagtatrcattatcataacttattcatagtacaatgtaggacacattttaactgaaagcaacaataaaaagcctgaatggttaatgtattcatgttaaccattaatacagactgtattttaacagctcattcaattcaacaacaacaaaaacaaataacccaatcaaaaaatgggcagaagacctaaacagacatttccaaaagagatatgcaatcacacaaaaagattttcagcatcactaattattagagaaaggcaaatcgaaattacaatgaggcaccacctcagaccagtgagaatggac

SEQ ID NO: 20105 - DNA, 600 bp, Bovine  MMBT12104
aagtctctcttctctcctcccttctccactaattcattggggttggggaaagagagcaaagacagagaaaactgtttaaaatgtctgactccacaggccttccytcactgtttcagctattatctctaatggcctttgaagctgaaagcagagttgagtgtatattactttttgcctttacggtctgactgatgacatttcatgttttaaaatagttttgttccaatgatttcttctcgtagcagtggatgggaaaatcctaatacaygaggatatcatatgataagtggataataatcrgcaggcattcgggtggtgggcaaatcaactgtgtgttatttttagagtgttcacgtgatatgattcatcttaaaagcatttctgagtgttgggatctgaaactatccccatgatttactgaagtcatggagaacacatgtgactcttgttttgaaaatgacagcctacggatcccatggcttttttcctccccttttggtttcttagagaattggtgggcaaaaccaaaagaccaatataaattccccctggtaccctgctgtccatgttcaaagactgggagtatttggtgtacatgat

SEQ ID NO: 20106 - DNA, 600 bp, Bovine  MMBT18116
ctggatactattaatagtaggaattacttgggctttcctggtggctcagacagtaaagaatctgccagcgacgcaggagacctgggtttaatccctgggcaggaagacctcctcaagaaggaaatggcaacccactccagtattcttgtctggacaattccatggtcagaggagcctggcaggctacagtccacggggtcacagagttggacatgactgagactaacacacacacacattggtggatttaactgcacaagtggaagcttgaaatgtgtctccacagttggctgccttgtygaacttctgcatttgcaatgagaaggaaatccttgagctgccacagccaacccctctaaacacagagtccagggtcagacttgtgaagagagccaccccaactaactgttggatgagtgaacaaggaataattcttggaagtacatgctgaaatttgcttgcttcctagcaaagctgtctaatcaaccgaaaactctttaagtaccttccttcatgtttattcttgcttgtgacatcctcaccctcctgtgtggtctgaatgtttgtgcccccgaactcacatgctgatttcccagtccc

SEQ ID NO: 20107 - DNA, 600 bp, Bovine  MMBT05353
tccacacttcaggaaaatattaaatagcaaataaatccagttatgcattgggtcaatgcaattaaatgcaattaaatccagggctcagaataaattctagaaggaacactgtttctatattactcacagtgactatagaaaacaatttttagtgttgaaacacctttgtactgtaggcgtgcaaaactatgtttgctaacctgaactggcaatagtcttaaaatagaagcaaaagctattgctaaaaataatcgaataaaacaaggatataagtaatttatgtttccaaacatctcattygtaaaacttacccatcatactctagatctcccttcttctgcttttcttgagattctaatctttctaactcatcattttatttcctacatcacattaacacttcactaactctggaatttaacccaaaatccaacttttgcttttccatcccaaactcatgaaggctatatgatggatgcttgataaaactaaatctctctccctctccctctctctctctcaaagtaaacatgtaaaactactgtttctgcaattatcatcaaacacttttctctctgctcccagagcagggactgacat

SEQ ID NO: 20108 - DNA, 600 bp, Bovine  MMBT22491
ataagacttttgctgttgttcagttgctcagtcgtgtctgactctttgtgaccctatggactatagcccagcccaccagactccactgtccgtgggattctccatacaagagtactggaatgggttgccatgccctcgtttaggggatcttcctgacccaggaattgaacccgtgactcctgcattgcaggcagattctttactgctgagccaccagggaagccccaatctcactaatagggctgcccataaaatggaaatggacatagggtttgcagccaaattgcttttgaatatgcragtaccaatgacaaaaagcattcaaaccagaattttagtctgatttcattaaatattccatttttctagctctatagtttgatttcaagctcatcaagtggatttctggttggaatctgattttccgtgtaggtctgcctccagggaagaaacattctcccctagattttctggtatttttagcctttctaccaaagatctctctatggagtgatatattgcttgtcatgtagttttctacagaaagaacaacgcccaaaaatgkgcttcaactttttctgatcactattatagggtgaa

SEQ ID NO: 20109 - DNA, 600 bp, Bovine  MMBT09293
tgaacctcatagtcagctccatgggtagacttcaaaggggctgatcccaagctcaaggatatcaagctggtaactttgaaatataaagtgtaacaaaagtattccagctgaatactgctgttgttagtactgttctttttttaaaataagcaacacatgaactaccttttctttgctatgcctgtgtctctgtaggtattacccctaacacttgtgactgtctactactggacaagtggataatgctgtaatgttaaatgtccagttcccagatctcaagaagaaaagaaaaaacacctytggtctcccaccagttttaactgatcccaagaggtaatgagacatgcacaaaggggtaatgggctggattacaggagaatcctgaaaggagaggggagccccaggaagtaaaacagatactgttagaagcgacactgttggactccagaaccctactgataagatcaggatcactgctcttagctcaacggctcaggccttggaagcactggagttatcattatcagatgcacaccttccgctgtcaggtaactttagcaggaaccagaaagtgcttccccacgttcttactggcaacaa

SEQ ID NO: 20110 - DNA, 600 bp, Bovine  MMBT11650
aactgatcatttcattatagtcagtatgccagctagtgatagggctcagttgctcagtygtgtccgactctttgcggccccgtggactgtagactgctaggctcctctgtccatggggttacccaggcaagaatgctggaggggttgccatttcctcctccagaggatctttctgacccagggatcaaatgtgtctcctacattggtgggtggattctttatcactagaaacacctgagaagccccatagttggtataaggactattggaaagttcaaggtaccacttcaacaggttaaytggaataaatgtggctttgtctgaaattccaaagattcaacccatttaatcacagggggaaccagaaatgctcttataagcaaaacatcttctcacatttgagaaaaaaattaataaacaagaataaaatctttttgaatttatcagttgaaattgaggttcttcttactctcatttccttctctgaagtgtttcactaggtaaatctctagtctgtctgaagagatcaaaatttaggtggcgaagtgattgcagattgtgttttgtttataaaaatgcttctaccttgtgccacgaggc

SEQ ID NO: 20111 - DNA, 600 bp, Bovine  MMBT22850
agggcaggtgcagaccctggagcccagacaacaagcccacctggagacccgcagccaggcacctagtcctgtcacctgctgggtgcatcccacctgcactgccccccactgaaccacctccccacctgctcccctccacacaagagtgctactgccttttaaaattattggtcccaaaacatttagtcaaaaaatggcttgtggggctaagcaggctaggtgcrtgcaggggtcgcccaaaccagggagtcagtctgagtagggagctttcaccctggaggagaggccatggctccaagyaggggagatggtgtcctgcagcggagtggctggcacaggccgtgggcccccaaggagacagcaggcccctacacgtggctgggaggagggagaaactgggaggagggagaagggctggcctrggtaccagagccctaaccagggccgtgtgatgctggggacaaaggctacaaatgtggacactggggaatygatcaaacaggcatgagggagcacgggacccaggtttctcacccttagagaaaggaagtaccaacatggatggtaagaagacaggcacagatcctgtggtgttggact

SEQ ID NO: 20112 - DNA, 600 bp, Bovine  MMBT22847
agggagaagggctggcctrggtaccagagccctaaccagggccgtgtgatgctggggacaaaggctacaaatgtggacactggggaatygatcaaacaggcatgagggagcacgggacccaggtttctcacccttagagaaaggaagtaccaacatggatggtaagaagacaggcacagatcctgtggtgttggactagaaacatcagtcttacttagagttttcagtttaaaggaacagataaagatatatgaatgtaggtacaaaggtctgtccatgagcacatgtgcacagactcaytcaggaaccgccgcctggcaccttctaggaccttagattacaaacagttcagtaccagtaccatgggcaggatcccatggagggcatgacgaggctccggggaggcagaaggaaggggcacctaaaccacgtgaggaagagccaaaggctgggcgtccaggggagagcaagaggaacaagcaggacagaggcccaacaggtcatgatggtgagggtgacaattccagatgaggaaacaaggagggcaagagtcagagggctcaaagatgtaaattcacattttaaggcaaaggataagtt

SEQ ID NO: 20113 - DNA, 600 bp, Bovine  MMBT05589
agcctgcacacagcagcgaagacccaccacagccaaaaaagaaatatgaacaaatctttttttttaaaaaaggaatttttatagactccagttgaaatcttcaatctagtaacaagagtgattgatagctcatgttttcctggtgccatacctgttattccggaaatactctaagtgaatgaaatgacttcagtttatagaagtgtcattatactttacaaaatcctataaggcaataatctatcccctcttaacttaccctttgtcctcttatccaccacaaaactccaaaaccaaagwgataagaatactaagtaaattcttttaactggaatgattaaagtatcctctagaacttttgcataattgttttaaaattattaatcacttaaataagtcattgttaacaagtaataagacttcccctagtggctcacacagtaagaatctgcctgcagtgtaggagacctgggtttgatccttgggtggggaagatcccctggagaagggaatgccaacccactccagtattcttgcctggggaattccacggacagagaagcctggtgagctacagtccatggggtcacaaacactgag

SEQ ID NO: 20114 - DNA, 600 bp, Bovine  MMBT20554
aggtcaggtggtctgatactcccatctctttcagaattttccacagtttattgtgattcacacagtcaaaggctttgacatagtcaataaagcagaaatagatgtttttctggaactctcttgctttttcgatgatccagcggatgttggcaatttkatctctggttcctctgccttttctaaaaccagcttgaacgtcaggaagtttactactatactgtaaatgaagactttgtattctttcattttttatttctgttgttgaatgctctcattgaggtaagaaacacggaaaggaakaaatcagagaaaaaccagaaattggtaagtgaaagaaaacctattatctttcatatttktgcatgtgtaatcagcattgggggggggtggtaattacctcacatagtttagatttaattttccccaagaatctagaagtcttctactctagaatgaaaaaaaaaaaaaattgagagggtgtatctttttcacaaaatrccttaatatggatattattccaggaggaaattagattgaagccaagggagcaaggtgtcttctggcaaacaccaaatttagagcccattattattactaaac

SEQ ID NO: 20115 - DNA, 600 bp, Bovine  MMBT20555
acacagtcaaaggctttgacatagtcaataaagcagaaatagatgtttttctggaactctcttgctttttcgatgatccagcggatgttggcaatttkatctctggttcctctgccttttctaaaaccagcttgaacgtcaggaagtttactactatactgtaaatgaagactttgtattctttcattttttatttctgttgttgaatgctctcattgaggtaagaaacacggaaaggaakaaatcagagaaaaaccagaaattggtaagtgaaagaaaacctattatctttcatatttktgcatgtgtaatcagcattgggggggggtggtaattacctcacatagtttagatttaattttccccaagaatctagaagtcttctactctagaatgaaaaaaaaaaaaaattgagagggtgtatctttttcacaaaatrccttaatatggatattattccaggaggaaattagattgaagccaagggagcaaggtgtcttctggcaaacaccaaatttagagcccattattattactaaactctaattatgttttcaatgtcttgcttttggtattgtgggaagaactgatttaatttta

SEQ ID NO: 20116 - DNA, 600 bp, Bovine  MMBT20843
cagtatctattctccaaataatcactgcagttcagttcagttcagtcgctcagtcatgtctgactctttgcagtagcctaagataaaaacatatgatttcgttcagagttgagttttagtcccagttttgccatttcaaacaatgtgaacatgagtgattcttctcccttgcatgcatctgttttcccttctctttaagacaaggggtttaaatcttagctcttcccaactttgagcttctaaggggtctgaatgattggggtcactgtctcgataggtgccacagtttggcttttatcyaggagtaagagaggyaggacagccatgtgtcagcatagagaagtcagttcatgcatgatggcttttctcatctctctccttggtggatgagcaacatgaaacagtaagataagaagggccagtctcaggtatatgagctggggacctccatgcccaggttgttggaggggctcgccttgacacaaaatatctatgatgagcctgggaaggaaagccaactgcataatatgtctgccatattttagcaacaaaatatctaataatattcagacgcaaatcctgtggcacaggcattctcat

SEQ ID NO: 20117 - DNA, 600 bp, Bovine  MMBT11341
  misc_feature (1)..(153): n is a, c, g, or t
nnnnnnnnnnnnnnnnnnnnnnnnnnnnnnnnnnnnnnnnnnnnnnnnnnnnnnnnnnnnnnnnnnnnnnnnnnnnnnnnnnnnnnnnnnnnnnnnnnnnnnnnnnnnnnnnnnnnnnnnnnnnnnnnnnnnnnnnnnnnnnnnnnnnnnnnncttgttccttgagtgaaatatggacaaaaactaagacatcatttagttcatgagtaaagaatcaaactgtgattcaatggcaagtgtttatgtagaagagctagaaattgaacaaacatctaaaaactgtagggcagttaatcctgygaaatcatggcaactatgaagtagttcatctttaaaattatgacaagattagagatgataagtatgtgaactctggttgtacatggaaatagatctctgaaataatgttgactgaaaacaattagaattcaaaatagkacagttatttcaactatggaaaaatacaagcttgcctactggcaaagatggggacttaatttaaacctatgtaaatagtgcttatatttacaagggccttattttctcctgagttgtgttaatgataaaagtcaattgsagaggtagacagtttggggaggg

SEQ ID NO: 20118 - DNA, 600 bp, Bovine  MMBT13509
tcagagccactaaagctgtgtcaatttataataactgtgcctgatatttatatgacaattgccattttcaaagcactttcatatctactaactcattcagctccgtcattcaataactcattaatggaagcaggtaacattattgccacttttcaggtcaggaaaatgagagttggagaggtcaatggctcacctaatatgacaagcttaagacatttcagatgtcagacaagtcacataacccttggaggttagcaactctaggtatactttttcagaaaactcctaaacagaacacaygaggaagccaatgctccctaagtgctctatttcttctcattatctccttgccctcacctaccattgccaggagcttgracttgtgtttatcagtcactctgccacccttctcagccaggcagcctcacatactttcagtccaacagtatatacttttatccccaatgatttttttttttctgtgcctctaagcttctcattcaacactcattcttactctgtgaactttacccatcatatttgtcccatttctaactttgaaaaacattcttatctcacttattccaatatgtctgctca

SEQ ID NO: 20119 - DNA, 600 bp, Bovine  MMBT08178; identical to SEQ ID NO: 4768

SEQ ID NO: 20120 - DNA, 600 bp, Bovine  MMBT12542
ggcttccctggtgggttcagttgtaaagaacccacctgtcaatgcaggagacataggttcagtctcttggtcaggaaaatctcattctcctctgggtcaggaagtaaatggcaacccactctaaaatattcttgcctgagaaatcccatgaacagagaagcctggcatgtcacaaagtgtcagatatgacttagcaactaaacaaaagaatcaagttcaggccttgattaagaatattttttaawtctctgtaagagggacagaaatttcctacagaggtcaggattctgtttgatattyatattcatggactaccagattttcaaaacaggcatgtagctgcatgaacatacataaggctatttcttcccaaacttgtcagaacattattmtaaatattagaatctctgattatcacagttttctttaaacactgttatttatgcatttcatcatatttttcctcctgtttaaagtcatacatttatgacttagtctatcacaatcatgttaccacaaataacgcttaaatttatgaaggaccattaaaactagatctataattcgtctctcacacctatgttactatagacaacttaa

SEQ ID NO: 20121 - DNA, 600 bp, Bovine  MMBT08087
ctttccactctcccagccgcctctttgaccagttttttggcgagcacctgttagagtctgatctcttcccagcttctacttccctgagccccttctaccttcggccgccctcatttctgcgggcacccagctggattgacactggcctctcagaggtaagtctccccttttcccggacaggagagttcattctggaaccttctggaagcatctccatccaytgtccttttcctcctggcytaaatctatgcctaagggtcctacatgtcttaggcacttgtgtgtcctgcagtgaagacrgrtgaggcccctagttcctctcttccccagtcacctatttgtatttrgtgtgctcctctgtatcctatttgttacattttccatgcactatgaaggccattctctattccttatcttctgggtaggatgtccctttctggtttggttcataacaatctacagggaaagagttgccttcagactcctttgctcaccccttctaacacctcacactcctgacaaatactgtcatctcacgtttcagagccaggaagacagtcttgcctcatcctgagctttccacccctgctgcatggagct

SEQ ID NO: 20122 - DNA, 600 bp, Bovine  MMBT05749
gcaataaaaaggaattagctactgattcacattacaggatggatgaacttcaaaaaaatatgctatgtgaaggaagccagacacaaagggccacttaatgtatggtcttatttacctgaaatatccagaaaggcaaatctatagagacaaaagtaaattatttctgatctgcagctccaggcaggaagaagggttaactgtaaatgcacagagagattttgttgcagggaacagaaatatcccggaagtggattaaggtgatgattgctcaactcagtaataaaaaacgctgactggtasactkaaaacagagtgaatttmatgaaatgtaatttatgcctcaaaaaagytttttwaaaaaaacttaatggaaaatttggtgaaagttcagaaactaaaagatttagaggttttgttgtattctggtgttaacatgaaagaagaggatgragaaagartgattagagacttcacaactgcaaaagagagaatctggctttatacaccgtggttatctgtccagatatttgggatggatatggttttttgttttgatgccagggaagaaagcttatctagatttagacacaatgaatcatg

SEQ ID NO: 20123 - DNA, 600 bp, Bovine  MMBT12007
agagtgtttatgaaagttttcagtrcagatgggcacttctcttcaagagcaggttcagctttctagcacaggcatgaggcagggaggggcggggggagagcattgtgtcctgttgtcatttcaaaccacttaagtgatcatttatggcaggacataaaaatgatcactgttttgaaagacaataagctagtattccaggtaatgatacctccaggctaactcattctttttcaggagttttaattatcaggatgggcacaccggtgtttattcaattctctgtatactagagatggtgtstgggaaagatgaatgccacccccttttcggctatgctcagctgaatggattgttctcattttscctcttccctcatcagttgataaaatcaagaacaggatccaaaacaatatgtacccacacaggacaatgtatcctggtgcctgtgggcaggaacagggcccccacttacagaacccaggttccaagccagcctccatcccattcagcacatcgcaccactacttctgggattctcgtgtcccacagaggtgacaataataactatctccttggggtttgtctacaggcgatgtggca

SEQ ID NO: 20124 - DNA, 600 bp, Bovine  MMBT16810
agaccttaaaccagttagtaggaatactgaatggagtgggtcttcatgttagcgcttaaacacatttcagaaaggttgtggatttccatgtaattgggatctaaggtgtaataggtttaatttgaggtcctctttaaaagaacaacaggaaaaggcatcttcagcaacgtctaatagcyagtaagaagagacaatgggcttccttaaggatgaaaaagtgawtatcttagtacagcagtcatttctttgagtgcctccatcatcagcatggcaccaaaaatgccttgtgtgtgctaccawtttatccttggaaacatcacagaagaaatgtggtagtgaagacagctggttctcaggagcagagccacaggccaagcccattttaacaaactctgagggattatccaaattctcttgctatcttgcaactatgttttattgactattacttggaatgaatggtcaatcagccaaggctaggaaatctgtttttgttacataaaaattgttgatgtaatgtacagcgggacaacacagtcatattggaaaagtatttgacttagttgacctgccaggaacattgtgtgtgcaaagaacact

SEQ ID NO: 20125 - DNA, 600 bp, Bovine  MMBT11030
cgcccaggctcagacagggtcaggcctaagagcgaagcccaggagagcagcagatgcggcccacgtccagggcctcgcagaactttcaacgtcgacaacattgcatcccatcacacaatcttgaacaggctccccggggcgtgacgggagcaggggcggggggcaggatgcagcccacacaaacagagggacgcagtctgagtggaaaggggtcattgctttaattaggtcaggacccaccccggggggcccacccaccccatcctgaggcagaaccactggccctgtgtcaacatgatygttacaaaaataaatatgaaaaaagcagccgctctttagtgatcatggaattaatcttgacagcaattaaatgtgtttagcatctggcatgtctcctaaattgcaccaaaagaatctggaagcacttggtttggcctcagaggcaacccggaagggagggcacaggggccctggcccaggcccggctaagcgcagtgcccgcctggcccgcaggtcacatctcggagtcggcatacatgccgttgatgagatagtccacctgcgtgtagtccttcttcctgtagctctcgtaggcctgca

SEQ ID NO: 20126 - DNA, 598 bp, Bovine  MMBT08359
  misc_feature (1)..(103): n is a, c, g, or t
nnnnnnnnnnnnnnnnnnnnnnnnnnnnnnnnnnnnnnnnnnnnnnnnnnnnnnnnnnnnnnnnnnnnnnnnnnnnnnnnnnnnnnnnnnnnnnnnnnnnnnnttttactgttatacaacaacaatatactgttatacttacaaagcagaaggaataaaaatataacttctcatccccagaagtatccccatgggctagtgaggacattatttagataagatagtttttctgaaggccctgaagatgtaaatagctgcctaaggtagcaaagtctctgagaaaaaaaaataatatgaaaycagaacctctgaaaaggagaaacctcaaacgtggaattctgatagaaatgaagcctcaatgaattttagattcctccaggatatcagtccagatttaggtgattaactttctgagatatttaatataaatgaaaatattgcatattcttctaatcctagataattatttataaattcatcagccataaaaagaattattcaacactagataaattattaaactcattaattaccaacctagagaattattgttggctgacttgattaggtctctctttaaaaccaacagtttaaagaa

SEQ ID NO: 20127 - DNA, 600 bp, Bovine  MMBT13743
gggctgatctgaggcacgtgtattgagagctttaggaaaacgacttttcctctctaagcctcggttttcactagtatcaaagtgacagattcaaatgtctctcagaagttacttatatgaacaaaatgaaatattctttattttcataaagtacttagcctcacacctggtatacagaaaatgtagaatatatgatgattaaatatccatccccagagtaaaggataaactcatattttcccaaagcagtcttagatgacagcatgaattcgatgatagtagccaatccctttttatatygagaggaaccgtagcgttatggggctgagaagtcwtatttagactataaattaggttacaaacactttgcagtcagggaccaagtcatatatgatttctttatccccagtgcctagcaaagtgcccagtaaacagtagatgcaataaaactttgatgaatgcagctattaaaaggkaaaaggcagagccaacaaacactttctgcccatcaactgtggcaaatgggaatagaccagtttagataattttagttgttgaatgagaagtgagtctgaagggcttgacatagccggctttgaa

SEQ ID NO: 20128 - DNA, 598 bp, Bovine  MMBT20429; identical to SEQ ID NO: 4757
  misc_feature (1)..(21): n is a, c, g, or t

SEQ ID NO: 20129 - DNA, 600 bp, Bovine  MMBT16956
atgctgagaggtattcacttttgttagtttcaacatgtggagttgatggatgatagcagtacacttgagcagctggccatgtaggaaactgaaataagtttggtcaaaaaaccagaatatctgccttaagaatacccagaagcatagtttgcagcctaactccagacttctggaaaacagaaagagcaaaacaaattaattttaggaaaaataatcacaaagaagtctgtgcaagccaagttctatgtagctaaatatcaaacatgggagattattaacttaaaacagagcaaaggcatrccatccatgccaaaccaatgaagtcaatgaagactcatcatacaggcggataaatttgtcaaagtgttttagattcttcctggtagcagacaagactgactgactcttacatatggaagcataaagctaatagctttactgggaaatataataccctatttctttttggttttgtatttatttagggatcaacctttgttatatttaagatactagattgcatttaataagttaaacttgtcatgtaaatgttagagtccagatttcaaaagtaagtgctatttttctgaacaaagccaa

SEQ ID NO: 20130 - DNA, 600 bp, Bovine  MMBT04526
ccacattcctcatagatgtcccctgcctggcccctgagagtacctgcctttgcatcctggcaggcctgcaggcaccctctcaggagagagacccagaccatagtgtgaaggttctgagccccttcctcagcatccatctctgtgtgttaagtgcatattctttaaagtcaggcctggggcccatgggatttctctttctgagcttcagttttctcatctttaaaacaaggatgttagtacttatctaggactatggagagaatgacttgcattttcaatccctgggtttgggccactcayaactcctccttccccctttcgtggaacaggataagttcagggggtctagcaatcactcaggcccaggcaacacccatcagagtggaatgagaacaggccaggtttgtgggtgttccatgggctagatgaggcactgcctctaggctgtcacagaccttgggccctttcctaaaccaaattgagtggacccgctgattccttctgtgtctgttgccctctttagaatgcacactctgcaaggcctataaccacattttattcccatctgtatcctgcaagctcaccatgtactaataaaat

SEQ ID NO: 20131 - DNA, 600 bp, Bovine  MMBT05637
tatttcgtattacacacaaaagccgtcaacagtagtacctttgtccttccaaccccaataaacagtaccgacccaatggctaacattgagcattaatgtctactatctgctcataagatgggtccttttttctgctagatatctgatctggaacaatcaacgtcaatatgttagttctcacattaaaggagtttatacttctatttttagggcttaatattggttctaaagttttacctgtataggctttaaaaggtctttagaaagaaatactctttgttgatctcctaaaaagcgaayagatgttatggaccccaaaccagctttgtccagtagagatttgtacatctgaaacaaaagaaaatgttttggcatcataactgctattagtatcattgtgaaaatggggactggcaatgttccatacaaagattaaaccattcatttgttttacttactactagtatctcaataataactatttatgcgaccaaaacaagagcacacaatttttatccagaatcaatcatataaacccgatacacatttgagagtcatgttaacatataggtctgggtttacagatgtatggcttggccc

SEQ ID NO: 20132 - DNA, 600 bp, Bovine  MMBT08765
tatcatctataaatatgatgcttttatattttgaggtacaaaggcattttctgttcaatctctcttaccagagtcattcgtttttcctaagagaagtaaaaaagcaaaactacttaactactgttaataagttaactcttcttccatgacttcatccagtaatctctggttttctgttaattgtgtggcacctctcccactggtctccttttttgctcacttttctttaaatatagatattctctaagatttacttcctgtcttttgcttacacactatttgctttcactgtcacatttrtatagctgatacttaaatcagtattcatcttttcacccacccatccatctatccaaatatttattcattcaacatgtattgagtgctactgtgtgtcagataagtaaagcaagtggtgggaattcaaaatgatgaagaaacagcccctgatttgagggataaacgaatgttggaaatttttatctgtatgtagactgacatccggcaaagttcaacatctaaaattaagcctttgcttgctgctgctgctgctgctaagtcgcttcagtgtgtccgactctgtgcgaccccatagacagc

SEQ ID NO: 20133 - DNA, 600 bp, Bovine  MMBT10908
aataaattccaagaatgtttctaattctaaaaatgtttgattcaatagcaataaatatttataccccactgtatcgccccttgtactaattgttgaagatagtgtagatactgattactctcagtaaattcagtttactggaggaatcagtaagcgaatcattttaatacaatatgttttctgcaactatagacatcagtgcccggtgctttaggaacacaaaggaaacaatgattattctggggtgcaaaggactcttgttagttattttcccattatccactgcctcttttccacttyccagaatgtctcattacaaattttccttgatttatgatggggttacatactaatatacccactgtaaaaagaaaaatatcttgaattgaaaatgcatttaataaacctaagctaccaaacataactttgcctagcctaatgttaaacatgccaagaaaatttacattagcctgcttttgggaaaaaacacctaacacaaagtctgtttataataaagtggtgaatgtctcatttaacttattgaatgctctactgaaatgaaaattgggatggttgtgagtgtatcagttgtttgccctt

SEQ ID NO: 20134 - DNA, 600 bp, Bovine  MMBT00838
gctgggagggattgggggcaagaggagaaggggacgacagaggatgagatggctggatggcatcactgacttgatggacgtgagtttgagtgaactccgggagttggtgatggacagggaggcctggcttgctgcgattcatggggtcgcaaagagtcggacacgactgagcaactgatctgatctgataggtatataatatacaaacaatactatgcagctctttactataattaagcaataatccagagaaattagaacagtgtacagagcacgctgcacaaacatgtccttgtttgrgtgtatctctttctggaggaatacttcagaagccaattgtagtggttgcttggaggaggagtcacagagaattagagaatgacctagaaggcagacatgcttggtatatttggattatttaagatgtgcttacaatgcttattttcaaaaaagaataatttaacatattttttaaaaaatatgtccataggaaccatacagtttgttccatctctttggaacaaatacttaaagataattttaagaaataaatttcactctgtgaaaagagtgccaatgttcagagaaagctatatttag

SEQ ID NO: 20135 - DNA, 600 bp, Bovine  MMBT10441
aaaaaaagaggaccagggtgcttgtcttctttttcttccttctcggtattgcaagcacaaagcactgcgcagaagctgcaccaatccttgccgtccctggcagcagaatggtagaaggtgggagagaccaggaatccttccaggctctgctgactttagaaatgaggattgcacacgtttgtctcctgaaccaaaagggtgagaaggcagggtgccagtttgctacactgctgcaatgatctcacgctcactgctgctgccgtcctgtttgcccagttcaaatgcctgttcagtacaaaycaaaaaaaaaaaaaaactacttggatttttcagcaagcaaaacgggtattaacattaaaaaaaaaaaaaaaaagaatcagcagtaagaaaaggcaaaaaacaaaaagcacatacaattttaggattcacttgttatgcctcaatattctgtttatatgttctttctttctcccccccccccacccccatttagagataagcagcagaatttatcaggcgtgaaagggacagcctcctggtggcctgccaaaaacccagaataaaggcgaagttgtgcttcaaagctcagtcgcttgctga

SEQ ID NO: 20136 - DNA, 601 bp, Bovine  MMBT13338
  misc_feature (1)..(1): n is a, c, g, or t
nttctaagtatataacaaatattaaatggtacttacaagaacatgtccctttcttcagtggatgggtctagtttctcagctttgattctgcttgttaaggagtacacagaccagtctgacttatccctaagtccagttattctgtgatgtttggttaatacctaaattctactgatatctacttcaaaattattctcagaaagcaaacatttttggttaatttacttcttcccaccctaactgctaccattgtctttaagcctgcaaacattgtagattgcacctgatcaaacagatgctktattcaaatcaaaacaaatggaaagtgctgtgtattttggcaaccttcctttcttcctttgcctatttttaaaacggagctttcctaggatataatttcctgcatagtgtggcagctatggcctacttaaagtcttgcagtcttgcagtaattgaaatgtaaacttactgaagaattagtatggttttgcaattttttttaagcctagaccgtctcacgacttgaaaatagagtgtttacttccaagttgtgtataattgctgtagcttttctaggaaaccagtgttcttattctaagaa

SEQ ID NO: 20137 - DNA, 600 bp, Bovine  MMBT12610
ttcctcagtgaaatagcaactctagagagtatatagtctagtgtataagtaatataggagttgatgagcatttaagaatgcagtgatgcagaggtacaggtggggtgctcaagagtgatggtgggaggcgggggcacacggggtgatgattttgtggtataatcatgagagaaggtggacctaggtggcagcaggggagcatgtttgaaagatacctttccttttccccaggagagccaggtcctcctgactctcacgaatccagtggagaaccttacccacgtgactcttttggagtgygaggagggggaccctgataatatcaacagcactgctaaggtaggagtgttttgcttcattctgagtgactctgacttccctagagtggcctcatttgacctgctttaaaggattccacactcattattttcacatccagtcttcaggttcccttgatttcacctctagggttttctacttcatccgcaggcacactgccactgccctttttgagggtttcatcatttctcacatggactaggacagtaactttctaactcccttttttagttcacccccacttccactccagcccatctt

SEQ ID NO: 20138 - DNA, 600 bp, Bovine  MMBT03828
catatgacagctttgtaggtcagaaatccaacacaagttctgctgggccaaaatcaaggtgttggcaaggcggaattcctttaggaattaccacctagagcaaggtgatgctctggggaagaatctgctcctttctcgacttccccagcttttagaagcagcttacatttcttggcttgcggcccccgtctgccgtcttcaaatccagcaacatggcctccctctgactctgataccgttgtcacatctttttttttttctgaccacagttgggaaaggttctcttctttcaaagacccrtgtgattagattgggcccacccagagaatctccccatctcaaggttcctaactgaatcatgccttcagagtcacacgttttcgccgtgcagtcacacgttcagagcctccagagttaggacgcgggcatctctgggacaggggcattgttctgcctctgatgtgttagtatattcgtcccagtgttcagaacagtgctgagctacaaacgctctacaacaggaatatgtttaaattacagtacatacagatgttggagtatgaggaagcctctaaaaatcattggaagaggatgacacgg

SEQ ID NO: 20139 - DNA, 600 bp, Bovine  MMBT02837
agcatgagccaggaaccctgtaatatttcttatatttcttacatgtggatgctaaacaattactaaatagccttattttttctatgagtgtgggtttcaaatatatttttcagtagagaatcattggttgcatactaaaaaagatatctgtttagaataagcatttaaggtcttttaatactacaattgtttttgagatatgttgttaatttgattctctttgtctctaactcacattaaaatatgctattgaggattaactaaaatgatgtatatgattagacgcagtggggagtgagyttgctttattgctctctcttaatatccctgaaggctgggattaaagatcttatattaaaataagtaattattggataactcaattaaactttgtgatagtaggggaactcttgtattactgactttttaaagtttcccaaaatatattctgctgcatgaccactatttttaaacccatgcattttctaaattttgtacttgccttaaatgctcacattctttcgtttattaagatttattgcttgctggacaaacttcttagatgttaaaactagctgcctaggctactgcacaatactt

SEQ ID NO: 20140 - DNA, 600 bp, Bovine  MMBT04305
agtaatgcaagtatacaacttttcttttaagtgccccaaatagttccattaccactgtgaataaaccattcgcattgtggttagaaaagtttgttttagcaatttccatgcttaagggctttcactaaacaataattctatggtggtgacttttgggtgtgtctaattgtctacaaagtaagcttgaaactggcatttcatgtcattaagaattaagaattcaaaatataataataataaaataaaagatttacaaggctggtcattcaagaaaaataggaactttaaaatgtcaaagarctttatatacatacacacacacattaaaataacatgattaaaaatacaaaaaaataaataaaaataccataaaacatattgatttaaaattacctttgctgttatagagttcttttttagcaatcagttttcatcaagtttattattttaacattcctaacgcaaatggcactagcaaatatttgggaagtgaaagtgaggtctctcagtcgtgtctgagtctctgcgcccatggactatagcccaccaggctcctccatccgccggattttcgaggcaagaatgctggagtgggttgcc

SEQ ID NO: 20141 - DNA, 553 bp, Bovine  MMBT17619
ccatttatcaaaacgtagtttggaaattcactaatcaaaacattttccatcagaggatttaaactcacacaccaaaattatctctagttaagcaagcaggaagtttaccaggaaccccctaaaaattaataattgtttttacagctttgataaatccatgccagctcatgttagtacacggtgtggcacacacaatctccagtgagtctgtcacttctaaacaggaaagcatgaaatccttagcataaggcaagaatcacagatgttctgaagtgaggcgttttagggtttgccccccayccacaaaagctggtttctcagtctttgagatggttttcttagagtgacagttaattatgccaaactcatcatattcatcatcttgtttcatcttcaggaacctacaaggaagggtgtctcatcctcagccctactgaygtttggggccrggtatttctctgttgctgatgcggggagaagcacccgtgcattgcaaggatgtttagcatcatctctggattttacttactaaaagccagtcttgcctccaccc

SEQ ID NO: 20142 - DNA, 600 bp, Bovine  MMBT16401
cgcctgcaatgcaggagactccagttcgattcctgggttgggaagaggagaccccagttcgattcctgggttgggaagatcccctggagaagggatagtctacccactccagtattcttgggcttcccttgtggctcagctggtaaagaatcttccagcaatgcgggagacctgggtttgatccctgggttgggaacatcccctggagaagggaacggctaccagcagcatgaatgtgtgagtggcagatatttaattaaaatagaaaatataaactggtaccaggggcctggctgctayggatgatttctatctccagaggctgtgaaaaatctcttcctcctgtcactgtgactccccacctgccacccccgccctcagttaactcttggcatcttgattgacgaggtattctgcattcgggtcatcctcaggggtagcgcattgccagaaggtcttgggcactggtgcctcagggtggcgagggtgtgcccccaagctgtgtgttttggggagagagagggtccatccgtgcttggttcttgctgtggttgttcagtcgctcagtcgcgtccgactctttgcgaccccgtggactgc

SEQ ID NO: 20143 - DNA, 600 bp, Bovine  MMBT06055
aaaagcctccatctgctagatgtaatcttttcgtacctgtggaaaaaatgaataaaataaraaggacccactcgcttytgaccttgactctcygcagattatgcacctaagatagtttcttttgttccttgacaggtcttaattccaaaatgatagtgctgtagtattttgacagtttcatccttttacctaaatggggaygaatttggcttcctaatattcctggttggcatatgttttgctgcaacagagggagaggattttcctttaatgagcaataccctgtgtcccttcacagcrtcttttcttgttgtaaaaatgytcaagcatcctttgcctctctagtctatttgctacacggaattgagaaatcattataaataaaagaggtattaaaacatcctcactgtgtcatggatctgtttatactttggaaagaaggggaagggggcgggtaaacagaatgaattgctgtgaatgtgctgatccattgggccccatcttttccaacccagccccgcagggcttcctacctctcttcccacctgctcgccgtcatcgctgcaacgttattctcccggatgctatgtttctttccca

SEQ ID NO: 20144 - DNA, 600 bp, Bovine  MMBT09222
cctgtgtggtcccagacagcatgaagggcgacctgtagtccaggccaggagagagccaagtggggaaggagggtaagccaacccttagtgaagagacatttttacccttcacrtagtgaatccttctgaggctgctttttaaaaatgaaaaaaaaaaaarggaagagtctcttaggattcaagtgatgagcaaattccatttcagaaatataaggaacaagcaggcttccttcttaaaatttagctattgttacaatggaktaaaaaaaaaaactgaggctctgtggtcctcaggatttyggttggttggtcaatgcctgtatccccccctscaccccatttaagcatcacacaaagcaaaccctccgtccccattcacagatacatgcaaacacacactcttcaaatcttctataattttttcaagtgaatcctttgtttgctctgctatatgttacagcatcagtcactgactccctggcagacattaagggtaagaaagcaattatactcttgaaaaagcacatttatggacactttacatgtccattcaaaccttttccccttgcaaggcttgcctttggctgcctctagatacag

SEQ ID NO: 20145 - DNA, 600 bp, Bovine  MMBT04328
aagtaagtctaaatacccacatatcgataattaataagaatctacagaacagcacagggaactctcctcagtgctctgtaatgacctatacagaaacagaacctagagtggatatatgtataaactgatcccactttttcacttgaaactaacacaactttgtaaatcaactatactccaataaaaattaatgttaaaaatcataaacaaacagataaacaaatacccacataaaaaagtaaagatcagatgcacaactgaatcaaaacgacaaatctataatcgagagtaggcagagayttcttagtggtgaacagcacacacacacagattcataaaaatcctgtcaataaagcaattcaaaatgccttgacaatgcccttgccccatcctaaaaagcatgaactgcctcagcatgatgttaactcttaccaccaagggattctgttgcttggctggctggctgtggaccccatttggttttttctttggattaggtgaatcttgatactgttttctgccatttccccttatactttgattctgtttttccaataagaaataaaatgtaaacatacagcacaatgtaacaggataaaa

SEQ ID NO: 20146 - DNA, 600 bp, Bovine  MMBT02587
ttattaatatttgtttatgtatatttattttacattagcagtaatctttgtcttttttttttccttttctctctcctgctttagggtactactagttcaacagcttctcctccagtctccacccctgtcacaggacataagagaatggtcataccaaaccaaccccctctgacagcaactaagaagtctacaatgaagccacagcctgcaccccaggctggaccaatccctgtggcaccaattggaacactaaaaccccagcctcagccygtcccagcttcttacactacagcatccacsccttcaagacctaccttcaatgtgcaggtgaagtcagcccagcccagctcycattacatggctgctccttcaccaggacaattttatggttcagggccaggggcccaaggttataacactcaaccagttcctatgtctggccarggtccacctccttctacacggggaggcatggattatgcatatgttccaccaccaggacttcagcctgagcctgggtatgggtatgctcccaaccaaggacgctattatgaaccctattgcrcagtrgggcctggctatgggggcaaaaatgactct

SEQ ID NO: 20147 - DNA, 600 bp, Bovine  MMBT06817
aatacaggagacctgagttcaatccctgggttgggaagatctcctagagaaggaaatggcaacccattccagtattcttgcctgggaaatcccataaacagagaagcctggcaggctatagtccatagggtcgcaatagttggacacgacttagtggctaaacctacctagcgaaacaacataacaatgattaattcaagaaacagcaaaagttaaatatatcttttatctatatatctttctgacttcactggaatgtctttagaaaagtaaaagtatgttcagacattacttaatacrtatttgttgtttgggtctattttcatccataagttaaagatcttcaagacaaatgtgatttttgagtttatatctatacagtgaatggagatataaattaaatggccatactttccagtatgtgctagctgtttgcgtgtttcacaagacccaaatcaaccggactgaaagctgcagttcttaaacactcttgtgttagtaattttcacaccaacgaagtgtttccactaatagtagcagtagtggtagttgccggtaatagaagacctactgggtatgcactgaatgagagctttgctt

SEQ ID NO: 20148 - DNA, 600 bp, Bovine  MMBT11363
gttatgtcttggcttactcatgagtctgaaagattataagcaaacttgagatatttactgataggatttccatacttaaatatcagccagcgagaataggtttgaggcctcaaccttgtttttctaaagccttctgatwaagttgtcctctcgccatggctaagcctggctctgatgctacaccaccatcacatggaaggggactcagcccccagactaaaatgacatatgctgtggcttttgtcctagctcttttgcttttgtaggatgaccttgagtggcctccaaaacttcttgttstccattgtaaataagagatagtaatatgtattcctgcrtaattcacagattaaagtcattgtagacgacgcagtgcatttgaaggcatttgggagacttgtctggtaaggcattattcttatgtcttccagtcacccaaaaaactagaacatttctatctgccagctacccttttttcagcacatcctgccctcaaagtatctgctgtatttttagtaaaagttaaaaggaaaaagttgaccgtaatcctgtgtatttctttctggtcttttttctgtgcatttaaaataagatgaaaag

SEQ ID NO: 20149 - DNA, 598 bp, Bovine  MMBT18225
  misc_feature (1)..(28): n is a, c, g, or t
nnnnnnnnnnnnnnnnnnnnnnnnnnnnttaaatatttgtcattcaaagcatatgatttgattgtgcaaatgttgttgacacaacagcagtgaaacttgcctgtgaaggcttcactatgcctaatgaaataaaagatttatgagacctttgttgttggtgttgtttgtggttaatgcacaataatctgtattgaagacagcaatacctgtgatttgccacacctactattaaggaagtatagaagatgatgtgaagatggtgatgttaaaactcaggaaaccatctaccttttctacaayggcactgtctattcccgccaccatgatctactatggcaacaactacggggctatgaatatgataggcttagctgtggctatcaaggatatggtgactatggatatgactgctgttgcccctattactatggaaaatattggtcataaacattctactgaaaaactctagagccactgaacccattatatttgtcctcttgtgaaayagagattctgctgttgggcttactcatctcatcctgtctcttcaaaaagcaacaatcaaaattgaaatctaaaccatcatgaaaataattca

SEQ ID NO: 20150 - DNA, 600 bp, Bovine  MMBT00972
tgttcaattgaatatcattttatgataagttcgtgttctagtctttgttgatttaagtatttcttgcataggaaagctgcttcccacccccacagccagcctctctgattatcactgattatctcactggtctaagcctctgtgtcctttctccctgccacagtctcaacagccagagggacggccgggtctaaggctacatgactgcacaagctacagagtagtggtatcaggctttcccaaaayagcagcaccaatatacatctcacccagaatatatcagtgtcccatggatgcagrtcatgtctcctccttggtaaattcagacatcttatttcctggtgttagacagatatcaagttgggggtcttgatttccatttaacatcacaaatggtgaccatgactttattcattgcattcccactgtgtgaaaagtttatgaagaaggaagacagtggaattgggcagagggcaagggtaaaccaaaatggcccatcagagtggccctgaattgggctgaagtggccgaggctgacatcctgcctgggtctgtcttaggatcagttgcccatgtgcaggcagctctgcagctcaaacc

SEQ ID NO: 20151 - DNA, 600 bp, Bovine  MMBT21987
ctctcctggaatgcttgcgtgggggaaagcaagctgccgtgtcacgaggcccctccagcaatctgtggagaggcccccgtggtaaggaacygaggcctcctgctgaccgtgrgccatcttgaaggcagctcctccctccccactcaggccttccgatgcctgcaccccagctaacatcttgactagaacctcatgaagagactgagccaaagccatccagcgagtcatccccaagttcctgacccgcagagaccctaaaacatcagaaccctgttgttttaaggcactgtgtttatgggkaatttgttatgcagcagtagctgattaatggaccccaagcacaccctgccagacatcactaatcaatcacagcttcactcctgctgggtccagatgatgcctcaaaatctctctcaaccctgagctccaggcagccactaccaactgaccagagttagcatatgagatgaaaccatctgccattccttagcctaagatagagggtgagacagttggatggcatcattgactcaatgcatacgaagtggagcaaactctgggagatggtrgaggacaaggaagcctggcgagcagcagtcc

SEQ ID NO: 20152 - DNA, 600 bp, Bovine  MMBT13771
gccaagaagattgacaatgtactttcctgatattaaaagcttacaatcaacttgtttctgttgaagtcctttaggcatgaataatacctctctgagcttacaggaagtcatgctagttttgcatgaacaacaccaagtaatgttgagtttaatggactgatgactggggacctgggggataggatgaaggaaacaggagggaaaagggtgggaaggtgctgaacccattttggagaaaggaagataggaagaattgttgtgtacagaaatgtgagagggaatactcagagtaggatggayatactacrtggaaaaaagaaatatgttaggagagacttagtgaccagtattgttttaygcaatgactgtcctgtgtgtgactatatacacatgtgactaaatgcacatatgtagtttgtatttaaagtctaatgggcacccccacacacacatgacagaagagggaaacactgaggaagtcaagatcaattttctctcattattatatgaatatatcaactttttcaaggcaagccattggttcctcttttcttgtttcaggaagaaaaggaaacaaggctgtcagtggtctgtcttggg

SEQ ID NO: 20153 - DNA, 600 bp, Bovine  MMBT04514
tggccccgggaacagcctccagagccaggctgaacctaatccctcaggtaatggaaaacctatttctatttctgaggcctcactactcttcataccgaagagccttgtgcctgtcacacatttattgaagcttattactcatcgagacagcggggtccagttagtatttggaattatattttaaatcacaatttttctcttatttattttgggattccaaggctatggtgaaagcatgtcagagttattcttcatgtgctttcaaacaccttaaagcccacccctccccctgaaattctyttctacgcagagaatctttacgcatacgtggaacatcttcagccaagacacaggggtcacccctgtgctctgggacctcaggactccaccagatcacagggttctaggggagagatttccagtctcctcactcagcattagagtaatcttccccaggccactggctttacttctccctctcacaccacgctcttttctttggctttcaaagataaatggatgcagtctctgaggatgctggggacggaggtgggaacagatgggctaaaactgcagtctcatcatccagtggaaaaataa

SEQ ID NO: 20154 - DNA, 600 bp, Bovine  MMBT22720
cccctaacccgtctttaggacttggcttcaaaactagctccacaggggacttccctggtggtccagtggttaagaatctgccttccaatgcagggcatgcaggtttgattcctggtcggggaactaagatcccacatactgcagagcacctaagcgctcacccccatgccacaagagaagcccgctcatggctacaaaagatcctgagtgccacaactargaccggtcgcagccaaataaatgtttcaaatgggtaactacatattctccatacgtctgtgtgtgcccatgttcatcctygtgtatatttaatgcaatacttcatttattaaatatttgatcctccactgtgtgacagatctgcataaatgtgtctgggtgtgtgtatacaactaccatgtatctggatgagacattcattcacttacttcacatgtatttaataaggactcttctgtctactgggcttttctgatagctcaattggtaaagaatctgcctgcaatgcaggagaccccagctcaattcctgggttgggaagatctgctggagaaaaggataggccacccactccagtattcttgggcttcccttgtggct

SEQ ID NO: 20155 - DNA, 600 bp, Bovine  MMBT08089
agaggggagaccaggcaccagagaacccagatacagaaagaagttctggcctgtaccatgtaggtcccacctcacaaggaatcagtgggtctatgtgagtctgtgcatcaaggaattcaccttgttgacatcaaggtctatcacgagaagccctaagcctggtataggctggtagccaagtcacaaacaacagcttaccccgtttctctctgctttctggcctgtggatgaaaaaaaatccagcgctttgcttttccaggccctcaccaactgccctcccaacccagaaaggagagaggytgagccctgctactccagaggaagcagacatgaggcaaaggccaggttactgccatagatagcctgacaacccagactgagcagcaggcagggaggcactgttcatgtaatgagtgtccaccacagctcacaggaacctcatggccttcataaacactcacccattcatccacccatcatgcggtcactggctatgttttttgttagaggaaccagcaggcagcccagccccaaaagacaactgatgacccccaggagaggtgggacacacaagtcctccacggatgtgtcccctcctca

SEQ ID NO: 20156 - DNA, 600 bp, Bovine  MMBT06489
gtagcaacatattcaatcttcacagcaaccctttgagggacargtattattgttcctgttttacagagggcagatattaagtaacttgtccaaattcacacacaaatcatgtggagacagaaactgaacccagacratttatctgcggattcagtgcccttagtgactatgccatagcacacctcaagctgtagcaaagtgcttctttccaccctctccaaaagggaarccagagtactgcagaatcagcctcggtgtgcaggttggtcagtgggccttaatcagtgtcccaggtctagmccaggaccttggactttgaccttgaaacaacatggaaggacctagaggacgttatgctgaatgaagtaagccagacacatgaagacaagcaccgcgtgatctagctcgacatggaatctaaagcagccaagcccagagaagcagagcaccgaccagggacctggaggtggggaaaagggaagacacgggcctaagggtcttgtaatctttccgttacaacatcagttctggatctaatatagacattagtgactggagttagcaagactgtactgtatacctgaaatttgctaaggtggt

SEQ ID NO: 20157 - DNA, 567 bp, Bovine  MMBT20828
aaagaaaatmaaaatattwaaaaattttagcttcatctctatatgagaagaatatgctaattttttcttacactcattaacttttaaatcctggatcaagaatttaaagcctgcctttaaaatttctcacaaagaagatttagagagttttagaagtgaacagacgttacttcttgtgatttattcacctcccaaactgaaaycttccaaacctttttgtatccctgagttaaagtttctgatgacttaatttttcaggaaaagtagggcaaagtttgatcacaggacgttttcagaaaycaaatgaggtcagagatcactgaacagattcataccatctgggaggccagagccaacagagacagttaaatcttgaaaatgcaatttaccagccgctttgaaagttctctgagggtcacttacagctttagggatttccgtattaattttatcccaagttaaatgaagttactattattttaaattttaaaatatgtgcttgttttggaggatacaaaatatgggaaaagagaaagatgaataatgataacgtttttgctccatgaa

SEQ ID NO: 20158 - DNA, 602 bp, Bovine  MMBT01899
  misc_feature (1)..(2): n is a, c, g, or t
nntttagagtcatgattacaattaatcagatattcctataaatcagaatgtacatcaaaatggccaatttggaacacttaaaaatggataacaatctcaaagaactttcaagctgaaatggtcatctcggaggaatgactttcttaaaatgatgcttccagctcagatggtgactcgcaggtgaggcagcctaactgttygtgctattttgtctgacagagaaagcartggctttagttttgtgtgctttcaattcacttgagtaaaaaaggcacacaaataaacacatgtttacctttgcmactaaatagaaatgattttccttttctgctttatagagtttagtaaaaataagttggggacttcacaactgcarctttcctcagctttmtagaacagctttatcttcttcaatgtcttttaataggtttacagcatcaaagctagcaatgtttaataaagccaataaataactgcattataaacttgaatgtttatgttgcaaaaaaggtaacaaattcacccttggtgggaggaaacattttacagtacatgcctgaaagaaaggagatgaaaagcaactatctcttaacagttttaag

SEQ ID NO: 20159 - DNA, 598 bp, Bovine  MMBT03325
  misc_feature (1)..(29): n is a, c, g, or t
nnnnnnnnnnnnnnnnnnnnnnnnnnnnnataaggtatctgggcattcttggcctccgttggctgcttcttggatgataatcctatatcgagactgttttattgtagcatttcctgaagtaaaggaaaaataaaataatagtgcccttttatgtggaggcaaagaaaagtccagggatagagagcaatttaataaagaaaaaaaagaaaaaagaagaacctatggaaagactacctgggaaatgagaataataagaaaagaccagagattaatactcaaccttacttctatgagaaagamacatcacacttactaactgtgatttcaaatctgtatgttctaatatgggaagattgtttcccactgataatatattttaattaatcagaatctatattatattttgcatatayttcagcataatctgaaaggcccytgaaatactctttgatctcaaagcaacagctcagggggttaacrttttactattagcaattytctccctcaggtggggtacttccttctttaggctactttttactatgcaaacacttattaaaattaatacattactmacatatttattaatgggaattag

SEQ ID NO: 20160 - DNA, 600 bp, Bovine  MMBT19030
aatagtgcccttttatgtggaggcaaagaaaagtccagggatagagagcaatttaataaagaaaaaaaagaaaaaagaagaacctatggaaagactacctgggaaatgagaataataagaaaagaccagagattaatactcaaccttacttctatgagaaagamacatcacacttactaactgtgatttcaaatctgtatgttctaatatgggaagattgtttcccactgataatatattttaattaatcagaatctatattatattttgcatatayttcagcataatctgaaaggcccytgaaatactctttgatctcaaagcaacagctcagggggttaacrttttactattagcaattytctccctcaggtggggtacttccttctttaggctactttttactatgcaaacacttattaaaattaatacattactmacatatttattaatgggaattagtttattagatttcttattcctcacaacctgaggtaatatgtgtacaattggaatttagagaagaggcagtaaaattacaacagaacaaacattatcttcctggttattttgctgacccacagaagtagtaataggcac

SEQ ID NO: 20161 - DNA, 600 bp, Bovine  MMBT06037
cttgtacttgattaaatattccttggtaccacccaaggatctgtaacttccctggtggtgaaaaacagtctttaaataaaaataatctcacatggcaaaaaaagttttctaataaagtttctctttaaaataggaaagaagacatggttatacaggtgctgtgaactgatcccagaaagaatttagagtttatctttttgaggtattggttsttagggaaaatattcaccygtaacaatgtggatagtattaacttactcagtgttatattatgtggcctcaggaacagtttcatacaayacagtcaagtacttattaagcattgtataagatctggtctcttacttttttttttttggtctctttttgatgtgaaaataaaattagaagattttagagcaagaaggattttgagatgatttggtgacgtctctgcattttgttggttgaggagacagacccagagagtgacctgccctgtgtggcgctagctaggagcagcaccaggacagaaacccttatctcctaatctttccacagccccgttctgcccatccttatactgagatttcagctgtctttgaaatttagattttctgc

SEQ ID NO: 20162 - DNA, 600 bp, Bovine  MMBT19602
tatattatttctaaagctaattatggaagagagagaatcaccgtttctagttttgtaatacattctttttgacacttctctgtcacagttgctaggaatggggagttcattcatcaaaccaagagtcctttgtccacagtgacctaagctttctgtgacttttggaagcttcaaagttagaagaaaaatgttgaaaaagcttagaaaaagaaagcagtaatgggaaaccttttcaaaataagacagttkggtaggttgacaactrgagtaatrgaagcaaagaatgtctctagagtgacrgaagaaaccataaagaaaggaaaagggagaaaacaaacatttaaatrtttgtactgggtgctttggtccttatcagtacattttctatgagatgtctcattcagcctcaggccacaacccagggagggaggggggggtcgcctgaagagtaggagaaggggagagccaaggcagggaggaagggaagatgaaccttatttttttttcagtttttgtgttttatttatttttttaattaatttattttaactggaggctaattactttacaatattgtggtgggttttgccctacattgac

SEQ ID NO: 20163 - DNA, 600 bp, Bovine  MMBT19601
tagttttgtaatacattctttttgacacttctctgtcacagttgctaggaatggggagttcattcatcaaaccaagagtcctttgtccacagtgacctaagctttctgtgacttttggaagcttcaaagttagaagaaaaatgttgaaaaagcttagaaaaagaaagcagtaatgggaaaccttttcaaaataagacagttkggtaggttgacaactrgagtaatrgaagcaaagaatgtctctagagtgacrgaagaaaccataaagaaaggaaaagggagaaaacaaacatttaaatrtttgtactgggtgctttggtccttatcagtacattttctatgagatgtctcattcagcctcaggccacaacccagggagggaggggggggtcgcctgaagagtaggagaaggggagagccaaggcagggaggaagggaagatgaaccttatttttttttcagtttttgtgttttatttatttttttaattaatttattttaactggaggctaattactttacaatattgtggtgggttttgccctacattgacatgaatcagccatgggtgtacacgtgttccccatcctgaaccccctc

SEQ ID NO: 20164 - DNA, 600 bp, Bovine  MMBT12112; identical to SEQ ID NO: 4590

SEQ ID NO: 20165 - DNA, 600 bp, Bovine  MMBT03477
ccctggagcttgtgacagcaaccagatggggggccttcgggccccttgtgccccttccaccccctcagcagggggaggaggacaggacagagagcaggactgagcacgtggagccgggagaggatgtcagattaggagcctgttagctgaacctctgtggctggcccggctgccctgcccacctctgctgcccttctacctctagagcttcttccagttaatcaaagrgatgcttctgaataaaagaaaaactactggggggaatattttgtttcattttgtgtcacctttaagatttgygtaaatgcgtatttctcttgtatgtgctaagctttgtgaattcatgtgagttgaaaacctttgcacatttgatttgaaggttgttgtgaggtttagtcacagctgtcataaactgacttaaagtgtctcccagttctcagaactcagccacatagctcattaaactcatcagtgttgtctctttaattcttactgtttcacatgaagtaaaacagccaccacctcaaagtggagatattttgttctttgacttttttaatacatgtctggacagaaattagcagcgagttcagtgtcctg

SEQ ID NO: 20166 - DNA, 600 bp, Bovine  MMBT12386
actaggagtttataaaatgtgagctgcgtattatagaaatactaaagaaaaccaaaatgttacttcttgcaagtcttacttgtataagtaactgtttaaacaactgaatatactgttaagtctatattctattctacatgcctttaaaaactagctttcatctgtttgaaaatagtttgaatcagtgattcaaggtcaaatctacatatctaatttcttatatttcttttcctgaaagcaaaattactttcaaatacacttctgtaggtccttatggaacatataaacttttctgccttyggtatattaataagaattctcaaaattttgttcttcccaaaatgttccccaaacaagagagctctttatgtttatgtacttaataaatatgcattacatatcatataaagtccacaggaaatagacgagacataaatccagatcctaaagaacttaacaaatatcagtaacacacacataaataaccatagtacaatgcaaagtttactaaccacaatgacaaagaaacagaaaaatcctttgggcgttcccaggaagaaaagattatttccagctggaaggtaaatctgagagccaact

SEQ ID NO: 20167 - DNA, 525 bp, Bovine  MMBT05024
gacatcagtcattcttggtccttaaacagtgagatggggaatcaaccaagggattggatgagctccagtttccatggcagggcaaaagttgaaagtgatctggttatagagatgccaaggaatggggactacttaaacaccatgtctgtagcagtgcattactggccatactttttttctaatccatgatggacagaagcatttgtaaaattgaacggaaatcaattactaaaaaaaaatggtcatgcatttaaatgtaatggcaatgtcaaaatgctctaaacttttccaaatacttakattcatctgctgtgcttaatcccgaggtagaaatcagtacaatgtcctgcattagttcatgaaccacaacttgagtagtattggtctataaaacatattagtctgaatcagtgataagtagataagaaagctcttttaaaaaaagtgaacaaaaaaacaaaacaaaatttttgattttgtagtgcttgccaatttttcataacaacctccatccatggctgattt

SEQ ID NO: 20168 - DNA, 600 bp, Bovine  MMBT08196
atgtttggggaaggctggagggagtggcaagaaatgaagctatgcaggtaggctgaggctagaaagaggccagatcttgaagggcttggaatgttaaaatgagaaattcccagcaccgagcacagtgcctgacagacagcaagtggtccagtgtatcaacggagagaagggatgacaagctcttaatgaatcacaggaagccactgaagaatactcatcagaaagaccacgatcaactctattgtcaaaaccattctttgagcacagccactctggaaaacagtttggcattttgtcctraagttgaaatattcacacatgctstaacccaggagtcccacaagagaagtgctcactgtagacaatgggaggcatgtgtaagaatggtcacagcagcacgagtcatcctaacaaaagcctaaaaaccaaccaaatggccaccatcagaagagaggatgaatgaactctagtatattcacacagtggaatattacatggaaatcaaaacaaagtacaatgacatgcaacaatacagatggattttgacaataagtcatttaatgaaggtattccccaaaggattatatacaaggtaagtac

SEQ ID NO: 20169 - DNA, 600 bp, Bovine  MMBT11721
caataatttgaatgaacatycatcatctcacatagctatggaatcaaagaaatggattttctttgtgtgtggtgaggactcaagatttactctcctaaaaacttttgtatttaatatagagcagtgttaattttacatattttgttgaagagaaagtcccaggtcatcacagttttaatatgcactttataactggaaatttaagtactgtttgacagtcttcattcatttcctcctccctttactccctgtctctggtaaccagaaatttgcttcatttttttctttgtttttgaagtrtaattggtctgtactatgttagttcctgttatacaacytastgagttttttttctgtgcattttgaaatgatcaccacaaaaggtctagggtgctcaagggaggaggtgagatcagtgtcttcctactccactatcttgatcacacttttgtaatcattccactcagaaagcatgttgtataccttttcagctagatcctctagcatttttatcctaggaattttcaagartcagtctgacatttcatcatctagactatctctggttctgctttcattgactctttccttattgttcac

SEQ ID NO: 20170 - DNA, 600 bp, Bovine  MMBT13834
gtggggtggagccagaagggggagaaacactaggttacacaccatcagtctacctgcaggtttactttccatgccaaacaagaaaatgctacgaatatgactcccagcaacggactccacagaacgccacgcctccggattgtcaacctggaagtgatcgcagcaaaacggttgagtgcttgttgactgaataaccactgtcagtccaaatccttcatttgacagggtgaggaaaatgagacccagagctggaaaaatttgtacaggacagctggaatgggatgttgagtatgaataggytttggagtcaaacgtgsrttggaattcaaatgaccttgagcaatcccctcaactccacttcctcctctgataataacagatgtaagtgacaacccaatagttgatgcagggaatatttgctacgygaagcaggcataatgctaagcattttgcattttagtagttttcttcatctgttaaaaggaaacaatrcctctttcttggctgttgcaaaaatgacatgatacaatgtatataaaacagccagcacaaagaacttggccaaaaaggtgctctagaaatctcagctcatttgctcca

SEQ ID NO: 20171 - DNA, 600 bp, Bovine  MMBT21995
gggggagaaacactaggttacacaccatcagtctacctgcaggtttactttccatgccaaacaagaaaatgctacgaatatgactcccagcaacggactccacagaacgccacgcctccggattgtcaacctggaagtgatcgcagcaaaacggttgagtgcttgttgactgaataaccactgtcagtccaaatccttcatttgacagggtgaggaaaatgagacccagagctggaaaaatttgtacaggacagctggaatgggatgttgagtatgaataggytttggagtcaaacgtgsrttggaattcaaatgaccttgagcaatcccctcaactccacttcctcctctgataataacagatgtaagtgacaacccaatagttgatgcagggaatatttgctacgygaagcaggcataatgctaagcattttgcattttagtagttttcttcatctgttaaaaggaaacaatrcctctttcttggctgttgcaaaaatgacatgatacaatgtatataaaacagccagcacaaagaacttggccaaaaaggtgctctagaaatctcagctcatttgctccaaggtcataaactccacc

SEQ ID NO: 20172 - DNA, 600 bp, Bovine  MMBT15261
accttcgaagcactgtaggtgcgatgagtttatttctgccatatttattggctcaccaaatatgttcttacaatctaggattctgagctgtggcaaagtctggagcataactgctctgtatccttggaaacaaatcattcaaatgaaaactcaagcataaaaaaaaggttagttacgtttagaataaagtaaacttatcagctaccacatatatcacctgaatgataaaattagtcctggaatggaactaataaactaacaaaatctactcatcttctccagtgtgcaatcattaaatayagaacaaacaaaacattatgcccaaatccctctaaacaatcatcctgatgaaatcagaaagttartatcatttctgcattgttcataaaactgccttaaaggtataaatgcacgaaacaagtggcaatgtaytctagacaggaggccaaacatacctcttccttatctgtaatacaactagtacacatgtaaatcaggatgttaagaataacaatcagagatcaaaattttgctagtgagtctataagtattaactaccttaaacatttccactttctcctcttacatataactaggatg

SEQ ID NO: 20173 - DNA, 600 bp, Bovine  MMBT04116
tctctaaacaaagatacatactttagatgaaaagtaattaaattctatgctgtgttgagtgatcaacttacccaggtggtgctagtggtaaagaacccgtggctaaccatatacagacttctttgtatatgggagagagggttaactttctatgattaaagttttaagatttcaagcaaagttcaactaaagagaaaagaaaaaatcagtcattgtttcagactatttatttttttaggcagcttgtgggatcttagttccctgaccaggcttcgaacgcgggccctcagcagtgaaagygtggagtcttaaccaccagggaatccctgaacaatttayggataatctctattgctttcttcatagtcaaagactttggcatagtcaataaagcagaaatagatgtttttctggaactctcatgcttttttgatgatccagcgaatgttaccaacttgatctctggttcctctgccttttctaaaaccagcttgaacatcaggaagttcacagttcacgtattgctgaagcctggcttggagaattttaagcattaactttactagcatataagatgagtgcaattgtgaagtagtctga

SEQ ID NO: 20174 - DNA, 600 bp, Bovine  MMBT17843
tagcatggtcttgcctccttctgctggatacagagttctctttaataatcagatttagcaaacccctaagcttcgccccttggttttctgtagccttcccactgtgccatccgcttcctggaagaagagcgtggtaagagcaagtgagtctggagcttccgagttctagaccgtacattgccaccttgcaattcaaccctccttctccaggcctcagggttgtttttttttttaagtttttgagccaatggcaacattcattgggtcccttacgacctgaacgtttaacgaggctgggcrattgcccccgcttgccaaggagcctggggtggaattaggagttttttagtacttttcactgggacaaaggagtgtgctgtccctgcccccacccgagggcagggtgtctgtaggagctgggtcttagatgaggaaatgcaagtgcgaaagctctgtcctgcagtgcgtgatggctttactgtgagaagtcacagggactccagggtcactccgctccagttatgcagcgggctttcggggagctcaccccatgggacggggcctcttcctccagctttccgctcaatcccaagacgctcc

SEQ ID NO: 20175 - DNA, 600 bp, Bovine  MMBT07590
ttattattttaccttgttttactattttcccatctttctgcatttctttcctttcttttttgcatttctccaattaaattttttctttgattgaagtttttctacagacaaaaggcagagagaagacatgagggtgcgatctgttctgggaagaccccataggatcctgcttggttaccatagcaattccagccaataacatgaggagaaaaagcactccacctaagctcatgtgatctgcagaattgtgagagatagtatttttaagctgtctgtgtgtgtgtggaggaggggtgtggwtggtacacagcaataggcaactgacacaagagaaccatatacttggaaatgcatcaaaaacgtctagattataggatttagcctatgatctcagatgttcccaatgcacatccttctaaaagtctacttgcctcctcccctgtccaaagaaccaccttcctctaaaaggacagccacaactcaggcatttagaaggacgcattgaatttctgtttggactgatctcatcrgtcctttggggagttttgctctcccatttcttacaacagcagagacaaagaaatattcttaaaagaaaca

SEQ ID NO: 20176 - DNA, 598 bp, Bovine  MMBT10313
  misc_feature (1)..(136): n is a, c, g, or t
nnnnnnnnnnnnnnnnnnnnnnnnnnnnnnnnnnnnnnnnnnnnnnnnnnnnnnnnnnnnnnnnnnnnnnnnnnnnnnnnnnnnnnnnnnnnnnnnnnnnnnnnnnnnnnnnnnnnnnnnnnnnnnnnnnnnnnnncagttgtaactactggcatcctgaccaatggagttaaaaatcagagtaggcaagaaagaggcagaggctgaactgctamaagggaggaagacacatgtctctttaggaggctgtgggcatctgaggccagtgctgaaacttggtttgaaagctgcccaagctcygaggcctttaggtagtgagattaacaagcttagctgtataaatcaaacctacattattagaaaagtttgacatttgctaaattacctatgaaaacttaccctggttgttaagaagaacccaaaaaaagtatattcatttccaagctaaatgtcaagctcccttaaagatctaacacctacagatgagggaaggggcaggggaggaaatgccatcaaattaagggcaataaactttccagacatcttcatctccataactgctcagagatgtctcctggcatttcttactgggtaattc

SEQ ID NO: 20177 - DNA, 604 bp, Bovine  MMBT08379
  misc_feature (1)..(4): n is a, c, g, or t
nnnnataataaaaagcatttgtaatcccattgctctgactcaaaaccaagaataattttttgacatccttctgcaacaaaaatgcctgtttttatatatgcttttgtgtttggaaatgtgaagtctactctgtctttgaaaaccagaaaaagcaatatttattctgtgccgcacctgatattttctttgcccagcaaatgttaccccaaattacatgatgtggtaatttataatgttacctgactaatgctttagctacctggtttaccttctatgaaatgtagattgaaaaataataggtttyctcacaaaggtgaaaatgtttctcttagacataaattagtttctatttacaaagctgctatatttattcagcatatctcaaaggaaaattgttttccaaaatgattgttatgagacacacatttcttcatcattccgtcagagtcctgtaatggatttgatgcagatttcttttagagaggcttatcttttggtcctaatatatagggacatgctgggaattgcatgtctgcaaatatcggggtcttggggaagggwcatgagaagagactagyatagccagaccaggcagtgcagttgt

SEQ ID NO: 20178 - DNA, 596 bp, Bovine  MMBT18831
  misc_feature (1)..(1): n is a, c, g, or t
natgaatttacctatcccctcccattttgcacacatgtaaatattctatacatgctagtcacaaacttgctttttttttttttttttttgcttaatataccttggaatatttattaaacttgtcacctggtatgtgctggacacccttacaggaagcattaagtgaaatacacaaatattctacttctaattttcatcaaagcattcttctagaaattgtcataaactaagacattaattggactgcatttctccatattaacagtactgtaactggaggattgcatctctgattaatgamcaacatcaaataaattatagccatgaccaaaatattaagtcaaagatagaaaagaaacttttatattagtattaaatagttgatatttccccaaatcataaattatacacatataaatacaaatttccaaatgattatataagcctcagtgcatgtaaacagcagtatatatgcttttaccataaattttatctatctaaaaatgtgctcatgacaaatacatttgatgatatttttcttgtcttcttagaatttttaaggggatatattggaggggcagatttgatgcccaaat

SEQ ID NO: 20179 - DNA, 600 bp, Bovine  MMBT02682
gtgcctttcaaagaagtcagcaaggctggcctccaggaaatattgcctttgatgtaacatctggttttcagggaatttctgtgtagtgcccaatcagagggcggactaaagggcagagaaaccaagtgacttgcccagagtcatgtaagtagttactgacttaacctggattacctgcagtttctatttgttgcttaaagtcctagcctgcttatttccattctgtaagttgtatagagactgtacacatagatatagtcattcccctcccttcatgaatagatgtgtgtggatctttaygactaattacagatttatttgcatctttctttttgatgtttcctccytgtaacttgagaagaaaggaaaatttcctgttatcctctgctttgttaaaaaaatgatttgaagtaacagtgagttgttattgattgcaaaatcttctttagaagtgaactgatctttttccttgcaaggaaaatggagagttaaattgtatggacaactcacttgatttgagggcaactggaaggcatcatcactggcatcatcaatgttcaacctttcccccttgtcttggcttctccattttyccctcct

SEQ ID NO: 20180 - DNA, 600 bp, Bovine  MMBT14001
tccggtttctggtagcgaagccagagcatgccagcaatggccagggccacgcagagccagttgaagaagctgaagaagttgatgacggagaagatatctttggagaaggcatagagcagggtcatgatgcactgcaagcagagggcaggccatgagcctcaggatgagccagggggagggatgaccgcacgcaccccttcttagcagaagaagtggtccgcaccacgcgagggccctcagagcaaagggacgtgctgatggcaggtggctgaggtcctgggcttcatggaggtggcagargccatgtctaccctggtcgagaggtttggcttcaagtgcctctatgctgattttagatttttttttttaacaactaccgtgtattaattctggagaaacaaaaaactgtcttatgctctctggcatccaggggcgcatgtgatgaagggtactacacttgtgataacctatctacatctcatctcagcctctgatccccagcctggctgacaccaggtggaaccagcaaaaggggtccccagacagggcatgcaccaccatctcaaagcccccgtgatccccaagggacacacctgtcct

SEQ ID NO: 20181 - DNA, 600 bp, Bovine  MMBT16797
gataccttccccagtgtgcgtggtttcggagccaggcgctggggttggcttctagtccatgcatcactgtatccccataatccataaagggcttattgaacctgcagaagagagtgcatacagttagcgggaggcagtttaacctaagatcacatactgaaaagtcaggagacacatagcaaggcagaacccagctggaatggaaagaacactggggcaggcacccaagttctagttcagacttttgacacctggtggtatttccctgatggcttgttttccttacctgtcaatcggggyggtgactacataacaagggtaataacacacatattgcataggtacaggtgttctcatatccatgattctattggatcctcacgacaattctctgaggcacrgttaggcayggattgtttatgtccaatttacagatgagccagctggataagcacaatggtctgactgagatcagctaatgagtcacggaagagcctccttaggtccctgccccaaatgcttttctgtttttctgggccttgttgaaggacattaagaagtgaaatcttattacctgggatgtttctgggatgtctctga

SEQ ID NO: 20182 - DNA, 600 bp, Bovine  MMBT13286
ctattttacacttcatatatgatcagtgtatttcacacgttcaattagaccccaataaaactgtgtctaaaaaaaggaaaatcaggttcctatttacaatagagagaactagttacagaacatacacaaataattgtatcactgaaaaagcagaaaaagttcaccagcaggacatttttatattatttgttgagaatcaattcagaggtagaagacattagtaatacatatgcattgtagaaaatgattttattttagcaaatatatgagaacttacccacttagccaaataaatgctgytttccccaaaacaagactgtgagaataaaaagtcttattctgacacgtggcccccgctcaacacaatttttggactgtctcctggatttgaaattgccttcagtccccacttatgaggaacataagaaaactacttttattgttttatgatcacacctggtaaatgaaatccgtattacatttcccactttaaagccaggatttataaaatatatctgaccaacaacccaattttgccagtataaacttctgccttttgacaactgccttcatgactatttttttttaaagccaaccact

SEQ ID NO: 20183 - DNA, 600 bp, Bovine  MMBT08320
cattgccagtcatcctttttctttttttaaagccttcctttgatgtagaccatttttaaagtcttcattgaatttgttacaatattgcttctgttttatgtwttttggctgccagcacatgagatcttagttccctgaccagggatcaaaccccatgccttagaaggtgaagtcttaaccactggaccaccagggaagtccctctgtcatccttaatatttattttttccagcttatttgaccttttatcttttgttgtttctttttactctacgcttctttggcacctcttgatctccyccttttgtaggtgcctccaactaagcagagtaacccttctctccctttgcttcttggcaggttcccttctaagcagtatgcgtacgtgcatgctaagttgcttcagtcatatccaactctttgtgaccccatggactgtagcccgccaaggctcctctgtccatgggattctccaggcaaaaatactggagtggactgccatttcctcctccaggggatcttcccgaccccgtgatcgaacctgtatctcctgcattgcaggcggattctttaccactgagctacctaggaagccctctc

SEQ ID NO: 20184 - DNA, 600 bp, Bovine  MMBT08338
tttcctttctccaggggatctttccarcccagggatcaaagccaggtctcccacatygcaggcagattctttaccaagcgagccacaaaggaagtccaagaatactggagtgggtagcctatctcagttgattcaagagggactgtatgwaaagtgctttactaaattayataaaggccaattgtttctatattaacatctcttttttggttgtgccataggctccagcctgaacttatggctaaagaaaatcagactttgcctgaattcctccttctgggattctccgacctcagggcmctgcaaggccccctrttctggggggtgttgctggtctacctggtgaccttgctgggtaactctctgatcatcctcctcacacaggccagccccaccctacacgctcccatgtacttctttctgcgccacctctccctggtggagctactctacaccaccgacattgtgcccaggacactggctgacctggccttccygcacccccgtgccatctccttctggggctgtgcagcccagatgtatgtcttcattgtcctgggcatttcagagtgctgcctgctcacagccatggcctatgac

SEQ ID NO: 20185 - DNA, 600 bp, Bovine  MMBT09998
tgatgaaaaactaaagcattaaataaaaatattgtttttagaaatacagagcaccatgaaaaatgatcttttgctaagtgaaaaaaaatgtattaaatgttaagtatacaatcattacagctttgtaaaatacagatgtagcaggaaaagaatataaagattcattcatacattagtggttagtgagttcactgatgacttcttttttcagagtaatttcagtaaagacttttattgtgtgctaacttgcttcagtcatgttcaactccttgcgaccctacrcattgtagcccacctggyttctctgtccatgggattttccaggcttaattcatataacaacaaactatggtttgtattctarttggcattatctgcttaacaaatttcacttgtatatcattcctctttgtcttctattttctgtcatcacacaaaggaaatatacacaagtatggatttataaagttaaaaaaaaaagtctctttttcccccmaaagttttcaacacagaggtatagagcaatgtttaccaatcaaattgtttatgcaaataactgcatctagattggcctgtaastawgtgcagtggaaacgatca

SEQ ID NO: 20186 - DNA, 600 bp, Bovine  MMBT16347
caaaattttattttgttgcagttttctttagaaaaaaaccttttgtcatgatgttataatgaattcagaggaaatagctgttttatagtacagagaaaaatgactccatctaaatattgccctttctaaattccaaattcacttgaaaagttatttgattccattttaaacagccactttttggtcattttaaagcttgattgaaaacaaagattaagtgaaaaaatagaatttacttaataaattatgtttaaaattattatttgcagtttcactattaaagacaataatgaggactgratactggcaaattttgaagtcacatgataaggttatcaccttcatagacttgcagctttaaaacaggcttccctagtaagtcagacagtaaagaatctgcttacaatgagggatacctgggtttgatccctgggttgggaaaatcccctggaagagggcgtgacaacctattccagtattcttgcctggagaatcccyatggacagaggagcctggagggctagagttcctgggatctcaaagtgtcagatgtgactcaccatagcacagcacaactttagaataaacatattaacaggc

SEQ ID NO: 20187 - DNA, 598 bp, Bovine  MMBT18628
  misc_feature (1)..(46): n is a, c, g, or t
nnnnnnnnnnnnnnnnnnnnnnnnnnnnnnnnnnnnnnnnnnnnnnacaggccttcaagaatttcaacagatttggggtctggaagaagaaatgggaggcacatgtccaggcagagacaatttacgcaaatgagttagctgctttgtaaaaagttggtaggaaatatagcaagcagttcagttttgcttgagaaccagcactccattatgtaaaggggcagtgcagggtaaggctggaaaagggacattcaactggacaaatgtcagattaagcagttttacctaatttgacaggaaacyactgataatttttaaaatagggtggagctgtgatctggccactgctttagggagatggttctggcaagaacaccaaatggaytgaagggaaagcaactaagcggaagaccaaataggaaactacagcaaaagtctagatgagaggtaaccagtagctgacygagggcagtggcaatggggacacagaggcaggggcggatggaaaagacactgggtaggaaaggtctataactctgtctaattcggtaccccccagccccatgtggctatctaaattgaatttatgtacactaaagtt

SEQ ID NO: 20188 - DNA, 598 bp, Bovine  MMBT10434
  misc_feature (1)..(10): n is a, c, g, or t
nnnnnnnnnntacaggaatgccctgcatgtacagatgttacaagttctctaaatgactgaggtgaaaattctatgaactgttttctctggagatggtgctctgaagtataatgtttttatttcatttttttgttctttgtagtatatggaatatggcatttatcataatttaaattttaggggataaaactaaaaaaaatttgaagaaattttacatgaggcaaaatggctatgactagaaatagatattaaatgcacatttataaatacataaaagcaaaatgcccatgtgcctcctcyactctgtctgtggagatagcatatattttcttaaaagctgcatgtttcttgaatctcaatccaaatcatatggcaagcrtgttggaaacaacaggcacgcatgtcaggggctaaggcaccaggcaaccctggcacactgtcaggccaactgctggactgctgcttggcatyrctacaaagctcccctgctggcagctcatgttccaggctcctggctgggctttgccatttgccctgcatcgtcgtgggcaggtaggcaggcaggaaggcacaagcggggatagttgagcaatgtggg

SEQ ID NO: 20189 - DNA, 602 bp, Bovine  MMBT12717; identical to SEQ ID NO: 4540
  misc_feature (1)..(2): n is a, c, g, or t

SEQ ID NO: 20190 - DNA, 600 bp, Bovine  MMBT04400
tgaaagccaggtatcagcagggtcactcactctgggtgaagcctttcctgcctcttcgtagcctgtgacagtgctgtcaactcctggtgccccttggcgcacagctgcatcactccagtctctgcccttgtcatcacaaggtgtttcctatgtgtccacattttcccctcgtcctgtaaggccattggtcaggctggactgggactgccctaatgacttcatcttacttgataacatctgcaaaggctccatcatcaaataaggtcacattcaagggcaccaggtattaggaccatgacytatcttttgrgggaacacaattcaagccgttacagatctcagtgacaaagcaagaagatacattttctttgcaaatgtgcttgtggcaggagaaaacttatcttggattttttcagatacatgtctgtatctgcatatttatcatataaataaagtcaatattctcctcaaatcttacaaatcttttttatattatcagttgtatctcatgtttcatttctggttctattgcttctatatatgttctttctttgatcaattgaactaatggctttgtgaattttttcaaaggcttaaata

SEQ ID NO: 20191 - DNA, 600 bp, Bovine  MMBT12866
tatgtttttttttccaaaccttcagtgaagtttctagaactatgcagtgaacaccccaacacacctaccgcccacattccacaactgttggcgttttaccatatttcttttctcacatatttgtccttctaaccacctaccaatccatatatgcatatatatattaatattattgatacatttcaaagtaatgctacagtccaattatttgatttctgatatttcacacaaaggctggcctcaaaataattcttcctctcactttcaactgacccactccctgcagaccccaggtcccaktgtgaaaccccagcctctaacaccactgcagacctgatgaatgcctctccttcagggcctttgtctggggctttgtctgaggcttttgttagccctttctaccctggatgaaatcaccattcaccctcaccctctcctcttcaaccatctaatgtttccatcctaagcctgtcaggctaccatgaaatgaatatttctaaagcccaactttacatttgatttcagccaagaagagtggtattttcacacagttctcagtataaatgatccctccagctgttcttaaggaaatgagcctgg

SEQ ID NO: 20192 - DNA, 600 bp, Bovine  MMBT18761
tctgggctgctgaaagcacatctctctgcttctttttgaaacatgcagccacggactctaagggaaaagaacttccaaacacctctgtaaaacacacagagggactctgtagcagtcaggtaacctgagcagaatctgggcwtttaaatgaagtggggcagtttctcacaagtttggcagatagacaaagccctggttccgagagagygtggcctgtagcagagaacaggaagcgatggtccaggatccgagagaggggtccttcctgcaggcatgggatgagcctctastatytgatcrgacactgacaatgaaaggtaacactttctatgcacactagaactttacaggttatatgtgatctatgggcttcccatgtggttcagtggtgaagaatccacctgccaatgcaggagtttcgggtttgatccctgggttgggaagattccctggagaaggaaatggcaacccacttcggtattcttgcttggagagtcccatgggcagaggaacctggcaggctgcagtccacggggttgcaaagaggcagacacgactgagcgactgaacaaagtcatctatgctttacacctcacacac

SEQ ID NO: 20193 - DNA, 600 bp, Bovine  MMBT22451
ctgaagcaacttagcttcttaaaaaaagaaagggaaagctttttttttwatggatrcatgccagttaatgaatgtggagggaatgatagagtcagaaatttacattttacagcttccaacctaaccactgatttaggcgaggataatcgataaaagctaagatcacagccaaatgatgaggttcaggaaggaatctcagccctacactgatcctcaagcccccaaatcaggatcccacacttcactgaagcccagacaaaggagaggaccacagttaagacaggttccagataggcttaktaggttatttaaataaaatcaggtgaccgtttctgcaggtaaaaggccaggagaattaccaggggaggaatttccctttcctcacatctgcctcactgtagccattcccctggggatgccaggtctgggcagtgatcagaaccaggacagcacctgccagtggygatgtctgcagtcatcccagcccccaaagcctacctgcagagtcctggmtacggaacacgtggctctcctccggtggctatcctctgggcacggaagaggggrttctctgctgccaggcctcttggagccgagata

SEQ ID NO: 20194 - DNA, 600 bp, Bovine  MMBT22455
acagccaaatgatgaggttcaggaaggaatctcagccctacactgatcctcaagcccccaaatcaggatcccacacttcactgaagcccagacaaaggagaggaccacagttaagacaggttccagataggcttaktaggttatttaaataaaatcaggtgaccgtttctgcaggtaaaaggccaggagaattaccaggggaggaatttccctttcctcacatctgcctcactgtagccattcccctggggatgccaggtctgggcagtgatcagaaccaggacagcacctgccagtggygatgtctgcagtcatcccagcccccaaagcctacctgcagagtcctggmtacggaacacgtggctctcctccggtggctatcctctgggcacggaagaggggrttctctgctgccaggcctcttggagccgagatagaagggacagcaacagagagtccagcacagccagcccctcccaggaacaccgaagacccctggaacaagaggcctggctgtgactgccccttcttactagtttcaatcctcaccctctgccaatgccaaggccctggcgccagaggcccttccttgtcaatctt

SEQ ID NO: 20195 - DNA, 600 bp, Bovine  MMBT11854
gattctgttttacatctcccccaattcccaactgaatgtcttttatccatcaccagtggtttagtcattaattcatgcattacatatttgcagcagaagccaaatatgttcagttacaatggattcacaaggatctgttcagactgtgattatctgtggggagwatctgaaacatctcaaaagaagtctaggactttggtggtagggtatctgaaagccaacgcccatgcaatctgtattatataatcctatacaatgttaggcaaaccaagaattatattctccatgttttggagatgrtaaaactgaatccaacgaggtaaagtgattggtgcaaagtttagggcctgcacagagactggaatctgagattctgactcctggcccctctgcttcccatacatcctgtgctcctctccccagagaatcaacagctcttggagaggaattttgattccttgagaaagggcaagcttgtggaagtgctggactggaaatgacaggatctctggaagagcctttagagaaaactaggaagaagctctcattttattcataatctagttatcccctggatgcttactcagcctccagagactt

SEQ ID NO: 20196 - DNA, 600 bp, Bovine  MMBT10616
agtttaaaaaatagggtgggaaatcccgtgacatcaaagtgaagctaagcgttcctaaatggaactcatcatacaattttcgtatttgagtgtcagaaggaaaagctataatctgctttatcattctttttatgtcatgcaaagcaaacactttttctaaatgatgctcaacacggactttaaaagttttttctttttttttttttcacatcattcaaactggtagaagctttctttaatgcccaggccaaatcaaaaatgacttaatggccagaccaaattggtcgttcaatttcaagrtctaccaaaacaaattgactgtgtctttttatccagatcgtcagatagagacctattaggatggccgatccacttcttaaaaaaaaaaaaaaacttaatttcagctttgtgtgagctctaacttacccagaagcagattcaactgcctttatccgcaggttttctttcttttttttttttttttttgcaggttttcttaaataaacccacagtacagcctttcacgaccatgcttccatggactgtatatggatttatttgggaattaagcacttgactcttttagcccatggtttaccc

SEQ ID NO: 20197 - DNA, 601 bp, Bovine  MMBT02629
  misc_feature (1)..(1): n is a, c, g, or t
nacctccggcctccaggagcccctggaaggtgtttgctaggtgctggcccgttcacatttgcactttgccgtatctctaggctgtagggagaagactagttgcctctctggctctggaatccctatggggcacaagcctgaaaactgcttgcctcctcagtagctttaaatcacggcagtacaagacagataccaccacatctcttttgatttcacagatttggaattagggctcctcttaaaaaaaaattgcatttagaatagtgcgatcaacatgtaaatttattcaaaacatggaagygcgtgtttggattttcttgaaagttatttggggctggctgatcttttcccgcccagcgcaggcctccctgggccagccctgctgtcttgtgggggtcccgagcccttttcatcgaatctggccagctggacagccccagccctgcacactctggggcctctgccgtggagagtgtatttcccacaattgggtctccatccgtgcagaggagaaagaggccctcacaggactgacaggtaggcttctggttggggaggcccaaggcagtgggagccccaagcccagtgggcccagagggct

SEQ ID NO: 20198 - DNA, 600 bp, Bovine  MMBT02678
tcaaatcctgtgaccagcacatgaagctataaaacactgttctgctgatgcagtaattgtctgacatggctacctggttccaactcctgcttagtatgcaaatctgctccaagaatgcatttgacaatcacttttctgtccgcagaaactgccccttgacagaaaatgtattcctaaaatgactttttttttttttgcctttaaaactaaagcttgcaagtccagtggtagctgagagcaacaacatatgcttataattatgattaccatcagggaattcaaccgtacagagggaagggraagaggcccggcaagggggagcacaaaagctctgaaatacggcagaggaagcacacccagccaggttggctattctgggtaacgggagaaacttgattgtagaaaccaacacyggtttccctccagactcgaaagaaatgttgcgtgggcagaatgagaaatgctgacagacaaaatcaagccttagggatttgcctttcatggtgggctaaaggagcctgcataaaaaggcagccttgtcctgtacctgcccgcagcatggacctttatacccggtggccactcactccagccctgtac

SEQ ID NO: 20199 - DNA, 600 bp, Bovine  MMBT00596
ttttaaaggggcttttctgaaaagtaaaatgtaaatataggacatgtgggaagggtggggccttctgcagatgtcctgcaggtggacaaatagccttttaaattttactttttaaccatcttaaccgtgtgtgcctatttgtactgcagatgtgaaatatttgggggggttaatatcagtatgttttgaaactgaattattacataaaatcagagtaacctctttctccatcctccttttccacactgactattcttgccaaatatttctactgaaaccaattttcagcatggtaaaackatggacactcaaacctccttcttcatcttccctatcctgtcttacacccggtctggccttatatttttttgttggcttttcataagtaagaacaatttactgtagtttagagactgcagaatttcaaaatgtttatctataagccttcctttgttaatgttcggttacacagtcatattagttaaaacagtggagtcagtggagtgagtctgagttcttaatatgctgtaagataaaatcttgactgatactaaacttgacggctgcatactattaagaggaaattggattacatggtgg

SEQ ID NO: 20200 - DNA, 600 bp, Bovine  MMBT05893
aacctagctaacctaggaaaataagtttttattcattcagttaatacacatgtatactctagattctaaatccaaactctctttaggattttctctatcatttgataacaaaytacagctatggtaaaaacagtattatgctactaccagctttactgaaaagctagtcctaatctaaaaatatttctctctttatccctttcttctttaattttctatttcctccctttccctccttgccctaacaacaacaacaacaaaacagctaagactccttagtatgatggttccacagacaamatgtagacctcagagttgctaggtgtctgtaaagggctcaagtcctttgagaaacaaagaccaatatagtcagactttctgctgactgtactaggatcagacccaggaggctttggggatttttcataactggaggtttgtacactttttcactgccttcatccaattcccccttcctatacccacccgcccccaactctccacctctgataaccacaattctgatctttttttttttttatgcatttgttcatttgattgtgtttgaagcataactgacctaaaacacggtgttagttt

SEQ ID NO: 20201 - DNA, 600 bp, Bovine  MMBT08168
cctccatttgcatgtgaagtcaaaagcttccgttttactcccagagtccagcgcctgaatgagcttgaggtgagtgatttcttcatgtcaggacttcaggtggagacctttgagaaactcatgaactgaggctcagagttaatgtgaatcgtgactgaatggaaggaagcttctgatttttaaaaaagttgtttataacagttaaagttttttctacttaactgggattatggggaactatctgctttcttcggtgcttattattctgctaaacttttttgttgttgttagtgttggaarattctctatcctgtagtcttttgggaaatatttttaaaaaytattctattaaaacctagtttcagaggggttttttycccccctctgacagaacttttctaggactcgattgatttattgagatctttctttaaatactcctgatctgtcttaactttccagtttgaaatttgtttaaatagttgttccyttcgcttgctagattttcaaaggatgcttcaatgtggataaaaactgttctagaatacaaaagagagatcttaaagatcgttaaggcttaatgtgttatgctgtttgttt

SEQ ID NO: 20202 - DNA, 600 bp, Bovine  MMBT19989
atgtaattttaaaacatagcatatccaactatgggttataaggaaataaggatgtggcaaattctaaagtaactttagaaagtctctgctttgagttagttagggattattttgttagtaatggaataaaaaagagtgttgacagtataaataactgtgacatttatttaaaaaaaaaaatgtttcttgaacaggcagaagtatcagagattcctctrtaaattttgtatatttgaaaaatatcacattcaataaaaagtttctgtaagtacactttcacaaacaaattctgtgaaataytggtcttgttctacagtaatgtgtataaactccaagtaaaacctgattaccagttgagtatctttgtttatgataatataactatgtgcaactttgattagcaaagaagaaaagtcaagttcttaacttctggaatgagttttcttcaccaggtaaaatgctttaaatgaaaacaataaaataggtattaatatgctatgaaaattagaatataaaatgtatattatagtagtaaaaacttctagctttctattttttatgtcacatggaacgattacgtatttttatgtgcaaacgact

SEQ ID NO: 20203 - DNA, 600 bp, Bovine  MMBT04176
atggcgttaataaatcaccttcattgcatttatccaggtcgagagaacaaaagagatggtgaaaaacaggagagataaaaactgggggaaattttcattcaaagactgtcatttctagattggattgtgaaaaagaaaatatttcatggtagaaaaaaaaaatatatatatatatatataaacagcagagtgcctaatatgggtctgcaggaatgatgctggctgctggagatacagagccaatamgcttggtcctgagtctctcagtcttgaggaagaaaaaacaggcaaattgcaackgtaacattgtataaatattataatacctaaagcacagatggctgtgttttggttgttttgtttctttttcttgaatctgyattggctagcsagagaaatctccttggagaataccaagaaaaatacaaccataattaggagcagaagcccaaattctggaaataggaagcagaagagaatatacattctttcgcctgctctgtgttggtacagatctggcaggtgtgaatttgcatataagtaaccacttcaggtagacacaggtcagcacctgcattcacaaacacaggtggttgggca

SEQ ID NO: 20204 - DNA, 600 bp, Bovine  MMBT03173
cctaagggggctaactcactacttctcactcctctttgtagagaagttatccaaaatccttagtagatattcaaagccttccatgactgttcccttcctacagttccagcctttccttctatctctctccctaatgtcaaaggtgtagctaagctgggcaactgagcatttcctgaacatgcccactgctttctcatcctgtgcttttgtgtatgcagcgttctcccccatcagggatgccagcttctcacattccacctgttgaaattcaacctatccctcaaaatccaattcaaattygagtttatctattaatacaaagtcctacctggctctacatccccaaatcttccctactgtaatgaatttctctttccccttggcaatatcaatatacagaattatcagattttgcctaatttaattaccagaaagtatttctctcattcaaaaaatacaatttaagggactttaactttttctctatgtttatcttcgttcctagaaagtcatcttgtctagaatacttagcagatttatgtgataaacttctggttggtaggacccaacctccagattgcatgaatatttaatgagaag

SEQ ID NO: 20205 - DNA, 600 bp, Bovine  MMBT07878
tttttagatataaggaaagttttagaatatagaaagcacaggtattctgacttaatttctcatgcaaaatattttcctaatcctacttgtatttttactgcactttttggatcaattttaatttgcatgactgttgaaataaattagatgagaaaagaaaatcggcatacatttcctataaaagtcagaaaatttgcatcagtttgaaattcttgcatgtctatcctaggagaaaagtatcattartaatctcatttagcaagtgaagaaataggtttggaaaagatgaagcctttgctsaagttcatgtaactttaagtggcaggaccagggcgctaaccagtgcagccttaatctatcaactgctctgtgttttttccattaaccaggtgaagtgatggcaatttgcaagtaacatcttgcctatgctttcctcaatacacatttacacccacagaccactgccctgtctcttaggcactgtgtgtgtgagtgagcacgtgcrtgtgttttcatatattcagtacaagaattgtaatatttagttcttattcaaaccagtttgtttgataaaagttctagggtgaaaatgttaaaaac

SEQ ID NO: 20206 - DNA, 600 bp, Bovine  MMBT12370
tatgatattattgcttctacaccaacggactcctactattactatatgattgcttcctttaaatctgactaaactggagtggtgaaagttggagtgactttattggcttctgagaacatgtatgcattcaatgaagtcagaaacaatttcatccatgtgtgccccgatggctttgtaaatagggtttcagaatcataattcaaagtatcaataaaggaattgcttagttatccagaaaggtttactctataaggcacataggtatccttgctgaatgaaaacttgacccaaagtggagtyaacagggaargctgtgggtcagactgyttggattcaaatcccagttctgtcactcacccgccaggaaacttggctgggacatttctctgtgcttcgatctgtcctgtgccacctgagggttttaatggtgtctgggacttggcggtttttaacacatactggtgcttagaacagtgccgggcacctggtggtgacttaataaatgccaatgacgatgattaatatttcccmaaaatgttagtgcttttgaaattgtacccattaaatattacttggcgttttccttcagactctgggtca

SEQ ID NO: 20207 - DNA, 598 bp, Bovine  MMBT14223
  misc_feature (1)..(38): n is a, c, g, or t
nnnnnnnnnnnnnnnnnnnnnnnnnnnnnnnnnnnnnnatggaagcttgataaaaagatgagatttgaagtactcaacctgttaggaataagtagttttattgttgatttaagctggtagattgaaatatctcagaatgctaaagaggcagagcagcaggtttcaggtgattaaagaaaatccctcatcttggaggaacttgaagggacatgatgctatttaagtagaatctaatcagaaagaagaaaagcttgaaagtaaaaagacggaatgtttcatgtcgttatttgcaaagcaacygaacaaaaggtgagcaagataattaagtgccttgstgctgagtagaatttttcaaagtgggttgattagaggtctttcttaaaaaaaaaaaawttaaacatctaagtctaggaaatctagttgaaacagctaactcagttataaaggtggagaccagtttgggagaaaatcgacagtattgtgtgtatggtggcakatgttcacaatgatgagtttaattgtcagcaaaatcctgatcagttctgaatarttttagcattaatgatattttcctgtgttttaggtttttgaaaaatgg

SEQ ID NO: 20208 - DNA, 600 bp, Bovine  MMBT05935
gaacactgcagtgggttgccatttcattctccaatgcatgaaagtgaaaagtgaaagtgaagtcgctcagtcgtgtccgacttttagcgaccccatggactgcagcctaccaggctcctccgtccatgggattttccaggcaagagtactggagtggggtgccattgccttctccaaaatgctgttggcaagggtataaaaagaaataggcagtcacatgcattgttggtaggagcataaattggtaacactccaaggaagtataataatgcaatgacagccatcaaaactacaagggcrcattccctctgatccaacaattccacttctgggacttcctcctacagcaatacttgcttacatgcaaaataatgcatrttcagacccttagctataaygctgtcatagcaaaagtttgtaaagaatcttattctgtcagtaggagacaggttaatgtgtgacatccatacagtgggactcagctgatcacaagaaagtgatcgccaaagtgcgctaagaagaaaaatagcccagacagtagtccacaatttgcagagaatattttgtatttgttgaaatatgcactatctggaaagatac

SEQ ID NO: 20209 - DNA, 600 bp, Bovine  MMBT12520
acataaaattataaacttgcactgacaaccagcaaaaaaaaagcagacatggcataaaatatttaaacataaaaccaatgaagcaaaatattgcagggcaagatatagtctcccaccccaactccaagcagcttagcctttctttgctgatttcttttttctctgtttctctttttggcacacaataaacactaaaaattaattcagaaactattgtgcatctttgaactcaaatttatttggcttctgtgtgctaatatgaagtttcacctataaaatgagaagtcagagttaataaasagctattgaactgtgcccaatgmgagagacaaagctgaggctgatggttcttattacttgccactaacaccagggttgatctgaatgtctatgacagagcctttgagtgtggggaaatagtaatgtgttattcaggtacagatccagtctttttaatccagacttctgagagacagtctttatgaaagaccccactaaaaacagagtggaatcctcttcattttatgcctaacaagcacatacaagaacacacaggcatccattttacaccccacttttaagaccagggctttcctggtg

SEQ ID NO: 20210 - DNA, 600 bp, Bovine  MMBT15475
ttaatataatttagcaaagccatgaattacatgtattccttatctcactcaaaaacatgtattaagtgtctagttttccaggcatttttgttggagctgggaatacagagagacacccaaaactttcctactgtatcaaagcctacattacagtgggacaacagtcaaaattttaagtgcatacaggaaatattttaggtggagataagcgctatgaagaagagtagagtgcggaaaagtgagtgagtttgcaggcaggaaggaagatgagggacttttagctagggtggggcgaggatrctccggggaggtgatattggtgcagggaatggaacagaataagggagggagccaggcaagacctaggagaaccttctagacaatgggaacagcatgtgaaaaggtcttgaggcaggaatgaattaggtgtgttcaaaaaagaacaaaagaccagggtggctggagtgagctagggggtgaatacaaggagatgaggtcagagaggccgaggccaggacatggagtatagagtgacaaaaataacatggtgatgcccagcctgagaacaggagtactgcagattaggaaagcttctgaaca

SEQ ID NO: 20211 - DNA, 600 bp, Bovine  MMBT09028
cgatatgctcgaaatgtcctctatagacttcaaagcccagctcaaatagtagatgctcaacatttgtcccaggagaagcatcagtaagttgggcaggtggccaggataaggagccagggttggctcctcttcctgagccattgccatcaagtcctcacaccccgccacccagctcctcatctccaggagtaccaggaagggaaatggtacaagtgcctggaaagggagagactttcttctgcgtgctgagcacaaaagcgggactttggggatacaccgtggcggaggtttagcctctcmcattccayggtttaatgtataactggtcacctttcctgaatgtccgtttcttttatttgccagtaacacgttcaccttgttcrgtctccttggttacaatgcacagttccagatcccctgcagatactttaccagcctggccacctaggcgtcattttgattgacagggactttgacaccttgtctccagccccaggagcctgatcaaggctagatttccaaatcccccagatacgcccccccaaaccaccctcacccaggggccagcttctaagagccttggatattctttgagggtaa

SEQ ID NO: 20212 - DNA, 600 bp, Bovine  MMBT14070
ccggcagatggccttgccaaagggccagtggaccagagccacctgcatggccaggaagggcagacccagcatgaagagttcatctgcgatggccaggttgaggatgtagatgttggtgatggtcttcatcttggcatagcggaggatgacgtaaatgaccagtgtgttgccacacaacccaatgatgcagaccacgaagtagatgaaggtgaggacgacgttgctggccaggtcgtagtacggctctgtctggtttgaaatgttggctgcccccacggagccattgaggtcgaacggagyggtcagccaaggttgggtctcrttgagttcagacaccagatccatggctgccttctagtcttaggctagatccaacccgccagaggtcttattctcagcttcatgggtcccagaggcaaaggatccactgtgacatctgcaaggaagaaaagaagattgacttatctgccagaggttacttaagctgtcaccagcttcccgtgtttcggtttgctctctcagacgctcttcagttgaaaagtgtgttgtctttcacaccagtgtgagcactaccagctcattctcacacgcaggccattg

SEQ ID NO: 20213 - DNA, 600 bp, Bovine  MMBT10226
tctgcccccagttttagtgctaacccccactttccctgcaggccagttctatgtcatgatgacgccccaggacgtgcttcagacaggaacgcagaggacaattgcacctcggacacacccctactccccgtatgtgcaggagacctggtcccaggaataggggacgctgggagggcctgtcgtgggcacccaaaaagaggaggttttcccgggatgggaaccaggcagttgaatacacagcaggcagttggtgtattttttggtcagcttttgcttttctagtttaagtaaagaaaatamcattttctccctctctttgtctctgcatatcgatttgtcttgcagagatcatttttaagtctgactccttaataaatgtttggacacacaggctggaggtaacatgtacccatttttttccatactcttctaggaaaatcgacgggacgagaacgccacgggatgagagaaggagagctcagcataatgaaggtaaggtcaggcaggagctgctaggcctcatgggctcaaccccagctgggtgtttggagtcacagatcagtggccgggttattgatccaagtactcgagaggtgttgg

SEQ ID NO: 20214 - DNA, 600 bp, Bovine  MMBT23097
ggctgtcccagctcaagtggatgtgcagaaatatgctacagggaagaagcctgtcagataygaggagtcacaaccaacccagraggtactaggtgattctgcagttggatgtgaggctgcctaccaatcccaggcaacaaggttgaccgtcaggcagccaactgataattcacttgccactggaaatgggtctgagaatgaagccacaagggagagagagccgtgtctgccccagccctccacagatgaccagttcaagagtttcctgcccaggccacagrctgatgctgggagagtggkcagtcgatccgagcaactggtccagaagagcgcccagtgtccagtgcagatgtcacccagctccagtggctcagcccatctcaggcagccttctccagggacacrgtcagcacagcctagggctgcatccatccggtcctcagtgccagaccggggagccagacctccacccccactcaagagacgtccctggagcctagagaagagctcctgcagtgacagctttacctcacagcaggcgggcagctctcaggcccatccatctgctggccctgctcctcagccacccagtctttccca

SEQ ID NO: 20215 - DNA, 600 bp, Bovine  MMBT10469
tccatgataactttccttcttctgaagtatgctttatttggaatcaatacagtactttagttttcttttgattattgttagcacaatgtccattgctccatcctttttaaccaattggagattttaattttaaagttgacttccatcagacaacataaattgagtcttgcttttatacccattctgacaatctttgaatttaaattkgtgctctgaccatccacgttgagagttattcttaatacagttggattaatatctaacatgtttgtaactttgttctattcattgaatttattstttttccccyttttctgccttatctgctactaaatgaacatccaatatgattcccttttacttcacatcttagcacataaattagttttttttaatgttgcatttgccttagattttccaatatacattttctttaactgccctgtctgatagtctttatatatatataaagcagcaacaaccacaaagaattatatataattttttttwatgtatttacttctggctgtgatggttctttgtggttgttgctgcttgggcttttctctggtttcggtgatcgggggctactcatggggc

SEQ ID NO: 20216 - DNA, 600 bp, Bovine  MMBT09297
tgggtgaatggcgtcccattttgaccccttaactaagatccactgagtactcacttacacttggaaggacttggaagtctcgaaggcagggaagccgtgtccctccacccaggtgacaggagatgtctcctctgttgcaggactgacagctcctttagcttcatggcattcttcttcaccttcatggcccagctggtcattagcatcatccaggccgtgggcatcccaggctggggtgtctggtaagagaccagggtgtctgggactgacccagggctagctgggcggcaactggggtgkgtcctttgcttacttctgtgggctaagctgcctggcctgtgggaacaccatgagttattggaagtgtgaagggattcaggataacttagtagatacagcatagcatcagaggagaataaggcagtggtttttaggggtgatgagggatatcaagcatcatgagataacccaagagaaggaagccttatgctctgagaagcttgtttcctgagccaagggttcttcctaaagcactgacacaggccctgtccatccattgatatggtctctctctgtggcaatgagaaggtcccttactct

SEQ ID NO: 20217 - DNA, 600 bp, Bovine  MMBT07960
cagctagtttgacctcagtttcacaggcaggagagctggcccaggagccccctgaagcgggtgttccaccatggcctaagtgcaagcacctgagggcggtgggcacatgtatgcacatgagacaggacacgaggctggggcttgccattacacataaagactgaattcctagttgtagcttttactatgaatgggagatttttctccttgcttctgtcattaagaataaaaaaaaactgtgatctatcataaaataaactcctaaatctgtcaaacaacaagccattctagagatcaaakatttttctaagactcacagaatgttcctatgattcaaggaatagggaaaaatcagaccaccatcaggaataaagcaaatgaaatragtatttaactcaatatatgggctctcagtctattcaccaattcctacccactggacatttgcaggtgaagaaactttgaagttaatccaaaagcctgccttttccattttggttccaagttggactacaagtttcagcaaggaaggtgatagggcaaaatttaagaagactgagactctctgtgccatcctaaaccctccctttttagtttctc

SEQ ID NO: 20218 - DNA, 600 bp, Bovine  MMBT06961
tcaccattgttaggataattgaaacttgcttcactaaagaaagtttagttaaacctctttacaacattaatgttaggtacatggagatcacttgtctaataatttaacttgacatcatatatcagaattgtattatatttgaagaacaaaattgaagtttttttatttggtgaatttaatgtctttccagagttctaaaamgataggttttttgttttttttttaatttaaattgataaagactataatttagcagaaatagggccataaagtagaaaaatagtcatatagctacagtcrtaccatacttcagcttccatgtaggaatagaagtggtaggtccagttttgttagtggaagaaaagggatttatggaaaagttatgagatgtttcaatattgagtccaccaaacactttgcacaatgttatacttcatttgtcagtgaatatttgttaaaatgtatgtctggttatcatgattgcgacagcctcaaggtagaacacactgcagtccctagctgaacagaagttagcctaataattcatgacagaaaattgattaaatgccttatccttttaattaaggctgcagaactgtt

SEQ ID NO: 20219 - DNA, 600 bp, Bovine  MMBT04565
cggggaccggaaacgcagccagatggttctgctgagggaggcacttttctttataaaaccaaaaaggcagtaataggtcaaacacaaaaatgcagatacggtaaaaccgaaagctagtgtggagactgatgtcaataagacaagcacagctctctgcggtgttcccatcgacagcagtcagtggaggcagggagacaaaggaaggaaaagcaaccccgtcggtccagaccagagactggagtggttcagtggggccaccaaggcctggaaaccaatcacacgtgagggtgttagactggrcacttacgaaggatcacaaaaacagcagaaacggacccacgtcccaagtctgctcatgggttgctggcctgtccatctcacccctgtcaggaccccaagaagccctcctgggaaggcactggacacgggtctgggggcagggggcacggcggggacggcagggtgctgggccgagagcttggagccgcccaggctggtcagaaccaggcctccagcgagcaggcacgcggcccaggcaggccctccggggagagtcttgggaggggaagacctgcccccacgagccccagcagagcagag

SEQ ID NO: 20220 - DNA, 600 bp, Bovine  MMBT04436
gtgtgcatgcttggttgtgtccaactccttgcgaccccatggactgtrgctcaccaggcycctctgttcatgggatttcccacggaggattactggagtgggttgctgattcctcctccagaggatcttcccaactcagggattgaacctgcttcttctgcatctcctgcattgacaggaggattctttaccattgggcaggtagaataagtattgatatataaatatgcagagctggatttgagatctgtcagtaggtctgtggaaactctgtgtatctcacaattgtcatctgtgagytaaagggaytgtcctagatgactttgtaggtccattctatccttaacatttaatatgtgtccccagtgggtaaatgtgtgtgaaaaacatttcacgcctcttggactttttggtgagtttaaaagcaatccatccatttactagttatagaagtcaatctgtagaaaactagtagaaattttatacactgtcatttctttaatgtccttctagttatttcatctgtattttcttctctgtggggtcagtgctgtatagtatggtaaaataaatctatcttctgattgatagtatgaaaat

SEQ ID NO: 20221 - DNA, 600 bp, Bovine  MMBT11557
catccaccaccatgatgagatgagaaaggttgatctttaaaattattttcaccatcaaatgatttttgctttatattccccaaagagtgaagtagaatggtgacatgttgtacacagaagctttataaaacatatcttagatgaggtcttcattttaagcctccccactggtactatctgctgttatattaggattctgaatttcaccgtaaacaataggctaatctaagtaagaatttctgagtctccatctgtaaattcagatttggcaaaggagaaatctactagagatcctgggtrgtatgggacaaaggattaggggagagaggcagaagcaaggattcagggcctgtaatccaactattctgggggcttccctggtggtccagtggttaagattccaagctcccaatgcagggggcctggattcaatcccagtttgcatgctgcaacaaaagatctcacacatagtaactaagatcctacgtactgcaactaagccccggcaaagccaaataaatgtttttaaaaatgaactactccgaaatcactaatttttaccacctgtgctttccagtgaactgcctatgagtattttca

SEQ ID NO: 20222 - DNA, 600 bp, Bovine  MMBT20034
gawatgggggaaaatccttcygtgctatccaaaaaaacaaacccaaacatattttggtgagctgctaaatgtggcgacgctgatgtcagaagcacccctgaggcaggtctgctttgcaaggctgccacagaccccgctcacgccttccacactgggcccatctgcttgcacatttggttgtaccaaatgcagtttacaccataaagcatacaatatgtgcayagttcttaaatgagatttgtcatttcactgaatttcggtcagcattttaaatagatacatttctttgtgctctagtckaacttacaaactgcacccggctgactgcagtgctgtgttttggtctcagtttttgtgtgtgtgggaactgggagttaccagttggaccatggatcctggacaaatcaacctcacagacagacatgagccaaagaagttgcccttgttctccctgaggaagtcstttgtgagagctgggaggagtggattccttttctctgagactgccgatgaaacccttggcttgtaccacagccatcatattctgacaagctcgcgtcactgaagggctatgggtgaacagagttgttgtgaacccaa

SEQ ID NO: 20223 - DNA, 600 bp, Bovine  MMBT08805
aaaatttctaataagttttgctttaattctgtagttgtcattttttgacactgcttttcaaggcaaatagagtctagtgcctgattccaactttataacaatattcctttcagtctgtacactgtgaactctcagttttagactctttgtgattaggagatgctggccttcatgtggggggatctgcaatgacccaaaggttcctctcgttagaacggactctgtgccaacgagtttgtgatttgtaaaatcgattcagtctcaatattggtactaagtgacagtgagatcctaacagtwtggtgtgttctatcgtgttccatcatgactctgtgtgactccatgaactgtaccccactaggctcctccatctatgggattgtccaggaaagaatactggagcaggtggccatttcttagtccagaggatcttcccaaaccagagctgaaatctgcatcttctgcattggtaaggaagactttttaccactgtgccatctgggaagccctcctaaaaaacataaaaatcagcacttttaaaaacttattaacagacttctcttctcttgaaaagtcagcaaagtaattaatgtttcaact

SEQ ID NO: 20224 - DNA, 600 bp, Bovine  MMBT09673
acacgccctgagtgtgagcacagattgtgggcagtgtgttatcagtaacaggcagaccagaggcagaaatggatttagccaatcagcagaactttttcagtaggaagcacagaatgattaaataactgtatttaaaaggacttccagccaaaataatttttacgtgcgtgctaaaaactcgctcctgtattggcaggtaggttctctaccgatagcatcagctgggatttttcgtgtgaaaattatgatggaatctcttttttcaggatgaaaaccacgttccccataattggaatgacygtgttttctttgtaagsgaatagggtgatttacatgttctagaaaccttgacagcagacacgtactttccagcagtgacaaacatctcgtcgcggcacttggagaagatgactgtggtggcgttcccgacattgaggccggctgcggggctgccacagatggcctctctcttggctatgctccagacwaccacactgctcagacgaaaggacaaagagaatcagggggaaacrggctttcaaaataagaaatggctcttttagccgttctagaaggaaagaaatacaagaggttactcac

SEQ ID NO: 20225 - DNA, 598 bp, Bovine  MMBT10997
  misc_feature (1)..(5): n is a, c, g, or t
nnnnnacagagagttgtacatgtctcccaggggtgattaaatgctgaggggaagttgaataactatagaattcattgggtgcaagtgcattccaatggcaggagcattctgtttgccggttataggacaggtttctaaaaagatacacacagcatccataagcaaacatcctcatctccctctagggratggagaacagaaactactgcatcccaggaatgcttatctatctaggagcgagacttgggaatcagaactctcttacactgcgggcatgactgctaactgacacaactttgraaacaagcggtagggtaaataaaactgaaagtacatattactgtgatccaataattagggaasttttcatatacgtgcacagagacacaaagacaacaattctcactgcacagtgtttacaagagcccaacactgaaaaaaatatcaatayraaaataggaaatagataaaaatatgacctctttacagaaaggaacactatatagtagtttaaaagaatgacgaaacaaaaacacacaaaactacgaaatgtcatttctagtggagaaaatgtacttattacaatattcytctcttt

SEQ ID NO: 20226 - DNA, 600 bp, Bovine  MMBT07988
attatattagcaataacacacaaaaaattgtggtgcttagcaaatagttgttgttcaataaatggtagttactattacatttctcactagcttccataaactttgaatgtttaaaggaatgttcttatatcgctaaaaacaaaaaaggaaaaaaagaggcatctaagattttaacacagaaaacctctgtagctcctagtttcaacttccctttgggttttctcactgttcagttgtgaagtgctgtgttccctttttaaagccctgatcgcaatacaggcaaaatattcatttgttccygttagcatacaagagacagaaaaagattattccttaagagtcagcacgttctttagactttttctacagtcacttttatataagaccatccttcctaacctattctaagagttatcagtactcagttactttgctttcaatgttacttccctcctttttgtagataagagttgatcaaagttttactatagaatctaaaccgaatttagagagcacagtaaataccaaatatcaaaacaaaatacctaacgcttatgaatttataataaatttagatttctaaaactctgaaagcctttc

SEQ ID NO: 20227 - DNA, 600 bp, Bovine  MMBT02708
gagctcatatgtgtgtctgtgtggaatgcagccctgggtccccttggacrtgtggagcatgtttttggcccaaatggaaacatccttaggcactgatgcctcaattaggggaaagataaagaygcaggatcagatatggcatctgtaaaatgttaatatcctgggtgatgcaccctagttaagtttatttttcagtttcgtttgatggctagtttaggcaaaatcgtgacacgtgtgaaattgcctttatttagctccctttggggatagcctctcaaccctgcccctgctgactgcctygttgctgccttaagctcaccccagccccacggagcactcctgcgcatctctttggagcacctattatgttctgggtgtaggggaaggggaagaataagagcaacttcacttgcaggatgtagaggaaggcacagaaatgggagcagatgcttgtcctactgcaggataaacgtgtgatcaggtgctgctggagcaggtgaaggctccaggccgctctgagggagggcctgcctggagaaagcacctggggcagaactctgaagaacacccaggagttagggcggctgctggccccgcagg

SEQ ID NO: 20228 - DNA, 557 bp, Bovine  MMBT17229
aacaaaaacaaacaaaaacccactcataaatcatccattttatatataagcacagttgtaccttctccttggctgcttctgatggtgcgaactggccamggtaagtccagctgttactggcataaagaattcagctgactccagctcggatatgtcttgggttcactaggtgtatatgtgtctctctcccactagaaagaaaagaccttgagtgcagggactgactttttttgctgctgtatcttcagcatctagttcagtgcctgacatacagaggtgcttgatcaatgatgaaggaaygaatgagaatttgagttttcacaacaggacacacagccagttttcttccccatatgattatccagttttcgacagatttttttcctctgctgtgagtatttttcaaaggccacaaayactaaagcatcatttttcacttttagataacacagctccacataagacagttttgcagtgagtatgaaatggatttacacatgtggggattttagcatttacatcctcaataagctaaagattgcattatttatttataa

SEQ ID NO: 20229 - DNA, 600 bp, Bovine  MMBT09887
gattgaataaattaaagaaagagaacgaaacacaaacttgcctgtcttaatgatatcctaagtccagaaaggaattcatgagcagacctctttccacatctagctggttgatttatccaaagagcaactgggaggctggctgcctctccccaccttgccctgcccccaggagctctttttcatggtccctgttattttaattggttgcaatacttccctgtcccatgtctactagtttagctaatttttctaaatctgtcacttcttgtggagttggcggaatgagattttcttaaaaaygggagaaaatggcgagcaggagagaggcctggttgcagccccagctggagccagagagtaggtacagaggcaggggtggggctaggtagggaaactgagtcagggagaagaagtctgtctgccctcctggggcttctccccggcctgggcagagcctcctgagacaggagagcttcctgagctctgagcatcacagaaacaactcctggcctccagcccctccctatcccccacccccaccgccacccccaagcctttgaaaccctagtgtgtgcttagctgctcagtcatacctgactc

SEQ ID NO: 20230 - DNA, 600 bp, Bovine  MMBT11212
cacctccaacctgcttaagacgacccaatggctaattaatctcttggcttactttttaaaactgcttaaaatatatgtttcctatgaataatcaccctcagttacccaaatatatgaacaaggggaggatttgtgcacaacagtatttccaaatgattaatttaatatttctacaaattgctcatagcacctttcagctcttttgtcagaattcgcccaaactaaccactcagcattttagccttttaaatgcatactctctctcccctcttatgtcctaccatttttaaaacacagagrgccaaaaggatcagcttcttgccatgatcatatataagaaagtgaacagagaggtgaatcagaacgaaaagcaataaggcagaaagatgtattttccagtatgttcttaaatgcagtatttactattattaatatcattgtttaccaaaatgctttgttctcacagagtaatattgctttaagggattatagaaacttaaatagagtttaaattacatccagctgatgattggccatgggcatcactcagctctctgaatttaggctgcataactttcctagcatccctagtcctcaccc

SEQ ID NO: 20231 - DNA, 577 bp, Bovine  MMBT04488
gataaatgtcagggagacagtaacaccaggtgagagtgtggaaaggtggggttcrtgcaggtggcattcttggaggagttgtagccaagcttccctccagccagctgccttggagttcattcctcagaagatctccaagagaaaggtatcataatccttattttactgagaacgaatgaggtttccagaagttaaagaacttgctctgagttgcagagtttgtaaatagacagctgggatttgaacccgagtctgtagacttctctggcatggtgctggctttgctgtgaaacgagtggsttagattaaggctgctaaaaatctttcccctaaaatggtatacatataatgttgcaactgacacctctaagagcaactgacacctggtggcaactgacacctctaagagcaggtgctctggctattttctgtctacacaaggaataaaatacgaattatgacacaaaaactgggaaggccaggttgacttatttgctgcctgtccattgagtttcagagagagcatatcaggtttagcagctgcggcaggtcagcagtcaagataccaaatgcaaat

SEQ ID NO: 20232 - DNA, 600 bp, Bovine  MMBT08046
tcactggatatgcttccaaggtttactcacgcacaaagcacttaggactgagagagcatctgctgcatccgcttcttcagcatgttagcaggtgtaagtcttgaaggcaattcataactaatcagaaaatktatgaaaagcagagggtcaacaaagtcacacgttctctttggctcattcagctcaatagtaatattcaaacttccaagtagtatggcctcctagacgcttagccctacccctgcctgcatggaaaagggcttgttctccctcatcactcggtttcttgcctcctggatmtttgtcttgctctgaatcctgataattcaccaggctgttgtactgtggtagctcagatggtaaaaaaatctgcctgcaatgcaggagactctggtttggttcctgggtcaggaagatcccctggagaaaggcctgacaacccgctccagtattctggcctggagaatccccatagacagaggatcctggtgggctacagtctatgcggtttcaaagagtcagacatgactaagaacggcacacagcacagctgtactctgttgtgatcctttgactgctacacgtttgctttgtagcagt

SEQ ID NO: 20233 - DNA, 600 bp, Bovine  MMBT07728
taaaaatgttaaaaatatataatttacactctaatgtataatatgtagttccataaaatggctgcaacaaaaattaaatcactcaagtgctacactgcttagacacccttccacaaaatcgtaaatattcaaagcttccagctttgcctgttgatggataaacatcgccacggtttggttctttcatctgaaaaayggggatacctcaccactgccccagagggtcacagtgaggccgtggtgagttaattccgagcaggcctggcactgtgccagtgcagaatgagccttacaataaaygtggggtgcgttagccttcagagggttgctattctggaagaggagagagaggactgacagttttatagcatgcgatgtgatgagggctctggcagctgtgggcacaggtcttgtggaggacagagaagaagcaggatgaccacccagaggacccctcccactgcctctcaggctaaatgaagttgcctaccaatccctgccctgcgaccggcgccagcgtgctgctccccacagcacagacgccgttcctctctgcctctggtctctaccatcagcacatatgcttaagaattctctgcg

SEQ ID NO: 20234 - DNA, 601 bp, Bovine  MMBT06647
  misc_feature (1)..(1): n is a, c, g, or t
nacacttaaaatgattgtagaaacaggtattaagtcatggtctgatttataaactaacaaaagccacattagccacagatgctttttcccttcaataatttaaatatatgggaaaataattatttttcaaagggttaatttctattaattatactcttttttttaccactaactttgcatactgatttctcagttttatttttaagtcttttgagtttagctttttctattagatcttcttcaaatcaacctgtgattgttattaacatgtttacattttaaaggtgatccaagtggggtyggtaaatacatattccttaatatgcatgtcaagtcatcaaacctctatgttttcaaaagtgtttgtactgtgtatgataatttgaaactaggcagggtttaatgctgacattgttgtattcatgaaatcctatattgaccaggatggccactgagatgaagacatgacattcaagctgataattatctttattaatattagaaacttcattttggcttatattttactttttgttttttagttatttacagaggaaaggctttatgtgtattaatataaacagaattttactaatgtact

SEQ ID NO: 20235 - DNA, 600 bp, Bovine  MMBT12322
gtcttgtaaggatcctgacaataaaatgattcatattcttgtagcattattgttttccttgaggtaaaaataaagggaataggttctgctttttattttttaattcattgttattattacttttttggcagagacatttatttycttctctacaaatatctctcttcctttctctccttcctccagtgagggcatctagacgaagtatagtcattttatgctctggcagtcctttctatatactctatgctggcattttagcttccttttataagtaatcatttatatgcsttcctcttytccttaaaactttctctgccttatttatcattgtattctcatacatggatggttaggaaaactagtactcaataaatgcttagtaaatgaggaatttaggtgctgaagaagactcttgagacacgcctgggcaacttgctcaaggaaatcaaatcaatcaatcytaaaggaaatcaaccctgaatattcattggaaagactgatgctgaagctgaagctccaatacttgctcacctaatgcgaagagatgactcattggaaaagtccctgatgctgagaaaagaagtccctgatgctttt

SEQ ID NO: 20236 - DNA, 600 bp, Bovine  MMBT02962
attgacctgtaagttactggcagaaaaatcaataaattccaaatgaaaaaaaataatgcaataaccacactcagctttgacctaaaaacatgtataacaatcaatatgataaagactctgtaaatgtgattttaaaaaagaaaatgtagtgcattcatgtgaaaaagtcattttgccagctaaacattctctgctaatactgaacattcatttcgcttaggttttaaatattcctatgtcctgaaaatgcatacattatattctcagtgttcaaaataataatgtgctagaatgaaagcmcatctctgcaggtgattattatacatacattatctatcctgtgtgtttgtaggaaaaatatatttttcagcattagatgttataaaataacatgaatttagtagactgtttctagaaaactggaaaaaatatattgcattattaaatagtacctttaattaatgtaggcatgctataatcttgtgttctgaactatgactagcagaactataacgagcagaagacctactcacaaacttgcttgctaagttgttgaagtcatgtctgattctttgagacgctatggcctgtatcccacca

SEQ ID NO: 20237 - DNA, 566 bp, Bovine  MMBT17301
cagcagggcaaatgcccaaatctcattgtcacaccgtttacgggatttttgccttctgtgggcctcagtggattacaggagttttttgaatggtatttatatttcctctagccaaagacacattaactgtagtatttctttggcagattactactaaagaaagaaatgttgcttgctccacggaaataaattgataggttcaggaactgtcactttgcttatataagtgaatgcctcaaaagataaatgtttcaagcctgagcaaatggttttaaatacagaaaaaatatcctgaatccrtatacttaaacattacaagacataattggtaagtttgaatctttttaacatctggtaagtgctttcccattcattcaatcagttagtcagcacagccaatatgccagccactgtactgagtcctgctgactgaaagtttaaaaagatctcatttctgtcttctgggggctcacagtccacggggaaagacagacatgtcaataaatacaatacaattaacaagcgctattattagctatccctacacaaggctacagaaagaagca

SEQ ID NO: 20238 - DNA, 563 bp, Bovine  MMBT18863
  misc_feature (1)..(2): n is a, c, g, or t
nnatgaattcagtgacagtaataaactggtttcagagggacgttgaagctaagctcaagtataaaccacagtggtacacagcagtaatattacatgtttcttgaaacacacctgaaaaggcaggaccctgctttacaaaatcatytgccaaagtatgttcttcaaaacactagttctacaggtgttawaagctcttcttccttgatccctacagaaaagggttctatggccaagtaaatktgagaaatgaaataaaattaaatagcgttattcactgcaggatttttcagagtccttaatakacgtgttaggaacctccaagtcttgtttagggtttgatatgaaatatttcctgatctcacttcactatggaacccttctttagtgaatcaattctggggattagtgttcagtggaacacatcttgggaaagggtgtccaaacatgcatttttgtgttagacataattagtgatgatatttaaggttaagaaatgacaaacacagcaagaatatattttagaaatggcaatattcattaagtaatattaatattttaaaaaa

SEQ ID NO: 20239 - DNA, 587 bp, Bovine  MMBT07173
gaaaagtacaggraagagtgaaatcatgtgattcttcaccattcctctagactctggagtagacgctaccttgtgccccgtttagagctaagggccctccccggttagaatgtccaaggcaagacctttggagctgcgcctctatgagggtctcttgtcccagtccatgggcctaggacgcttctccccacctcccattttcaaagccgcccggtaggcgcccggtgtacgcggtgcaccgggagtctgcscctgtcacgccggctcggtccctgccacgtggctctcaattcggccctmtgtccagtcctgtcctcaggtttcgtcgatacttagttcgtaaggacagtcgaggtatctatgaattttcgcctgtatgctccgctcacatggcggacacgaaccgatccactgcgcctggataggcagccgcgtggcgagcgtggtaggcgcctccactgcccgctccgagctgcccaccaggattgtagcagggccccagagctccgaactggccgggcgatgtgcgcccatagaagtccaccgcagtctcgacgccgccgctgctgccacccgcggggggcgaa

SEQ ID NO: 20240 - DNA, 598 bp, Bovine  MMBT03906
  misc_feature (1)..(142): n is a, c, g, or t
nnnnnnnnnnnnnnnnnnnnnnnnnnnnnnnnnnnnnnnnnnnnnnnnnnnnnnnnnnnnnnnnnnnnnnnnnnnnnnnnnnnnnnnnnnnnnnnnnnnnnnnnnnnnnnnnnnnnnnnnnnnnnnnnnnnnnnnnnnnnnntttaggttgtttaagtaataataaaaatttttcttaatattattcaattggctgattgacttaataataaggaatttattttaaacatcgtgctaaatgctgtgtatttaaagaccagtaaaaaaataaaaactggtttcaaggagtttgctatattrtttgttgtaaagtctttttcatatttagaatgattctgttaggatggatttccagatgtaaaaaatataagtatgaatacagtaaagtctcttgatttcttaaaaggatataccagttcacaattctttaaaaatatatgaaatttattttttcccatcattcaatccagatccttatatttaagaagtcaattaacatttagtgaacatttaatctatgctacatgtcaggtcctgcacaatgaaataagaatatagaaattaagaaataactgccttgcctaatcgagtggggaga

SEQ ID NO: 20241 - DNA, 600 bp, Bovine  MMBT08110
ccttcccccagctaccccatgttctagccatgtggagcttcccactgttcttagttgtttcacagctctgtaccttcacagttatttcctctataaaagggattcctttgcttgataaacccaacacatttttcaagactcaactatgaagacctccaccttctgcagaattcatcatttactcccttctctggattcctagccctagaccgtattatgatgatctgttaacatatctgcctccttttggagcctttgagttcaaaaaggacagggactgtcctttattcattttcctawgaatgaatgaatgagtgaatatccaagtctgccaaattcagagagaaggtctcagtaaagcataacatctaaaactatcagtttttaaaagtctgccttttaaaaatttataatggcttttctttttgccttatcttctttgagaatgagggacctttgtggaaaaggatatggaagtgaaggccttatgttacacacacacagttttgagaagaccagctcccccctacctctcatgtgtacatttttaatttttcgttcttcatcattcaactccttcagggcacagtaagtaggatt

SEQ ID NO: 20242 - DNA, 600 bp, Bovine  MMBT10105
aacacaatatctatcaatcatatgccaaaagtactttataaggagactaaagaaaagagactagtttctgaattacttagtccttgtcactctgtacctgacactattgtcatttcccccacattgtataatttgtgtatatagaagttactttgtcctcagatgttagaagacgatagaccacaaagaataaatgcttcccacgcaacttgttaggaatttgagcaaaagaacagaagagattgctctctttctcattcctacgggattacttggaagttgtttcactctgtctttgtmaagttgctcaatcttaccttaaaacttagatgcttgctctaagagtgaacatttgacaaagactagctaccagactgttagggctttcccagtggctcagcagaatctgcctgcaacgcaggagacacaggagaggcggctgccatccttgggttgggagatcctctggaagagtaaatggtgactcactccagtattcttgcctgaaaaattccacacacagaggagcctggagagttacggttcatggggtcacaaagagtcagacatgactgtgcaccacactgccaggcttctgtc

SEQ ID NO: 20243 - DNA, 600 bp, Bovine  MMBT22554
ggttggggaactaagatccctcgtgccataaggtgtggccaaaaaaaagaaaatctgaacaaagcagagattgcatttttagcagttagatatacattaactatccccattaaatatgtcatttctttcattgtgaacractgcattattaccagatgaaaggggccacctcctgttttcttaaatcagcctgtaggttgcgactaaggggtcagttagttggttcgggatacctgagcctcacctctgctcccgtcctcggcaggttcacctctgtctagtcagcctgtcttaatcgcygtgcagcgaccactgccaccgacgatcaagcctgtcacctacactgtcgccgcccctgtgacgacctcgacttcccagcagcccgtggtgcagacggttcacgtcgtccaccagatcccagcggtgtccgtcaccagcgtggctggactggccccagcaaacacatacaccgtcgcagggcaggctgtggtcactcaggcagctgtgctggcccccccgaaggcggagccacaagagaatggagaccacagagaagtaaaaggtgagcagcagcagcagtcactttgggcagtttttcaa

SEQ ID NO: 20244 - DNA, 601 bp, Bovine  MMBT01244
  misc_feature (1)..(1): n is a, c, g, or t
ncttgtgtaaaaagaaaaatgatgtctgttgmgaattggtgggtggggggggtgttcaatgtggtatgttgttatttagatgatctttaaaatcctttttgctcattacactataaaaaccgagaaagcagcccttgaaaagggaaaaacaacctgtatcctggccaaatcctccctttcaaagtagcttggcttgatttttttttctcttgatctccaaataaatttccattttttaagcaaaaaaaaattctacaatgctgaattttgtacatctgggaaagaaaaggttatggatatwaagtccctcccrctcccaaataacacatttcttttattttgatatgaaaatgctgaaatgaatgtggtgacttgtcacaggctatccatggggtttgggggagttgcagaacttccttgaattttcttattgtctttcatgattcctaagagcttgaaatcagttagagaggaattcctgagacagagacaacaagtggtgacagttttagcagagatctccttcatggtggatgaatgttggcatggttctgtgtcctggcagattcttcttgaggatgggctagtttgtaatatattt

SEQ ID NO: 20245 - DNA, 430 bp, Bovine  MMBT03021
tggtcctggagcccaggggcctgtgaggtgggcagctctctgggcccttagaacttctgcctgagccccatgggaacccttccggtactcgtatctaaggagaaaacccaggaatttctcatctgtgaggaagaccaagaggcaaaactgttgggttgggctcaggctggttcatgatcttcagtagaactggggaaggaagttaacccccccaggtctgttgtcaggaatcccttccgaaaatctacttgtacactcactgcagtttagacttcctgtgctttgtgcaacagagggtcracggtggagtggagtcaggccagcgactcttctccagctttttcccctgggctttgctggctaccgaagtctgtgtacataaaggagacgctgctacacaagcaccaaagacctgttaagcgcgtgcagt

SEQ ID NO: 20246 - DNA, 569 bp, Bovine  MMBT18676
tgacatgctgatatatgttttattcaagtctttgaattcaactatttcctgaatttttatactctgtttggcagggacaatcatcatcttaactttgtaaaataatgctcaaaagaaaaacttcaaaacctagttacatttgtctttgtagtttgtctacactgttcygtggtcattctrtgcaaggagataaactcagtttataagaattcataagaaagaagggaactgagccatttaatcttcttatattcttgataattgcaaactatgacagttctttacactctgtgcagctcrtactttcacagggcttggcttagacatccttgagtatttcagtaaaaatgaatgtacactgtcatgagtgcctgttttgtgacaaaaattgtactttcatgttgcttttcagtgcatattacatatcatccatatttaggttatcagatggttattttagcataatacatacttgtaatattcatatatccattttttttcatattttgtacctatattgcattcagagcccaatattttaatagcaaaagctaaaaagactttccatt

SEQ ID NO: 20247 - DNA, 600 bp, Bovine  MMBT16697
gaagtcttctcctttccttctcctactcttagcctattggcctcttagttgttcctttcaccttgttggaaattctgtgaggttagactatctatattttttcctaccttgttcctgttacagagcacttaattattatttagaagataaagtaatgcacaagagtttcttcctgaatagttttgatggtttcctgttttccacttgggaatacctctcagagagaaactatttctttaagaaggtaaaatgctgtaaatttttttctatcaatgttttgagcttttgaaaattactacyggagtgtgtatttttatctttctcacacctctgttagtatttcagactacacaattgtatgatcactatctttcaaattgtctttcttgtgaaaaataagtgactgtttgacttttatgtgcactgacagggacctcacattgttattttattatgcatagctcatagtgctgtagatgtaattaattggcaaggtctgtatgtgtggtttctaattttgctaatataatgctgttgggccaaagggaggtatagaaaacattcaaaattacttgccatttctattaattaataattggt

SEQ ID NO: 20248 - DNA, 598 bp, Bovine  MMBT04274
  misc_feature (1)..(21): n is a, c, g, or t
nnnnnnnnnnnnnnnnnnnnntctttggttccgggctctatgctttccctgaaacagttgacagttttgcttttggtattaaataacataggattagtctgcctaagggaccatctgttgttccatgcctgccatgacaattctgggtcctttagaattgcagcttgtggtttcttattaaggggagcagaagagcattctctatcaagagtctaagcctcagaaatgttgtccattctgaatgaatcaacatataactatgacatgtgtcaagtaagacaggatgtttttctttcattwtatgtaaataaacttgaggttttaacagatgggaatgtaagtttgtttgtttgttgttctttcattaggctgtgctttataatgtggatatattattaaatgcttcaaggcagtttctcagttttgttttataagttactgctgatatttctgataaagctacaagtaaaaatgaagtcctacttgttatatgctaactagtttcaagcaaatcagcaatacttatatccttttaaagctataaaagaaaaaggctgtcttcaacttcaaaaatcctttaacagagttttwaaaagct

SEQ ID NO: 20249 - DNA, 600 bp, Bovine  MMBT02442
atagtggtttaaaggagtacaatttgagttagctaatgatctgacattatagaaggggaaagaacctgtgagactaaattccaattagtaaacaatgtagtaccacagcatttttgttcctgaaagtactttactaatattagtgtgctgattatatttcaaagcctttctaaaaataatgtacttgacctgctagtatttgatagaaagtattaacagttaagatccttagacatttttgcatgtaagttttcactgaatttaaaggccaattgaataaatgtaggttgatgaaaggtwattctatgaaatttgtgtagcagctaatcttaaatatttcagaagcattatattatgaaaaccctgttttgtatagatgaggcaatcttcataaatttccatcatcaagattgcatttcatgtgctatttttccgtagctctaggaagatagcaagtaaaagatacgcactagcctagaaacatagaagagatcttaatttactacctgaaatgagccaccttaggggaccacccttccacactgatagttaatacatagtactttagttttaaagtataataaagctaccttctacctt

SEQ ID NO: 20250 - DNA, 600 bp, Bovine  MMBT02610
cacattcattctcaactttctaattctgatggctgtggatgctggtgccaacagctgagggaagggctgctttgaaggcagagggcaagtttagttttggacaagctgagtttgaggcacccctatgatatctagagcttcctggcaggcagttggatatttgggtctaactcttgtggaagaggtctgggctgcaactgctgattgggtaattgcaacgtgaggttggaggtgatctcctaaaagtagaatgagaagaactgtgggtttggagtcttgcatataaggtggagactcacrattagtggcacttaaggatgccacccaaggaggcagaggccttatttactgagatgtgagaactggaagagtatactcttccgcaaaccaagagaatgttgagattccagaaggtgggggtcatctgaattgtcaaatgtaacagagagacccagaaagagaatgcctgcagaatgcctactaagatttgggagaatgaaactcaggggttatcttacccaagcaggatgaggaagggtgtgtgttggggagaagaggggaagctggaatgcccagtgaggagaaatgaggaagtggaga

SEQ ID NO: 20251 - DNA, 600 bp, Bovine  MMBT11980
tcaaggcagggcgagcagtcctgatgggtccgctggaacggccctgaggggaggccccagggctggcatgtaaacagcccactgccacagtccaagtgcttggggcctacagctccatcctgcgaccctcccaccctcgctgcttttctgacatccttcctacccagaagaataaaggagaaaataaaagcctccgctggtccaccgtcaaggtgacgtttgctgcaaacttcctgtcttttcttgtggttgagattctgccctggctggtgagtgtcgaagtcaagacaggaacatagrctcagattttaaggcaactttgggtgaagagggaatttgaaaccatctgcctcatagtctccaggtcttctttccccatttagaagaaaaccccgggtggcttgagccgttcgggcgacagactcatgactcagttcctggtccctgacagtggccgtcacgttgctctggtcamtgtggcttttgaagagagagaaaaaaacaaaacaactttctaaaagctgttccgtcacaagtgtccgggagggttgacggttgagccattgttgtttagctcaggaagagggtggcagctgttat

SEQ ID NO: 20252 - DNA, 600 bp, Bovine  MMBT10710
attcgtaaaaatttcatggggatgttgataacggaaggaggttatgcacatatggaggcaggggttatacagaaaatccctgatcatccacttaattttactgtgaacctaaaactgttctaaaaagtaaactgtgttaaaaactagcataaattcttagccatagtgatatatatggcctcataattttcatatcatttagggataaacattataattttttatctttagaacagttaattactgaaaagtttatgagtgtgagtgtgtgtgtatgtgtaatttgttttcctttgggcmcatcaaaatgaaattaccatctgtgtttgagactgatttaaatattttcttgactgaaggccagagcattagcaggaagaatccttgaagtgccttctaaccttgcattttcttccttttctagccatattggcaaagcatcaccttgtctgtacacaatgacagtgaatattggtatcacttatcatcgattagtacactgttccttgagatcttggtatcaattacattttactgatagtattagaaaaccaaggatgaaagaaagtcattcagatgtctagacagtgagttacagag

SEQ ID NO: 20253 - DNA, 600 bp, Bovine  MMBT19654
actgtctccttcttatagctcatattgcccattagttggggggaaattgtcttaaaatagtttcagaagaatgttttaaaaagaggaactcctttgcagataaccataatgttttacttaaagatgcaaaagaaaaaaaaaaaaacagaactgtgatttggtgatactcatcactttttacatatgtgtttattataagtagttgtgtcatgtagaactctgctgttggggagtcaagacataatgttcttctctctgttcattatttgagcagaggaaggaaactttttctagacatgrattattaaagacaggatctaaagaacacagtactatatgtttgaaagctgttggcttaacataacgatcatcatcccacttcatagtccctggatttggtgctttaatatttagtttagtctaayactataaaaggcatgacaaatacactatgttctaggtttctttctttctatttaaaaaatatgtttaagtattgcagtctacatgacaagagatgatccagactattttaatgagttatgcatgcatgtgtgctaagttgcttcagtcatgtcagactctttgtaacccatggac

SEQ ID NO: 20254 - DNA, 600 bp, Bovine  MMBT08165
gcagcccctccctctccccggtccccaacccctgcctttcctacacagtctcacttgtgttttgtgttaattgcacttaatatgcaagtttcatgataacttcaggaaataagctcaattaaatgtagatatattcagcttactgttgcattttacaaatataatttttccattgatgtttaattgccttaaaattctttcaaggttaaaagggaactatctcttgaacattagttattaaattatgtaatgccaattaacttgctgaattgatttgagctttatgacactttttattgmttgtttgaaagcaagcttctaattatcaaaggattggatattttcaactcaaaagtcctctgagactaacagaaagctggcctgtcattttgaaggtcttggttccttatgaccagtgacctgaaccccagtgtgggctcaaccaaaggaagcattttcctgggtggagggttccgggaagccttgaatctgcagctggttttccacggtgttacccagctgctctccagatcaacagcggcacccagaagtagccatgtgatcttcataggcaaagagctgctatttcctccatttgtc

SEQ ID NO: 20255 - DNA, 600 bp, Bovine  MMBT15534
agctggattaacagctctttttatggtaaaccacttcggccctaagagaagaaaaggagtaacagagctccaactctgcactcccccagcctctacacctgcaccagcagtaaaggacccctttgctctgcagcttcttcccacacctctactctgcatcttcttatactacaacttgcttggaaacatcaagactaatctcattatgatctctaaccctcctttgtatcattcactgcaagaattccagaattctggagccatcctaaatcctccactcacatccccatatggctaagkacatcccctttcatgaactaccccctttcctactaatccctcaattcctgaaatcttttcaccatatcctctggaacttatcaacaaaatctcctatattttgacctcttgtctgaatgatcccttcacctttttgctcaagaggaaatctaatagctgaggccactgctctctctacagtctgatctgtggctgttttctctcccacacccctgacactatgtacctggacggggagggrgrgggggtagtggggaggagtagraggaggtactcaccgtgtacyttgtttctgtttcc

SEQ ID NO: 20256 - DNA, 598 bp, Bovine  MMBT11177
  misc_feature (1)..(94): n is a, c, g, or t
nnnnnnnnnnnnnnnnnnnnnnnnnnnnnnnnnnnnnnnnnnnnnnnnnnnnnnnnnnnnnnnnnnnnnnnnnnnnnnnnnnnnnnnnnnnnnnattcctatttgaagctaatcttctacacgagcaatgtcttcttcttccctaaaatgttttaaaatactttgaaatattttcttgatattccgtttttaatattttactttgaattacttcaaacaaatggccagcacccatgtgcttaccacccagctttaacaagtatgaatttttgacatctttgcatcatattttatgttccsttcataaataggtctgtgaacaaaaactccagctggcaatacaactgctttctctaagataagcatattaggagctagttataattctacatctttatttaggtttttaagtatcagatggatacttaactagttattacagaactatcctcattacaacattttgaataactgtaaacatcaagacaaagattttttcttcatttattgtacccttcctatctcagacgaccagctgaacttctgaaatraatgtcctagacaacagaatcataggcagtttcttttacctcccggc

SEQ ID NO: 20257 - DNA, 598 bp, Bovine  MMBT04791
  misc_feature (1)..(6): n is a, c, g, or t
nnnnnnactacaatgttcagaaaagggctgcacaggggcatcttaaacaatgtaatttaaatattcaaactgtgaaacacttttcctttatctttgtcagtgcctcctacaagatggagagcaaagtagaacacaaactgctttttattttcatattcttttttgttatgattataggatattgaacatggttccctgtgctctgcattttggaatgaggggagaaggcctgagagggaggaaaaatgaataataatttcaaaacgtcaacatttctataatttttgctggggaaggtamaatgaaggctcagcttcaatcatttttttttttttctaaccaattccctaaaaagtgttggactgcacatgatctcttaaaaagtacttttgttctacaactgaagtgctgctgctgctgctgctgctgctgctgctgctaagtcgcttcagtcgtgtccgactctgtgcgaccccatagacggcagcccaccaggctccccatccctgggattctccaggcaagaacgctagtagaattaatttctgaaatggacatacttatattcacatttccttgaatgtttccgttataagag

SEQ ID NO: 20258 - DNA, 600 bp, Bovine  MMBT01961
tcccagacccactccagttcctgtttgttatttctattatgttttcctagacttaactcaacataaaatttttttttttgttgtctttgacatttagtttgtctcactatatgagaatgtacactctttgacgactggaaccgcatctgtcttcaattcactgtgttctccctagtacttgtaaaagagtcctgaccattatagaagctctttattttttttaatgaatgagttaccaaagcattcattctctagaaaaaggaatattaggctatattcactttgaaaatggtttaattrttatattgaataagtagttattaaaatgtttcatttccttttttctattacctaagtagggtttcatatcaattcatctctgaaaaccatcatattaaaagggaaacctagaaaatattggggatgttatatctgtttctttaattatctatcatcagtcatctctctccctaacttacctatctatacacatatgcagacacatagcctactaaggagctgtttcaccaaaataggaaaaatcttggtcagtggacattaacataacttgagatgcttaaatggagattcaaagcttcc

SEQ ID NO: 20259 - DNA, 600 bp, Bovine  MMBT10971
cataagctctgacggtgagctccagatttgtcactccctaatctggccatggctatagctagctgtcatcaagctctggggagcaatgctgtaaatcattttcccctttgtgcaaggagaaaaaatagaaaattacattcttctcagcacttttgaatgtgctggtgcctctgtcaatagctccttcttgcgagcagaaaagcagcatgatccccaggaagaatgtgttcttatgggcatcagcccagtcatccacacacagagggagagcactgttcactcatcagagtgctttgcccygtcagstcatggtgtgtacctcttaacagcaacctggggtacaggtcagatccccccttttgcatattggcgacctagacttaggaaggttgaaaattcactcaagctatcaggaggcagagctgcacctcaaatctgagctgaagttcagagttctgtactcttggccctgagtgtgattcaggactggggaactgcctaccgaagtgaggataaaatctgcctaagtaataaaatagcaaaataataatagtgacagttgtaaaatgctgctgctgctggtggtggtgatggtgctga

SEQ ID NO: 20260 - DNA, 600 bp, Bovine  MMBT01595
aagttaaatctttccccttaagcacrgggtttacaaaagtgagccgactatggctcctgctcatgaggagcctggaaagggarggagccacacagacaggaagagctggcatggggctgcttcacccctgccccctttctcctgggaccctcacttggaggaattcagagaaatgcccyatcctgcacgctggcagggagcttcctctagctcctgtcctggcagggctatcatggctgccacatgctgccagcctgcagcagccccgcacacacggcctctgtgcaccatggatggggyttccgcgcaaatgaaagtgagcgccagccgggcaggtcccagtcctgcagcatctcagcagggagagggcacttgggatcactgacacattttctcacccatgtgcttgctgatttctctgcatttacagtttcggcagtgcacaaagaaaccaagcagttcttcactttatataataccctggatgacaaaaaaggtttatttggaaaaagaggtaagagcctttatagaaagaagataacatagatgagtgtgtgtcacgtgcccagtgctgggtacaaggtcagaaagtgcatgatt

SEQ ID NO: 20261 - DNA, 600 bp, Bovine  MMBT02427
taaatctatccctcatacatatactataaaagaaaaaaaaggggaagggagaaccagagaagagattaaagatgaaaagaaaataatccttgaaaagatggaaattattatccagcctggaattaaattctcagcaagatttccacactttgttgaagggtaggactggtgtctcactttttatgaaactgaactttggaagacacgatcattaatgtacgaagagaaattactgtagtattctgaagtaaatttgagaataacttgaaaaataggttagcttttgaaaaataaggatamacataacattgatctcctatttttcctggtacaatgcatctgaaaaacagccaaataaatggaaattgctgtacacagacagaagaatgatagatgaaaagtaaatagaaaatataacgaaaagaaaaaagtacatataaagggcagaaaataataaaagtcatgaaattagaaaatatatatagtatcaggtaactttttaagtaataagtagtatatttatagtaccttgtcaaaaaagctacaacttggtacaaagtctctcacaacacagaataaaatgtgcttgatgtttgttct

SEQ ID NO: 20262 - DNA, 600 bp, Bovine  MMBT18240
tcccctctggtccggtggttaagactctgccctccagttcatggggcatgagggtccagatttgatcccttgtccgggaactaagataccacatgcagccaaaataaataaataaatagtggaggctggtcaacagccatttgagctgagtgatgtgaaaaagagctagagcttgaagaggctgagctggcagaggaattgttgggagctggattcaggaaagcttcacaagcttccgggagcttggagttagtagattggacaggaggagaccccagaggcctctgagagcagaagaargtcgtgtgagatttattgtacaatttgtgattaattggtggtgaggtgcagaggagaggaagcaggagttacagctttgtcctggtgcgtggtgagaacaccaattcaggggagcaccagggcaggcagggtgcagacaagtgaaggactcatcagctatttagacatcaaagtctggggagacatcaaagagcccaccttccagagacaacaaactggaatcaggagtgttgatgctggtgctgacagggccaccgagtcagggtctggggggactgggactggggctggagctcgggg

SEQ ID NO: 20263 - DNA, 600 bp, Bovine  MMBT06679
atatacatgtatagttcattaatatatggatatctgacaaagcaccatgtgatatattgatgcatctaactttacatttaccaaatgtctgctagcccactgtttccaatatttaccttctggaaacttgcaggttgtaaagtgaataaaaattagttgtatattggtgctcatcagacattaatggaaaaggaaatggcagcacactccagtattcttacctggaaaatcacacagacagaggagctgggtgggccacagtccatggggttgcaaagagcctgatgctggtgagcgtcygaggacagcrcatgtaagtgtattgttgattcctttgctgtacagcggaaactaacataacgttgtaaagcaactactctaataaaaatttaaaaayaaagactgtagttttatatgaagagttacttctcaatctgttacagtagctgggtctcagtttccacatcttctcccatgttagagcttttgaaaagctgaggcaccacatgtaagaagatctaaatgaatggtctcacaggggtktacatggggctgttgtctttagatcacaacttccacaaatgatttttaaatatttaa

SEQ ID NO: 20264 - DNA, 600 bp, Bovine  MMBT02927
agccagggcattgcttatttctaaaagctctctaagcaattttaatatgcagccagagttgagaacctctggtttaaagcactgctaaacaatatctggggttttcttagtgaaacaggaatgctgttaacttaaagaatgccatttacacaattaaatataaatcaagccaaagaaataatgatggtttttaagttcttctagatgagactgaagtttaccacgacaaaactgcacactcataatgagataaagaacaaagttgagaatgcactctcaacaactgctcctgagaaataygcctcatatctatcttagcagccttatatacaggcctgcygttatgtttcattttctatgctctttcatgaggtaccccagcacctgtttaaatatgtctgaagtagctgttaaaaagaaaaacctaagtaaacggcagatgttcacataatttattcatccctgaaagtctggctataagagaagaaatgcatgcagatgaatactcagaggtgacagagaagacaaagctggtgccaatccttttayagaatgacacccaccaaaacctctcacagagacttgaattacgccaggaga

SEQ ID NO: 20265 - DNA, 598 bp, Bovine  MMBT04255
  misc_feature (1)..(48): n is a, c, g, or t
nnnnnnnnnnnnnnnnnnnnnnnnnnnnnnnnnnnnnnnnnnnnnnnnttgtatcattactatttgaagtggcagcagtgacctgatctgagcacagggccttcttcccaacctttgatgtgctgtcggaagataagttaaatcccaggcttttggcatcaggttttaatttgatattgtggaaatgaattgtgtactcagtattaggacagatagtgactgcctattacctatctagtgaagtcattggaggcactgctcaggtggaacaatcaggaaaaaattagaatttgtcagctkcaktatgtgtctggtaatttgcctcattcataataagtgtttagaacatttctgattagctgtcaggaatttattrcttctgacaatagactgttgccacgtgkactctgggagagcactggttaacagcatatgggaactgtttctcctgctgcttgaagaaatatttagcagtccttcagttttagaaactatgagaaaacaaagtgctgagatcaaaacaaagaggatatgagcttcttacaatacagaattcataaacgtcttccactctgtgtctgacaatgatatataygtg

SEQ ID NO: 20266 - DNA, 600 bp, Bovine  MMBT05110
aaaaatgtgcacaggtatattctgcaaaaattaattttaactgtattgtgattatagtcaaaaagccagttgtgatttataatttaagaaaataaacaagagtttaaacaaaaaaagaacaacccttgctatatcagatacaacatatactctgaaggcacattaattaaagcagagtggggaatgggtcaaaaatatatgcataaactgtggatgagaacagttcagttagtaggtgcagaaaatatacagggacttaaaatatgatagaaaaatactgaacttcgactatagagggayagattatttgaggctcttgtggggaaatcaaccatttggggaaaagttaaagtctcacttcccaagtacacaaaattagttagggataattaaagtcattgtgaaataggaaatcataacaacaaaaagaaactataggtgaatatatatgtgacttggttgggaaatagctttttaagcataaaaatggagtgaattgcagagagatagactaacagatttgtccacataaaatttaaagactacatttcatatcccaaagtggatggtaaaggttttccacaaccaccatttcctaat

SEQ ID NO: 20267 - DNA, 598 bp, Bovine  MMBT20439
  misc_feature (1)..(76): n is a, c, g, or t
nnnnnnnnnnnnnnnnnnnnnnnnnnnnnnnnnnnnnnnnnnnnnnnnnnnnnnnnnnnnnnnnnnnnnnnnnnnnttcttccctcccttccttccttctcttttcttactgccttttcttacttgtcttttctctccccttctctcgtccacgccctgtctgcctccctctcttgtgtttgtgcagagcactcttttatctcctttatatttgacttgtggatgaattaaaattgtaccatttgctttgtggtttgattgttttttttgtttggccttctgaggccctgcaaggaatcrattgtgctgtgttgggcagagatcaaaaagctaaaagaagccagggctcaacccccagggtacaggtaaagccagrgtggtggggtcaggtacctgtrtgctccagcccttcgccccagtgcctgacccgagggcggctttccagtggggacccagacagcccttccactgccacaaagaaaagccaatgcaccctcccagccaccatccacgaaaccagggctctggggggctggagaggggtcccagctgcctgagcagtgactgcggctttatttgctctctttcctcatttgca

SEQ ID NO: 20268 - DNA, 600 bp, Bovine  MMBT12971
tggtttgagccttgggatttttccagcttatatggctttttgagcggcagggttaaaggtggggactggctctgataatattcctcccaggaaagtagctttaagaaaccctactgcagaggaaaaattagctagatatcccacaatggaaaagagctcttgtaattttaccttttcgaggggctagagaggtagtatcgcctaggggaggtgcacagggcaccstgctgttggtcattgggcaggtcacttaccctctcgatgcatctacaaacaggtagggtaatggtaatagtgccyccctcaaagaactgttgagggtcagagaagttaatatatacagagcatttagaattgtgcctgccatctgttaaagttagctattatttcttttagctctgtgtttttgcaatgtgttgattttctgagaaagtgtaggggacatacaggaagagtggtcagaagatagttcaagcgaggatggtcacttccttctttcccctcctcacactccccaccctcctaccccacagaccctggagctgttttgtgaggcagtaacgtcatatttgaatgyatgaccttgaaaacttctgatta

SEQ ID NO: 20269 - DNA, 600 bp, Bovine  MMBT02473
cgctgctaaggactattttatgtgctttcattgaattttttttctacagactgatgaggttgagattcatatttgtcttctccaagatatcttggacatctgaattagggactgttcctgggaaatctgccaagctgtctccctcttctttcctaacttggtttaaagcatctgctcattttcccccaacatcatagctccattctactctccacatcccactggactgtaaactcatggctgagaacattcctgtctgtcacctacctgctgacctgagtgctctgctcatgctcaaarggatttgcggcagcctatgtcttacwcatatttataaattccatggaacttaaatgtgcaacttttttcatagaagatgcctaatagatttatacttgaataatggatgaattccagtgttttaagtgttacattcaactatttctgtagttcccaggaatagtcagagtcaaacagtcaaacaggaaaaatttttagtctatcaacatttctgaggataggtttcataaatctctatttttttttttaaagaacctatcccactgtcaatcagtcatgyccaactctctgygaccccat

SEQ ID NO: 20270 - DNA, 600 bp, Bovine  MMBT11190
tccctatacatttgtctcactttgtgactggaggcattttttcagaagtctccctctcactgtatcatactcttttataagtaattaaaattattaagaaaagcaaaatttatgtccacaataggcatttgctgtgatggatgaacagaatggctggtcagaagacaggaagagctcttggtggagactcaattaactaccatattgtttgactcagaaaagaaygagagtccaaaggttttgcgtataacatattaacacataagagcatatttcaaatttaataacaacttgttttayctatacagtcaatagagccaaaaaaacttacttctaaaatctaaagtaggtattagctagctcagccgtttgaatgtgtctacttgtttgcccaggacaaagcctggcacatgaccaacrcacaataaatattcgttgaataaactcccttcttacagtcctgccagctttctcatttaggtgtcactgggcaaaataattaggaaggaggagaagcagcaagggaaaaacaagcttaataattttacctgacaaagcaytatgaacagagcatgcatttgctctgtagagaatattaaa

SEQ ID NO: 20271 - DNA, 600 bp, Bovine  MMBT11414
ttcattcgcttcagtcctgtccgactctttgctgctctatggactgtagccctccaggcttctctgtccatgggattgcctaggcaaaaatactggagtgggttgccattcccttttctaggagattttcctgactcaggggttgaatccgtgtctcctgcattgcaggtggattctttacctctgagccactggagaagcctggcatttgcctgtagtattttataaatgaatcttgtttctaacataatttattttttccatatcagtgtttaggtaaaagaagtactttccttttarcaatatacagaaactaacttcctacagattggccaaaatctttkaagtgtacaatccttagaggtaatataatcctctcattttgcaggtgggaggacagttagacccagcaaagtcaagtgagttagttgcccaagactgataagagactctgccaaagatgatgcttttgtctggtttttgatttgtttcccaatcttatgcctattcatatgtataaacatattcatatatattatattacttgtctgaaagggattttgcatctgcaaattttggtatccgtgggggtcctggaac

SEQ ID NO: 20272 - DNA, 600 bp, Bovine  MMBT06243
ccagaaaagtctgggtggattctgtaataatgaggattattattaatgcccctttgaagtggaaataagtgaggaaccctcctatggtgtgaaagttgttttgacaccctgaggaataaagacccctcaggagactctacaaaattaaaccccagcttctagagtctctcacagaggggtgagacaaaagtgctctcaatctagttcgaagccaagaagcagaaactaggagatctccctcttaggggttggctgcagagtccccaaggcttctgtcctctccaagcttgctgctgctckgtagctttttgtctatttggtaaagacgtgttatgcatcttaacaaacttgttcaacccttagccctcgtgatagggggaatctagtcgtgctagaaagccaaaggacatggagttcaggcctgcttcctgtcccgcttatcacctcttgggtaggaaaggcatgagcgataccatctgagtgtgctctttttgaaataaaaacttgactgtttttccattatttatgttagtttgacatgaatgagttccaatctcacgcatgatgctggggaccattcagccggtgctcctgtctgag

SEQ ID NO: 20273 - DNA, 600 bp, Bovine  MMBT04533
gagcgcgggctgcggcccccaaatgacattctgctgcctgcaactctgtaatcgcttttggaggggatattatgttaatatctcacacaagagcctccgatcaggcagaacgtcagggcggccaggcccaggccatatggtgcatccgaggtcctcctttgtaatcctgggtaattgaaatcctcttcctcattcggacgtggaaagccttcctcggtgggtagcagagggcccttgggtaatttactcaccgctcctcaggggaacatcattggggggatgatggcagggtggctgggrattcacgccagaggactttaccctttttgagaacaaaaatcccttgtacctacttaagaggaaaactggcaacagtaatagacccaccaattaccgagctcctgtgatgctccaggcactgagataattacatctgctgcctatgacaaactgccagacatgcattacgcccatttcaaagatgagaaaactgaggctcagagcaagcagcttgcccaaggtcagcagcttggagtagaggcaccaggactttccccaggtctggctggctagggctgcagtccgactgggagctggaag

SEQ ID NO: 20274 - DNA, 600 bp, Bovine  MMBT11410
aagagtttggtctctagaaaccaatcacagaaccattccttagaactgactcactggaagctatttctctgagactaccatttgaacaattgagttcaagaacatacagtcataactgtagtgacgacattaggaagtggaaatgaaggagctgaacgcgacatttagcctcctctctacggcaactcctctgaaaacatagaaagctagataaggaaattggtagcatcactagcagaaaacttcacatcccgtgagcttgtttgccaatggaataaggcaaaagtcaagaaaatggcytccacttcacttctgcctcccgaatctcatgcaaggaatcttgcaaggaatctcatttctaggaaactaccataggaaaagaaattttyagcattccaaaccctacaatagagaaaaacatactagaagcatgatcaaatagaaattgaattagccagtccaccatgcccaccacacagaagggaagactgagtttaccacattgaaagatctctatggaattagcaggtgagccatatctccagcccagtgcctggcgcaacatcctgcacctattagatgctcatcaaaaatttagta

SEQ ID NO: 20275 - DNA, 600 bp, Bovine  MMBT08628
gaaaagtgaaagtgaagttgttcagtcgtgtccgactcttcatgaccctatggacttcagtctaccaggctcctccgtccatgggattttccaggcaagagtactggagtgggctgccattgccttctcctaatgtttttatatacctgtttaattaatgaagaaccctatctctctatttggatcacatttttaactaaagaaagatgcttttaatcaacagttgtcaataacagatgtgttgacaactggagacatcttgtccatatagctgctcattcagccaacattttacaacayttggagtttcagagagttcttagacttcttcaaacccatccatatactcatagttaagaattcctgctctagtaaaagtatgatgatttaaggaatattgcaactacttgagggaaaagaattcatgtatgttggagctgggagataatcataaatctgaaaactgtcccttcaaagggaaggttgttttgcttcatttttaaagggaagaagataatggattttgttgttgtttatttttacaatggtttacatattctgatttctaactctagtagttttttttttttttttcaagga

SEQ ID NO: 20276 - DNA, 600 bp, Bovine  MMBT00669
aggcaaactcaaaccccagggatacaaacccttgttcatatgttaacttctcctcgagcaagtgaggcctgagggcagggctggctgtgtgttttctstatccccatggcctgggacttcgagtcaagtaataggcccctaggaaatatgtgctggatgaagaagaaaccaattacctgtctaaatatgtatttagcttccataagcatattcttttatatatttctgtatgtgcatatgtatctatccttccataaaaacttggctgagaattttttcttttctcttccagcatctaaygaccagcacatagcagatactcagtagctataggttgaatggctacctggcatgtaaaaaatasattgaaaagatgaattaacaaaacatccatggtcatgtgccaccatagatgcatttttgtggcatttacagtagtctgaggttgaatgtgggatactccacaaatgaacacttaagaggccagatactttgccacttttgaacattacactcaatgccttgggggcccaggtccagggaggcctgatgaatctttttgaatctgcactggcaagatggagaatgttatggttcagt

SEQ ID NO: 20277 - DNA, 600 bp, Bovine  MMBT01076
cgaaaggctccaaacaacctcaggtatcccagctctcrtctgctcacctgccgcaggaagctgtctttatcacattcgctctttgcctgctgctgaaatccaggccgttttcccctgttgggatctcgggaaagctggtcgccatacactatcggcgtcccttcaccagcgttcagtccgcgagtcccgccttctcacctcacctcctggctctccccgagcaccaggggtggtgttgggctgcccaccacactgtggggcgtgggggctgcagggacctgctttgcagcggaggatacraggccgggccctgtgttggcctgaacatgtagagaggctgtgggcaggtacgacctccatagtcacacatggctgggaaagtgtgcgttagcgaggaggatgggcgagctggtgggtcccagtgttcatagaacatttccagctgcaacttgatgcttctctctgctccctgaaaaccaccgagtcctcctytcctgcccctcattttgatggtctgtaattctctggatgaggaaccgtgtcttgtcttgtttagcattgggtccccggcacatggcaggcacagaatgcaagcctgat

SEQ ID NO: 20278 - DNA, 600 bp, Bovine  MMBT01083
aagtgctgaaatgtagaaggagggaatatttatgttttattgggattttgctgtaaacctaatttttctatttctgaatgagagaaaattcatgcaaacccctaagaaagaatttgccttttttttttaatgtccacttaaaaacactccacttgccttattttgaaagtataagctgttgagagtaagagctaactttatacattctttgttattctctcaattttatgctgatttaataaaatttaattttcaacgagacaggggaaagagcaagtacgtgtgaaggtgtctcgtacyttacctgttgatcttttgtgtttgcctgtccaaggatttatttacatcttttagaagtgttggtatatatgatacattttagcttataaaaagaatgtgattataaacaaatgcccatgttgctttttaattgagctttaaactttcataatccaatcactattttccttctctactattcagctcttactacacacatgagaacaccacagcacttaagtttcatgattcactgtaactggtgatgctgcagaagtaagacctctggtaatttacaaaaggtatatggttcagtaaaat

SEQ ID NO: 20279 - DNA, 600 bp, Bovine  MMBT13086
tactatatctaatataaatcacaaataaatatttcatgttatttaatggtgtcttgaaatctgcatgaggcatgcagaaaagtttttgaaatggagagaagtcagaattaacagaagaaagaccaaatccactgttttgtatgcggcccacaatgattattaatgaacacatgcactgggacatagataattaaaggagactcagaaaatacaacctagaatattatcaaatgcaaatcctttcattctcagattcttttttttttttttttgagcaagttttgacacaaattataactmaatcttattacaaggcactcaacattaaatcatacaatttttaaactcagaagaaccttaaaaggttaatttaaaaatggaagaactgaagttaagtgatgtaaagtgacctatttatggtcacacaaccagttaatagcagacatagatttactgacctgttaggcctatgccctttataccacattatgctgctacactgttagtaatgtcattatttttgtcattaatgtcatatttagcaataattaccacattttataaagaatttggggagtttgcctcttgccttcctgaccc

SEQ ID NO: 20280 - DNA, 600 bp, Bovine  MMBT08928
tcttttcccaattttgaaccagtctgttttyccatgtccaattctaactgttgctgcttgatatgtactaaatcaaagtaatttcagatcaaatttgccaatagatacctcaaaaataagtacttaagacactcttatgttaaataagagaaaataagtattcatggcttaagtgattttcttgacaatcacttatgtacaagcatttcatggtttgtatcagagaaaacatactcagagccagtactatacctgactataataagtgaacctaagagttcagccagcctcaactacagyagtttcattcagcaggatcaaaaaagccatttgccagcatgatgaaaccttttctgtgaccatagtctgcaaggctcagaattayccagcaattcaatcttcattacctctctgtctttaaagtagaaacccacttggctcatattttaacagtacatccctataataggatggctatgctgagatcctgggtagtaaaaaagtatgccaaggtgatttggatccattttgatactttctgaacctgaactccatagctgcaaggtcaattttccttaccactgaatagtttgtacctag

SEQ ID NO: 20281 - DNA, 600 bp, Bovine  MMBT11959
aaacagtacaatctaggagctcagttaagttctctgcagttcagttccaaatctttgtcaagaaactatagagttttttaaactggaatagcttactctttctaccagacacatagagttgataattaaagggtttaaactccattaatctttattagggaatgttcataacatggcacaaaggaaattcttgacttcattatgctcaacttgtacttttgtgcctgtgacaggtaacaccccttaccacgttcatattccaaaattatacttcctttggttagctggcaagtgaacatytgggaactctcacatgaagttgctgcctgcctgtcaaccattctgtctgcggagttaagaaatatttttctacacgtcaatagtaatgattcagttatttgaagattatcatttcctattccgggcttccaagatagcactagtggtaaagaatctgcctgccaatgcgggagacacaagagacgcatgttcgagccctgggttgggaagatcccctgaagtaggaaatggcatcccactccagtattcttgcctggaaaatatccgtgggcagagaagcctggcgggctacacagccca

SEQ ID NO: 20282 - DNA, 600 bp, Bovine  MMBT20470
attctaaatgctatctgcattgcttatatatatatgtatgtatgttgctgttcagttgctaagttgtgtctgactctttgtgatgctgtggacagtagcacgccaggcttctctgcggttcaccatctcccagagtttgctcaaatgcatgtccrttgagtcggggatgttatccaactgtctcagcctttgctgtactccttcttctttttttgtggctcatatattgggaggcacgattattgtcttccagcaagaaaatggaagcaatttgcttcagtttcatccttcaaacgtttrttgggtgattactayatgctattctctgtactgggcactaagcgttcaaaaatgaaagattttgctttcttctctggaaaactcaatatcctgctaaaatctaggagtgcccacagtggcttattttcctttctggagagttctgtgtctaatgtttctcatcttatttagtcactacttttccccctatcacttttcatcacatcatgaatgaacaaaaattaatcttctcctattatagcttcaccttaattctgattattcctcttaagtaaaagttatttatcttcaagccttacg

SEQ ID NO: 20283 - DNA, 600 bp, Bovine  MMBT20469
tgcattgcttatatatatatgtatgtatgttgctgttcagttgctaagttgtgtctgactctttgtgatgctgtggacagtagcacgccaggcttctctgcggttcaccatctcccagagtttgctcaaatgcatgtccrttgagtcggggatgttatccaactgtctcagcctttgctgtactccttcttctttttttgtggctcatatattgggaggcacgattattgtcttccagcaagaaaatggaagcaatttgcttcagtttcatccttcaaacgtttrttgggtgattactayatgctattctctgtactgggcactaagcgttcaaaaatgaaagattttgctttcttctctggaaaactcaatatcctgctaaaatctaggagtgcccacagtggcttattttcctttctggagagttctgtgtctaatgtttctcatcttatttagtcactacttttccccctatcacttttcatcacatcatgaatgaacaaaaattaatcttctcctattatagcttcaccttaattctgattattcctcttaagtaaaagttatttatcttcaagccttacgattgctttcaaaaaa

SEQ ID NO: 20284 - DNA, 600 bp, Bovine  MMBT16461
catgttaatatagctgctgcctcctggcagtaaggatgaagttgtctttgcttgcacaagctggcatttggcatgggcatacaacttcttgatatttcagtcaccaaaccacttaaagaccatttgaggagagaataagtgtcctggttgttgtctgaacgccttttgtgatacctcctggtaagatcaagaacacgtcagcatcaaattttacagaatgagtgtcaatatcttggaagaagatcttggagacagcaaagaaactctcttaaaatacgttagcatcatcacatctctcawtggtacagggaactatctgcctggaaaacctcagacatcgacaactctgagcgtcaagaagtgattcaagagattcaggctggaagatgttttagaaatagtttaatttatttaacttgtagtttccttttttatgcaatcagaaaatgctacatgagaaatacaaagcctttaagactctttaaacaagataaaaaaggacaattttaaatgactggaaagtgatatatttaacagtttttcttagcatgacacaaaatggtggtcccccttagatttgagctgtcctggaatgatgaa

SEQ ID NO: 20285 - DNA, 600 bp, Bovine  MMBT03193
aatttccatgagtgcttaatacagtctgatatattatgtgttcccagtaaatatatttttttaaaaataacaaatgaactttaacaagaagcaaacacaccaattaaattaagactagatgttaattaggagggtaatggaattacctagaacatgtgtgcaatactgaataatttaagacttataaagttattttacatatgattttctagtttaaaatattattatatttggtgaatttccttaaagtatgctaaagccaatagaattaaatataatagattttgctataaaagtggyctgttctgtttagtgaagtgcaatttctctgacttaaaatgatggctgatggcctctgtgtacaaattcaatatttaatctaattgtataaatagaagcataccattaattcatccatgtgggatttaaattagttactctgaaatttatcccacatacatactcactttttaaactgtcactgtgaaaataaaaactaaaaaaaaaaaaaaaaaattggaagatagtagtttcaaccactatgatcttcttcaaaaactgtacatgttctttttcttttgtttcaactcataacattta

SEQ ID NO: 20286 - DNA, 598 bp, Bovine  MMBT04937
  misc_feature (1)..(32): n is a, c, g, or t
nnnnnnnnnnnnnnnnnnnnnnnnnnnnnnnnttctatctataaatgtaaagataagattgcttcttggcaactaactacagggcttagaggaaaggactaatgagttgacatttgtatagacatttgaaaacatcaaacaagcatttctttgtgctgttagtagaattcagtgttattactgagctcatgtaagaacagttattaaatgaatgagaaatgaactagtggtatagagatgtataaattgttaaaataaagatgactgattaaaaaccaaaaggcagaagagatcataagkatttatataaagtcatttttgtaatattaccacatttgaattaagcacatgtaatgagttcataaaagacaggaaaaaaaatcagtgagacaaacatggaaggatgaaaactcatgcacctgttctctttcaaaaacctcacacgcataaagaaaaggataaaagatcgtataattccacacgaacaaatataacagtatgagctgactggcaaaatttgagaagctggaaagcacatctacaagtgatagctgattaagcaaactgaagaaagctgaaacttaggtgcgtagaggct

SEQ ID NO: 20287 - DNA, 600 bp, Bovine  MMBT17894
atggggtcgcaaagagtcagacaccatttgagcgactgaactgaactgaactaaagtcaccttcagcatcggtccttmcaatgaatattcagggttgatttcctttaagattgactggtttgataataaataattatcattgttaggatgtacttccacgtggaggcctgaaaagctcctccttcttccagaccttgtttaagtgtcatctgctctgtgaagcctgcttagacctccccggggcagaattaacatgccttcattagttccactgccgtattttatatgtccttttatctrtcctttggtacactgaacttcaatcatgcccagttatctgaatcaaacgtatggtttcaaggcctgatataatccagaaaaagaatagtcactgtgggagaaattcttgcttttttaaagaagagattgttaacccacgtgagtctgtaactaggaaagttgaactgaacgggtggaggaatacttttggggtagagtacttcctgggctgggcctgccctattccagatttgtcaacatccttccttccaactccttccagctgctaactagactgcccagagaaaaatgcaccatacc

SEQ ID NO: 20288 - DNA, 600 bp, Bovine  MMBT18475
gggacagctatgggcctaagttaacaaagttagtaaccggtactttttaactttgaccagagttgtgtgtacgttcattaaaattctagttaaaaccacacagtaggagtttcctacaataacttgaaaatgattggaaactgtgtttgaaagaaaggtcaccatcagatcagaggattactgtagagaatgtggcagcacagtccccccgcccacagtagctcacagtggagtgaaggcccagaaatgagacaggttaatgggacccacgggtgaaccagaaacgaagccaagagtgcrtgagaatttagggcacctctgatcactgggagctggtggttcttctgtgagtgctgggggcccctggccagacccccatgcacagagtgggcacccggagggctgtcggtgggctctggccctgtcgctgacctgcctctccctccctcagagcttcttgcgcgtctgcggtgaaggccccagcacaggtcatcgtgctccgggccctcgccttcctggcctgtgccttcctgctgaccacagcgctttacggcaccagcaacccctttgccccgggagccccgctgcccccgaccctgc

SEQ ID NO: 20289 - DNA, 600 bp, Bovine  MMBT22967
ccgggcccttttcttcagaatagataatccccatgtgctatcagggggtctgagatcctcagagactgacttgctgctctgctaactttatttcttttcctagagggagaaagaaatggtcttacccgccgtccaccagcacaatcctgactgtgacatttgggtccatgagtatttcaccccgtcctggttctgtctaccgaacaatcagccagccctgacggtcgtccggccgggggacacggcccgggataccctggagctgatctgcaaggtatgaggccacttggggttgtttgygttggaggactcyacggacactcagatgcgggtggcagaggaggaktcttgaaagaacacctttatttcataacagagcagtgttggatcctcttgtgatataygcataatggatggatgtgatttcttccacactaggaggagagggawtctcttagtagcttcttgcaacatgtgttcttgatagatttgtgcaaagcctmttatgtgctcattgcacaagttgtaragaatttaggtaaagaacaaagccgaaaattaaggcacccttgctcacaaaattcagaagtcacctcggtg

SEQ ID NO: 20290 - DNA, 600 bp, Bovine  MMBT01601
tttttaccatcactcataaacgaagaagttaaaattaaaacaataatgtggtcattaaaaacctatcatattggaaaagaagaaaaaaacgtctgataatatccacgttgttcagggcatttgattgtgggcatcctgacctctgctggtaggatgtttgttgatattttcctggatggcgcaaagcactatgtattaaaaccttaaaatgaacatggatttagtgtttatgtttcaaagtttatcctaaggagacagtttgataagtttgcaaggaattatggcactaggaaatttgcygaagccctactggcragagcaagacactgaagagctgacatgatcatcagtagaaagatcggttagcacatgatggkatatctaccagtaagatataaagacggatatctatatttataaacatatgataatatgctaaatgaaagtctagaagataaaacaataygaacaatatgatagaattcacttaaacacatacagttggccctttgtgtccataggtccagcattttcagactcaaccaacccccaggtggraaaaaatatgagaaagttccaaaaagcaaaacttgaatttgc

SEQ ID NO: 20291 - DNA, 602 bp, Bovine  MMBT13976
  misc_feature (1)..(2): n is a, c, g, or t
nnctgatgctgggaagagaagggagcgacagaggatgagatggttggatggcatcaccgactcaatggacrtgagtttaagcaaactccaggagacagtggaggacaggatagctggcatctgtagtccatggagtcgaaaagagttggatgcaatttagagactgaacaacaatagcttctactagtttcttgcaaaaaagtaagttggggggaagaaaaaaaacttttgagagcaactcacaatatctgaaaatgacttaaaaaaaaaattatttgacggtgctgggtcttagttgcagygtgtgggatctagtttcctgaccagggattgaacctgggccctttgctttggcagcacagggtcttagccacaggatcaccagggaagtccctgaaaatgtcttaattttaccttcacagtaggtttagtttggcaggtacagaagtctaagttaaaagccattttattaacacctcaggrtttggaagcctcratcctgtcctccrgcttctgatcygccactgagatctggtgtcatgctgatgcctggtccttacrtgcactctgtttcttttgtcgttgttcagtcgctcagtcat

SEQ ID NO: 20292 - DNA, 600 bp, Bovine  MMBT16300
aatatctacctctatagtgagggtgtcctgcagactgcttcagaaccgtatcaggtggattatttccaagataaaaccagccacttgactaatcactgcattcaaaaggagtactcagagaactatgggaagtatgaagaaggggaacgcaatgttctttgaggaattcaatcagtacctaacaagtgctttgaacatcaccctggaaagtagtatcttactacaaatcaaaggtatcatagagttacccagtcctttctctttctgttaaatgtgtcttgatggagctttgggagtttrtgcctttcaaggaattgttccatttcagttgtcgagtttaaggacaaaaattatttgttatatccctgtattatccttttaatatctatataatctgtaatgatgaaactttttaaaatccttatgcttaatccttctgttaccttatattggtaatttatatcttctctctttcacttgggcagattggttagaggcttatcagttttattaatctcttctaaaggtcagcttttggctttatagattttctctgtcattattgttttcaatttcttcatgttctttattatttttatt

SEQ ID NO: 20293 - DNA, 600 bp, Bovine  MMBT07592
aagctgcgatggctggtgagaaggagatgcaactgcagatttagcgagaacaccctcccctcccccaatgactggagaactgctgccagctccctgggcagagccctaaatgctccaagcccagaggatggtgtccccttctaagtacccttccctcatcttctccaaccataagtgaggcaggtggaggcccctgagatctcccttttatctcagagccagcaaggtcaggacaaggcaggcaggcagagcatggtcaaatcccaggtccgcctctacttacctgagtgcccctgtgtyagctactccacctctctgagcggcagccccatgcctgcagggtgttaagatgccggcagcacaatcgatgctgtgccctgggccccctcaaatcccattgggaattctgagcgcgctggctctccatgcgcatccattgccaatgcagacactgaccaactgtcggaactctccttggcactcatggaaatgtgcaccctcacgaaggactggggatgcccagctgccccgttccactatggggactgtttggagtgtaagctcaactgtttccaggttccttctgcaggaccagcccac

SEQ ID NO: 20294 - DNA, 602 bp, Bovine  MMBT01483
  misc_feature (1)..(2): n is a, c, g, or t
nnattctgaaaatatatcatttatgacatataatatattaagaattccctcaacttataaatactagtgatttgtgatcctgttggacttcatttattttrcaaatgtttagctattcctttccatgattcagatgtgacttcaaactstgcttgaagggaagaaaatgcatagctgcagtgttttattgcagtaacaaagccattcaacagagtgattgcctttctgtattacttattattatatactactatatatacatatatatatatgaattttctgctattgaataagaaaacatmtytcttttgttgtgtgttcccacatatcatgtatcctgataataataaatctgtttctctcaatattcttctgtgaattgatttagttttatgtagcaggacatttaaacagcctttttaattcagatagcatgtatcattaaaattgtaattgaaataacaagtccgtgagaccccttaagatttcaacaccatgtttacagggtacagagctatcaaattaagactgaaaatttttctttttccttggggatgctgtttgcaaatgtaaattttcatgtcagtatttaaacatattgg

SEQ ID NO: 20295 - DNA, 600 bp, Bovine  MMBT06524
tttctaatggttcactaaattagatctgaaatatctgggattgctttcttcagtttcttagtaaagagatacataaaatcttggttattgaagaacttttgatacttactcctggtcatttctactgaaatgatctgagttgtttatcaataaaaatgaatgtagtggtaactgttcaagttggaatatattgaaatgtcttcactttctcagttacctgcctagaaagtaaagattaaattgaagtgaaatgaacaaarcttcaaagagagcagagtcagtccacagataggaaggttrwataggaacagcaaagtattatataggaacaggttagtatttcaaataacacagaaatttataaagtagaatacatatacccctataatcttctcctccagaaataaagcactatcaatttgctatatatcctttaagatatttagcatgtgcagtgtgtcagcagtaaagaatctrcctgcaatgtaggagacctgggtttgatccctgggtggggaaaaattccctggagaagggagtggcaacccgctccagtattcttgcctgaagaatcccatggacagaggagccaggtggcct

SEQ ID NO: 20296 - DNA, 600 bp, Bovine  MMBT15952
ctaaacatcaattgaataatttttcattaaatgatatgaaagaatacatcagttttaggtttcatcatagcccctcagatctattttcctaattaccctgttgatgttagttttaaaatgtgcctgtactggcaaagtgttactgtttctgtaaaatgggtcaaggaatattatcttgtttttgtcacttcaatttatagcactaatttttgtttggacttgtattcattcaaaaatttttctctgtgagaaaagactagttagcctgctgctactactcagttcagttcagttcagtcrctcagtcgtgtctgactctttgtgaccccatggactgcagctgaagactagttagcctgctgctactactcagttcagttcagttcagtcgctcagtcgtgtctgactctttgtgaccccatggactgcagcacatcaggcctccctatccatcaccaactcccagagtttactcagactcatgccctttgagtcggtgataccatccaaccatctcatcctttgtcatccccttctcctcctaccgtcaatctttcccaacatcagggttttttcagttctttgcatcaggtggccaaa

SEQ ID NO: 20297 - DNA, 600 bp, Bovine  MMBT05310
agctaaaaggagaaacatggaaaggctgactcttgcttgtggcgggatagccctaaattctcttaatgacctaaatcctgattgtttgggacatgcaggacttgtctatgaatatacattgggagaagagaagttcacctttattgagagatgtaacaatcctcgctctgtcacattattgatcaaaggaccaaatgagcacacgtttactcaaatcgaagatgtcataagagatggcttgagggctgtttaaaatgctactgatgatggctgttagtcccaggtgctggcgcagtggamgtgcaatggcagaagccctggttaaatacatgcccagtgtaaagggcagggcccagcttggagttcaagcatttgctgatgcattgctcattattcccaaggttctcgctcagaactctggttttgaccttcaggaaacactagttaaaattcaagcagaacattcagaatccagtcagcttgtgggtgtggacttgaacactgatgaaccaatggtagcagcagaagcaggcatatgggataagtactgtgtaaagaaacagcttcttcactcctgcactgtgattgccaccaacattc

SEQ ID NO: 20298 - DNA, 600 bp, Bovine  MMBT10386
aatgttgcctaaaacttattttttgcaagggaaagacaaccactgaccatgtgtggaagatccaaccactgcctcttcttccttggccactggaaaaagctgccatcatgtatcttatgcayaagacaaaagaaactgctaccaaaaaacaaaactgctaccttactctggtccctccaatcaagaaaaaggagggttttagccagttgcgaataaccacaaaagtataatgaaaaaaagaaagggggacttccttggtgggccagtggttatgactgtgtcttcccatgcaggggatgyaggttcgatccctagtcagggaactaagatccacgggaaacatgccttgccttatcttccttgataagataaccccaagatttgtaagcaaatctttgtgaccaaatgcttggtcccaggagataaaggctggtggtccaagccagtcccagaattctgatccctttctgccagtgactgaactagcagtaagtctaagacctagtacacagaccagtgaaatctgagaggaattctttagaagggtccctgggaaagaccttcttccctgataaaaaaaaagaagcaaacaaggtggcc

SEQ ID NO: 20299 - DNA, 579 bp, Bovine  MMBT01516
gttctcacacatacgcacgcacacacacacagacacgtgtgtgtgttttaatctcataggtggggtaaaagaacagagaaagattctacttattgtgataaagtctagacctgttcttctttttttttttaacaaatgagaaactgagttagagtttaaataacttacttaaagtcacacagccagaaagtggaagagccaaaaattgaaccaaggcagaggatccagagcctgctcacttaactactccaatattggtaccaaccttctaggtcctatgaggactagaagagtgatgtstgcagagacactggtcagtgcccatcagctattaatattctcattaggaagctggaatgatggctagcagcatttaatgtgttacctgcgtagtctattctgagaactttgtctcttttttatgttagtgttttgtttttctagttaattaaaataaacacctatttgtgctgaaagttaaaaaaaaaaaaaagtcacagcagcaatattcactgtaaaatcaaatagtggattttgggcttcctaggtgggttcagtggtaaagaatcgatccctggt

SEQ ID NO: 20300 - DNA, 598 bp, Bovine  MMBT12375
  misc_feature (1)..(107): n is a, c, g, or t
nnnnnnnnnnnnnnnnnnnnnnnnnnnnnnnnnnnnnnnnnnnnnnnnnnnnnnnnnnnnnnnnnnnnnnnnnnnnnnnnnnnnnnnnnnnnnnnnnnnnnnnnnnncctggagaagagaaaggctacccactccaatattctggagacccagtttgtagtactttgttacaatggtcccgacaaactaaaatggtgcatttgtctaaaacaaaggctttattaatcatttcttaattccctggtctatttctaacctaaaatgtggtgggaagacacactttattttgatgagaacatrttctgatggtaagtaaattgtttttaaatataagttaatgsaatttgtcaaaactaaaattgaaatgccttctaattaccaaataattccctgaagaagaaacttcaaagtaggggagaataagcaaatatttattaatgggtcttgtgtttcctctcggaaggtttgtctgcctgtagatgaactggatgcttgttagagtggaccagatacagaaagtggaaatgaacacaccrgggaggtggaggcagctccaacacctcccaatccattcagctgacctatcctaaaacacaaa

SEQ ID NO: 20301 - DNA, 600 bp, Bovine  MMBT08793
tgcttcttgtttgtcatattcactagttcgttgtacttttcagattccacatgtaagtgacatcatacagatttcgtctttgacttatttcacttactctaatgacctccaagtccyttcaggttactgcaaacggcaacattttgttcatttcattggttgagtcgtgtcccattgtaaacatacaccacgtcttctttgcccattcatctgttgatggacactcaggttgccttcatttcttggctcttgtgaatagcgctgccatgaacatagggtactttcctctaacctttaaaygttctatgcaggtcatacatagacttctgacaaacttgggcatggttttatggcattgcctcacaactgtgtttcatagagaggtaagcttttaactgtactcacttcaccgaagacaaaattgagagccagaaaatataagtggctggtctcaaaaggcaaatccatttatggtaggcagagtgatgctcaggcctaggtcttcatactgtcaattcagtgctccttctactggtctacgcaggctccgtgccttactctaaaatctgtcttcctataagactgcaggcatttatttct

SEQ ID NO: 20302 - DNA, 600 bp, Bovine  MMBT07361
agttcgatgagcgacagcatcaacagtaaagctcaccatctatgcagagacgaacccactaccggccaattatgagcgagtatcgctgaatgcctgatacgtatgcgccatacatgataagaagctggttcagtaaccagcatttctatagcaacgcacaccgctctgcaggctgygttctgggaaggcagttaaaactggattctgcaatgtagcttcacttggaatctgctttgatttttgtcacctcattagaatgaaagtattcaaaccaagtaacccaagttattatgaaacagmagcaacttatcatagagaggatcttaaatcatgatttctcggccacgcaaggtcagtcggtcactttcaattcaaaccactgacctggtttgcttattcataagtgaccgttccccagggcatcgaatcagattgcagtctgaccacctgggacatggggcagccatctgctgtcccagttacgagctaaagagaggaaatgctataaaaacaagccagcacaccatcttttactgtcccgaaagtcttggctaagatgcattcaccatgaccgacaaaactgcatttgtcctactgggg

SEQ ID NO: 20303 - DNA, 600 bp, Bovine  MMBT14265
ggtgttcctctaaagcctgtctactcagagtgtggccagccaaccagcagcaacatcagaaatgcaggggctcggggggccccccaatcccacacacactgaacccgaaaatacagcccagtaaaagcttcaggtgagtcgtgtgcccacagcgtctaggaaacatcagccctgtgggaaaacgcatcccccgggaggaatgacggtatgtaaagtaacttcttagtaaaagaatttgtttaaccaagtctctcttccctgaggacagatgtagggagtggggcgaaaaggggttcagamgaggtcttaggaagccaggacattttcccagtcatgacaagccatcagttacagaaaaaacaaaaacaaggaagtctcaatgtgcaaactaaccagcccacccaacacaaagaaactcaaggtcagagaggcagggccaggcaaatctggcctcaccacagcctcccctttgtaatgtgcttgattgcattttattttctgtgttttcactgaaatggcagttcgcggagaaaccctcgcatttggctgcgaacaggctctgagcagcaagagcgcttctgcagaattggcaggagggaa

SEQ ID NO: 20304 - DNA, 600 bp, Bovine  MMBT18506
agtgaggcagagggcagcatgggaccaaaagacatcagtcagcaggtggacaggaagttgatgatgcgggaagcacaagaaagctttaaaagtagctgaacaataccagagaaagagcaaatagtctgtatgtaagcagcgttcagagaacagaagacaattcatgaamataaaaatgggtgcgccaaggcccgggtacagttaagtgcaaatctagagattaagatcctaaacacacctagaggtctggaagggaaaaccagtcttaytcctgagatgaagagtcaaggacaaaccarygggctagtacccacaagagaatgaggaagtgtgagcttcaggctagagttcttgactagacyattctgttacacgcgtttggtgactctgtgaatataaggcctcagaaaatttctttctcacctaccgtttactctgggagggtgtactctgttaaacaagagtaagaagaaagatgtcaacagtggaacctgaaaacagggatccaacgcaggagtagatgccctagaagacagttcgggggcagttccgagcttccagcacgaggcactgcagcaggtgttgagcacgcccgctcca

SEQ ID NO: 20305 - DNA, 600 bp, Bovine  MMBT05290
aaaacactgtgcaatttaagtgtacatgaatattggccaacattccactattaaagaaacattattgtgaatgaaagttattgctttaaggaatgtggccatgagagctgcaatgatcagagcatggggaggtgggaaaataattgaaaggacctagcaaaccatggctgcataatacaagcaagtgccagtggtgggaaataagagctccaagccctgctcttgtcacctgaaaagccctgtgagctgcagccctggcctggcaggaagtagaaaactgacactaaggtggatgtcagrgtaatagggaaagatggcctcatcagaggtcatgatgtttctatttcaaacacagcagaggtgctctctgtatagctggtacagaggataatggaaactagaaatacttaagagcattgccttgtcttgctttcctctcttttattgtgtgggccaggggcacttgctgctgctaagtcgcttcagtcatgtccgactctgcgcgaccccatagacggcagcccaccgggctcccccgtccctgggattctccaggcaagaacactagagtggggttgccatttccttctccaatgcatg

SEQ ID NO: 20306 - DNA, 600 bp, Bovine  MMBT03454
ttgtataaacaaaccgggatgccttctttgagccatgagcaaatccacagctccctgttttctgaagagaagaagaattaaagatgggactgtttaagttggaaaggtctggggcttgaccttgctactttaaatttccttcatcactaggaaattgctttgaattcgtctgcttggagaactctaatttrgtttgttcttggtttgaaccacaccatgaaagagatgctgtccatttgtattatagcaaaacttggaagccgcctcagtgacactgttctccagttktcctctctgctrttttcatctttaaacctgagcttgttctcagtaattcagaatgagacccctgacatcttactgcctgagtgagygtcccagctagtctctgcttcacagtttgcctttggacaaaattttacacctttctctgcctctcttttcctygtgtgaacaatggggttattaataatgcctacctcatacaagcattgtgattattaaattaaatgaaattctragaaaattagcgaacccagcccacaaaacgtgcttaggaagtgttatgtattaaattgcttattgttgttattaattatt

SEQ ID NO: 20307 - DNA, 600 bp, Bovine  MMBT14824
aaatagaaaaaaatagaatagaaaaatggaagaaaatattggattttcttctcctacaacctgtggatttttattatttcatgctttcttatttatgtatcaaattaaatcattgacaccatctaagtgaaaggtgtctttcaaagggataaagtrttcttcattataagccgagcaatatgctctaaggttgtactgacatttgaatgctaatttctaaaacaaargaagaaatggttcccccaagacactcacagagcaataagaagattagagggagatttgaaggatgagactcakatgctacttcagcattccagaaaaagcatccatcacttagctgacasagtcagggtcctcacttgtcacttacctgctgtatgatcttaaatatgtcactgaacttccccacagaggctttatctgggaaatgggagaaataatacttgcttcatatacggactattttttttgttgtttcatcgctaagtcgtgtccgaccctttgtgaccccatggactgcagcatgccagacttccctatccttcattgtctcctggagtttgctcaggaggtttagcataatctagtatataatct

SEQ ID NO: 20308 - DNA, 600 bp, Bovine  MMBT03135
atcttgaggacttcaagaccgcatacgcactgtttacaccattctgatcaaagtcaatcatgacttaagaacaaactgtagccttctattcagtatttctttaaataatctttctgcttctctttgaggaaagaaaaaacttacaacctggagactagtattaaccataatgataatgttycacgtttacatgctcaragagctttagcatcattagacagttaatgcatatgacactkcattgcatgaggtaggtcagtactgttcttccctcttagcgacagggatccaggtgctgcragtttcagttctcactggtacacttgtcatccatcagtcatagggycagggctgggaaccaggtcgacagaatctctgatctctccaacgtatgtagaactgtgagcagccaacacttcccaaaaaaagactgttgacaaaaaaaaagtttatcaatgaataacaggattcaaatagagtgtttccattctttaggagagataagattgtgaataattaacagcacagaagacaatgtaaaaacgaagggctgttgtgctgtgtggcatagacagtatgagctccagggattcagataaa

SEQ ID NO: 20309 - DNA, 600 bp, Bovine  MMBT09227
ttccctttcttggagaaaagtttattgcccataactatatactgtttaacatgctgacatttatagtgaagaaataatttttaaagctgtcttttcttagtgccacagttggttgaaaaagagaacaattcatttaattaggagaatatattggtcatacacagtggaacaaattaacctatttttgacttwtttttttcactggtgagttgacagagctttggacaaaactggctgtcttctttgacacaattcactcacagccataggatagcctttccaacataaagtgaattatartaaattcttgtcttatttggaacwgttggtgaatggtctgttctggtgaactaaggattatcattgagatcatatgcaaataagcttatagaagaaacatcttatgttgaaagtaatatgacttttataggtttaactgctgactcactccatcaaggttcttagaagcatgyaccagaagctgactgtggctgactaagygaaatgatactttgttcaaaggatactgggaagctcatagtatcattgacctgactggagaacaggcctgaggttaagttcccaggaaccatgtccaga

SEQ ID NO: 20310 - DNA, 600 bp, Bovine  MMBT21733
gcacagtgctctgcagatacgctcagggaagcagtaatttgtatcatccagtaattgaagttgcgcatgttctcagctgagatcacagcaagcaacgctctgccttcaactcataccatgaacaagtgtgatttttgccactatactgccgtgcagtactcattgccacttytgtgtgtgtgtgtgcatttttgtgcctttttttttttttttcagttggtgatttcactgttaaaatggcccccagcggtggtgcggaagtgctatccagttttcagaatgtaggaaggctatgatggkcctttagggagaaaactcatattagatgagcttcatttagtgtaaatgatagtgttggagaatcaacagcatatatttaatgtctttaaatagaacacacataaaacaagattatatattgatcagatgatgaaagtgttgtaatcagagactcaagaagccctcaccctaatggccctgcagagcggtggttcagtattcactgattcagcattcatggtgactttatagaatagaacttccgtgaataatagaaatagactttgattttatgcctcgttgagaaatagctggtaaagt

SEQ ID NO: 20311 - DNA, 600 bp, Bovine  MMBT12954
ctaaggtacaccaaagcccaccccactaataataataaaatgagatggaaaaaaattttctaatatagcaatatgctgaaaactaataaagagggtatatattataggaattgttaataatggcaagatttaagtcttcagtggaatccttgaagagttgatttttctagaagtttgtaaagtcgagtcttcacaacagacacatatcaaagacttgagctcagactatcaaccttacacattcactaagcaaggttctgcttcctgagatgagactctatggactcacacaagtacaargatggctcacttctcaaggttaaaggcattctagcctcaagctcagcagctgacaactgcattgaacgtgaatcatattttattttgtctttttagaggaattctgccaagatgaactataaaaataaacacaaataggatttatgagagtttgtaggatatgccttaggccaactttcaggatcaatgaatttgtttctgactttaatgtttagaatgactcatttatatgtcttggagtaaatagtttgtctaatgttatccttttagaacatataataaggtggaattttcttcatc

SEQ ID NO: 20312 - DNA, 600 bp, Bovine  MMBT10598
ttttgttgtgcctagagcatgtaagacgttagtctcccgaccgggatcaaacccgtgtcgcctgcattggaagcacagaggcttaacagttggagcaccagggaatgccctcattcacacgttatgaatgagaaacgtgaggtgagagattagggtacatgtctgctggctcctaaggctgtgctctttcttctctgtcctagcgaaatatgcaagtcagttcaggataattgctaactagcttagggcccccgaaccttcctgggttgctgtccttcagccaagaaattgatgggaacwattctcacataccctcaaaattcaagcccattgctctttggtcaaagagcaaagactctaataaacctggctgacctwacaccaagcaattgtgctttctggcaattgcagacgtggaaacaatctcagttaataaacttacaaggagctgtcctcttctttcctttccgttctccctctctttctctctctccctccctgtttctctctkgtgatgccatatttttctaacctttcccaccatcaccttttcctacaacgtgttctactttttttttttttaatgtggatcatttgcta

SEQ ID NO: 20313 - DNA, 600 bp, Bovine  MMBT12655
cgcccctcatcccatccacctaggtggtcacagagcaccacgctgagctccttgtgctatacagcagcctcccactaaccatctatttttttttaggtctctgatgttttaaatatagataaaatactagagtctatatggtcaatattttgtttctcatgtcttagtgtgattaaaagactaggaaattttaggttagcctttcagttctgcattttaaaataaatctgcattgggaagaggaagaaaaaagaagtgaaaaacaagcaaaaaaagggattgtatctttaacacttggayatcaacgtgaatggtctctgaactggcagatggaacttgatcaatgtagacatgaaataagaataaagcttacagttgggctcttggaaaatgtagaaggtagaatacaaaaaagtgccattcacttgttcactgtacaaagatcacccctggtaatacttttagcctttttttttgcagggtttagattatttacatggcagcgaccatgtagcatatgcagaattatgtatgttgtcatttttagagacagtttctggttataaaaataatacagaattatctaaaactggaagatac

SEQ ID NO: 20314 - DNA, 600 bp, Bovine  MMBT14154
tccctggagagaaatggtatcgcacttgaaatggagtctctccactggcagtcgagcctgaatatttgggaagagctgtgcttctgagctcaggacaggcctgcggtgaacagagaggcagcaaggggcagagcaggtgctgcaaacattttccagaaacccataggccaagatccctaatcagcgaccacgtccgtctggttctggctcagaaccgggtccacactgaagggcgctggggtgccccttacctctctcactccccacctccactctctactacacatcagaccccagacrccctttctcgacggggttttcctccgttcagccaggtgctgtaagctgcccagaacaggtgaagggccacgtgggcactggtggcagacaatccaaagccaggccagcggctgccaggctrtcgggggctgcgtccaggtgatggacaccctggtccaggaaaagttacacaggcctgggaaagaaaacagcgggacctgcgtgtcctgcccacgcaattcgaaacaaaatgcaatcgccctaaagtacgcgttcccaactcaaccgtctaaatgagcttctgtcacattacgtgataaa

SEQ ID NO: 20315 - DNA, 600 bp, Bovine  MMBT14388
ttcccctcccacacttacattctcctattcctgctactctgtcactaccatcaccaccaaatagttgtgtgaaatagagaaggaactcaggtaagatagccagccaagctcttcagttctagtagcaagcaaaatgtacataccccatccaccaaagagccaacaaggaaaataatttatcataatccctaggacatatacaccaccaaaatagcacagaatcaagctctgcccaacactgaatacaaattagctggacttggctacatggtgctcttcccagaccttgtggttaaatcrtaatgagctttttaggaaaaacaaggggcctgtatgagaaatggattcctaggcagagccaataggagaaatgcttgatgaggtttggaatttaagaataagaagcaatgattagagaaacgcagatggggatgaaaatgattatatctgtactagactccaactctgcttatttacttcagagaagtgaaattaatctaagatatgctaccaagtggcaagtatttccatatactaagtgagtgagtattttatttaggggatgaaaggtgagtgtgaaggatagtttagccaaatgct

SEQ ID NO: 20316 - DNA, 600 bp, Bovine  MMBT09438
aaagataattctcaaccgaatccagatttacaagctctgaagagaggtcacatgtaatcttaccgttgcgaaaaactttattaaaatcaaatccttggcttgctagaaagtcaatgcttgagctctgaaacaagagtaaatagaacatgcatttcagtgatgttcatggcaggtgtgtgaacagaagcagagaaataactctggggagtaaatgaaggcaaccaggcaagggggcagcatgccacgggtcagaggacaaggggtttctactccacggctgctgaactgtccattcattcmcttcaactatctgggcttctctcctatagtttatgagagaaatatcctttgttacccaacatttaagaaaattttacttggtgaacttatattctcccaacaggaggaaactcctgaataaaaattaaatgtatttctattatctcaccccaggttcaagtttaagggaacaactgtgcaaattataaggtatcaatattcacttcaacttagattctagaagcccaaaatcttaattggatgttctttacattcaacataataatatagaaaaattcccagtaaagagacttattaaac

SEQ ID NO: 20317 - DNA, 482 bp, Bovine  MMBT20678
ctcagacactggaatcacctacctttggggtctaaggagttgatctgcaagctgaggggatggaagatctgggggtrggaagagaatctgctcaatggggccccctgaagtcactacacggcagcttttagatgtattggtggtacttcttctgccaaagagcaactttcccaaagccccactgacctctgctccaggaattaagttattaaactccattataaggcaacaggaaacaagagagccaggcaggctgcactctcatgagacaggggccccaggccaagttcagccaagaaytaactataagcaggtgactgacctctttttcatctgaaaagtaaggatatcacttgtttttaccatattccaaatgtgttctgcggctcaaagagcatagtaagctggcagggctttgcagcatttaaaccactccccagatgtaaatacagcggcatgtgttgtgcggctcctagagagca

SEQ ID NO: 20318 - DNA, 600 bp, Bovine  MMBT08626; identical to SEQ ID NO: 4815

SEQ ID NO: 20319 - DNA, 600 bp, Bovine  MMBT01625
ggccctctccatctccaggactctcagagagagtacagccatgccttccttcatcctgccagggtccacatcccaacccctttttgggtggggttttacctgcctgggccagcagtcacctggtattctgtagagccctggatcctctcctctcaaccctaaaatctcccaacatgaattctgggtgctgccagaatctttttttgtcccaggtaccaaaaagcataggtacctgggacttggagaggggattttgtattctcagtgtgttatttttagatcccttagttctgtcatcaytgtaaacttcagggagtatcttccctttagaaatcttcaagtgagaaatgagtcctggtttctacatccatgcatacatgtgtgcgtgcatgtatgctcagtaatgtctgactctgcgaccccatgggctgcagcctgccaggctcctctgtctgtggaattttccaagcaagaatattggagtggggtgccatttcctcctccaggggatatttcccaacccagggatcaaacccacttctcttgtgtctcttgcattggcaggcagattctttatcactggagccacctggaaagcct

SEQ ID NO: 20320 - DNA, 600 bp, Bovine  MMBT18871
tttttgccaagaagtcttgccatgtgacatttaaagtgaaagtcactcagttggatacaactctttgtgaccccatggactacacagtccatagaattttccaggccagaatactggagtaggtagatggtcccttccccaggggatcctcccaagccagggatagaatccaggtttcccacaatgcagacggattctttaccagctgagccaccagggaagccctgtgacatttaaagattatcataaagatatagtgggaggaggtagggaagggaagtggaggttgaataaaagasrtaaattctcaaccaccataagaggatgtcaaaagacaatatcttaaattgataaatcaagaaatagctgagtgagcaaattactaaagtacaaagagawaagtaatagataaaatagttagacattgaaagtggcagcctcttaagagcagtatggataagagatggagcagagatccatacrtaccaccaggtatgtcttaaaagaattcatttatttttagaaccatatgatcttccaatctttcttctttcagaccttgaccagttggccaaccctttgtcactgctcaggactcta

SEQ ID NO: 20321 - DNA, 600 bp, Bovine  MMBT22165
tgaagcaaccacatttcctccaaccttacctcttatcagtatatcctttccatatccacctgagttcttaaagcatagtaatattgtattactctattgctcggcaactccttcctgataaaatctgagagcatctcttgaaaataatgcaaaacacaggtccaaaataggatgctaaagtttctttgcaaatcagttgattcagaacttgggagtgcattttccttgtagaaatamtacatggtaggtttacaaaatagccaaaactttcaactaaagcatccataattgaagcctccyagtttagttaacagtgtttccacctggaatgtcaagatgcagtccaaatatgtgtagaaggtatggaggaggtcatttcccttcctatcctccrttggacatagagatttaataaaggaagagatttaataaataaaggaagaaagaactaatatttattaagtgcttattatttatcagtctctgttaggcactttacatattttatcttttttgagacacagttkacatttaacattgtgtaaatttaaggtatgcagtgtgttgatttgatacatttatatattacaatatgattac

SEQ ID NO: 20322 - DNA, 600 bp, Bovine  MMBT07879
ttttttgtctgtggtgtttatccctctggctatgaagctcacaaatggtaagtaaagccatgcttttcttagagataacattgatgctgtgatagaaaacaaagatttagagcactcacagcttgtaagactattatctggagttgtttataacttgtaagccctgttccagagccagtggagtcatagattttctctagcatcacttgctattcaaccatataattctacccactaatctgtaagcatttcccaatcaagcaaatcaaattcgaatgatatcccattaggaaaacctgygagttagatcaagtggtaataagatttacatagaagtttctgcaactagggatcatattttaacaacgtcagagtgtaataaatcttcatttcaaatcatactgacatttaaactagatgctgggtcattaaaaaaaaataaagcattataaatgcrtcayacattcataaaagtgatcttctgagaaataaacaggtgattcattttagatatgtcttttagaatttattttctgacattagtattgctataactatggtggagtagttgttaaatgtaattgttcacatatgctgact

SEQ ID NO: 20323 - DNA, 600 bp, Bovine  MMBT05863
gtgaaaccaaagatattccagatttcattagtgctgtcagatctatgattatagatcattctagtaatctcaatcctggtattagcctcagctaaataaattcttcttgaatgtgttattgtcagtcttaggagaagttacattagagttagtaattaaggtattagtccctgcttaaccaatttagggaaaaggaacttggctttctgagtattaagttgattgttcatagaatcttgactcaactgaaattttgacatgtaaatataagttgaaattttaactggagaattgaaataytcttttacactactatacaaattctccctctttattaaaaaatacagtgttatataactggctttattaacagacatagtagttatataaaaatttttatgagcaatatcatgtaatcaacggcagagacagtgaaacaaaagttcctataaggcatcatcaataaaataagcaaacaaaagaaccaaaagtgtttatcaatgtttcctggtgaaggacacaatgtaatacctgtaaacagagtcaggccttctaggttatttataaagcctgtttgggattgtgataaagatacttttc

SEQ ID NO: 20324 - DNA, 600 bp, Bovine  MMBT02524
agccatcctaaaattgaatcctacaagttactaacagacttaagcttacaaccatctctgaaaatagatcaaaaggcacaccctgctcaagatggctcaataatgyccttttctgggaaaaagtgagagcagttctcaaaagaacacttttttaattgaatgattgcacaacctaatagagggattgcccagatttggtatttggtgaggggagattcaaccttgctagattaccctcacttcctctggagctctgtccccaggaggatgttaaaatcaaacaaccaagaattatatcartacagtgcttaatgaagatgtcctrtagtggaatttaaacaaatgtgaatgtacttatttttcctatttgattaattgctatattcctcctaaagaaaacacttttcagatacattgaaagattagatcatggctaatctatacatagtatctgtacatacatcactaagaagagctcacaagccagatttcacactcacaaacacatattgtttttgtatttcattatttttttcaatccatacccaacaaaatgatccccatcaccaaccagcctggctgcctaaacaagatttgtaa

SEQ ID NO: 20325 - DNA, 600 bp, Bovine  MMBT07700
tagcacattggcttccctggtagctcagctggtaaagaatccgcctgtaaagcagaagaccctggttcaattcctgactcaggaagggataggctggagaaaggataggctacccactccagtattcttgcctggagaattcccatggacagaggagctttgtaaccccatggtcgcaaagagtcggacacgactgagcgactaagcaattaacacattgatgaagaaaaatgctgctttggtgcagaggtattgcatctatgaatttaaatctaaggtgaacttgaagacactttgagrttgcttcttaagtttgaggttgaggtcagttagctactcatttaactgggagtggaaagaaatcggaacttacaactctcagctgtttcccaaggtggccacctctgccacctcctcctccttcacttttggggggaatctgttttcttgtacctactcaatctaacctgcaggagaatgccaatactcttaggtgtcttggcctagatgtggctagatctcttctattcttggtttgcgtgaaggaatagttcaaagctaccctcacatactccatttcagaacatgtatcctgtattc

SEQ ID NO: 20326 - DNA, 600 bp, Bovine  MMBT08588
ggtagtacaatcttgaaatgtgggccaaggctcagaagacctcagttagaactgacacccggactagagtttcagcaagaagttccttctatttaatttgtcagaatttgagacacacctgttcatctttccagaaacgtctttgtcattcatgaagcactcgatgttcagtggtaggtctgtgctgttagagctcatcagctttttcaatttttcacactcctgatacagacgaaggagtgctcgaattttggattttgcatccaacttgtacttagttttaaattctgcacaaaaatrttccactaactttgcatcgaagttttttcctcctaagaaaggatcaaaagctgttcccagtacctaatttagttaaaacaacaaataatctggttattttcaatcatatttgtaaccaaaaatttaaatgttgctaactcaatcraagactaataggctcaaaatttctatttaaactacaacatgaaacccaagtcaattaggatgtatgtcattataaaatccaaatgaaatgctacatctctatgatatttttaattctaatgattacatagaagataatcttagaaagtttttctt

SEQ ID NO: 20327 - DNA, 600 bp, Bovine  MMBT03904
tctgactcctagggttttaccataacaaaatttctgtttctcctaggatcttgctctgaagagcacataagtctaaaaccttgcattgagtttcaagggctttaaataatagggttgtcttagcaaaagaggtgattttccttagggaagagtcttgtccaggagaggttggactcctgtgtctatccacttgtatcattttgtctgatttaagattttaacagttccctcaaagtgagattcatcatataaataagactttatttaccaatacatctgaagtgaccgagatgctaattkctattgaattatctaattaatttttattttaatgcaggctctgaaccaggttgtcctttgggacaagattgttctgagaggtgataatccgaagctgctgttaaaagatatgaaaacaaagtattttttctttgatgacggaaatggtctcaagtgagcaaccctttgtcattttttacatgcgatgctatgtgaaggggagagaaagacatgatgtgtttttaaagaaaaatgttacaggctaaaaagaaaagttgatagagaagaaaagtatttacttagctctgaactggaagattg

SEQ ID NO: 20328 - DNA, 600 bp, Bovine  MMBT12510
taagtgttggactgtgttatgagacacaagtgyctggtgtcccaacattaaaaggggttttctttccatttggaagtattatctccagtctataaaaagcaaaattttagttttttttaggagaagtataaatgacagaaacactttaaacctcattactcttactcatttaaacctcattactcattactcttgcagggtagagctgtttatctgatcttcygtaagggcctaggggtggttttcagtggctgaaaatttctgcaaatctagaaacaacctgggaataaaccctttggrtggaaactaaagcacagacagggagagcctgggctccaaactttttcccccctgtttcaagcttacctgttgctggaagtataagaagaaacattgaatctatctctataggtctctagttttttaagattttaccagttgtgtgtagttctcttttgatatagtataaccttttatcaggaaaaatacttagaggaaaaacctttaaatttaacataaaatctaattcttttgctcctattgaagcttggaagactggatctttattagagtgcatttctacaaagagataaacatttt

SEQ ID NO: 20329 - DNA, 600 bp, Bovine  MMBT14039
ctaaagtgtccttgttccaagagaggaggtggggatggatacacctaggaaaggaagcacgcaacaaaaggggtttgagtcaaatgttccctgggatcccaaagttttctaagggaacagtgcggttcaactgacccactgacaaggaaagaggtcaacgtgggcaacccagtaccccacttcctggaggctttcaaagaaactcagcatttcatgctgagtttcagaagagaaagggcagctcagaggcaggaaccaaggatgttgagggtagggaggraccaagaaacagacaaaggragaaacaaggtgggaagagggcagataagggctgaggttgagacccagagggagagyagaaagaggacaggattgccaaacacaggcagcaatcagggctctggcgtgcccaggtcagcgacttcttctcctttcagtccacaccctgagtggatgccttgatgccccgcccaggcccctctactggctgtaagtgttggttccagtgactccaacaatttgtggtggcctcttctctggagacctgagcaaccagcagcctattaactgactgatgggataggggaagggtaccaaaga

SEQ ID NO: 20330 - DNA, 598 bp, Bovine  MMBT10988
  misc_feature (1)..(31): n is a, c, g, or t
nnnnnnnnnnnnnnnnnnnnnnnnnnnnnnntttcagacagtacagagatgggcatctgctctgtgtttattttcatgtgtgtgttctcatgcgtatgtgtgtttgtgtgtgcttagcacatcagacccctgatttcacaaatattgcttaagagaaggcagtgagccagtttaaagaaaaatgttcagtaaatgagaagaaaacctggcatctgagtacgacaaagtcctaatggaagttgacaagtgcctgtggtcccaggccagagggtctctgaggcccttccctctccaagaagyggtgggttcagaccccccggccccctagaatgagaaacacacagaccaggccctggtttccaccttgtcctcatcagcaccaagatataccatcaccaggagcggcaggagaagttgctatgaagtaagtggggtggtccttcctggccacaggcccccatatgacctcagaggacacagacagtgtccacacacatgacccctggtgtgattcaggccagatgaggccagggcacaggactgacccagactgaaggcagatgtggccggagtcttaacagagatggctcaggctggg

SEQ ID NO: 20331 - DNA, 600 bp, Bovine  MMBT01547
acaaaacaaaaatcaaataaaatcgtccatacccagtgagtttctgttttaatgaagtagatcatatacaccattgtgaattacacaaattctggggtaagtgcatttaaaatttgcatttaactgcaattttgatatccatacgctaatggagaagaagaaaggatggcccggtacccatctgcaaaagggaacctggagataaaaagtcaaaaccaaaaaataatacaggatgtgttttctaggtgatttacaacattacacttggtccttccaactatctcaagtgttaggtattaygatgcacccccttttttcaggtttatagaaatggggtcaactggatggaccaggaactgaaatccaggtccattaagccggagtttatgcactgaatcttgattccacaaagaaagaaagatgttcctgggagcacttgtgctaacactttacatatcgtctctcatttaatctccacattaatctttctccacgtgggtggaagttaagtatatgttgaaagaataaatataggcatgaaaagtgactgccttcaatgctgggaggacagagggaaacagcaacaaaagcagaagccaa

SEQ ID NO: 20332 - DNA, 600 bp, Bovine  MMBT01213
cttgttgcttccaatttaatatctggctttgaaacattttacgcaactagtccattttctattttattgttcagagcttatcacattctcatcagtctaccaaaggcatttttagaaaaggaagttctaagtccaggaaaaaataagtatatatttttaaaactctgtacaataatttctaaaaaatatactctatgcattggaaataagcttaaaactaagtctactgacactaaatttagaaagaccattaccaataattaccagtgtacgtttgaggggatagaatagaggaaatastatacatgtcatttcagtaaactatgccatggcaactaacaaaactctcataatttcatttcakccttttaagattcatgtataagaaacatttcattcatcatagaaagcctgcttttatatttcctccatgaaatcccaagaactactctgaaatcatgacgttgtgatgaacgtaggacacagtaaatgatttttgaccatgaaagctacgggctgaaacgaagccagttaccaggggaaaggtactactctctgtttgcaaaattttcttctcaacaacagaggtaatgctgagtg

SEQ ID NO: 20333 - DNA, 600 bp, Bovine  MMBT11828
gtccactgtgagcagcgcgtgctggagtcagaccctgggatgctgacctcagcgctctgagcctcagtgttcttgtctgaaagcggcaacgatgatgcgtctccttggttgtcagactccagtgagacgatcctgtcgagggcctggcccaaggatgggcaggaagcatgccttcagctactgacttccttcctcccttttcctgtatgtggcctcttcttcctttccagccyctccctctctcctcttctctctacaccacagactgagtaccactccctgtgtctaagagaagggggygctttgtcacagcaccaggagagggggtctggggagcctgatggtgaagctgccctcccctaaygcactatcatgacctagaacagggctgcgcaccaaactcagggttctcacgtggtttstcacrktacagtggggaaaaagcttcatgagtgaccagtacattttagcagatgagactcaagaatgcacccaccattcagcagagggatggtagggaaaaagtgaaagtgttagtcgctcagtcacgtccagctctttatgatcccacggactgtagcccgccaggctcctctgtcc

SEQ ID NO: 20334 - DNA, 600 bp, Bovine  MMBT06755
cctaggcactggagaagcacttgccttgaacaagtcgactttgctgatgacgccgaagttgacgtcaacagtgagggcgagctgcatggtggtcggcagcgtctccagcagatcggactcatcttcatagagataaacacatcgacccacaaagaagagtcattaataaacaatacygaagctcattaaacattaaaacaataacagtaacaaaatgccaagtcctgttttgtaaatgaacagctgcaccactgtctatattttccttacttttattgaaccrgcataccccatcacaayggaaaagaaacatattttcactattgacgacaygacaattctgagtaattccagaactttgtgcttgctgaaactttagatataaaatttagagaggatggggccaaggctagtgagcaaactggggtgggaaaaggatctggttcccatcttctgattccacagccctaacatcctagggatggcaaagaaaaatgagtataatgagtaccaagtggcttacagagttctgtcatgatcttattggatgcttggggcaaccctaagtatgttcattcctgctttctggaaagaagaaag

SEQ ID NO: 20335 - DNA, 600 bp, Bovine  MMBT00895
agtcggcatttgaatttaggttcaacctaaatgctcttggggtctgccctggtggctcagaggttraagtgtctgcctgcaatgcgggaggcctgggttggatccctgggtgtggaagatcccctggagaaggaaatggcaacccacttcagtattcttgcctggagaatcccatggatggaggagcctggtgggctatagtccacggggtcgacctgcaaaaagtcggacacgactgagtgacttcacttcacttaaatgctcttagctgagcattaaatgaatgtggtcattgcctcyctttttatcttctcaaataatggctctggacccaaagctagtagccctttcttgagttcaagcaattcaagcagcgagaggggtgtcctggcaagtgaggacgttacttcagggcattaggttcttatgggtgtccctgatggcctctgttggtaggataggttctgcggrttgtgtttccagtcatggcagtggagttgtgctgatccgtccccagcagaagcccctttgtgatgtgggctggggtttgtaccatgcctggccaaattgggtggaatccttggttgtggaacagtaaca

SEQ ID NO: 20336 - DNA, 600 bp, Bovine  MMBT05452
gtgtcttctctctacagggggagaaagaatagaactcagcacgtcatctgtagcaagtgagtcacatgcatgctagtatacacaacaggcagagagcagagtgctgatcttgcagtgctggcccctggagcctctgttctgactacagtttgcttgacatcctgtcccgccaactagcagtgattaccttctgaatctctgtatcaaatggcacactgcactcgcgccagagttctcaccggaggcgtttaccaggcaatcctccaaaatcattgccacagacgggaacagagaggggaygccaggtgttacctgggcgcagtgagagaaccacacaaccacacatcctcagacagccactcagaggccacagggtccctgagggcagtgaggagggtacgacttttaagaaagccracagaaatttctcaaacctgaccccctagcgcatgttaagtcacttcagtcatgtccaactttttgcaaccccgtggactgtagcccgcctgactcccctgtccatgggattctccaggcaagaatactggagtgggctgccattcccttctccaggggatcttcccaacccagggatcgaac

SEQ ID NO: 20337 - DNA, 600 bp, Bovine  MMBT03045
aggaatgtgaatacacacagatatatttcaaaacctggaaaatttaacctaaagtacattttagctttggagtgccctcaagggtggaactgaattgctcaggagatgaataatgggattcattactatgaccagttgaaatctaacctaacccaaggtattcccatgctgttgagcagcttagaaactgtgacgaataatgcagtcctgcttcaattgattttttatcctaccactgtagccatcaacaaacaggtattttctttctaccaaaaaaaaaaaaaaagaggtgcatctgtrttcattgaaagaggaaaaagtaacaaaggccatcctcttgcatattcagatgatctttgttttagctcattttagttctatgacacaaaaaaagtgcttatttatcatgcactctgtaaagttagattggatcaatatcttatggatgtaaatatttacctatacaagttgctttcattattgtgtctaaaaagtcatatgactgatgttaaatcatcaattaagagacaattttttgtcctttactctgttacacatgcaaataaaaatatgttatataaaacataaattcaacactgg

SEQ ID NO: 20338 - DNA, 600 bp, Bovine  MMBT04939
taaatggaggctggggggactgataatgaaacacacagcctttggccattggtcagcatccgattagaatgagtcagcaggtcttagaaagtttgggagcgatagtggtatctcagcggttastgaaaggtgggtttgggtctgaattctgggccaggcagagagatacagggccacagtgccaatgacatccttctccaattctgtctyccctacaagtcttattacctgmaaacaactaatttgttaaggtgagaagctgtcttttttctaaaagaagyctgaaacacagcacacagkattatttgtgatcttacattgtccagacctctgaggtttaacaaagcgacaatggccttgcttatctttgctgctggtagacgacagggtaaatacgtgagtrtttgagcatctaccatctttacaaactgttctagaaaccatggagatagagaagaagcatgaaacagaagcaataaaagtatgttgcttcggctcaaggagtgtatcacctagtttgaaaagcacgtttttacctacactgaaagagtaactcataaatgtaaatgagtctttgaatatgtaagttcaacatgaagk

SEQ ID NO: 20339 - DNA, 600 bp, Bovine  MMBT02539
catttctcttacattggcaggcggagaattcccaccaagccaccagggaaggctgcactgtggattacctgtccattttcctcagaggtgtccttcaaggagcgtaagttttccattttaatgcagctgatcaattattctttttataatgcatgaatgtgttgcccagcacaaagctgacctactgtgtgtcatgtgtgttggttctcttatcctttacttcaccaacatcctctttcagggtcacaggaggccccttcagaggaggctagaatctgcttatattttcccacctaactkccattyctcactcctcctggacggagttggctgtcacttgytcagagtttcttttgaagggtgtccttgacytctccaaggaataatagacctccctccccatctttcccctcaccatacacagacctaatcagaagtagatccacagtggacattcagcctttttagcctcctgcatcttttctctgaaaagaaaagagtaggcaaaaaagaaagaggacagaggaatgtagcaggctggatgtcaaattagagcctatcatgaagagtggggagctggagtcaactgctatggaaagt

SEQ ID NO: 20340 - DNA, 600 bp, Bovine  MMBT16624
gggcttcgccttttgatatctttgagtttaactgaaaaacttatttaaatgtccattgtattagtcctataagaatttattggaatgaaaaagctttacagtgtttatagtattgtaaacatattttatattcagttgtgtcttcatattaactatatttcctctgtaaaataaattgtgaatgttgaatacttcctgctacaaagaaacrgatcaattaaacacatttccatctccctctctttctttccttctccagcagaattctgtgtattaagattctattaaaacaaaaacccrgaatcagtaggaaatgtgtatatgcatatagttttgtgtgtgtgtgagagagagagagagagagaagattaagkaggttcatacatccaaaatctacagggcaggccaatagactgaatagactgactatccaggcaaaagttcatgttgtaatctatagtccaaaaagtagtctggaggtagaattcctttttcttttaagtatttgtcttttctcttaaggcctgctgattgaatgaggtctatccatattatggaaggtaatctactttaaagtctactgattaaayacatctaaaa

SEQ ID NO: 20341 - DNA, 601 bp, Bovine  MMBT12403
  misc_feature (1)..(1): n is a, c, g, or t
ncaaaaacccrgaatcagtaggaaatgtgtatatgcatatagttttgtgtgtgtgtgagagagagagagagagagaagattaagkaggttcatacatccaaaatctacagggcaggccaatagactgaatagactgactatccaggcaaaagttcatgttgtaatctatagtccaaaaagtagtctggaggtagaattcctttttcttttaagtatttgtcttttctcttaaggcctgctgattgaatgaggtctatccatattatggaaggtaatctactttaaagtctactgattaaayacatctaaaaaatttttgtacagcaacatctagtctggtatttgatcaaaacgctaatgtactatgacctaagccaggtttcacatgaaatttaccatcttcctgagaaattttataataattytayataatttgactgctctaaataaactgaaacaaagcaaagcaatgaaaatatraacacaaacacacacacamaattatatgatgattggtgatgttttcagcttactagtagtataaattctatctagtcacaggaaactatttctcatatggaagtgagaaactcagtaaata

SEQ ID NO: 20342 - DNA, 600 bp, Bovine  MMBT06161
cacttagtcagagacactcttctttgagacctcttggatccatccccttctatgtacctcctttgccttcttagctgatgttaacatcacctctcacctggattgctataactgatctccaaaatagtctcttggccaccagcctttcccacctgcagtccattcccaacactgctctttgtaatctggctcttgcctacttctccagacttatctcctattacttcytctctagattctagatcttaaacactccagctgtgctgaatggcctgcattgctctgaatgggccatacttytgtgcttcctgttgtcctcttggtctggaacattccccttcaatgtcctttgccttgaaaatgctttttgttcttcttgactctgcccagtattgcctttctagtggatttccatagcatttccctgaccttcatatgggatccctactctctatgtatgcctttattattgcgcttttcattagtactgttctcagagctgtggctgttaccttacatggcaaaagagactttgcagatgtgattaaatcaagaatcttgagatggggaggttattctggattatctgggtgagtccta

SEQ ID NO: 20343 - DNA, 600 bp, Bovine  MMBT00862
aactaacccttggaacagtaaacacaacacacacacacacacacacacactcctatgcatacacatgtgatcacgggcaaggccactgtcaaatcctggacagctctgtttggttctcaaggctgccttttccacttagaaagctgggcagcagcttcatgggtattctttttgtctccctctcgggcacaggaatgtgagaggacaggagtcagaagtcacgtgtctgggcccttctcagccattcttcgtgtccacttattcctggaagtaattcatcctactctgtcccctgtctawtctctctctggagccttcccctgagctgcctccaaggtggcaggtgacaggctggyctggccgagaacaaagacagttatccttggctgccacctgtctccctctgyrtgcctgccctgtcttgtcatgctccctccacatgtctagyagacaccgcaaggcctctgggcaggggcttttttttattattttttcctttaaaaaattctctggtttcttctgtggttagatggcttatgtttgatgtttaactyctctacacccccatttttcttcattcttaaaaaatgccaacagaaa

SEQ ID NO: 20344 - DNA, 600 bp, Bovine  MMBT22894
caaatcccgccagctctaccttaaaatagatccagaatctgactattctcatcaccttcactgtttacagcctggtccaagtcaccagcatttctcacctgggttattgcaacagcctcctctctggtctccctgtttctgccagtaaccccctacagactgctctcggttttggtgttaaaacataaatcagatcataacactccttctctccaaattcctttctctgggtaaaatggttcataagacccaacaggatacagccgctggtttcttctgaacgcctcctcccatcaccgyccctcccctacattccagccacacagttctctgaatggaacgggcacattcccacctcagggcctttgcattagctggtcctcttgccggaacacctttgcccctattatctgcagtggttactctctcccttccttcagatgtctgtttaagtgtgagactttccctgacaacctgagagggaacagcccctccactctcaggagcccgaatcctctcgccccgtttgctccttgccccagcccccacagaactcagcactgtctgatacagcgctgatttatcatctgcctccttgcc

SEQ ID NO: 20345 - DNA, 600 bp, Bovine  MMBT22410
ctggagctggcatccatgagtctgaaccacagccccatcacctcaagagtcactaaacccaagcctcagtgtcctcatttacaaagtggagatgatgccaacatgtggcatggagagtgttgtgaaggtgataggagataatacacattcacgctgacaacagggcctggagcaggcagtggtgcccagaccatctgctgccgctgcctcgaggccagcaccatcctcagttgtgggaggtgcgcttcgaaggtaatccacamagactggtagagcagagaaaggcgcaaacaagtacayacatcgacacaggacagcagggagaggtatgggccgtgggcagctcgtcgaaggaggctggtattggtaccaacactaagtcactggaactgaacacaggtcatggaaacacccagtgtggtcccagaccctcttaagatgatgaattgggatgggtcctaccacagtactcagaaccgaccgaaaggctaactgaatgaaaggtttttagtgaccagcacctgggatggtaggaatgcttagagctggctgcctgcgcacatccacattggaaagacaactacaggagcacgaccttgt

SEQ ID NO: 20346 - DNA, 600 bp, Bovine  MMBT03303
taatccctaataaaaatgttaaaaagactcgactgacataactcaggctatgaaatcagagaactattgttggatattgacttttatcccagttctttcaaagtttgggtctttaatttgtattttccaagtctctaaagcattcctaacattgaagtttcatttccagaagataagtcaagaatcgtcatgactacttaactagctccactaccatcctatgttgacatcaattgctttggataatatatcagagtcctgtgtctggtcctcagacttgaagattcaggaacctagtaytgttttctctamaaaagcaayctgtctctcagggaaaagttataaattggaatttctaacttggaagttaaatcattatttttaatcaaacatttatagcatgcctactatgtgtcagagactattcaagcactttggaaataatagccactttttcctttataacaattcatttacagatgagaaatagcagacacaacaatgctatattactttcctatagacatacagcttatcagtagccatagtttagagttgaatccagccaatctggttctaaatctatgcctgcaaccatgc

SEQ ID NO: 20347 - DNA, 600 bp, Bovine  MMBT01893
ctactcgcctgtgaaaaatgaggaggatgttgccgagctgtccatttctccttcagacaacgcagtggtcttaacaagtaagcattcaagtgtatttgttcaataaatactaggctagcgcataaggaaaagaattttgtgttctcgggtaggagcaacagagattaagacagataaaacagaactacaaactagattycaaatctaatgcacagctctgtaattytgaaagatgttacatttgttgttattttaatatatctttgatatctacaactttttaaaaatcagtggagaaayaccaactgtgaagttcaaagacttcaaacaagttctgcttccaaataagcacattaaaaacaaatgtgtgccaagagacgttacatgactaaatctcagtgtttagtgagagaaaaaaatgaggattgaagctagtgtcatggcatctgttttattctcatttaagtgtcagcaggtaatctgtttggtatttgaaacttagaaacagtgactggtcactcagggtagatcaggattttattttgaagaaggagccagaagtttaatttgtacttcaaaaagaatctgttagcaggattt

SEQ ID NO: 20348 - DNA, 600 bp, Bovine  MMBT00653
aggtggtttagtaggttctggtttaaacttcagttccttctttctaagaaaattaggggaaactattaagcaaagtgaattcctcagaatcactttagactttcctttcggcactatccaaattttataaattctcttctgcctggagccctaaatctaaatctccataactgtattggctcaagtttcactttaagtacaatcttaatggatcatattcctgaggaagcttgcttcctccaataagcctgcaaaattctctcttattattcttgattgtcccctgaaatgttactcttygtgaattaatatggctctgcctagctctagataaaatcctaattttctgtcaygtgtcttgtctgtgttgcattttctgtgcacttttgtccacccctccagtgaaagggggtattttaaacatttttgtttccagagagagcaacttgctggttggaggatccaagtttaaaatggacccccagagaaacatgtatggcttgaggcatcctgtgtaattcaatgaatatccaccctacccctaacccatatttgctggctaaagcaaatgtgaaagtcagagaggggaaggagttatat

SEQ ID NO: 20349 - DNA, 600 bp, Bovine  MMBT14596
aatcagtcacacttttcttgttggaagcctcatatatatatttgtaccttgctaaacctggtctgaatgcaggagttaaaaattcctcagaaatccagatttaaacctgtaatgtcgtctgtaaatataaatgtcatggacccaagattgtgtaatgaatgatcctgccatgaaggaaattcagaagaataaaaagatacacatgcctagggcaagaagtcagcaaagagcccttaaccatgatgctgttactgagaataatgaaaacacattaaaaaaatactcatttgtaaatatgtrtatatatagtctagtaaaaacaggcaaacacatatctttctgataaagacatctttttattctacttacttggggcccaggtcagtatcaattggtcagcctgaaaatttcagtagtctctgtttgcatggcagaaattctgcacatgttttatctgattcctaagagtatctaaaaggatcttttatgttaaaagagaggtgaaccttcwttgacagactttgtctattccacttctaactgggcctctcttttctcaggatctatcctagccaaatatctcagttacatttaccatgc

SEQ ID NO: 20350 - DNA, 600 bp, Bovine  MMBT01909
gcattgaatatatcattttgtatcatttataatgatgttccccctgttttctgcttttgtgctaggttcacagccgtagcacagacagatttgaaggagccgctgaaagtccttggcatcactgatatgtttgatccatcaaaggcgaattttgcaaaaataacaagtatgttcaatttagaatttgctcttaaacttgaacagtgtgttataaaccaagtttctgatttgttcaggaagaaaaggtcagcattagggatgtgttgctgtgaaactcttcagggtttcattggatgcctyactgaatgacgctgccgagcctccatcacttatatcagcatgagtcatgcatcccttacatttcccatgtacatttcatgggaaacctacgtgactgcatgcatttaaagaaacatttcatgtattgtttccattacctaaaaatttggctcttaattagatattagtctcttctttttccaaatgcacaatttccccctgtattttccaattttcaagatcaagaatgtttgagctctcaaatggcttaacttccaccaaacaactgcaggtgccagtatgtgcaaataggattttggc

SEQ ID NO: 20351 - DNA, 600 bp, Bovine  MMBT05716
acccttcaaccacagagcccctccctgagggggcaaggggtggcatctgttaatatcttaggaaacaggggttctgaggaagccgagagggaggggctcgggaagacggggttggaagcctcaggagtaaggggaccctgcgctctacttacctgttcgcgggtctgtagggtgagtagggagcagtggtacatgcaagggtcctgtggctcatcccttctctccttccctagtgaccaccctcccttggtgggtgcctgggaaaagggatcttggtctaccagtatgccagtcccaagygggcactcgccatcctgctgctggagaataaactttgaaggggtatttcaggagaactcagggtagcagtctcaggccagaaatttgctctccttaaataggtcagaaacaccaaaggcaagaatcagacagtggggtccctgagcagagccactcactcagctagctcagaggctgacaacaaacagacaagaaaggcccatcaatgctgcaaaccccaaacctttccgtcattttgataaggctcgggcttttgactctgtggcagagtttaccgactccagttaattccagcttcaa

SEQ ID NO: 20352 - DNA, 600 bp, Bovine  MMBT01470
ccaacgtcactgtggtttcctgggtcacaatccctttrcactcgcagaaaacccaagtgcactgttctggccctttcagcacatactacatctgggcttcattgaggatttcacagagttagaagcacaaatccccgctcctccccaaaaagtggccaaaacccaaagacataatgagtgcaaaggatttgctcacccacacatacccctggccacccccaagcaaatccgagaacagggtgagcgctccccaccctcactctgaagatttggtttcagagttctctcccgccctctttycttttctctcctcccttcaggtgccccttcccrtggctcagttccacggctccctctctggccttcagtttcctcaactgtaaaatggaaatggtgacatctatctcccgggataatggatcaaatgaaataatggaaatgaagtgctttataaagtgcaaatcagggtcagtaaactcctgaccctgtagtctacaaactacaacacctgtttttgtgacacccttgaattaagaatggttttgatattttttaatggttgcaaaaaagtcaaagaataagattctaatacccaagaaa

SEQ ID NO: 20353 - DNA, 598 bp, Bovine  MMBT13918
  misc_feature (1)..(32): n is a, c, g, or t
nnnnnnnnnnnnnnnnnnnnnnnnnnnnnnnnccccagccagacactcagactgacttgtaccccgagaggaaaccagctcaggtgacctgtgtttctcagttactagtgactaactgtgaggtggagccactcacagccactgtgtattgaacagtttcacacgtaaacacgttattttggtttcacttcatagcctttttgaggggagtgttttcccctttcttcagatgaaaataaaaacatcagagtaacgaggcttctttctaacctcagtgccaccgtacctctcccacccccytaccccctctcagtggataaaagggtgttctgctttgctttggattcctttttccccagggccaagtgtgggaaagtgctgctgtcttctgctgtcctctttacctcccttatctctcctggccttggattcactctttttttgatgtttaatatttaaatattgtgcactgggctctgctgtgctgagcgctttccatctgctattttaattaccgacccctcctgaccatgttatgaagcagttggtattccacccaagatgccatgagaaaacggagactcggagcttcccagag

SEQ ID NO: 20354 - DNA, 600 bp, Bovine  MMBT01604
ttgtgttactaggaaaggtgggatggttctccacacatagctacacggcctcacggcctcatctcgtgtgagcctcaagaggcatggtatattggctccgtggctcagaggagacagcgaaagcccagagagcttccatatgtgtgtgtgaagacttaatcggtgaacgactgagcatccatccctatctcaggtttgcccctgcccctgttccgtgcctctgtgagggtctcagagaagtccagacacccgagagtcacccctcaccttctaggtttcctgctactggaatggaccagrcagttttccctcttcttcagaggtgggagcagggcatgatttggcccctgtgatggtggctgaggacacctaggggacacagagtttggtagaaccccaggccggtgggggtagcatcctgggagagaggagaaggtggggtaagggagaggaacacccaggggtggaagaactgctccctgaggcagagaaacccccacaaaaccaaacagatttcacccagcgacaggttacttattagcttcaatgtagacagcatcttcaatgtagacagcatcacccttggcctgaacgcggaag

SEQ ID NO: 20355 - DNA, 600 bp, Bovine  MMBT06072
taatcatttatgaacaagtgcacaccacattttcattttgtactgggcccagtggatgatgtatgcggtcttgcaataacatgaagaagttattaattctaagaattgttgaagttcacattatcaatagggtaaaataagtttggataaattcatgaattaatgtagaattcttaatgaggtctgtttttaagaagctgaagactatcttttgggttttctcaaacctttgaggatgatgtaataagggcagctaccaacagagggcctaacagaaaatgaaatttcctttctcattaygatctatctgaaactcagagacatgcatgcaactgctataaatctgagtaaacaatgaattacaatagaaatgttgatcaactacttttcaaaggaagaaaaacttgaaataatgattaaaaaccaaacagaattatgaatgaaatgtgacacttccctctctctcagcatttaaaaaagtaagtttctttgatggctctctatgacccttattctcactccagtttccccggcagcttccttgtcctaatcacttaaacaatcttacatcttccccaattagacagaaaccagaattta

SEQ ID NO: 20356 - DNA, 600 bp, Bovine  MMBT10877
gtctgtttctgttttgtatatagattcatttgtattatttttatattatatgctgcatataagtgatatcttttgatatttgtctttctctgacttccttcactttgtatgataatctctgggtccatacagcttgctgcaaatggcactatttcattattttttatggctgagtagtattccactatatatgaacactgcatttattaagcctcttgtctgttgataggcacttgggttgtttccatgtattactactttggctgttgtaagtagtgctgctgtgaacattggggcacrtgtatctttctgaattagtgtttttgttcttcccaggtatatacccaggagtgtaattgccggatcacatggtagctctatttttatgtttttaaggaatctccatattgttttccctagtgactgtaaccaatctayrtccacaccaacagtataggaggccttgccttctctctgcaccctctccagcatttattatttgtagactttttgatgatggctattctgacagaagtgaggtgataactcattgtggttttgatttgcatttctctaatgattagtgatgttgaacacctt

SEQ ID NO: 20357 - DNA, 600 bp, Bovine  MMBT05532
caaacaggccagcacctccagccacaacccatatctgcagagcctgctggcctgcaaagcttcagctggttggtctcccagcagggcccagggaccctcactgtctgtgagctgcaagctggtggacctgccctacaccctggggcagtgaactgtcctcctagagagtctcatgatccagttttcacagggtctcttcatcttagtcttaacatccatcccatcagtcacaccaagtacattaccttctaagcctggagaagcccctccacccccatggagaaacagcactcaacccgygcttgtgtccagctcccatgcaccactcccatctaacctcactccaatcacaaatctggggctcttcttctgggcttcctttattacaagattttcctcctgattcttggctggacatgttctcagcaactctcttccatccagcgaggggaggacagaccacaacagccagcacaaccttcctcccaccccaggggttcatgtcacaccaaacaccccacaaggaggtaggtgggctctgcagatccccaattcacaatccctgaaccagtgcccacagacctttgagaccctcccatt

SEQ ID NO: 20358 - DNA, 600 bp, Bovine  MMBT02245
tttctaaatttaggaaacaaattctgkttttttttttccccttttcttgcttttttcatttattgtaaaatcaagaaagtgaaatattctaagtatatgcttacaatgattttaccattaggaaaaatgctagtgatattgtcagtgagtcatttccttctttgtttatattcctacctagattttaaaccacaggccatctcacctctcagctctctctcagtgccttttcctttatccctagagaattaatctcatgtaagtcttcaactttgtggctgtgacctcggaaatttcttyggyactccacattgtgataattctttgtctgaaagaacaagagcatgagttaaccctaaaagaggagctggactgcagaaaggaagcaactccaagctactgaccaaggcaagcctctatcatacctctatttcacctttcccgaagtttcatgtatgttgtcaatattgtatatctgcacatacacacagagattgctagattgtggtacctaacaataagaatttcaacataggactttgtttctagtattatctaaactcaatacctggacgtaccctggagattcaactgatgttt

SEQ ID NO: 20359 - DNA, 600 bp, Bovine  MMBT07120
ctgggatgatacaccattgatcattgtaagaaatacttccagaaactgtttttaatctttccgccaragcattagcaattattctttagcccatggtgagtaatgacttgagtttcccagcttctcaatcgataaaacatttaccctaccgctacaaatgtgctcttcgcttagacaagcagaatttttcttccaattactctttttttagtgtgacctcataaaatattttaaaacatatttcaaggctttttttttttaaaggagaggaacaatgctcttccatgtgcttatattttyctctttcttttaagaaataagtcatgacaatttcatagttatttgaatagctaggactgctttttttttttatcattttgtgcaaacttaagacatgatttgagtccagccaactgctacattttggggttagccaataacaaaacaaccccctttccattttgcctgaacaaagatttgaattcctttgaaaatcaacaacaaaataactcccaaggaggctgagcaactcctccactttctctgcatggttcataaacctatagcactggctaatggagagcagccataaaacacact

SEQ ID NO: 20360 - DNA, 600 bp, Bovine  MMBT05366
cgtttagagttacacctgtccttaatgtttcataatacttaggaaaaaatgactgttttcttattttccttttgaagccagtcttaaaggtggacccttttcccagttttattgagatataattgacatacatcactgtataaatttaaggtgcacaacataatggcttgacttatctttatatattgtgaaatgataattgcagtaattttaagtatccgtcatatcatatagatacagtaaaaagaaagaaaaaatacatttttccttctgatgagaactcttaggatttactctctkaacaactttcatatgtatcatacagcagtataactatagtgcatcccctaactgctcacgtgtaccttatatcccaagtacttatgtgtcttataactggaagttttcacttcatttaattcttcctctccccacctctggtaatgaatgtggtttttcattttgtttttgcttttttgttccatatataagtgagagcttagcataatgccctcaacttccatccatgttgtcacaaacagcaagatttaattctttttatggcagaataatattctgttgtgttttaaaccacactta

SEQ ID NO: 20361 - DNA, 600 bp, Bovine  MMBT22905
gctccagagagtgtggaggctctggggtcagaaagaagtcagagtaatggacagtgacagtaacacccaccaagtgtggaatgcctacggtatgccagatgctgtgttaagcacagttcttacagaaactccacgtgatggaaactatgatcccatttaaggatggggagactgaggtttggggagggacatccatgtgctcaaggccatagggctgggaagtagcacagtcaggacatcaatctgtctgtgtgcagcaatgatggtaataatagcacataattatataccattcactakattctaaggcactgtcctaagaatcccactaaatacacaaccctatgatgtcactgctatcatcactaccattttacaggtgagaaagttgaggttgagaggcttaaactaatttgaaagaaattactcagctgctagaattwaaaaaaataataataatctggacttactcttcaccatgttatgcagtggattacgccttctatgcatttaacttgggaagatctagccatacacgatgggccaaacactttttaaaaatcattttttcattttttctgttttatgtatctaaaaata

SEQ ID NO: 20362 - DNA, 598 bp, Bovine  MMBT13051
  misc_feature (1)..(67): n is a, c, g, or t
nnnnnnnnnnnnnnnnnnnnnnnnnnnnnnnnnnnnnnnnnnnnnnnnnnnnnnnnnnnnnnnnnnnataaaaggaaggacaaagaccacgtttgaaatacccagaggccaattatcttcacagcatctaggtgacactatatgggttaggttatggatcaagttattttctagttgctctgcttgctttttatctaacaactgcccacatacctaatgcaatgagtgtctttaccaacaaggaacacaattagccatctcttctctctgcttcccttctactctcttccttcctgtaamcttccagagtgattactactatgtattttggaaaggctctgtgctctgcactgtggaagggcctgagataaagcatagttggtttttgctctcaaatagcctagaatttgtcagagttctaagtgtgtagagattgttctataaatgttggttaccagaacttgcaaattactggggaattaatgcatgggaggagtgtttatcgagaccctgaaaaaaagtgaaagttgctcagttgtgtccgactctttgcaaccccatggactgtagcacactaggctctactgtccatggaatt

SEQ ID NO: 20363 - DNA, 600 bp, Bovine  MMBT12003
catctactacatgcctgccaaagtgctgcccatcaggcacacagtgggaaacatgaatgcaagagctctgcccacaaccccctcactgtctgctctgcatcatccagcttgttccaacagaccaaattctctaaggcaggtccacgacttgcggtccatggcattgattaacctgaaaataaagagagatctttggttatctgtgtatttacttttctaaggaaagggctcatagcttttattcatttccctgattcttcactttaaaagttaacaaccaatagtaaaagaaccatgatkgaaatcaaggaatgaacaagcagttaatataagtggaggaccacttctgctcctctccctgtctcttcatcccatcgcaatctctggtcacatcttattgagaaatctcaagagccactagagtgtaactgtatgatacttgccttgaaatcgctaaagtactacacataaatactagttaatgctacggtcattattgctaaacttgtaggtttcttcttccaacattttccaaaaaagtcaaatatttcatgaccacctactatctttcaaagacattaccttgcaacgctggtcatt

SEQ ID NO: 20364 - DNA, 600 bp, Bovine  MMBT05486
aacagagaatatgatcatagtggcaggcactttgtctgtaggatttcacgtagccctccccgcttcccagggaggttagtctggccgtctccacctccaagggtaggcagggcccagagaggtcatgttgacagaacagcttgacatgaagtggtggtggccacaggatgcctgtggctgagcgcctggagacagctgggccccagcctggatgccggctttgtctcttcctggtggggggtcttgggacaatactctgagcccaaggacatggaggtgggtgcgtccatccctcaggcrgagactgaacggcattgtgcacacgacagcaaccggagcagaatgcgggctcagggaggggtagccgctgtggcattactgttggggttcagtcgctgactcgtgtccaactctttgagaccccacggactgcagcaccccaggcctccctgtccttcaccacctcccagagtttactcaaactcgtgtccatcacgtcagtgatgccatccagccatctcatcctctgtcacccccttctcctcctgccctcagtctttcccagcatcagggtcttttccaacgagttggctctttgca

SEQ ID NO: 20365 - DNA, 600 bp, Bovine  MMBT10920
gccaaagaggctgaggtccagaaagacctggaaaatcctgctgagcctgaagcccaggagacttctgaaagtgaggaagaaagtgcagtggtggaggaagaaactctcttgaaagaatttgaggaaaggcgatcacttagacagaagtctgagctcaaccacatggcggagccagtgcacagacatgtaacaaaggatcctagcagccaggaggttctgtccgaattgagggcactgtctcagaaactcatcacrgagaaccatcagtcagggaagcaagaactgagttcagcgaggacwgctcagagagaggaacctgccagggaggaagaggagcccatgttgctgcagaggccaaagagagctcggactctggaygagctggaggagctgggcagagaagggtgtgttgaaaacaaggagcttcccagaactgcagtggaagggctgcagttggagaagaatctaagtaatcatattggcgcccccaaggagaagaaaaggaaggagcaaatgattgatctccagaacctcctaaccacaaaatcgccttctgtgaagtccttggtagttcccatgactgtacaggcgttggaagat

SEQ ID NO: 20366 - DNA, 600 bp, Bovine  MMBT17731
gaatgccatctagtcttttctttgggcattaatttcaactttgtcctggaaaattatgataacatttgattctcagtttattagaccaaattaaaataagtaagaaacaaaactggtttttcctttgaccactttgagtgctccatgcaacctgtaaatctgaaaaactggcataagtattctgctgaggcttgctctgccttgatctgcctagctctgcccttgatatgagaaaaaatatggaagatgccctgtgtcaagttacaaaaattgacatgagaaaggagaggaaattagatstatgttagctatgaagactgaggaaagcaaagtgtgaaattggaaaaggcaaattttctacagcccatctctcttgccaagtcatctgtctgagtgaaagaagacctttaagtgaactcttcgaaggcctacgggcatatttcttagtctgttcctragaactgctcatctccaaagaaagccaagtgcatgctcagtcgcttcagtcrtgtccaactctttgtgaccctatggaccatagcctgccaggctcctctgtccatgggattttccaggcaagaatactggagtggttgtcat

SEQ ID NO: 20367 - DNA, 600 bp, Bovine  MMBT13438
aaatatgcaaattttcagagtctcagctgtcgatggaaatacaaataatagaagtgttgayaacagttgcttgtaacacatgggctttctcttgggtgtgttgttagcagctgtccccaggtctgggggttcctgattagggcaacagytctgaaaactgaattctactctaagctgaagtattggaaagtaaattacacacatcataacaaggagccacaaacgggagaccttgtgaccctgccaatcactgagtttggagagagaaagtaatttactaaatcgtatctcatgtagagkcctgatcccttgctagagattcagtccctgactgagttcacaatcccagatacggaccccaacccccatcacttgctgaccactgaccctggcacagatggagccaccatgctctgcagagcctggacccccggcaagtctaacgccagccctggaggcgagctggcatggagtttagaacagcgtgtgattgtaactattcaggccacaggataagccttcaagcctgaaagtccctagtaaatttagcttggtttgaatattctgtcagttgctttcctgggagagatgtggattttc

SEQ ID NO: 20368 - DNA, 600 bp, Bovine  MMBT02150
aatcatatgagttaatcagtatcactaacactttaaagtatcattaacacattaaagtatcactaacgctttctggtgtttgatctggcctacctttccacaaatgtgggtctctgcagattgttgtccctaacttactgcggtgaggccagcctgtcttctcagagggatgaacttgacagcccttaaaatgagccataagttaaccagggcctggagctcatatccaggtcaagcaatgcttgagctggggtgtagagcttgaaaatccagtcctgactgttctagatcattttcatygtatgtgtgtgtgtttgtgagagagagaaggacactaaccaattctcaatcagaagcatcattcccktactttttaattaaatgtttgtttttatcacagcagtatgtatatataattttaaaagccaaagcatcttataaagtgtgtaatataaaactggttccttggctcaacctgaccacgtctacccactactcccgcaaagcagccactttgaactcttcttttgttcttcaagtagcttctactgccatttaaatttttaaaatttttagttattgtttattttcttcttccca

SEQ ID NO: 20369 - DNA, 600 bp, Bovine  MMBT01948
atgttaatgactcctgaatttacatctctagtccattcctttcctctgagtttcaagatcatatatacccacttgaatactggctattaccttttggatagttccatttctgtttcgtttcagaggcacctcaggctttgttcttgtggcagatcccatctcttctcttgtcctgtgtcccacctgctccttctcaagtcatcctggccacagcaagtcacaccaccacccacaagttcactccagctgtcacttctatatctcaacaagcgccccacacccaccgaaccgctcagtgcrgtgtccctgcagagtctactacctccagttcattactgtgggaggcaggttccactccacagcagatgtggaatctcttctgttcttcccattcctgctgacacccacctagttcaaggaccaccgtggacctgaatcacagcaacgacctcctgaacacctcctgtmtctcctctccagtcctctccatacaaacatccaaagagagagtttgcacacctagcttggatcacatcactgccgtctaaaatctgtctgtactctcaggggcatmcttgccctcacccagcactttgtgct

SEQ ID NO: 20370 - DNA, 600 bp, Bovine  MMBT03791
accaggctcctctgtccatgggattttcccagcaagaatacaatattacctgtaataagtcaaattacacacaggaacttcctccatagccccaaatatgtaaatcagagacagaagtaaaaacaaaaatcattaaatcttttaagaatctaatcacttaagagagaatattatcaccccaaatattcagtggaaatcatccaattgaaagacagaatgtgtatatgtgtgagtgagtgtgggtggtggcggggggagatggaggaagagaattcggagacagcatcagcaaaaagaaayagaagtggttttcatgaataaaactctgaaaacacttcactccacttgtgcaagaattatggagagcagcattattttgctgacccagcaagatacttgcttagcaaatctcttgactacctaagaacactctgtcaaattatttaacttgttaataacttctaaaaacagaaaattcttggcagcctcttcgctaagaggcatcgctctcatttcagagccctcttcgctgctctcgctgcagttactactcaccctcatgctcttcagtcttcctcttgccaccgtgggctccaaatc

SEQ ID NO: 20371 - DNA, 600 bp, Bovine  MMBT08943
ttgaaactaagcttagttcagcaaaacatatttaagagggttgaaatctggtgctaaagagacttggcatatattccagaggacttttgaattctttcagaacaaggataatatttattgcttagataaaatatagttgtgaataataaatcaagtgtaaaactgttgttcttgcttatactatatattctaatatcttttggttattttctatcaaattcataaaaatgtttgttgagtacctactgtgtaagcttctgttacaagtttttacgaaacgtaagacaatctctgctgtcyagataatttcaatctgttttcaattttgacctctttttttctttcacagaaacctaagtttttctaaatagtttttaaaatatttccagacataattcatatgccataaaattcacttgtttaaagatgtgtaattcagtggttttttagtgtattcagagctgtgccttcattaccacaattttagaacatttcattagcccccaaaagaaaatttgtacctcttagacatgaccccctaatctgcttccaaaccactttctgcctctatagacttgcctcttctggacagttcatata

SEQ ID NO: 20372 - DNA, 600 bp, Bovine  MMBT09830
tcgcgcatacacaaaaagaactcacttgacaaacatgcagggggcagctctgtgacatgaaagggtctttgaatgcaccagggccttcactcaagttttcttaatgactaatattctytttgtgtcaagaagattcataaatgttcaaaaatgcaaagggatgtcagtatgggtagaatgattcaaatcacacacacacacacacacacaaatagaatccagaagtcactacttaaaatatgcaaagcttctttccaaagtaattagattatagacttcgacctagcaaacagacataartaycttaaactggacaaacgcaaaccttaaaatcattacaagagaaaataaagtgtgatttaggaaccttaagagattaaatacctaatcatttaggcaccaattctcaggtgacaaaataattctgacttactttctaaatttgttcgacacttgtgagtgaamagggaagggaaaatctcaatacaattcaggagagaaatgggataattactccacgtaatcaaacctcccagagactgcaggctactcactttagcagcactaatgactgtggcggtgtaagactgaatgttgtct

SEQ ID NO: 20373 - DNA, 502 bp, Bovine  MMBT21741
ttctcttttatgtcgggaaatacacgtcaaaagtcatttaagaaacttctgaggaagtctgctcttgtgttcagtgccaccacttcaacgtaacctgcttactgtgaagaaggatagggttaaacagcaggaaaggtaataaatagtcttgtaacccttatctgtggggtcacgtcccatgtttttctgagatcttcataaatgccagagcagcttgttgtaagagctctttgggaagccagggggccagtgctgcctaccttctcgtgtggtgaggacatggctctcatgatgtatctragggccgacttttgacactccgtttactccagaagcacaccatgtagcaggatggtgaacgtaaagtaaaaatagttaacaacatataaaaaattagattttctcatcccataggccatcccgccccccttttagggagggcttctcattggagaggtggtgtgaaagaaatactgtttgttttatttctttaaaattcgga

SEQ ID NO: 20374 - DNA, 604 bp, Bovine  MMBT01323
  misc_feature (1)..(4): n is a, c, g, or t
nnnnatgtttgcttggaaaaaccaggcaagcaaaaattaagcacaaatctttcataaatccctaagtcttagagaatcactgtttagtgttcctagttttgtgtatgcatgcacacacacacacacacacacacacgtgcatgcacacacacagacatatttagaaaaatggggtcatcctgtacttagtgatttgtgacctgctttgttcacagaacaatgcctcgctgccttaaatggtcatcttgaattattattaatccccacccccaaggacccacttctgtggtcatcaattgcttayagttatttacaaaatgagcaacataagtccaaacaacccaaatcagtcagcaacggggagagcatttctcactaactgatgcagtggtaatctgtgctttgagcagtggtgtctgctcagaaacaagccctacatcccatgaaatgtttgtttcatcaagggctccagggctcaggctgtaaaagaaacaaagagtttactgagcagccataaccttaaaattgctacagtttctatgaaactggaaaattccatcgctacagccaatgtcaacagcccaggcaagaaaggaatgtagga

SEQ ID NO: 20375 - DNA, 600 bp, Bovine  MMBT01540
atttccctggtggtctggtagttaggacttagtactttcattgccagagccccaattcaatccctgattggggaactaagctcccaaggggtggctacaaaaatgtcttcagtcacactagccccatttcaagtgctcagaggccatgtggctcgtggcttccctagcagccagcgcaggttacagaccacttccatcatcacagaccactctggtggacagcactgggtccaggctctattggatttgtgtccacgggtgcccaggtcttcagaagaaaaggtacaattccttagattmgctgcctttgagaaggcagctgtttgctggcctgaaggtcagaggaggagccctgcactcttcaaagtgyttcacgggagtggctggcctcatgctggggctccgcgtcagccacatggccccagctagagctcgggagtctcggcacacgaggctcctcttcatgtttgtctggccgaagtctgaattctctctcgggcccatgggcaatcgcgcgtttgcatttcagcgagtaaacccttctggatgacaattcatgaccacagagtctccacagagaatcagatctggagcttctca

SEQ ID NO: 20376 - DNA, 600 bp, Bovine  MMBT18385
aggtgtgaacattcactaactgtaggaatcccagcatgtcgggggcacaggtaggatacatatccattaataaagatagacccacttctgccggttcactaggggaagacctgtgatggaagacaaaaggtttgtttacatttttatgtgccatcattactgaagatgtattgccactaatttattgactatttgttctttctttgtaaattaggtatcttttgggatttgcttattttttcccaccaaagtacgtgtgttctcctgtttgatttgtgtgacttcttcggtgctgttcaygagcctttctgcctccggtgcctcctgcacatctggctccttctttctctggtctttgggctttagtcacgttttctgacttagagttgcacttattttgttgtcccatctctccccacgtcttttcccaggtgcctttttctcatttgcccttcatcattcagtgtctttaatggtccccgtttcattctccgatctgttgcgtcgcttcttcttttacttttcatcactgtttttttccctgatgttccacttccctcctttttctacttcccttgttttgtcgtcaccaggcagtaa

SEQ ID NO: 20377 - DNA, 600 bp, Bovine  MMBT09943
gaagcttaaagaggcagaagtgtttttgttccagtcaaacttgattgagtcttaaatcatcataatgagattttcagcggtaacagcatgttctctgcttctatttcccttgtttctgaggcttccatgcaagtctggttctggttgtggggagaatgaggccgtgttattttctccgggagagacaaggagatgccctggggtctggggcttgttgaatgtgtcctttgttaatcagcactgagtgtccacgggacatcagcaaagccccgtgggaagccagcagcggtgcgtggaccsgtctgtcatgccaggccagcgtggcagcgccatcaagacagctgttcctgttgggcttctcacttcaaagactcccgccttcctgaacatgcatcccgagttttattttccagggctgcaaaccaccccgtycctaagggcacaaaaggtcaagctttcatcccaggccgagaggaatatgcacttggatcctttccttttttgttttccttcagggaagtcataaaacctgctttgataattagtaaacagccagcatgttcccaacactcataaaacataaaggcgacatgaaaaccc

SEQ ID NO: 20378 - DNA, 600 bp, Bovine  MMBT05727
aaaaagacaaattgggagattgaaattgacacaaacatactactatataagaaaacagataactactaaggacttaactacattgcacagggaaattttactcagtactctgtaatgagttatatgggaaaaaaattttaaaaagagtagataaatgtatatrtatcactgattcactttgctgtatacctgaaactaacataacattgtgaatcaactatattccaataaaaatttaaaacaacaaccactcttgttaaatgaaatctctctagtccaaggaatcgaaaactacaggamgggccaaagtttcatcaaacagacaggggcaccagcagagccagagtccactctgtgagacttcacctgcctagcacatgtcctgccaggccactgtgcagaagyggcccagccctcccactatcccagggcccctcattgggggaaatgcctgcttcctcctcccgggatagagcctggcagaggaaggtgaggtgagcaggaagcagaagtgagcagtacagacaaaaggacttcgatgagggttgttaaaagaaaaaaaaaaaaaaaccagaatcctttgaaatgacaggctgagac

SEQ ID NO: 20379 - DNA, 600 bp, Bovine  MMBT01517
ggatgctgtggtatgtgcgccgcagctccgcgcaccgccgcctcatccgcctcaaggacacgtacgccggcgcgcgctggctccgyggtgagtccccgacgcagcaaaccagcgggcgggcggccgagcgcacagcgaaaccagcctgctckcccgctagctgcagccscgcggtatctgcgccctcgctcccttccacctctctcctgtagtcttctctgcctccgtcttcctgtccatcttttctgtgcccccctccccacaccttcacttctcttctctctccctccgctttcaggytcttgccttatattccgacgttggagctacggttacagaaacctattcacatctttctttccttatttaaagccctgccatggttccactgaccccgtgacagaggccacactccctatcctggcgttcaaggctctctctgatcgggtcccaggtgactcttcagttttatcttctttgtcctcattctgtgctccaggctcaaaggctttaagttcccgtcacagtgtctcattcctccaaagatctggccccaacgccaccttctccacacacttggcaggaattactcctcactcc

SEQ ID NO: 20380 - DNA, 600 bp, Bovine  MMBT06116
aaggagacgaactcaggcataaagcctgaggtttaggactcagaacccaagagtcttaaactatttagaactttagaactctgcctgtctggagtgtggttcacttagagagcaagtcaaaaaacacagccaggaagtacaagatgataaaactatcacaaaggttttgggtaaacataagrgaaaaacaaatygttgactagtcaataaaagggagaaggcaatggcaacccactccagtactcttgcctggaaaatcccatggatggaggagcctggtaggctacagtccatggggtygcacmgagtcggacaygactgaagcgacttagcagcagcagcagcagtcagtaaaatatgggaatcatttacaaaaggagattgtgtagtaactcccttaatagagggtttaccctgatgaagcaggttcctagttattccctgaagcattcccaagtgtgttttcagaagatgttttggcaatatgtatcaaaaacagtaaagacgtgactaacagcagtttctctcaggcaaattgctcattatcttctaaattgtttcttcatctggtaataacagggtttgggggaggattaaata

SEQ ID NO: 20381 - DNA, 600 bp, Bovine  MMBT04275
acatatgtgtatgtatatatacacatgaaaagatattcataatgtactgctaagtaataaaagcatattgcaaaataaataattgtaatgtgaccacatacttggtatacatgaacagatcacagaattaatgttaatgtatacacatgtacacacaaccaatagcattagtagcttatattgccattctctaaatttttctataagtgtatattttgctgataaaaaaaacatcaaaaaagctgtatagatgtttttggaagatctgtattgacaagaaaatgtttatgatataatgcrtaaaaaagaatacaaagttatacacacacaatgatagcaagttgatagaaaaaaatattttgacatagagaaaggctgttaggaaatatactaaaatattcacaatggcgatctctaggtaattttttccttaagatttataagaatcctatgtcaagcatatattatctttagcatacaaaagctattttaaggctttttatctgtattgttctacctatccccctagctgaattggttcataaactcaaagctggtaagacaattgattttttgttttttgtttcccctttccmcatc

SEQ ID NO: 20382 - DNA, 600 bp, Bovine  MMBT22106
attaccacagaaaaaaactggactatccttgagtacaatcctgccaatgacctgagaagacgagcctgggggagagcgggtagggaggtgccaggggacctagtgaatgaccccatttcagaagcaaacgcggggatgtattcaatamattcyagtagcaccaagtcacatgaatctggatgcacaaattaaccccaggctggttttaaatcatctctaagagactgttacacatttcagggagatctgagaatgttgtgcacatgatcctcgctktgtgcaagaagatgcctgcctcaytgaaggacaggtggctgcctttagcaactttgtaagtagattaaacacaccaaagaagcagtgcagagttctggataccaggatgagacctgcagcyagatggaacagcacaggagctgcgtaaccttaaccaagtgctgcacattccctaagcctcagattccttacatggaagactggaacagcagcagcatcctcataaagatgtcacaacatgaattaacacacagacaccatgctggtaaccatggcaacacgacaacattattcttgtcctatctagctaactttacggcttga

SEQ ID NO: 20383 - DNA, 601 bp, Bovine  MMBT19758
  misc_feature (1)..(1): n is a, c, g, or t
ngtaaatatcaaccactcactacgtactgagtaactataatattcatggcacagtttcacattctttttagtgtggtgctagcatcatttctactcttggtggtctttagttatgtatgttattatagcttagctggtaactgtttttaattctcaatcccatatgtttttttgcatgcaaaatagtatcaacaacattatgtcagacccaaagatacagaaggtgatgaaaactgagctggtggatcctcattcatctaataagctggaaaggctttacagaaagaggaaccctaattgyacatacaacaccctcagtctcacatgtcttcaaaatgacctttaaaagaatgctttaaatgtcatagcttttttagaaaacattgagccaaacatggaaattgcatgagaagaatttctgaatctccaattaaaggcacaaagagccacattttcaatttcctcttctttttttctttctctaacttgtcaatgcaattatttaataaaaaccaacatcacattaaaataattaggcataagcagttgaatgttgatggatataatacaagcagtttcttagacagaggttaagtttttg

SEQ ID NO: 20384 - DNA, 600 bp, Bovine  MMBT07783
tcgaccgctggttttatttagaaatgtgttatttagtgttaaggtattaatgattattgttggtcacaggacttaactgtctgattcaagttatttcagatttattgagacttgttatatggcccagaatttgatrtattttttaaagtactgcactttctttttcattcttatccagagaaagcaattgagctgcgattggcaaaaattgatcatactgcggttcatccccatttacttgacatgaagattggacaagggaagtatgaaccaggcttcttccctaagctacagtctgaygtgctttccactgggccagccagcaacaagtgagtcaaccccagagattccctggtgcagctcccaggtcacagtgataatatagtatctggacctagactgtcatttccagaagaccttgacttttataaagcaaatgtggagaagatacaaactgtccaggttgttcacttgtttaaacaaggaaacaggtgacagagcatcatcagctcccgtctccactgtgcaaattgggatagctccatgtatcaggacctgtaaaaggccagactgcagatgggttgaaatcatctgcaaatc

SEQ ID NO: 20385 - DNA, 600 bp, Bovine  MMBT16882
gctggcctccaggtgctcaatgactacttggcggacaagagttacatggaggggtgtgtgccatcacaagcagatgtggcagtatttgaagccatctctggcccaccacctgccgacttatgtcatgccctgcattggtataatcacatcaaatcttatgagaaggaaaaggccagcctgccaggagtgaagaaagctttgggcaagtatggccctgccaatgtggaagacaccacagaaagaggagctacagatagtaaagatgatggtggcattgatctctttggatctgaggaggargaggaaagtgaagaagccaagagctaagagaagaacgccttgcccagtatgagtcaaagaaagccaaaaaatcagcacttgtctccaagtcttccaccttattagacatgaaaccttgggatgatgagactgatatggcaaaactagaggaatgcgtcagaagcattcaagcagacggcttggtctggggctcttctaaactagttccggttgggtatggcattaaaaaacttcaaatacaatgtgtagttgaagatgacaaacttggaacagacatgctggaggagcagatcactgctt

SEQ ID NO: 20386 - DNA, 600 bp, Bovine  MMBT08041
agtgaactccgggagttggagatggacaataggcctggcactctgggattcatggggtcacaaagagtcggacacgactgagcaactgaactgaactcaactgaaacagctattcacattaaaaactcaaaaatgatttattttcatttgatgaataccacgacttagaacttgaaattactagcttaaattagctacaaagttaagctgaattaactaaatatagtaacttcatgccaaacatcatatttgataatttaaagatccttttattgccttagtttcatttatggatcctgrgttttacttgagctgtcagaacttggaactcattttgttttcaatatattaccctctamtaatgtttgattttttattttctgaatgttacagtggatcttgttttatttttctatgatatgaaatgatagcccaggttaaaatcaaacaggacacataatactaaaaattaaattggtctttgtctattaaggaaaactcaagtacaggtatgaaaaaatatgccagtacccacgccaggattcttagcctttactatactctataatacctgacagcagcttctaggagagactggat

SEQ ID NO: 20387 - DNA, 600 bp, Bovine  MMBT03268
tgaaatactgaattcactactgggcttatcgtgggcatcttttaaatattagaaaaatgacaatcattttttctgactgttctgtttgagaagactctaagggctctctctgtataaaaatataacacccctctgaagttatttgccttatccttgtactccctgagatccccagctctccccagtagctccactaatcatgaactctcccatgagagaagccctctaaaaatgctgtctttgtttactgggtgattttgaagcctagtctcttctgggaataaaaacccaaactgaaayggttggagtctgcccactgggaatttaaaccacttgactctaaggctatgatgacaggaacacagggaaaaatagatgagattctgagttgcaagaattccccaggactcactggaaagctacctaaggacagagggggaaaaaaagcccaaccataataattttctccaaagggccatactggggacagtgtcctgctcagttctttggttatagtttttccacctctagcagttgcccctgaatctggtgaagaattgtggcaccatcagtccccaagtcagtttgtgggggggttgt

SEQ ID NO: 20388 - DNA, 602 bp, Bovine  MMBT04435
  misc_feature (1)..(2): n is a, c, g, or t
nnatggaagcaggacccaggtgcttcctttctgaaggaaactcccaacacacactgagatccactattaacaatgaacacatatcgacagaaaagcccagagattctcaaatcaaattctttaaggcttataatactgtagattcagctttaagggggagaaattaaaaagcaatcattttaattattatgtttatgtcaagttaagctaactgctacagtaatatcacttggcttagtctactgtaattaattcagtgaatgtacaaagaaaacaaattagaactatttatagcactgaarctgagtggaaatgagatattgcccaagtgctattacaataaatataggttgttgacactccttcaaactatgctttaggactttcagccatttatgttattcttcaatggtaaaaacctccatgaaataaagaaaattccaatagtggatctcatcaatcttattttcagatgtgcatgtcacgttgagtaaccaggcacttgttttatttgagccaaattaaataaatctcattaaggaaatgttactagtatgcaaacactgaatgcattaaaaaaaaaaaaaagctgtctctgcaat

SEQ ID NO: 20389 - DNA, 600 bp, Bovine  MMBT16936
actacttgctgtgttagtctaaaatgttttaatgaccacatctctactgacagcaggtacactgtggtgggcatggcctttgatatttctaagcattactgattcaaatgtgatctgctgagttcacagaaaagcagagaaagctgtttttctgggatctttatcattttatacttaaaattatatattatttatagttccgttcatcccagataaatgtgtgtatcttatcatatatgcctgagcctagaaaataactcacaaaaataatcctcaaatagagttgttgacagataaatkatggaaatagtgagcaatggacattttggaacatgtttagtatgacagttaacaaccatacatgttatttatcttgcttttcagtgtcagatggaaaatatttcattccgagtaatggtactcatgacaagaagcaaggtttgaaaaaaaaatagtggcccttttcctgctgagtcctaaaagttggaaatcataatggaaatattaaaaatggaaaaagakaaagagaaagaggaaaactggactactgcaactcagcgttttgtcatagattcatgacaaggagatgcacaaagaaca

SEQ ID NO: 20390 - DNA, 600 bp, Bovine  MMBT01210
tgatgcagagatgggcaggaacacagactccttctcacccaccaccaccccaaagagtgtgtctccataaagatgagaaatacctaacaagacctgagtgtgtataaattctcccaaagtaagatgggctctttgtaggatgcaaattttgaatagtcaccgtcaacctaacagatatatttcaaatgtaaataaaagtcatcaagcagtaacagttcatctcctgacttcattttttgttgtcacagaggtgttctgtttagagagaaaataagctgttataatattccaactgaaatwtcaagaacatgatttagtaggtgagttatttagggctacttagtaaatagaatttctggactgtggtaaatgtgttactctccttcacatgttcaatgaaacagccttttcttcttctcaccaaggtagttatcctgtcctcagcccagagactcaatttctaacggctgttggatttattccagggcagccaagcacaggttctgaaccattttctttttcaattcctgtggcctcagaatgctcagaaatgttgacttttgcaaagaggccaaggaggtctgcacgtgtgccaaggct

SEQ ID NO: 20391 - DNA, 600 bp, Bovine  MMBT00815
ttgcaggcagattcttaaccattgaaccttttatgttttgatgatacgctagttaaatgaccagaaaatacatttaaggaatggacactaaactgaaagggatgaaatacaagaacttctaaacaatgtttaaccatatttcatgattatatatatgtaactacttgcacttcttgggggatttctattcaaattggacctctgaaaacactacatcttattattctaaagttacaaatgcatttcagtttctttagaatgtgttaggcttttgctgactaagcagcattacctcttagwagaggtccaaagctataatttgacccctctggcaaattaaatacaattatgcaaattaccaggatttgggcataatctaattagtacgatacatatgcaccagataataatttccctggctgaaagctagattgtcttatttcatgtttgaaatatgttttagaaaaacattctactatgtaagtaagatttcattatcttatatatactatttgctcagctccacaatggacatgtttagaaaaataaagccaaaattggaatcttcaagtgatgatgtattttgtcagaaattcatag

SEQ ID NO: 20392 - DNA, 600 bp, Bovine  MMBT21822
tttttcactcatttaaggccaaaaaaagtgctttaaaccctataatttggtcaccaattagtctttgatttactctgatgtacttagaggttttttagtattaaaaaagscttgcagctgaaaatttacatttaaaaagtaattaatgccaattcaatgaagaaatcctcagtttcctgtagaatcacattgaacttcaagcccttttaaaggatggaaagaattgatcatcagctaagaggtgcttccttggttctctgttggacaaaattctttgtccaggtaaatggacatcagacmccttcccacttctctttagctttgtccccatcactcttcatacctacrtgtgttgttactcagaagacagcatttgacgaacggttactgtcaagttccattcctccctgttccagccgagcgcttcccagacacagacggtcaccaggacagtgactcaagcagagccgcttgcgtctgatgtcagctgaagtcctcccgcccatccctttactgctttcttggtttctgagccgtcatacacagagttatctcccccgtgtgaactcaccgtctcattctccatctccctctgtcacc

SEQ ID NO: 20393 - DNA, 600 bp, Bovine  MMBT08604
gttggtaatacaagagtgatctttgtgtcctggttctagaagtattttttttgtctagactaaatgtttttgttcccaacttgctatagcggtgcagcagtaattgaactattttcgtggttctacaaacagcctagagcactgaagttttaatgttatcattgactagatcacaccaaaaatttagtaataaccttttgacatttcagctaaaatcaattcttgactgtctcagtcttcacattgacaaaacatgggaaaaacacggttttcagtctaccaaaacatccagtaacagcrcctaataatttgtacagtcaatcatatctgtcccccactaycctaacagtgaaagtcaagatgccttttacgttaggacctcagggcttaggaggcttgccggaaacatttgcctccttagtttgtctgcgtgtgtccctttgtaaatcatgaaacagaggagccagaagaggcactgctttggctcatttaggataatcagtcattttagagtagataaaactggctctcagaggcattaagagcccactgagaacgatttacagacaagattaaaagaatcttcagtactatttacaa

SEQ ID NO: 20394 - DNA, 600 bp, Bovine  MMBT13950
cccgaaccggccctcacctcccgtgcaggcctgacaggtaagaatcagctggacctctgagagttaccggaaacagaactaaaggttctggggaaggagttgcctcagacaacgagatccacccacagaactgcctgcagggactggcaagttgtgtttgtacaaaacaggacagggtgtcctgggaggtgggtgcaagggagggtgggcgaggggaacagcaggagaatccatgtcaaatctcagcagcttgttacatggcaggaaaacaggcccagtgcagcctgatctgaattgccrgcagaacctggagatcttgattttagcatacatattgtgatttctgaaacactggtgaaaattttaaaagtacagccggccaaagaaagacatctttgagtaggatacagcctcaggtcaccacctggggacactcagcccatgtcagctctgcccttggcatactcaagggactgatgacccagagggagggaggtccccggggtgcctctcaccctaactctaacaccagcttcttcccctccagaggatgagatgtcccccaccaaatgcccagcagctggcggggcctccagcaaa

SEQ ID NO: 20395 - DNA, 600 bp, Bovine  MMBT13908
aacctgttccagctccacccaagcycctggtcatgctctcaccccctgccttcccacacatgcctggagcattcctgtctagcttggtcagctctcctctcccacaatctagtttaaatgttagctcttctccaacttcccttgactctttccagcagtgtccactcactctgcagtgtggctctatacataccctctgttggcacttcttacatgttcctggcaccatccctttggaggtctggttccctctggaggtcatttttatgtcatgctctccctttctcaccttcctcttaygttagatataaaacatgtagcatatattcgtaaatatctcttgactaaactttcttttaaccttgtaattctgaaaggaagtggaagttatgaatttcctccattctgactagtagcaagttcttagcattgtttctagaggaagtttagggaaactttccagaattcaccaagtgtgaagtagatgtgctgaatctgaagtaatcaaataggcctgatgttaccggatacatacctgaccatggagctcacaccctttctccatcctctttctagttatggagttcttatctggtgttt

SEQ ID NO: 20396 - DNA, 600 bp, Bovine  MMBT22166
ggggatgatgtatctgcaaacagggatatgggtgagtgtgatgagtgggataaccttctggaacaaggagccctctgggcagagcacttaggcaagtcctttcacctgctccaaagtattgtgaggatttaatgacataacccattcagagccctggaataggacccagcgccacgatcggccttcaagagagtgcaccgctgtgatcatgagtctagttggtgcggcaatgtctgctctgtgtgtgtatccagttttttgtgctatggtcttatcatcatcattattataacagtgctrtgttgcaaatctgtttgtgtcattgttgaacgtgatgtgtcatttcggtcacgtatgtcagggttaagtgacctgaacaggacttttctgcatctccccattttcaaagccccgtcagtccacagatggaaaacccaagtccccattcaggatttccagctgtgctggagaggagcaaactgtggtctacacctagatcatgtccaccctctcaatcccctctctgcccatgttgtcctagaagcccacctcccccaactggctgacaagagcctgaagggcagatgagtgaggggcgca

SEQ ID NO: 20397 - DNA, 600 bp, Bovine  MMBT18935; identical to SEQ ID NO: 4593

SEQ ID NO: 20398 - DNA, 573 bp, Bovine  MMBT04182
gatttattgtcaatgttgctaatacaagaatttttaatagagtagttacatagggaatagatgcaaaaaaatataactttatttatatggtttctttttttcaggtaacaaactgggtagacccatcatttgatggtttttcagagactacaagcatttctgctattactgccacatcattaagtgtgaataactcaagtcttagaagaaaaaaggtgccttccacattagaaagtagcagatttccrgctagcaaaggaggaaacctatcttcctctaaacagatctgtggtctagaamattcaaaagaatatctgtcagaaaatgaaccatgggtggataaatacaaaccagaaactcaggtaataattagcatacaaagaagtcttcataatttagtttcaggaaggagagggatgtgcatttttgttattattcataaaaacctttttgcctaaatgaattagaaaaaaataataacttctaagtttttttatatttccagtctcgaattttcccagcagttattctgaagatatatcattggttatttgtctttgatttaatttaacc

SEQ ID NO: 20399 - DNA, 598 bp, Bovine  MMBT19179
  misc_feature (1)..(41): n is a, c, g, or t
nnnnnnnnnnnnnnnnnnnnnnnnnnnnnnnnnnnnnnnnnaacataatcaagaaatagaacattttcccagcaacccccagaagtttccttrtgcccacttgcacatcctgcaagttttgagaactgatttcttttacttgaagtgctccrtttagagagagagagaaactctttggaaacaggccatctcattcccaaatgaaatatctccaggcagaaattaatttttgtaattgtctgtcttcttttctgctacaatccatgtcagaaagcatggacttgaagctgtcaatattgmaactgctttcactatgggagctgaaggccgcatccactgggctcttgacaccaagcctaaatttctcatgtttcatggccacgcccaccacaagccctgactttttgcatgtgtatatttgactttcattttgatatagaaacacttaagtagctataatgcctgtttccctgtggaagtgttgtatatctgtccaaaagatgggaaatttcagttgttgagtgatcaggaaatgtcacttttaatccaaatataaaaataaatcctatagacatgaccaactaaactagtgtgtaat

SEQ ID NO: 20400 - DNA, 600 bp, Bovine  MMBT12570
agtggcagggtaygtctccagaagggaggtcagggaatttggcttcagctctttcttttcttgctttgtggatagtwccttataacctggctggcatcaggactttgcagacgcaggaaggaagagatgtgttctttaatgatggaaaaatattagagcacaatgccctcaaaatagaacgtgtgcacctcgcctttattttggggacttttattgttgtaaccatctctcctgggaaatgctgtgggaggcttttcccctttggtgaagcagaataattgtgtaacctgaggtgtcccygagagagctgaagggatgatgtcaacacacaggttttagaaacatgactgcatattttttaatgtcaatcactgctcaagtaacatcccttgtctccaaagtccaatttctgtaaaatgaagataatcatatatgtggctgcccaccccaccaggctgctatgaggatctaatgatataatggataagattatgtctgcagactataaaatgcccccagtgtaaattgtcattttcatcagcaatcagaagacctgctacttttgggttggtgccattccacatttcatygtttatgaag

SEQ ID NO: 20401 - DNA, 600 bp, Bovine  MMBT06661
agaaaaaggagtgaaagcgcccccaactcacatctggcaagttcaggaagtatcaaaggaaaggactcaactctaggttagccacaattgaaaatcacaaatcgtctctaagcttcagtttttgttctctaaaatacaggggtgtgaccagatgactccttaggttttcctgttttgggactgcagttcagcaaatggatgttgtgtgagttacaaaacaataaatgaatagctttaggtcagaaaaatcgaacttaaaagtgatgcttaaaacagacagacctggctctccagttcttstagagtatttttttctttgtgtacttaacccaaaatatttgataaaacttccaagtatgcctcattttttgtcaggtgatactatycattcataaactaagtaaagagataaatatttttaaacataaacatttccacaaaataygtaagtgcctccaaataggagaaagagatggttggatggcatcaccaactcaatggatatgtgtttgagcaagctctgggagatggtgaaggacagggaagcctgatgtgctgcagtctatggggtcacaaagagtcagatatgactgagcgact

SEQ ID NO: 20402 - DNA, 600 bp, Bovine  MMBT19513
gtggtgaggaagcaatgaaaagtgcatgagtgagtgagtgagtgtgtatatgtttgcacatgtacaagacgtagagagatagatgcagaaaacataaatttcaaggatatttaatcttagattttagaaaaaygtttattatttgagcaggtaagaaaaygggtggagatctagagaaattctgaagcaggaaagagggaagtcactgaaacacaaacttgctgttttagctgttcaaagacaaaaacagcaaaaaagctttccmtctgagagaggctcaagagcacagatgtgagctgrtggtgcargaagagagcagaaggttctgaccacagcaatcgttagaggtactcaatgccactcactaccactaatttctgagttcagaactatctgcagtctctcggtctctgctgctcatgatagttcaaaagggaaaagaacaaggcaaattactacagacagttcccactctagagrttcttaatctgcaagttgccctttttagatctttttggctgtgttatgggctggygagatcactgtaaaattatcactcaaactcttcagttcctctcctcttgttttctctggaaaatg

SEQ ID NO: 20403 - DNA, 600 bp, Bovine  MMBT19514
gaagcaatgaaaagtgcatgagtgagtgagtgagtgtgtatatgtttgcacatgtacaagacgtagagagatagatgcagaaaacataaatttcaaggatatttaatcttagattttagaaaaaygtttattatttgagcaggtaagaaaaygggtggagatctagagaaattctgaagcaggaaagagggaagtcactgaaacacaaacttgctgttttagctgttcaaagacaaaaacagcaaaaaagctttccmtctgagagaggctcaagagcacagatgtgagctgrtggtgcargaagagagcagaaggttctgaccacagcaatcgttagaggtactcaatgccactcactaccactaatttctgagttcagaactatctgcagtctctcggtctctgctgctcatgatagttcaaaagggaaaagaacaaggcaaattactacagacagttcccactctagagrttcttaatctgcaagttgccctttttagatctttttggctgtgttatgggctggygagatcactgtaaaattatcactcaaactcttcagttcctctcctcttgttttctctggaaaatgctttgctc

SEQ ID NO: 20404 - DNA, 600 bp, Bovine  MMBT13465
tttttataagggaagtgagttcttcctcgggagcctccggatggtttrtacttatgtcctattagccagaactgagctggatggtgactaagattctgaatgggaattggatcaggcaactcatggtgtcggctgccaatacttactacaaattcatatagtgcggagagggcattattgggtcagccacaaggagctctggccagtcagctggtatcatggtagcctgtcagctggtatcatggtagcctgcagaaaggttgttctcctggtaacagttctcacgtaatggcatgggaytagaaattccaaaagacaaggacattgtttgygtgatctcacttagagcttcaggacctaatccaaggcctggtacttggtagctgcctgacaaacatttgtgaatgaatgaattgtccatcagtgaggatggatttcagtgggctggggcactcagggaatagggatcaggataattggattttctggcagcctgagggtgaagcagaaaagcttatgatttcaaattaattccagcaacactaagtgcattctacatccaaggctccaaggtwaaaaaaaaaaaaaaaaaaaaagaat

SEQ ID NO: 20405 - DNA, 598 bp, Bovine  MMBT19515
  misc_feature (1)..(39): n is a, c, g, or t
nnnnnnnnnnnnnnnnnnnnnnnnnnnnnnnnnnnnnnnaaattttatagaatatgcacttacccaagaccatcttgattttcattgagctcagaaagtctggaactggatttctgacgtttaggtttacccctttctccaatataaccagaagtattttcatataatttttccacttcacaagcattcaacatacattcatcaagattgctgaagccagaaggaatattttctttgttgagacgtccccttraattgaaaaaaaattagcttcattttactttaaaaggtaaaaaggaykttttaaagacactgcatcatgcagaaagaagagtgcttagaaattccatgtttcatcttttataaaaatctgagcagagtgctactcctgagaccacttggtgccaaatgtatcagattaaaagagaaattattcctaaaggcaaactggcgagggctgtgtttctaccaatgaaaagcttttgtatttgtaccgaaagtaatctgtattcaaaaccaggggaattgtgcaaacttgcaaagacatttttccattattcataggttttatatacatacatacatacacgtacatgga

SEQ ID NO: 20406 - DNA, 600 bp, Bovine  MMBT03867
ctacttcctcagtataaattagttttttaaaattagatttacatttccagaaatcttgagtgtttctagattctcyatttcttttttcacatcttttgtttcaatctgtaatttctctctccatattttttcatcccattacatcatctaaaaagaaggctttctctttcaaattcaggatgtgaggaaggtcttgaagagatgaatttgatgaatatctgttcattttatgttgctcaagagccactgaaatttttttcttttgtgttttggttcctgattaaacttccctaaaactcwagtaataacatgcccatttataatgtttactttaaagcatatttaaatattgcagtaacttgcattttatttagcacaatctacttttaaagttctaactgtaagaagctatatatgttcataattacagtttatttgaatgtgtagtattttgggaacagtgaagtaccatattttggggaggtggaatgaaaacaatttatgtatttttaaatgaactaaagtttttttaatgttcactgtctagagtaattttaaaattcattatttctattttatatcataatctgtgaattaaaa

SEQ ID NO: 20407 - DNA, 504 bp, Bovine  MMBT19463
ccaaatttaaacaaaaggagaataagataaatctttcaagtgataatcaaaacagtaggaaggaagtatatgggttgccttataaattgaagtctgtttttcaaaaactatgattttcagtaagattagtaagagtgtctgaaatatttatgttagtaaagccatggtgaatgaggctgacttgctggaagaaatcatgccaaaagttggcatgtcaggatgtggtattagtgtgtttacatgttaagccagttgagaagtttgtgataatgtgctaatttagaatgattgttgactackgaaatctttctatcaatcccgatactgatgctgtgggcctgggactgatggttcacaaaggaagaaaacattctcaaacgtggtgcttttgcagagctccagctagtcaggagattcttttttcatcctaggcaactgttactggtctatagcaccatgggagaatgcagtccttatttcggtgattgagttagatcacattat

SEQ ID NO: 20408 - DNA, 600 bp, Bovine  MMBT19278; identical to SEQ ID NO: 4868

SEQ ID NO: 20409 - DNA, 600 bp, Bovine  MMBT16580
ctatcaagcagctgaagtcctaatggcctcaaaaccagttcccagagagtacagtcccagagctggggccaccagagagcagcacagaaggtctttgagaaggtcaccacccatcccttatctggtgatgaggctacttggaagttcactgtgaaagaacaggcacagtcacactctcagccttcagttcatcctggctgaacactttctccctctctcttcagtttacaaaatccagcaggaatcacagaaatcaaactgaccgagagaaatcactaccgacagggagacaattttacraaataaggacacgtggctgtccagaagacgccctgactaggaaggggaacgtattagtcactcagttgtgtccaactctttgcaaccccatggactgtagcccgccaggctcctccatccgtggtattctccaggcaagaatagtggagtgggttgccatttccttctccaggggatcttcccaacccagggatcaaagccagtctcctacactgcaggtagattctttactgtctgagccaccaggtatggtgaaatctcgctattgaacaccaccactggcccttcctaggcgagggt

SEQ ID NO: 20410 - DNA, 600 bp, Bovine  MMBT06827
taggaagtgctagcttagccactaatcatggtgacgtggttcttacttgagtggatcrtgtgaagacatccctttctattagtttgaaagrttttrattacaggtaacacaaactaactggctagtgttaggaaaaagggagaaaaargtatataaatttgcaaggataccaaggatgtcacagaagcaacgtgaggatagggaaccaggcatagakactgggtatgaatgaaggcacttctgttcttttatgccaagagggaggaagccagggtcttttaaccaagcaggatggtctasagctgctgctgcatgtaggacatcactgatgctgctgttgctgctatgaatgaatcttaatggtcactttggttttgtgtccctcactacagagtcactgtcccgtgttggagcttctggttgattgagactgggacacttgcgcctgttctgtcagatgccactccaaagaaaaaagaaagatcatcagatggtactccaatgatctctggtttcttgctagaaaagggtgttgatggggaactgccctatatgataaaagtcctctacactcagaagacgagcacctgaactagaaga

SEQ ID NO: 20411 - DNA, 600 bp, Bovine  MMBT11930
caatgacagaaacaggattcaagcacaagggttttgttattaaaacccattttctttctgtaccaccattgtgtaaaccatttttcctttcttccttaatgagagttaacaatatccataaataatttttcaaaatagaaagtaaaaacaatgatgttgctataagaacatgtgtagctacagccggtaaaataacctttgttagaagttataacyacttccaagtaaagtgtatacatattttattagagtagctgaagaaatggtgatatgatttaagcagcattttcatttacttgyaaacatgagtgtgtgartactttyttgtgaccattttttaaaagttatagttttcctacaatttccaaaagtctagaaagtaagtttgattatcttaacacacacatatacacacacaatcacagtaattgtgtcttagtagtgattagttatttccaccacagaaacttggtatttgagggcttaartaattccttaaggtaagaattaagcaatcaaaattctggtactgtttattattagaattacctggagggctggtatttgttcttttttctatttttgactgggggcaggggc

SEQ ID NO: 20412 - DNA, 600 bp, Bovine  MMBT08462
gctgagaaaccagactccgctgacttcagctctggcagtagggaaggaaggagggtagacaggaaatgggggacagggggtggcatgctgaatttactcttgtccctttggaggggggttgctgccagccctgcgggtgcttcatctggctgtcaatctggacaaaggctccccaaaccttcctccataccccacccctgcctgccacccaaccaagtcttacctgatgcctaagcaygagatatgtcctccataaaccattttcagatacagaaaaatgactggaagtacaccaaatcrttaagagagattagccaccaagcgtgggattataagtgaattttatttggttcttttgactttcctgtgttttcctaatatttttcaatgggcagaacaaaatcataagtgtttaggaagtctgggggtcccaggtctccccagctagtgagtaaaaccatccactctttagctatgaatgcccacacaggaaggctctgagctggtggtcctgaccygggggcaactttgcccccccaggggacatctggcaatgtctggagataagctggttgtcatgacttgggrgagcattgctgg

SEQ ID NO: 20413 - DNA, 600 bp, Bovine  MMBT09708
cacaggtgtcacagctcacgcgctcgctccgacgcccggctgcgccgtgaccgcagccctaggccgctctcagagcagcctgtggttgtgtcgctgtctccaggagctgaacaaccgcctggctgcagaaatctcacggctacggacactgctgactggggacgccggtggcgaggccgctggttcgcccctcacacagggcaaggacgcctacgagttagaggtatggctcggagccaggcccttcaccagcttgcggcacacgagtckcacgtgggaccaggggtggccccagcttaygggaaaacccaagtcacgccaggacacagagaacagttagccagacagcatgggacctctcgaggccccagggacctttacatttaacccaccctcactcccttgcccctctccctggtttccaccacatcacaagtgctgacctccaaaacggaacactgagcagctgygtgacactgcagctccctcatttctctctctaggtcttgttaagggtcaaggaatcagaaattcagtacctgaaacaggagatcagctccctcaaggacgagttacagacagctttgcgggtaatgcacg

SEQ ID NO: 20414 - DNA, 600 bp, Bovine  MMBT14121
gacttgtgactctcacgctgagctgcagttcccagggggtggggtccagggtgctggggggaggctggttcccattgaagcgctccccagatgccaagttgcagccagctcagctaattggcaagagaaggagaagcaaaaatagtgaaaatctgtgaattaataaaacagccttgaagcaaccgccaaaatgtgtacaaatcatgaagtaattagaagtgtgaagaattctatcgggttgactgtttccaaatccagcatctgatcgctttaggaggccaagggctggcaggccagggragtaaaattctttccattgcattctcatctggccttcttggagcctgggtttcttgaaaccctttcrgggtccaggcagtggctctgggacctgcttgagtcaaatgtgcaccttgtgaaggccctttaggacatgcaagatcttgtcccaatagcatctcatattttagaataaaactttaaggtttcacaagcgttttttggattgatggtcgtatttaatctcactatcaccaaatatttttatgtcagtaaaatactaacaattactctaaaaaatttagagtaggaaatcaaagt

SEQ ID NO: 20415 - DNA, 598 bp, Bovine  MMBT11597
  misc_feature (1)..(34): n is a, c, g, or t
nnnnnnnnnnnnnnnnnnnnnnnnnnnnnnnnnnccgtttcaacctgcttgggttcctttggcttccaaaatatagtgatggcccagatgagagagaaactcgtgatgcagctaagtttcccttaaaattatgctatacagatagaattcttcagtaaaagaatgtgagttagtgattgtctccctcccaggggatcaacctggagagcaagcatgaaggaaaacagagccccaagcgtcctgcagaggcctgtggtcaccatacctggcgcgaatrcttgcctctgtctggacttgctyggtcacctttcacctttgtctggcaggctctgcrgagcccccaggtcactcttggctaatggtctgcttatcactcagttctttcctcgtgccagagtaatctracaaatctgatctratcttctttgttgcgcaccttcagaccttcacgggttcttccatatttctccaagacttgagtcccttttcctcctcctcctggtatgtgagaccttccgaatatctctccgacccttctcttcacatcccaccagcctagccgggtcagacracttrttcttgcttgatggccscagcc

SEQ ID NO: 20416 - DNA, 600 bp, Bovine  MMBT16759
taaacatgtcaagcatatcagtgctataacacagaagttcccgaaggacatctgaaaaaatctatgaaacatgcagacaacaggagttttaaaccatactctcaaaacacaaactaagtttgagtaatgctaacctaataaccagcttacaagaattttgtttgtttttaattagcctacgtctgcttcaacagatctaaccacactgtttgcttccaatgttaataacagagaaatacagtttaaagcaggggttggcgaacttctgcaaagagccagacagtaacttaggctttgtgygctatgctgtttttgtcccaactactcctctctgcccttataacacaaaaacagccagagacgattcgattcacacaggaacaagcgtgaccacgtcgtgaattatttaaccatttaaaaatggaagctccagtctcccattgtggtcctacaacaacaggcggcaggccccactgggctgagttacctgacttccccagagttcaagcccagagccccgggcaaaaggaaggagagcgcttgcccggaacttccgtcactcttgtcccaccccatctccacccccttctttaaaaaggc

SEQ ID NO: 20417 - DNA, 600 bp, Bovine  MMBT01108
aaaactcactggactggttcacagtggcatgcctgctcaggcttaccacagtctgcaccgctctctgttatatctccgtagagtccatttcactccacctccgtggccagtgtctgttttgatcgataaatktcgctcccataacagtgaaacatcattaatagcacctctacatgtaggtcacctgccaattccccacaggcctttgagactgccacctctcccaaacattagccatctctccatctcatccacaggtgctcatctgagcttctgtgccctatgtatcttcttcttcckctgccccatatatctcaaaatatttggcttgttgacacccttatgtcacctgtagaacatggcttttttaatagcctcattcccctggaaagccctaagtaatttgtccagccttgaagcttaatcacacctcctagtcatcttcattgttggttagtttccatgatgtcttcgcagaaaaccccgcttttgctcacttctctggggctccgtctacccctatggttgccgtttattactggatttgaattctaaatgtttgggtactatttgtttacctaaaattcaggcaaaataaaa

SEQ ID NO: 20418 - DNA, 600 bp, Bovine  MMBT04721
gggtagaaggggatgacagaggatgagatggttggatggcatcactgagtcgatggaaatgagtttgaccaagctctgggagttggtgatggacaggaaagcctggcatgctgcagttcatgggatctcagagttggacaggactgagcgactgaactgaactgagtgcatatgtgataagaagctctggaaaagtcttttaaaaatatcattttcctttttattagattttaaggtcactcaactgctgcataaaaaatagtctggaaaacacaatgtattttcttattacttcaattsactacacgtagatgggggtggtctctgtgatgccataagtgctgggttaaggttctacgaaaacacggaaatgtatttacttttttcttttcttgtaatttcaggacagggaagaaaagagtacaagaaaaccagaaacatcattgaaaattaattgtttcacaaactcaaatgaatatttaggttcttaaatgattattttaatagacaatgtccagaacttattttggacaatttctgctgtatttgttccttaataactatttacatctaggtagagcaaggggcctccagaattat

SEQ ID NO: 20419 - DNA, 545 bp, Bovine  MMBT09996
ttctctgaatagccttccctaagtctctctgccctctattccagggagcctacaagtcatccacaatatgctattgtccagaaaaaggcagctggacagaactcgaaggagatgtggcagaaccgctggcagggccagcctgtgcaacagttatcctgcccgcctgcgtaccttacaacaaataacaccaggaaaccccggaacgacacattctaggaagcagtgacaagtgacatccctattgtagccagaacaatgcattctaatggtacatctgccgaaacccactttagtgtctgrtgatttacaagaagctacaaaaggaaaagacctgttcttgaacggaaactctgtctgtaactcggatcacatcaaacttcctgtggtgacagactcttccattgcagactggttttaacttgtctcagctttacgaaatccctcacgtggatctcgactttcaacaggagaaagaaaatacagaggagtgccccccgagagacctgaggatcagtattgtgcattgtagtttacctgcatgtgat

SEQ ID NO: 20420 - DNA, 600 bp, Bovine  MMBT17244
caacacaaacatggatctagatggattatcataaagcaaacatctctggacccaccacaggagtcaataaatacaacacaggagacatcacagaagactgctgttagcctcccaatcccgaggcctcttctctcccagaaaaggcagtctctaacaaagttgtcttagtttctcttcccrtttctccaaagttttaaaatcttagcagacccttcacatttaaagttgtggacctctttctatgctaattaattcatcactccttttaatgactctattttaaaaagagaggtacctgcktacattttttaactgctcagattttaaatgtctacttgtcatattaacgtgaattgttttactgtgcagtatgcrgatgcttccaggtgccagtcatttggataagcattgccatttgcccccagttaaatggccttagacctctgaaatacttctaattcattcctttgtgccctttcattgtagaaatctgtcacctgatatttttgcaaacctacttctcacttcaagcacctctctctacatcaacaaattccttttagggctgattttccctagttaacatcctggacaaaagag

SEQ ID NO: 20421 - DNA, 600 bp, Bovine  MMBT09386
gtgagggaactgaaaaggtgagaactcaggccatgaaaaatttagaatataggatgacagtatgccacaatttgaagaaaagcatcaataacttagtgagagatggtggtgaatttgtaaaaagcaataaatagaagaaaaatgccttgattccttttttttgtgacaaagaaaagacatcctgaaaataagtaagaaaactcttttatttcatttatattcaataattgtttcctaacagaatatgaggacctatgccaataggaaaaccgtgtagatatatctctttattcttctggygctggtgttgacataggagaggaacttccgtcttcattattcctctaacctccattttactgtactctatattattttatcaaataatatcaaaacatttaaactkaaatagactgccaactctctaaacaggatctcgatctaagatgtagcagaagtaaaaggattatgtttgcacatgagaaatgaaagtaagaactgtgaagaaactctggagagtccacaagtctttgagcctaatgtctggaagaaatggcagctggaggcggatgacctctcatcacctttactgtttctcac

SEQ ID NO: 20422 - DNA, 600 bp, Bovine  MMBT13653
gctggaacacggtgctgacagtcagcacatctccaggggctgcccaggaatgaattctccactggcgggaaagcccgcggtgtagccatcacatgaacatcaccagaaagcgtgcgtgtttaattagtcatcacttgaaataaacaccaggaacatcagtagcttaaaaggagctcaacaccccatgcaaccacttcaagaaagtgctaagaattaatgcaagtcattacaaggcaaaagcaaagaatgccaaccactcagacagagagaaacggtctgtctaaactgtggactccaaayataaacagaagggcccttgacgagtcagttatgtacttgcccaaagcagagacaagagtgggtacgaattaagagagcgaatttcttttgcactcaatrgatgataagagcaagatgccacaatgaggacaaagatgtggagagacagttctgtcactctgcccaaagccccaaccatagccaagtttcaaggcagccaccctgaaccgggaggtgactgcctttcctcgggcaaggcagcaagctgggcaacccccgcacactcacaggtcacccacttgctcatcccatggagcactg

SEQ ID NO: 20423 - DNA, 600 bp, Bovine  MMBT04595
ccatcctcggaaatgagagacgtgtgaggtagaactgaggtcttctcaggttcttttcatctctggggttttaccttaacttctctcaagttcatacattcatcccaagaatagaactttctcttcattctgaaattaaaaaagaaaagtttagtgcctggggacggagggtgtgaagacacaaattacactgctggctttccactctattattagtttgcttcaggcaagctgtgtatctgtcttcmctcctccttaaaagcagatcatctccattctgtgcatctcaaggccacttcstgcacgctcatgactatgtcacttcttggacaaattacctaatgaccctccrtgccgcaaattccttagctatagcgtagaaaccgctgcataagagaagyttattgtaaaaggcttaggtaaggacttagtaaatattagatgttcctatttttaccagtatctgtgaaagtgaaagtgaagcygctgagtcgtgtccgactcattgcgaccccatgaactgtagcctaccaggctcccctgtccatggggttttccaggcaagggtattggagtgggttgccattcccttctccaggg

SEQ ID NO: 20424 - DNA, 600 bp, Bovine  MMBT01584
atttatttctctaataaggaagcatgccttgaaattgctttctctcgtttttccctatcagaagtccaaatatgttgctctttaacaaacatggtaataaaagcaaagccccaaggctccacttactattatgcaaagactggttatagaatgcaattcttgaagaacatttgcttgcctagaatctattcagggctcaggtaagagtgtcaatttcatcacacttgtctcttgatcattataaagtatgaacttcttgaagagagaaattctatttaatcatccttggaactctcattyctggcacagaatatgacccacagtgggtgtgtttaatgaataaatataaatacttgatactttttagtcactgagttactgatgttcaattttcatttgacttttttttttttttttggtgcactggcagatgactatttaaagaacaagcaataaaaaatggggattgtatctgtatgaatcactctatgagttatttgtatatggatttcagtacatcttatagctaggctttgtagtgattttcaagggaccttggtaagttcaaattcctaaaatcagatcacaagtctatattgc

SEQ ID NO: 20425 - DNA, 493 bp, Bovine  MMBT17284
ttgtcaacaagattgtgaccttccagggagaagacagaagcctcaggactctgtaccctggcacctggctcaccactatttagtcatatggctgcatatttaaagttttgggtaaattaattttcaactaaatatagagttcctatatattctctacgcaacttctactaatgcaaaaacgtcttacatacctgtagactttatcaaaaccaaaaataaaaaaaaattacatacccagagaacttatcaaaactaaaaaattaacattgtacattactattaatctaacacagaattcaytctgatttctctagctttccattaatgtcatttttctgttccagaacgccacactgccctgaggttttaatttttcacttgtttttataacaaaattataaagtcttttcaaagattttatgaatgacaacatccagattataatcgtaatgttgaatatattatgccttgaatttaggagagaaaaaaatga

SEQ ID NO: 20426 - DNA, 598 bp, Bovine  MMBT02435
  misc_feature (1)..(1): n is a, c, g, or t
ncaagaacactggagtgggttgccatttccttctccaatgcatgaaagtgaaaagtgaaagggaagtcgctcagtcgggtcgactcttagcgacccccatggactgcagccttccaggctcctccatccatgggattttccaagcaagagtactggagtggggtgccattgccttctcctgaaacactgtaaatcaactatacttcaattttaaaaaagaaagatacaacactgtaaattaactatacaccaataaaaaattaattaagaaagagttttagggatttccctggtggtgcwgtggttaagaatccaacttgcagtgaaggggatgcaggttcaatccctgatcagggagctacaatcccacatggcagaccctgaaaatactgagcctgtgctccacaacttgagagwctatgtgttgcaatgaaagagctcacatgatgcagtagagatcctatgtcctccaactaagatctagtgcagcaaaataaaatttttaaagacaaaatttttgatttttaaattatttttaaaaattagaaaaatttctttaaaaaattagaaaaaagaaactgtgaggctacacttatat

SEQ ID NO: 20427 - DNA, 598 bp, Bovine  MMBT19805
  misc_feature (1)..(83): n is a, c, g, or t
nnnnnnnnnnnnnnnnnnnnnnnnnnnnnnnnnnnnnnnnnnnnnnnnnnnnnnnnnnnnnnnnnnnnnnnnnnnnnnnnnnnctaaaaagttatgctgtactaaaaataggagatatttaaaaatctccagtagtagctagcattcaaaatgttacattaatttgaaattaatttcagtcacataaaaaactaaagaactgttgcacagctaggttgtattatttccatcagactatattcaaggtgtaggaaagcaaacacatggctccatgcagttatttctctaaaatacctttcrcttgaaattattagcrtatatggccaattctaatagctgcttagagaactcaaaatgtcatgacatccctcttgttgtagcatatattttgtttttgtttcacagaatacaattattaaaaatakaaatattcagagctaacatcctccatgagagatggccattacatatttgtttttaatagtcatagaattttagatttgcaaagaatttccaattttacttgtagttattcctctgcttttaaataagacaacattttgatcatttggaagaacttaatcttttcttaaaattc

SEQ ID NO: 20428 - DNA, 598 bp, Bovine  MMBT19806
  misc_feature (1)..(67): n is a, c, g, or t
nnnnnnnnnnnnnnnnnnnnnnnnnnnnnnnnnnnnnnnnnnnnnnnnnnnnnnnnnnnnnnnnnnnctaaaaagttatgctgtactaaaaataggagatatttaaaaatctccagtagtagctagcattcaaaatgttacattaatttgaaattaatttcagtcacataaaaaactaaagaactgttgcacagctaggttgtattatttccatcagactatattcaaggtgtaggaaagcaaacacatggctccatgcagttatttctctaaaatacctttcrcttgaaattattagcrtatatggccaattctaatagctgcttagagaactcaaaatgtcatgacatccctcttgttgtagcatatattttgtttttgtttcacagaatacaattattaaaaatakaaatattcagagctaacatcctccatgagagatggccattacatatttgtttttaatagtcatagaattttagatttgcaaagaatttccaattttacttgtagttattcctctgcttttaaataagacaacattttgatcatttggaagaacttaatcttttcttaaaattctcctgagatccatact

SEQ ID NO: 20429 - DNA, 600 bp, Bovine  MMBT12729
gtttctattttatctagcaagacagcctccacttgagaaaatatgatgcccagataagaagtatttcttctttccctttattgttctgataaatactccagaagagtatctcaaaaatcagtggcagctgcctgtcaagaagacattytgtcaaattagacaatttaatgattttgcagtgtgacttgaaattcctatttttaatagaattgtcacaaaggttcatcaccaactacagacaggtacgtgatttagctgtgagtcaccaaagttagcaccagctagagaatttatctgagktaccagacttagtaagaagagagagacacttgtggttttgatagaatgcccatgtgggttctgtttatacagaactagagtgactttgttgaaactctgttgtttctattggtgttttacatatatcttagctttgctagaatctcttaaggctatcaattcatgttmttttgccaagaatcaatatcaagcaatgttttgtagttctcaggagatttgataacctataaaagcctttctatgaagaagtgtccttagaataacaagcttgtttaaatctttggcagtaattttccatca

SEQ ID NO: 20430 - DNA, 600 bp, Bovine  MMBT07007
gacatctttgattgtcatgactctttagagaaagaaaggaagagcaagagctgagatgtattctcaggctctagtgggtagaaaccaaggatcccatttgacagtccatgatggacagcgcaaccctcacaacaaaatggtccagcccaaatgtcaacagtgtcaaggttagaaatcctgaccaaatgctagctcaaaacattatttttaggattatgatgacaatattatcactttaaaaggctaggtccgataatatcagaattggcagagtttagagaaaaaagtgataattctccyttgtttgataaartaaaggttttggtcctttgggctcatcttcattccagaacatgataaactattttaaaatcgagtcttctcagaatagttctgaaaactagggacactggctatggatctaggcttcctggattgaattccagctcagccatactagcgttgaagcctggacaagttacttaacctcygagcttcaatttcttcatcttttaaatggagatcatgagaagaccaccttcaggaggttgtgggagatgaacaagctgaacgatgtaacatacttggccccaaacctag

SEQ ID NO: 20431 - DNA, 600 bp, Bovine  MMBT20723
gtcatgactctttagagaaagaaaggaagagcaagagctgagatgtattctcaggctctagtgggtagaaaccaaggatcccatttgacagtccatgatggacagcgcaaccctcacaacaaaatggtccagcccaaatgtcaacagtgtcaaggttagaaatcctgaccaaatgctagctcaaaacattatttttaggattatgatgacaatattatcactttaaaaggctaggtccgataatatcagaattggcagagtttagagaaaaaagtgataattctccyttgtttgataaartaaaggttttggtcctttgggctcatcttcattccagaacatgataaactattttaaaatcgagtcttctcagaatagttctgaaaactagggacactggctatggatctaggcttcctggattgaattccagctcagccatactagcgttgaagcctggacaagttacttaacctcygagcttcaatttcttcatcttttaaatggagatcatgagaagaccaccttcaggaggttgtgggagatgaacaagctgaacgatgtaacatacttggccccaaacctagcagcggaagtgct

SEQ ID NO: 20432 - DNA, 600 bp, Bovine  MMBT07933
ggctcaggtcgatccagggcctctgcttctcgaaggcgtgttggatggtgatgcccacgtccatgtcgtagggcgtccaggagccgtggtcgttctcccactcccacaccacgccctttccgggcgccgaggcggggtcgtagtagttgcgccggacgggccggagggtccctgccggagagggacggaggaggcggtcagcggcacccagggctggaacccacgggtgctaccttaagaggctcgcggtaagcgagtctacgtggccggcccttggctgccttggctttgaaggaggckccttcctgccgttttaaggtctgccgtgaacggggagggttcaggggtgcaggctggggtggaaggcagggtgggaagctgatgagctgcaagggaaggatgygggtgacgctgcagggtaccccaaagagcactgcctggtttggagttcggagactctactttagtttgcagccacatttgtttgcttaatataacagcccacaacctccttttctcccccaggagaaataagataatagctcctttgcraagtttttgccataattaaatgttgctctctcactcaacatgtatgta

SEQ ID NO: 20433 - DNA, 600 bp, Bovine  MMBT13489
gcgagtctacgtggccggcccttggctgccttggctttgaaggaggckccttcctgccgttttaaggtctgccgtgaacggggagggttcaggggtgcaggctggggtggaaggcagggtgggaagctgatgagctgcaagggaaggatgygggtgacgctgcagggtaccccaaagagcactgcctggtttggagttcggagactctactttagtttgcagccacatttgtttgcttaatataacagcccacaacctccttttctcccccaggagaaataagataatagctcctttgcraagtttttgccataattaaatgttgctctctcactcaacatgtatgtatttgtgccaagtccgggatttctcaagcgccctgtcctttgcactaaggcatatcacctttgacacatagtaggtgctcttaaataatctctcttcttccgtgactctctgaaggcctaagcccccgagggctaagaggaaaagaacacaggtcagggaaccctagagaacgtaggaagactctgtccccacccaggatgcccgcccaggtggtgatggagctggctgtctggacttttatgggtgtggtaa

SEQ ID NO: 20434 - DNA, 600 bp, Bovine  MMBT06698
cagcacacaggatcttcattgccacataccaccttccctctagtagcagtacacaggcwtagttgctccttggcatgtgggatcttagatccacgcccaggcatcaaacccacatcccctgcattggaaggagaattcttaaccactgacccaccagggaagtcccttattctcattttacagatgagaaaagctgaccaatttagcttcaagtcaactatagaaaaacaaacaaaacaaaagccatgactctaacatgtttcttgcacctactgactttcattggttcatttaatgctygttccaatttttttttttycccctctctgtagcgtcttctcagcatgctttagaaagtggagactggagaaatcttcattcttttctgatgcaaagattaattccagtgacacatataatccactgtgtcctaccattttccataatgggatgacaatttttaacttttgtgagacaagttatgcaaataagcacagccaaagagaatgcacaaaataggatgtgagagcaaaggagaatggaacagtgatggtccttccttttctcttacagcagcaatctgctgaaaagaggcctctt

SEQ ID NO: 20435 - DNA, 600 bp, Bovine  MMBT03223
cccctcggaagcccaagaagtgagctgctcggggccagcgcccttccctcccggctccccaacgcatcctttctgtaggagcctccaggcccaggtcaccttagtcagtcccatgtggccttgttgggggaacagagcaccccacgaagagggctgtggggcctgccctgggggaggtccccttgctgaggcaaggggtcgcacccccactgtgtggccagcaagggccatgagttcacactgacaccctccccgaagcctctgtcctcacagacccactcctccacgggcacgcactckcaggcagcatcctccctgggttcccccacacacatccacaagacgcagaaccgctgagagctgctctgcccccctgataaaagtggttcccactcgaggctgtcattcagctctgccaagttttatttaaaactgatgagatgtgcaggggtgagtgcccagaatgggcgggagggtgggagagtaagcagaacgctggatcatgagccaagccatctgtctctgttagttgacactggccaggtcactttttcctccatggtcctcagttttcccatctgtaaagtggctggaccaagc

SEQ ID NO: 20436 - DNA, 600 bp, Bovine  MMBT07740
agtgtgatgaggcagctccagcgtgcccagccatacccacacgatggaggtgaagtcacgactcagaaagctatgtccaagagaggcggggatcacagatgcaaacactggtgtgtctcgtttgcgaggcgaccgtcccctaaacatatcagatgcactcccctattcccaggcagactgataaagtagtttgatacaaatcagttgtagattagattctgcaaagcacgttttcctaggaaatccaattgcacctgctttggtttctggggcggcatccgttatccggtgatggtacargaattgcgctgcagctctttgagtgggaagggcgagatccttcatccgacsggggtgggatgagactgctcgagggggttccgcagggaaggggctccagtgggcacccttgggtcccaggctggctgggcaaccttgccaggcccctcggctggtgcctcccccaccaagacccacccaaggggcccagcctgcaggccatacatccgaaggcaggcgttcggtggagctccccgcaatttattttaattacgtgtgtcataaaaagaccacctacagatgagacaatgctgccgtaag

SEQ ID NO: 20437 - DNA, 600 bp, Bovine  MMBT00829
acctttctatgaacaaaggtcatttttattttaaatatttcagagctttatagaggcatatttgggacacattaaacagaacacatctraagtgcatactttggtacacagggaaaagctgatttcctttcctgtcactctaaattagtttgtaattcctagaattttagataaatggcatcataaattaggcacttttttgttcttatttcagtcagcataattatattaaagtctatatattgcatacatcaataattcatttctattactgctggatagtattccctgagtgaacaytgcagaaaccaactatctattcatttgttgatcgatatttgagtttgtttccagttttgactattgaaaataaacctgttagggatatttgtgtatatgtcatttatggatgtatatcttcatttctcttgtggaaatctctaggtgtagaaaaacttgcataatgtagtatgtaaatgattcagtgttaagaatgtgccatcctgttttccattggagttgtactattttgtcctctcttcagcaatgaagcagagctgctcatccttagcaacacttaggttcatttaggttagctgt

SEQ ID NO: 20438 - DNA, 600 bp, Bovine  MMBT00589
aggggagctggtttcctgagaaggtgcccaggacgggggcctcagccgtggccccatccttgatgaccaggaagtcaaactgaggctccacgtcgatgtcattgaaggccaagtggatgcggctctcgggccgggcgaggatgagccagacacagtggaggtggttgccgtagtcctctgggtagttgggcgacaggacgatcccagaagggctggtgaagttgaagaagcaggaaactgcaagagaagagccatggaggtcagtgagcgtccctggcgctgtgcccaggccactgaggrcaggcaggggggcatgtccttagtctaaaagcaatagagagaaaaggtgactggggtttggctggactggctgggctctgagctctaggcagcagacgtgctgggttyatgctgcgtgyggtgctgggaagggtccctctggcacactgcgggcaaggcggagctgctctcctggccttcctgcccttgcggtgagccgatcccaggagtgtctgctgctctcaggccctcctgttggggaaaaaccrccatttaagctgaagtggagtcccagtgcctggttcctcttagctggtggtg

SEQ ID NO: 20439 - DNA, 526 bp, Bovine  MMBT11240
cagcgctcttgaagatggagaggcagccgagacccaccttccctgattgtctgatcaagatcccacttgagtggagataccagcttactagttattgtgtctaatgagtaaattgttgagcctctagctttaaatgagttgtatgcagttattctctaccaatgaagggatggggtaaaagattttccaatttaacctcatgttttacacatttttagataaagcagtgaaaaacaacgtttaaaatctgattaatgagttctattttttttttttttctgttcttggcagggaggttastaaaatagtgcaccggggttctttgtgtggtttctttgccctttaacagttatttaacaaaaatactccaatctgcatttgatatctttatgctattgacattcaaactcctaggagctgtctagcccactgagactggcttttatcttttcctggtatttggagactaaaatggacaatgacagcagccccagccttactgaagctcatcaaactgtctcattca

SEQ ID NO: 20440 - DNA, 600 bp, Bovine  MMBT14215
ttgaaatgctccctctttaacttaatagtggttaaaattactattactttgtcttttagggggtatggtaagttaacaactgtctttaawacttagtgatgttatcaagagctgttatgtaatcttttgttgttcctgattgttctctgtaatggcatacatttaagttgtacttttgcaaaatcaccataaaacttctttactgcttttattacatttctgtgtaattttagagtaccaatacagtgagcatcaaatatatttttatatatacctaattgatacagctggaacactgakcattcagttgcataatttgggaaaaagcacataaaaattgagcctaacccatgtttctgcctcctcctcgaggccttttttcactgctccagtctgtcctgattttccacactgagaaatgctctagcatgtagtttgagtactgaattatttcacatttgattgtttacagtgttctcttcttgccaattttcactttatcttttctccatcagttcagtctctgaaattgtgtactttccatgacagagtatcaagactaagcacagagaagtcatgttgcacagaccccaagatcct

SEQ ID NO: 20441 - DNA, 598 bp, Bovine  MMBT10650
  misc_feature (1)..(18): n is a, c, g, or t
nnnnnnnnnnnnnnnnnnctctgtttaatcatgatcgcataagattggtatagtttcacagggtatgcaaaacagacatgccttaaatggttaaaattttgcttgtttgggctatttttaaaataattgaatgtgttaaatttgaatttggtgtctgtggacttctgagctagtgagtctaagcctgctgtaaagacataaacgactgggaaccaataggcagaggccgtctttggctcatttatatagcagcactgctttcatgttagctccttcctatgtctccgtccagcttatagmatggctatcctttgatctggtaccccagtcctgctccagtcagctgggatcaaagtaggagggtcaatctcctggatgcagtatctaggctcaagctgccactcagagggcagttacaagcttgaaagaccccagatagactttccctcaaaacctttgcctatcccatttatccatgaacaaagtcaaatgccatcccttacaggtaggcttctcccataacacctgcccatccattgcccccaccctcacgtctccactgtatcctatgcaggtcactgtcagatgtcttaccttg

SEQ ID NO: 20442 - DNA, 591 bp, Bovine  MMBT06617
gaagggctgggttaggggtaagttttaaagatgaccatgtggaatgcacagggcttccctggtggctcacacagtcaagaatccacctccagtgcaggaagcccaagttcgatccctaggtcaggaagatcccctgaagtaggaaatggctcctactccagtattcttgcctagagaattccatggacagaagagcctggtgggtttcagtccatggggctgcaaagagtcagacagaactgagtgactaacacacacacacgtggggtgcagcctgcaggggactactaagtctgaaaytgtgaaggcctgagattttactctccttcccaattagtaagttagtctactgcagaaatagactgtatatatccatgtatacatacagaatactggatcttaagaatccatttattacttatagcagtaacagtaaccagagtagaatggtatctctgctcccccattcccaaattcctctgagatctccatgatttctttatcttcccatgtagccatacttgacattacagaaaaaaataccttcagttttcttttattttttttatttttaattaattaatttatttt

SEQ ID NO: 20443 - DNA, 600 bp, Bovine  MMBT04819
ggtgtggctttccatacacatccacaaagccggtgcagccagaaggagtagacatgggcttttgttgtatttaagccaatggttttttctcctctgaaaagcaaaaggagaaattctctgagtccttagactgaaggaagacagaaatcataatcattctttgagatctcctgaatagagaacctaaaggtctaaaatagtttatggtgggggaaaaaaaacatatttagctccactgttgacctagtattgaaacattgttcatctactctttatgtcaggctagaattaaaagacagmatctgcagacaacatccaagaacatcctaggttccccccgcaccccaccctggcaccattgtgctctctatgtcgttaaaaattttctcattgcataaaaagatctaagatcctccagaggatatgttttgctttttttttctcttttatttccctacctttaaagggagaaattcttaaccaatgttgacagttgaggctccttggaaatcttttgggttcatcctcttctgaaatgattagaagatctagattctcaagttccataaaactcagggtgtcctatatgctttgtttcct

SEQ ID NO: 20444 - DNA, 598 bp, Bovine  MMBT13700
  misc_feature (1)..(155): n is a, c, g, or t
nnnnnnnnnnnnnnnnnnnnnnnnnnnnnnnnnnnnnnnnnnnnnnnnnnnnnnnnnnnnnnnnnnnnnnnnnnnnnnnnnnnnnnnnnnnnnnnnnnnnnnnnnnnnnnnnnnnnnnnnnnnnnnnnnnnnnnnnnnnnnnnnnnnnnnnnnnncttaagatcccacccttgccatcctgtatccggctgatctccagcacagacgttttatttcctcacttataaaatcaggatgtgagtccttattttctgggtcactgtgaagagcaaatagagatgatgtaaagcctcttcctcytccttgtaacacaaggacactgggttcctgtacccaagtcaaaattaagaatcacggtggctcagatggtaaagatggagaagggaatggcaacccactccagtatccttgcctggagaagtccatggacagaggagcctggcgggccccaatccatggggtcacaaagagtcggacagactgacaccatgtctggtgagcccagagggagcgagtggggcagggagagagcaccaaacgaagggctgggaggggggcctaagcctcatcccttttggtggcaggctctcggcccctc

SEQ ID NO: 20445 - DNA, 598 bp, Bovine  MMBT05844
  misc_feature (1)..(96): n is a, c, g, or t
nnnnnnnnnnnnnnnnnnnnnnnnnnnnnnnnnnnnnnnnnnnnnnnnnnnnnnnnnnnnnnnnnnnnnnnnnnnnnnnnnnnnnnnnnnnnnnnntctgtaatgggaagccccattgggttgtctctaagggtaactatgactggaaaagtgtctgcctttgtttaccttggaattcccaagtggcaataaaacagtgcactttgttcctcaggaggacccaattgttgggatgtcgtccaaatgcttccctcctggtggcgcctgtagcccgtcatgacaggacaggaatattgatcraggataacctaatgaaatattaacgccartggatgtgttggggaaagagcagatctggtcttgcgagagttacattgggtaagaattagccccattagatggctcgttgagtattcaggggagacaattcttgctttataatatatgcttgggtttgccttatggaaaatttattgttcattcatttgatgcactcctttaagaggtcaactttgactttcagtgctctcagaatttattctttactccattgttccttgaaaactatctttcattggatttctttgtgcattgagtt

SEQ ID NO: 20446 - DNA, 598 bp, Bovine  MMBT04159
  misc_feature (1)..(28): n is a, c, g, or t
nnnnnnnnnnnnnnnnnnnnnnnnnnnntatagcacttttttttttaaggaaacagagttttagcatgtaatattttcttctcatttacactgacatgattaaaaaataaattatctgttagtgtacagattacaaataaacacccttctaggctgttagtaggcaagcagctcagtggtctctaagacgatttctcaaagttctgacaatcctgtcaccttctccccaaactaagcatggttttcatcatgacacatctctatgcagatagacaccttgattgactttgcttttcctaytgggggcaatttggaacaattaacaacatttttattcattacccatgaatttcattgtgctaggtgttgaggtcatatggatgaataaatagataagtctctgcccttgtatatcaggtgtgaggggtatggacaggcacgaagcctgcaggggaaagtcttctgtatctataaaactgagccaacctggaggtggaagggattgtcatactatgcttaacatgttctagaacatgacgtgtgtgtgtgtgtgtagtgcacactcagtcactcagaaatgtctctttgcgaccccatg

SEQ ID NO: 20447 - DNA, 600 bp, Bovine  MMBT01102
aaagcaaaaattaaatgtaacatagctatacaatgctagtaaatgctaatcctgattgacaaacctagcatgcaacaatcaggaatgtgtgacagtttatattctgcaaagacaccgtgtacactgaaaaagtattgagaacaggaggaaatagcaagagattctgaaattataagcagtctttgatttagacatgattacttaaaaaaatacatacacacacacgtatgtatctatagatacataaacacagtaccatatatatgtataaacactcatacacaacacacatactccttygatcttcctctccccatcaataaagaggatactcttactgtcatgaaagtcataaagacaaatgtggaactttttagagaatctataagcttaaaagaagggaaaacaagaaataggatgaacttgggaaacaaaaagatttgaagatggactttcaagcacaattagatgatatgagaaaatctcagccctagaatatctcccttttcctgtaaggctttcatttcactgattcagaatccctaaacttctccaattaaaaattaaataaaaaataaattgaggaagagtattctaaac

SEQ ID NO: 20448 - DNA, 600 bp, Bovine  MMBT02298
tgaactgaacctggggacaatccccgaatggccttatgagggagatggaagtttgactycaagatggyttcttctcactgatacacttggaaaacagagayggtgcccctgatagaaacaggcagtctcgcaggggagcctgctccaggcagggaaagaatagatgctcggtttatacacggacttgtgggatgtgtctgtgctccaaacatatatttgctgagaagataaagggtggagccatgagcctggagagagacctggtggcctagggtaataaaagggagagaaaagactcayttaaaatcagtggcaccatttgcagacaaaaatgattaaactgctttaaaatctcccttactcrttgcaggaatgtatttgacaaatcctttcatcatatatacagcaaagggaaatgtcatcccaacccayatggaattacaatgaattccaaatacatayggccaccaaagagtgcaaatcaatcatgttttactatatttcagaaaagtttttctttttaatggtccttgtgactctaaaagtaaatatcatgctcattccatattaygaaaaagaaaaatatctatggaataccct

SEQ ID NO: 20449 - DNA, 600 bp, Bovine  MMBT19049
cagtatatgtcaaaagaaataacagtgaattcttcctttaccctaaagataaaccactgtgagtactgccaaaaactaaagacaaagaagatttaagtgaacctratcttggataaatactaggtttcatatattgtcatgcaagcaagcaygtgtcaaaaggcagccagcactgtcttttaaagatggataaaaactsaacatacttatcacaagttcccagtgcaaaaggaatatcatctttaaccagaatgttaggggttttaattaaagtagattttgttttaagagatggaaagrtgygtgcatattatagaaccatagatgaatatatgtatatagcattgtacagtgggtttacatggttctgaaggttcagcctttcaaggtagaataatttggtgaagaccactatttccctcacttaaatctttgttaaagcaacartggactcccactattctttttcagcataatgagatcaagataacaacagtgacatagaggtgtccatggctctgtttcaagtagtttgtccatctatcagatattaggagatatagaagtattatatgaaccttatagcaaaaggatgcttaa

SEQ ID NO: 20450 - DNA, 600 bp, Bovine  MMBT19054
tatatgtcaaaagaaataacagtgaattcttcctttaccctaaagataaaccactgtgagtactgccaaaaactaaagacaaagaagatttaagtgaacctratcttggataaatactaggtttcatatattgtcatgcaagcaagcaygtgtcaaaaggcagccagcactgtcttttaaagatggataaaaactsaacatacttatcacaagttcccagtgcaaaaggaatatcatctttaaccagaatgttaggggttttaattaaagtagattttgttttaagagatggaaagrtgygtgcatattatagaaccatagatgaatatatgtatatagcattgtacagtgggtttacatggttctgaaggttcagcctttcaaggtagaataatttggtgaagaccactatttccctcacttaaatctttgttaaagcaacartggactcccactattctttttcagcataatgagatcaagataacaacagtgacatagaggtgtccatggctctgtttcaagtagtttgtccatctatcagatattaggagatatagaagtattatatgaaccttatagcaaaaggatgcttaactt

SEQ ID NO: 20451 - DNA, 600 bp, Bovine  MMBT17342
acatgggaaacacttgtctgtcctgatatatgacactgtcataatatggtaatgccatctgccccatactctttccctgaaattttatgttttatttagttcctgtacctgaatgcttaacaagtactctcctctagctgtatttagagattacagatagacatgcaatccacaccaggattccattgcaatctgcactgtctcgtgccctccacatgcagctgccggagagaagagctgcccgtgcttagatttatgctccctcctctgcaagagactacatgggcaccgctgcacccrccttagactaactgtacaattagcactgtgatagaaagtccctgagtgaacacacgctccctcgtgacatgattaactccagggactctagacaacaggagccagtcacaaagtgcaaactaattaactttggaggacaggaatgaggacaagggaggtcaagcagttggcatgctggccacagagcccagagcagcagaaatgaaagttcagctgaagcagtaggaatagaaactgcttcaaatttaattttgtgatttttctctctggttcttttgtcattttttctggactttatat

SEQ ID NO: 20452 - DNA, 516 bp, Bovine  MMBT13544
gtaataccaatctytagtaaccatcttgaagagggagattggcgtcatcttgggttaggtggggtaagacaagacaacttaggatacgttttcgggaggagggagatttatagaaggatttctggctctcactgctgtggaatctaaatggattagtcatgttacgatcttgaatgtggaactacactcaagagtcttcagggacccagggtgacaagacaactcgatttcagtgaaaaagcagcatgttctttgaccctgagtacaccgatgttgaactacaatccctgaacacaggtyaagaaagatgtgaaagaaaaggaaaatgaaggcatgaggaaagaggagagaaagggaggaaacaagaggaaggttatggagagaaaagaaagaaaaaagtggggcagatctaggacggacacgaggtctgctcacagcggtcaagcctagcactgcccaaggcgcctgagctgacagagcagagacacgaggctgaaagactatagtcagtttcat

SEQ ID NO: 20453 - DNA, 598 bp, Bovine  MMBT20073
  misc_feature (1)..(149): n is a, c, g, or t
nnnnnnnnnnnnnnnnnnnnnnnnnnnnnnnnnnnnnnnnnnnnnnnnnnnnnnnnnnnnnnnnnnnnnnnnnnnnnnnnnnnnnnnnnnnnnnnnnnnnnnnnnnnnnnnnnnnnnnnnnnnnnnnnnnnnnnnnnnnnnnnnnnnnngtggaattccatgggtttgtttccatctgattagaaagcaaatcacccccacaatcattagcacagaaaactgaataaattcaaattgtctttaatgtcaaatggaattcagtcataaatctctcagttcccctcattcccatcagtactkctctcttccaaggccatcattacatttaaaatgtctctgaatctcttctgctcctgctaacagacacacaagtagacacatattatatggcaaacaaggctggagccagaatttgatccacatccatctggcccaaacatcaatcataccattataccatactgtgacatttcagcatagccaaataaaaaaggcaaaattactgtagcccttaaaaataatccttgatgaagaaaaaatatttggaaatcattggtctatactagtgagctagtcattcaatatttcttagtaaatc

SEQ ID NO: 20454 - DNA, 600 bp, Bovine  MMBT20760
acccttcctccgtctttagcaccacaaagaaagctggtcaagtctttctcaagttgcacctctctgaccttctctcctgcctccccccttctactcttaaggatacttttgactacactggacccacccagaatccaggatactttcctccccctttttgggtcacctgattatcarcctaaattccatctgcaatgtaaatttccctttatcatggaacctaacatacacycttcagagattagggcgtagacatcttcgggggcattattctgcctatcacagggcaaagagaagatycctgcccacagaatccagcagtggtttacttggcagagtaggtgactcgggcttggaccagacatgccagagcttcagtgacctgtcctgggagtrcagttctgcaggaccttggagagttcatggatgagtgctatgctactgacartctagtcctttaaaacctggagcaaaccccctagtgccaagtggctcagggaaacagaggctaccctcataggcatttagcaagtttcccacgtcttattaatctctcatccatgacttagcctaatatcaggacaaggcagcatctccaat

SEQ ID NO: 20455 - DNA, 600 bp, Bovine  MMBT02818
atggctccatatattatgaatattagctgtaggttcttaaaatgtacattgcttttggaaatttaactgtaggaaagttagtgttctttgaacttatggtaaaaatattcacaaagtttttgatgtaaagtttcatacaggatgagataaagtttgtttcattaaaaaaaatgatttcaatattgctttctgtttaattaaattgcatttatagcacaatattccaaagaaagtagatctgatgatcagaaatcaagaatatttgtattcaacaaattaacacttcactatttagttcaygaatattcaataaaagattaatttattttaaaatgtctctattcctttactcactcatgtgaaaatacattgaatcatacgtctaagttcttgacaacaataaactagatttttatatggtactttccagaaacaaacacaaataaaactaaaactatttgaaaacaatagatactctagagaattaaaataatttatartatttaagcaaaataacaatatcagttgtgaaaagtaaatgactacttccagaatataaattttctttttaaaaatgtttgttcagaaaaacagttgaca

SEQ ID NO: 20456 - DNA, 600 bp, Bovine  MMBT16195
cagaactcattcgtgtgtagaggacttcctgtattacatatggggcacttaccttaggctgaaccctgtgatcaaggtcttatattacctacttcagttcttacagcaagcttgtgagaaaggtgctgttttttccctatggatgaaaaagcagaggcttggggaaactggttaacttgctctacatcacatggttagcaaaggcagcaccagaagtcagagcccgtgttcttcaccacttgatcgtctgtgttttcatctatgtttccatcaagggaatttctggtcttagtttctttyctcaagtaggtatcatctagaatgctagagtttatattatcagctggtaatttggcttatggaaagggcactggattaggagtcaggagacctaaattctgatctaactctgccactgactacagcagctgagacaaagtgttttcttctgctgggctaccaagtgggaactgataatgcctgctctgcctatctcagggactatggggagggtcactttcaaatttatccaataatgagggctcactggaggctcaagctcatgtgagctgcatttgcatgtatttttcattattgtta

SEQ ID NO: 20457 - DNA, 600 bp, Bovine  MMBT03212
aggwgaaggggatgacagaggatgaaatggttggatggcatcaccgactcgatggacatgtgtttgagtaaactcygggagttggtgatggacagggaagcctggcgagctccagtccatggggttgcaaagagttggacacgactgagcgactgaactgaactgaactgtattctctgaatttttaactattttaaaatcttcatctttgtcttcccttcaagcccatgtgttcagggaccarctttgcagcactgagtgaagtcacctatagtccccaagaaaacctggtaaatcctwatgttcagagatgaaagaagaaaatgagccctgaattcctttgtcattaaaatttcttccttgtcgactgagtttctgtggatttgaatgaattatctaagaatcagtgttagcgtttaattggaagacagaggaaaccacaaagagtctgacaagaaagggcagacaaaataagaatgtctctaggcattgaaaagtttgacaggcgagaagagtttgtgatttgcaaagcagctggagaacatgagtcagcaggagataactaaaaaaagttaaataattaagcttacataatagcta

SEQ ID NO: 20458 - DNA, 600 bp, Bovine  MMBT06062
ttccctctatcacagtgctgacacacagygttctttcaaatcctcaactagcaggacctcggcagatggagcctcctaccacaattcccatctgttgattttttgctccatggcccagctcctgaattttgctgacatgttttaatctttaaaatatatgtgactgacattctactcattaacattgtatgaacacagaaacaatatgtttttcttagccaaatctttgaataatattgaagtttgatgggaaatgggccatggccttgggtgagcagaacacattgataaagtcaatcyatttgcttgtgtgtttccaattagtcaaccacagcttgcctcttggcaaatatgggtaacagatgaaaaggtactttctgggtcagcattaatgcatcactgaaagcaagtyagtgacaatttgtaagatgaagcataaatctaagagaaagccaccagtatcatcaggctgaaatctttggtgcatgcatgctcagtygctcagtcatgtctaactctttrcgaccccatggactgtagcctgccagyctcctctgtccatgggattctccaggcaagaacactggaayggttgccatg

SEQ ID NO: 20459 - DNA, 600 bp, Bovine  MMBT18706
gctctcatcaaaggaactggtatcttgttgataagatttgcctctgcccagtttcccaaggattctccttttgctgaaaaccccttctagttgccatcagcccatttatcatcctcaccttttggagactactgacaataccagtaggacttctctctcaggatttcttcaacagaatgagctgtaggtctaggaaggatttcagaagatcaagttcagtctgtttttaaaactgtaggtgggacaactatggccaaataggctatgaagaaacattcagaatctttttctgtttaaagraacatggcggggaggggggtgcattcttaaaagataatacatttatttattcacacttggattgcatttgtgataaaataaatgtctaaaatctttaaaatgaaacacagtaagtacttagaagatgaagggctacacagcaaacagtcttgaagcatgactttcctcggggacttctctgcctggttttgttttcttagtcaaacaacaaaaaacgcctggagactgctctttctttaaaaaaataaataaataaagcaaggagttgctggagaaagttccagctgtggtaaggcctgc

SEQ ID NO: 20460 - DNA, 598 bp, Bovine  MMBT16382
  misc_feature (1)..(209): n is a, c, g, or t
nnnnnnnnnnnnnnnnnnnnnnnnnnnnnnnnnnnnnnnnnnnnnnnnnnnnnnnnnnnnnnnnnnnnnnnnnnnnnnnnnnnnnnnnnnnnnnnnnnnnnnnnnnnnnnnnnnnnnnnnnnnnnnnnnnnnnnnnnnnnnnnnnnnnnnnnnnnnnnnnnnnnnnnnnnnnnnnnnnnnnnnnnnnnnnnnnnnnnnnnnnnnnnnnnccccaccccggggggtaccttagacgctcttggtgggggagataaggcacgataccaggaaggaggcgatagtcctgtgaaagacctacaraatgctaagaaaggtacccgggaaagaccgggaccgattgatcacacccttccgcctagtagaaatttggaagacttcctgggcgaggcggtacacagccgatcttgaaggcttgtggggatttgggagagaggagggtttgcagaagagaacagtgtgtggaggggcagcaaagctagaggaggacaaaggtaaaaaggtacagtctaggaatagtagataatgcagttggttgcgtaaggccacggtgaggagtggtgtgggggcggggggcggtcgccacagtcgtttggggtcc

SEQ ID NO: 20461 - DNA, 600 bp, Bovine  MMBT02863
ggcatctgagtgcatgggrcaaacgtagcatcaagtcaagcttctcaagtcaagcttttagatacctatgcctttgttgatgaaaaattttatttgtgtaaatgtctttttgaagaaatgcattgcagatttccttatatgaaaccttcctccatttataatttattatgaaagtaacaacacactcacttcaaggtaaacaaagctaaaagcctagatattcttctatagttttctccaggttcatacaaaggagaactgtcatttgaaggaaaagtattgcctcattcagttcccatmgaacagagagagatgaattgctgtttgcatacctgttattcacatgtaggtcactgcccctcaagcgctgcatagactttgatctcttctgaagttaaagcatttccctgcagttttgtttatcctcagcctagtctggggtacctcaaatttgaacgaagtcactcatgaatgactgaggttttgatgttgacaattctctctactgcaactcaggcgtatgtaactccactaatctgaacatttttgccatcaaaatggctaaggatctaagtatcagagtccctgaggaagaagctc

SEQ ID NO: 20462 - DNA, 600 bp, Bovine  MMBT05238
ttgtgtgctactggacatgtaattaacctggtttgcacatgtatagagtgttgctagtattaataacagctatctcacaagcttgtcatgaggattgaacaaaataccctctaggaaaacattctacccagaatagatgcctgataaatgttcattcctcacatccttgctctctttttccctcccccacttctttctttctcctctcccttcccttttcaccatcccctcccctttcctcccttctttctgtggtagagctgatatttacaggaaaggaccatggagatctagacagaraggagattgactctgggcactatgagggaaggagagaaaagtcagagaacaggcaaagcgcaggtagcaagtgagagggatgggcytggacagctgataagagaaaaggttttgcagttaggaagtgcattggcactgacagtatctgaggcttgaagaggtcaaagaggtatagatcacatgcctcctatagtcagcccctatggctgaactctggagaaggaaatggcaacccagtccagtgttcttgcctggagaatccccatggacaaaggagcttggtgggctagagtcaacagg

SEQ ID NO: 20463 - DNA, 600 bp, Bovine  MMBT09589
gtcacttatttgtaaatgcttttttaagaaacagaaacaagaacccaacaaataaataaccaaatttggatgatttgaatatgtttggaatgttgagaatctatttacattttaataaggtatttctttggtgcaggtattagataaatctccatagagatgaggctaggacacagaattaagaagaaagaagcacccttgacaatttggagaaaaggaaagataagcagagtagtgtttaatagaaacagatgtggatgtaatccctttaggaagaaaaaaaaagccgtacaaatacarcataagagatgggaaaatggctttaaacacaaagaatgaaaaaacctgggagagttttgagaaacccaagctcagaatggcttcatgactcagactgtcttccatttcacatcccaacatggtgtgttatgtggataacttaaagaaagacacagtgttacgcacaytatattatttataagaaagattaacacgggtttctgaaagtggcaacagagggttgaaaagagggtttgtcagcctaaaatgaacacatcattatatatatakagagagagagtcacagacacatattctggt

SEQ ID NO: 20464 - DNA, 600 bp, Bovine  MMBT06575
caaagtgaaacagtactaaatatgggagagggtgtttgcttaaagaaactatttgctaaggcaacccattagaactgaaagttttcattatgagacatgcattagggacttctttttttctaaaaacattacgtagcttaaaatatgctctcaaaaaaaatatctaacagtcagaagggacattctgtaaacacaaatttattttgtttttattctgaaaataatatatgtattatgtctaccttttcattggcaacatctgtcagctccacaatactcttcaagttgatatcaaagtcmcgtagaagtttccactgatcttgttcaattcccacacctgcctttttaattgcttcattttcaagcaacatttttagtccctgagggaaacctataattttttatattaatgtttatataatatttatataatatataatatttatttccataggttctatcaaacatgacagatttattatgttctacttcatacacattttatgtttaaatttgtgtttaaattcagaaaccaacrcttaccttgaatgtttttgagagctttttttttcacctaaagcaaaaagtcctgactgataa

SEQ ID NO: 20465 - DNA, 600 bp, Bovine  MMBT10461
tgcatacccatgttcattgcaacataattcttaatagccaagacataaaaccaatgtaaggatcaatatgtgaatggagaaagaaatgtggtatagatacacaagggaaagcttttcagccataaaaaggaaggaaattctgccatctgtttcagcatgcatagactgtgaataaaatgcaagtaaaataagttagagagagaaagacaaatgctgtatgatttcacctatacatggaatgtaaaaaaactgagctcatataaatagtgtataatggcaggggctgggggctagctattsagttatgcaacatgattaaattctacaaacatattgtatgagtttatgcctataattaacaatactgaaattgtgcacttaaataactmttgaagtagatcttaagtgttcatatatatacaataggtagggtctgagatatgcatatgccttctcattttgtcttacctgtagaaatgaaaaacaaatgtttattttaaaataatgcattaaaacattatcgttaaataatataatacagtttggataaaatttaagactattcttattcaacatgttctaaacatacacacaatacaa

SEQ ID NO: 20466 - DNA, 598 bp, Bovine  MMBT06241
  misc_feature (1)..(93): n is a, c, g, or t
nnnnnnnnnnnnnnnnnnnnnnnnnnnnnnnnnnnnnnnnnnnnnnnnnnnnnnnnnnnnnnnnnnnnnnnnnnnnnnnnnnnnnnnnnnnnnaattatcacattactactgggaatctatgattcatctttatttttttatgtgtcattatatttatcaagtgttaaaataattcttgctggaggtatatcatcactattcctgcatttaaaaagccaaaatgatttggacaaataaaatacaaaaagaaacctactttttgagatactactactgttctgaaactattgctaaggagmatttaaacatgggtgtctttttatgctccaataatcatgagtatttcataatggcttttaaataatctcatcaaaacatgaaatagcattatgaaaacaagtcatctttcatatcctccagatgtaagtactttctgctcatacactgtgattcctggaatttgttatttagaaagattggtagattgcagctgtcaaaaaaacatcagatattatttgaacttgtacatcatcatggactgtatcagagattataagaaatgagtaatgatgataactgtaaagtgatgggcttgtc

SEQ ID NO: 20467 - DNA, 600 bp, Bovine  MMBT04542
ttaccacccggtaaagaacccaggactcactaaatgttgcactgaatattctcataactaagttcaagttgccttgaaatcaggctggtgtcttttttgctttgactttcattcctcccaatctcctacctcctcctcaccaataaaaggggtgagtttaagtcattttggtacaagaacttttctgaattttgatttgatacataagaaagtgacaaatttgtcatacccttaagtgcaataagggtactctttcaagttagatgctgggttcacaccctgggtgggttaataagatamaatttaatgtgataataagataatactaatcatttactaggattatattaataagataatagattggcatcatttaaatagtaagtctaaatggcagagagtaactactaacatctggtccagaaaaagtggtttctgtctagtttaaaaccttaaagggtaaaacataactttatcaaaaagaactaagtttaccaggcacttctggttgtctcgaagccattgaaagactgggatccaggcgcttttcctacacagactttgagctgagttccccgccacctagtaaaaataacaaag

SEQ ID NO: 20468 - DNA, 499 bp, Bovine  MMBT19472
ccatggttagcaaaaggagagayagcagcagaatggcttttgttgactatgaaatctcacatctctcctgtaaaagtcccctttttttggagaatcctttttaactggctgcccctgccgccaggattgctgcctgaatcctgggcctcactgttgccaggaaactttctactccctaaaaggtttggtgtgtagtctgtcataagaatgggccttaaagactgtcatgataaacaatttagctacacgtgtctctaaaggtgtggatttttgtccatcttaggaagtctctgctagagkacttcttagctctgtttcttccctggtaggttcagagtccagtgtagaaagaagttcatctgcatcctcatgcaaataacacgtggctgcaaaattggtttaaagtctccttggctacagttaaaaagaaaaaaagaaaaactggataactgcattgcaaaagaatcaaatggacttgtttctcacactatatacagag

SEQ ID NO: 20469 - DNA, 600 bp, Bovine  MMBT08864
aatttattttaattggaggataataacttcacaatattgtggtggttttgtcatacatcaacatgaattttaagagaaaaactaaaatgtacttttctagtgatgcagaaacttttcagaattaaaaaaaatcaaaacatgttaattataagttcccagcacatcaatgtttctgcagataatgattataaacttaagacaagattaaaaccaaactaccttaagtctctggagagtaaacagtggcaggcagactctggagaggcactggtactggaaagaggagattttcacagattrcatttgcaaagaatttatatggaaataaacaaagtaataaagagtgaaaggatgcctctttttagatagtgtggtcaggaaagaccattctgaggattcatattggagctaagaaggaatatataagacagccaactaataaaatttctggcaagaaatactggagtcaaaagaaagaatgattgctgaggtactggggcaatgcttggcatgttccagaagcaaaatggagacccacggagctgaatgctagagattaagcggcaaactggtgagaaatgaagttggagaggaagacag

SEQ ID NO: 20470 - DNA, 598 bp, Bovine  MMBT13205
  misc_feature (1)..(31): n is a, c, g, or t
nnnnnnnnnnnnnnnnnnnnnnnnnnnnnnngacagaaggaagctaggaggtggggctttgtcatccctctgtgggagctttctcagagatgcaggcctggctgcccaggagccccaggaatagtcctgcagcccccaaggagagattcacaggagcgagttgtggggtctacagagctgcaccccctgaactcggggcacccagcgtttcaccctcattttggatcttaacatcaactctggatcaataaggaaaagcctattcactgttctgttacctatgtcaaaagatatgtcccytatgaaataaartcataggaatagagagacagacattctttaaaaaccgcagaatgagaatttttttwaaaaaaattaaatgaaaaaggaattaatgagaaaaggaaactctgtgatagaaactaaaaatgtaatcacagaattaaaactcactattaatcccttggtgagattaaagaacagagctggtgccgtgaaatattaaatcagtgctgtagaggtcaaggttgaaaactctcatcaaaaattcagaggtaaagataaagaaattaaaatgactagaggaaagtttataggt

SEQ ID NO: 20471 - DNA, 600 bp, Bovine  MMBT08256
aagaatcagtgacaagggaatatgtgaagcccagagttgtcctcatccaggatcatgatgttgtttgtgccttttaamtagataaaatcaaatacgccacagctggtgaggtggagcatctcttagattggaggggtccactgttgaggggttttgaatggaaactaaaaacaaactggtagctaatggcacttgtaagraaayaagtgcacggtacaaagcaattccctggctagaaatctagccttgatacgcacaaggcatcattgctattttggaggccactggtaggtagaactstgctttacatctcattgttcaagatcaacttttaactaaaccttgccacttaaaacagtatcaaagtttcagtacaccaactgagaaaacagaagcacgtcacttgtttatccttgtgtttcatagcagaagcaccaaagcaaaaaaggaaatgtgcttgcttttgacaattgaatttttctcatgttcatctgctaacactttcttacattgtaagtttgcatttattttgcaaggactatattgatcctacacacagagatgacaccactcccctccaggctggcctgtcaatcagca

SEQ ID NO: 20472 - DNA, 600 bp, Bovine  MMBT13674
gagcacactatttgagaatcaggccatctgcgtacgatcaaggatgttcccattcacataccagattgctatttgcacagggtgtatccatcatgtctcaaggatgaggaaaaaaataagacgcgaagcataaagacaaagcactaggagagtacaaaatcagattacagtcttgcttccaccagggagtagctcaatcttctttattctgaaattagcctgtgcgtcctgaagagggcgcacgcacattccccgggagtgctgcctcttcacacracagctgttaccaagttgtctaargtctgggataagttcttccatcagggcttctcctccctctgtgagggggtacaactttctctttctctgcctccttatactttcgtgtccttggttaatcgctctgactccccgtttggagacctgatccaagtgttctcacctcaccagctcagtatttctcatcaattaactacctagccctttcccataggaatacactgttaaaaaaaaaaaaaaaaaaaaaaaatatatatatatatatatatatatatatatatatatatatatttatttatttatttgtggcggctcagcaag

SEQ ID NO: 20473 - DNA, 600 bp, Bovine  MMBT08074
aggaataactgaaaaagaaagtcttcactggtaatataaagtctaatgatattataagcagtaatcttaagcatcaaacgtgtaaaaaaaaatgaggcataattactgacatttcaacaatcttctaatagatatttagcaagttactgatttcaaatatgaatttaggccaaataaacaatgaatgttagtagctggaaactaatcatctatgacatatttgctgattttgtttttaaggatatgtttagaatcttacagctgtatgccactgataattgttccaaataagcccaccaktcctaaaaactcctttctgctcagcttcttcacgatgtattcttcacacacattagaaacagcatagagggaagctccaagaaggaccaagatgtcaccaatcagtacattattacctatagagagataagccataaaaagggatacattgtcactagggaaaactctccagcttgcttccagaagtttatctggctcataatcatctaaataagattttacagaagaagaaaccctgatttttaaaagtttaaagactcttactcttctcattttctggcacaattmtgctttcatttt

SEQ ID NO: 20474 - DNA, 600 bp, Bovine  MMBT14593
ctctaaattgtcgctggtaccagattttagtgaattttcgggtggtgtggtgctgtagtttgtgggggactgttgttttaatcgggagtgattgccgagtatgtgcttggccagttgtgtttcgtgacaagaaatttaggcttttgaaaaaagttcgtggaaagggaaaatataggttcatgaaatgggacagcattaagaacagactgacgtttgcaaaatagttgtcttaagcaaaagttgggacacaaggattgttggtccaagagggaataaaagtggagagtgtttaaaactttratagtgctcgttttatatctggttactataataaattggcctacattttgtatgtttgctttttcattcctgttttggcgctgattcatttttattttgttgtataaaattgtcagtcttgatagatggaaaatagaagaaaagtgatttgatttctcagatttgacaaagtgatggttttctggattcacttttgaagtttaggttgttactctgtcacaaagttaagttgttactttgtcacaaagttttgtttgtcacaaagttaagttgttactttgttacaaagttaactcaaat

SEQ ID NO: 20475 - DNA, 598 bp, Bovine  MMBT18319
  misc_feature (1)..(22): n is a, c, g, or t
nnnnnnnnnnnnnnnnnnnnnntagaagctcccacaactttgctccaaatgccccccttccatggagacctgcctgctcacatgttcctgaagccctcagagctgtgtcttcatacttggtcctgagtggggatcatgggaagtagttctggggactgactcatgacatatccctggaatgtgagaaataagtcagatcaacacaggtcaggttatctctcacctgtaaccctggacttggctcacactaatgttctctgcagagaagttattctgtcttctgttcatyggactcctcaycctttgagtataaatgatgccctatcttggttttaagaaaaattattctccttccttattgtctcaatagcctatttttcaaacccaaagagtagtgttccctcctctctctgtgatggaaagagtagtctttctatcattttgcatycttcccaaccctgttgctcatgataaatacactatttccagaagcctggagtcatccttgatttctctttcttttatatcacatattcagttctgtctttaaagtgattatgtccagtagcgtgatggtaaatctttaacaactgactgt

SEQ ID NO: 20476 - DNA, 600 bp, Bovine  MMBT09809
caatactttctatgtcagtcttaagggaaatcaatcctgaatactcattggaaagactgatgctgaagctgaagttccagtattttggtcatctgatgcgaacagccaactcattggaaaagtctctgatgctggaaagattgagggcagaaggagaagagggcatcagaggatgagatggctggatggcaatgccgaggcaatggacacaaacttggtgagggacagggaggcctggcatgctgcagcccatggggtcgcaaagagtcagacatgactgggtgactgaacaaccacaaygacaacattatactgaaaggcagcagagtgagttagcctttgtttagaacacaggacacaatggagatgtgagccattactcgtcactgtaattcaagaatatggattgatggtcaagcaagagagagagggtcctatatagtcagaatcagagactgagatagacccagcaagagactagaaaagacccagacaagggtgagaagtgagacagatgtactttaacagaagtcttcccatgacccacgaacatcaaagggaaaaagctgacacaggtgaaagttgttgagggactgctac

SEQ ID NO: 20477 - DNA, 598 bp, Bovine  MMBT14128
  misc_feature (1)..(150): n is a, c, g, or t
nnnnnnnnnnnnnnnnnnnnnnnnnnnnnnnnnnnnnnnnnnnnnnnnnnnnnnnnnnnnnnnnnnnnnnnnnnnnnnnnnnnnnnnnnnnnnnnnnnnnnnnnnnnnnnnnnnnnnnnnnnnnnnnnnnnnnnnnnnnnnnnnnnnnnncttcctgaaaagagtttgcctgcaatgttttgcagattgggcaatctcttttttttttttaaattattcttaaattattttatcagcttataaagtaatcttcagggatttctcttagtagagatttttaagtgtcctttgcatgtaagyatatgcagaaaatatttatttattatttttaaaattaatttttactggagtatagttgctttagagtgttgtgttagtttctactgtacagcaaagtgaatcaactattaagtgtccttttttcryaattttatttacttgcctattgactgtggtgggtcttcatcactatgcgggctttttctccagttgcagygagtgrggcttctctctagctgcagtgtgtgggcttctcagtgtgytggcttctctcgttgcagagcaccggctccaggcgcttgggctttgggagttgcag

SEQ ID NO: 20478 - DNA, 600 bp, Bovine  MMBT01784
aaaaaaccttgtatgccaagttatattcacttggaaatttcttagcaagtaatatagttttctgaaaaggttgtgggtgggaaggcttacctctttcctaatttaatgactaccaagtgtacatgatcctatgatagagaaaggaacatccattgaccaccattacaaccaagatttaaatataaggacacattaatttttttaatgcagtacctattttctccttcatcgggctattttggctgaaataatttgacagcaaagcaacctttggtcttgtttgagaggttttgctgcttytctccacgcacctgtgtctgtctgtgcaataaacctgactgtaggactctcatcacaaatgaactgtcagatcattactacagttgatgcaatataatctgtcttgaaattagaatcagtctggccaagctaggcgttcacttgccatagaggctaattcacttcttgaatatgcattcatggagatatgcctcgatttggaatccagagggagtacacgttaagagcagattttctgaattagcatggcaagagggaagggtccttcatttagacggctgcagatgccgctccctcttg

SEQ ID NO: 20479 - DNA, 600 bp, Bovine  MMBT09442
gaaaagttcccactggattaggcaacaggggagtgaccagtgtccatgaggaaggctttatcagtggagaaatgggmatagaatccggactcaaggggagggagaggcagatgcaggaagcttggctggaaaggggagaggccaggcaggtggaggctgggggcatgttgtcttgagagcaagtgcttcaggtcggaggtggccatggaggayaggcactgtgagccatagctcgctctgktgagcaggcgtgtcccccatcacactggcattgtagatgtagacccaggttcctgtccrtcccttgtcaccacagggcatgaatctctctgggggccagaagcagcggctgagcctggccagggccgtctacaggaaggctgctgtgtacctgctggatgaccccttggcagctctggatgcccaagttggccagcatgttttcaaccgggtcattgggcctgatgggctgctccaggggacggtaagtttggaaaaatgtctcagaggccatagtgcaaaggtagagaaagttctatcctacatctgctcaccaccaccctcctggaattcagttttcctctttgtaatggtcagcct

SEQ ID NO: 20480 - DNA, 598 bp, Bovine  MMBT08238
  misc_feature (1)..(42): n is a, c, g, or t
nnnnnnnnnnnnnnnnnnnnnnnnnnnnnnnnnnnnnnnnnntgagtcaccaataaactgagacttttcctcctcccccgtactttgttcccacagtggtcacagctgcctacaggttcctagagactggagttaccgaagagtgaccgaggcagtgacctctgaggtctcattgcttatcctcccccattatcccagaaatgaacaagctggcatccacaggaattagcaggatcataccgggacaaatagagatgtcaaactgattctgtctctggttctccccctcaaatctctttmccatcagtttcaatctcattcttggtttttctctgtccctttctattctcctttgatcagtgcttcctccctcgagctgttattttcctcctctttgttctcctgtgtgacatctaccatcgtcatcctatccccattctcctcctcatctcctcctccttcctgactccattcaaaaataatgataatgataaagataacaacaacagtaataaacagttgtctgctgactgtactgcaggaacacaaagtactttccgttagtgatcactggtggctcctcaagtcccgccagcct

SEQ ID NO: 20481 - DNA, 602 bp, Bovine  MMBT13198
  misc_feature (1)..(2): n is a, c, g, or t
nntactcaagatattttttgaactcctctttggtatctaacttcagagctcatggcacattatttaaataacttcctaattctgtgttgagcatcagtgagattagagggtttgtgtgtgtgtgtgcaccattttttttttaatccytcagatgacttttctgaccaatgcagatataaatattgaccaatgccttcaatctttactctagctatcccacagtctgcctgtattcatggcagcrtggataaaattagaggactgagaagactaagatggactaagakcttggaactaagctyttcataacacttgtagaaatcattcttgtgtacacacacacaatacttagtgtagatttctgatcatgaaacttcaagataaagacacttgtattgcatgagataaaatgaaagtgtgggaagcaatactgcaaaaggaatgaattcaaagcagtgaattatcatggctaattcctttaaataggtttatacacttgacagaaatcatagaaaatggattttttcccccataataaaggatcaaaaacatttctgaaactactcttttccctttgggacaattttaatacagatgaagga

SEQ ID NO: 20482 - DNA, 600 bp, Bovine  MMBT10013
cccccggttctcccctcaggcaagaaagaccaccttgggacgggtcacctgtgagaggcccggggaggaaggacccaggcctgggcactgcgactattttttgctgctcccttattaccttcttttttttttttttctggttgtcaaatgatccttttttttttttttcctttgcagttcttaactagcggggcactccactgcgccactgttgatatcatctatgatgtcatgagggtggcggccatcaacattgcagcccacagactgggcggtccccaggatctctttaatggttcyagaaagttctctagctagagaccgatkccgcatctgccaggcaatgttgacaatctcatcaaaagtaatgtttccactgtgcttaatgtttttctgcttctttctgtcccttggtggttccttgagggctttgatgatcagggcagaagcagaaggtaccacctcaatctgggcttgtctgttctggtcagtttcattgtaatcctcagacccttccaatcaccagttgccttggcgatatcatcaccaaccttttttgtagacagacccagagggccaatcttgggggccagggcagat

SEQ ID NO: 20483 - DNA, 600 bp, Bovine  MMBT04733
gtgcccaaaggcaagcctttccggtcaggtcacatcagagmcacctgaaaggagaaagtgggtcacaaacaagatcagaaggttcctgagagcaatacctaagaacccaggagactggaagaatccaagattccctccaggaagccccacggggaggaggggagggccctttggctgactaaaattctaattttagataacaaaattggaaaaatattttagatagacaagaggaccccaggtgaccgaggttgtctttgctgactttttctatcttccttgcagaccacaagcatcacrgtggagagaatggcacctttgtgatctctgattccccttrtaactgacatagcacatgtgcgtgtaccaagtcccttcagtcgtgtccaactctttgcgaccccatggatgataggccgccaggctcctctgtccatggtgattctccaggcaagaatactggagtaggttgccatgctctcctccagggaggtgacasagtagtagygcttaaaaggaagattttcagaggatgactagaaaattgaatctaccttaccagctcaatatgtcaacctcctagaggtgtgtatttttaat

SEQ ID NO: 20484 - DNA, 600 bp, Bovine  MMBT04646
aggccttaatcttcatgactgaagccatttttgctgtgtggactagtcactcatcagctacacagtgataacaggtctgagtttctctagtaatgggaacagatatgttacaatctatactttccatttagttccccttatgatcaatgcctgaatttcaatcctaagagtatattactatttgattctgaagcacatgccaaaagaatccagcaggactgcagacatatcgtccaagtgcactgccacttccagtgactttatggacaacatctgtgtgttatttgaaaattaatcctyttccatctgtgtaccctatgttttggattccctttccttcacaaatatcctgaattcaaggtatctaaagtcctggagcagttgtccggaggaagagaagcaacagccccgcccccaacccttgggagcagaaaggaagagaattatcctaaggaattatttaaaaatccagacgcggcagacacaaataaaaccatggctgcataggttgatgtcccaggggtccaaaatttaacgtcacttgtgcaataatttgtttagcattaaactaaaccagtttgatgaactcaaatgccctcg

SEQ ID NO: 20485 - DNA, 600 bp, Bovine  MMBT18747
ttccactctctctgcttgtcccaacttggtggctccaaaagctacctgtcacaaacagattttaagttgatttttcttctatctctgcttccatcagattaaaatatggcaccttcactgccaacgttctagcttcttttgggaccaaatcacgtrttgtcatcagggtctcagttgagagcaaagagcaggaacttcttgtaaagcgtgatgtggatcaagggtaaggttatttagcactagaaatctttttgtaatccaatcattccagttactggaagggtggaagaaaatgtgacygtgaagtgggtcacttcttaatatccargcattaaaatgccagcttgaaaaattagtataaaaacttgttatatagtttaatttcctgcttgtaatggcgtgaaaaataaatcagtgagtggtcggtgatgcaactgcaggcrgggtgcccggatgtagacacrgcataaggtgctgtgytctttcccctccgtctctcaaatgtcccttcatattttgtttatggaattaaaagtgttagtctgcactagcgtctcctagtcttgcaaatgcaattaccaaggcaattagtgaaatttt

SEQ ID NO: 20486 - DNA, 600 bp, Bovine  MMBT06165
attaggaccatatggaaaaaattcaaagtcccttcctggaggctatattcatatgtctgttccttactatttccctgaaattaccctatttcaagcctttatcatccctatctgacgcttcccaaacttcccatgtctccagccccctgtgctttaattagcttactttgttgtgacccactgcctgcagaatctactagagacccctgagcacagcctccgtggaagccccaggctgcaccagcctttcctcatatctatttattttccatagattctcctcccacaatctgtgcttcrgtcacactgggccatttgcagctccttatacctgctctgcatttctcaacctctgtacattattcctgytctcatttctggaargccttccctatgcttgatttccatcaacatccttcactgagcatctcaaaggattcacaaccttgaaatcccttgattcctcatagacgggtgctcttaaatattgttccctctgccgcctctgayaagctcatgtcttgtccccagagtaggaagaatcctgatgatctgggactcagtattgccatgatcccactcaaccacacctacatctta

SEQ ID NO: 20487 - DNA, 600 bp, Bovine  MMBT12785
gaataagtacatgtgagttatatttctaactttacatcaaagatgctgactgttcaactagtagcttttctagctaccatgggcatgcaagagaaaatctgagaagtcgatgaggagttttgttaatttagcttctaaatggacatgcatttatagaggatttaatctaaaaatcttctgtctaagctgcttctctagaatctggcttttcaaggcagttaacctgacacagtgaaacagcagtatacatgtatttgcatttttaactcccctaagcatactctgatattatagtcaaayggcagaagaaaggaatcatcagtcagcctttagcacgctgaatccaaatcacaacagagatttactgcttatgttttattcttcccaaggagacattaaaagaaaagactgcttaagaacaacggtggcatatgcatatacagaaacctgggtgtgtattcatatagtgggtggaaaatcaggcactcaaaaaatttctgctcaacaaaagacaaaagagccataaggtattgttttttttttattctaatagtataatgatctttaatacattatagagacaagcataggagatggttt

SEQ ID NO: 20488 - DNA, 600 bp, Bovine  MMBT13607
acacgactgagcaactgaactgaactgaatacactgtaaatacaggaaaaaaattgtgtccaggagaatccttttgctacaagtaacagaaatccagactccagctgtttttgtttttgtttaataagatgggtttcaaggctgggggattcagagatttcgtggcgtcaagggggccccacattattgccacttccctggactgctactcacaggaygggcttcatcttgcaactctggccaggagctagggcttcaggtgccctgtctcttgctaagtgggagtgaggaacaatgggyatccatcctggaatcaggtccttcccctccatcttattggcccaacttgggccccatgcccaccctgggacttcttaataacaccatcagaggactggcctgtgctgcttggtctgaacgtcagcatccgctgctggagcagtggctgtgttcagcttcccattcccatgaatcacagcagctgagtaagcacccgaacaaaactggattctaggaaggaagagaaaagcgaaatagatgttgggagaggtgtagccgctcctacaggaggcttccctacttcacagtgtggcctcgggc

SEQ ID NO: 20489 - DNA, 600 bp, Bovine  MMBT11378
ataactgttattccctgaggtttacaaacattaacrttcagttttatactctaatagcartaacatagaaataaatgagctttaataaggaacataagtcttactgcaataagttgaacttctatggaaaagactaaaataagcaacaatcaataatcaatagagactataaattaatttcataagctctgcagattttctctttgggtttctcattttgttcttgagctcataaattccttggttagtccatatctgagtctccatcagttttaaacactgcagatattcttccctctstcatctgcttaactttgccttggctactcaatattgaactgaaatatttagtttttgatatattcaagctcataccattttttttttttttttcctttggttctwtaaagtttttattaagaaatctttctgcacttttttaggttgcagtggtgttcccagtattttcttctactaactttgaagtttcagcattttatgtctttaattcacctggattccatcactgaatgtagtattttgtctgcccattttcctagtgtgtgctactaaaattttcctttatccattgatttgtga

SEQ ID NO: 20490 - DNA, 598 bp, Bovine  MMBT12100
  misc_feature (1)..(36): n is a, c, g, or t
nnnnnnnnnnnnnnnnnnnnnnnnnnnnnnnnnnnntttgtgtatttctttaattggaataaattgtatcataatgtgcacaggcacaaacttctgtaaatgtccaatgtccagtgtctttcctagaccctggaagtccatttctaaattcctggtttggaggaaatttgttcgtgaacccaggaagcaggtttgagaagttatgggtagggtgcagccggcacgtggacttaatggataagcaggaagggagggtctcccaaggttgtcaccctgcctggggtgggggtaccgtccccwgatggttgagaagctcatttgcagccatcactctttgcagtgtctttcattttgcatttatcgcgtgcttcctctgagctagttattgtttctgatgcatacgtcctgctgcttcacctgaactgtaaacgtcttcaaatcttactcttaagtcttcatctctttgcctctcctcttgctgccttacctaagaaatgcttggtgggttcttgttgtccccccaccttttttttttttttttaagtgctgtgcggtagaaacgtttattatggtgttaagtctttaaataattctcagc

SEQ ID NO: 20491 - DNA, 598 bp, Bovine  MMBT11225
  misc_feature (1)..(70): n is a, c, g, or t
nnnnnnnnnnnnnnnnnnnnnnnnnnnnnnnnnnnnnnnnnnnnnnnnnnnnnnnnnnnnnnnnnnnnnntcagtatcaaaataggcctcatgttaggtaagaatcgttctctcaaagtatggagataaatataattttaaacaataagatattactactttctacttttaaaaaatcaaaagtattaattttgcttgaatataaaataagaaaaaggctattatgaaacttaagaaattgctgaatagcagaacaatgtttcttttccacatgagactttaattcataaaagaaccccytttgtttagggaggtgggaaaaaaggagttgctaaatgttatgatatgagaatcactatctgttaaaactcttatttattttagactctgtcttttcaggctagagcttgtattttacatgtgttttaagctatgttctttaaaagtaaaatcaggactcaccaagtgtttgaactattattcacatttctgctttgaaacttttgcattgtgcttgctgtctaagtagcactaaaactcccctggcacagctacacagtaagagaaaagggtaagaaagagactaaaaggatcagat

SEQ ID NO: 20492 - DNA, 600 bp, Bovine  MMBT18820
gaaaagatacatgtagagtgatggtcggccaaggttaccagattctttgttgaaagtcatggatcctgtgcattccatctgatgtaatgagaaaattattttattaaataatgtaagaacgcctatatagtcttaggggagagccagagaatcagatttgcaggtgttgaagctcagagaagaccttgagttgtgtcaaactattctagtgagcccctgccactgccatgactgggcttaagaacttccatgcgccactccgttatgcacgcttagttgctcggttgtttctgactcttrggaccttttgaactgtggccctccagactcctctgtccatgggatttttcaggyaagaatactggactgggtcacaatggcctcctccrggggctcttcccgacccaggggtcaaacccatgtygtctggatctcctgcactgcaggcagattctttacctgctgagccatcggggaagcccaggaacttaggtaccttgtactcatttcctcttgccgctataataattaccacgcatttatagtctaagacaacacacatttattctcttatagttctgaaagtcagaagtccaaaat

SEQ ID NO: 20493 - DNA, 600 bp, Bovine  MMBT12377
tacacagtgtcacttctgccaygtcttttgtccacagtaggtcacagggccagttcaggctcaggggaaggaaaataaattctagattccacttcttgttggaggagtggcagggtcacattgcaaaagaacatgtgggtyggaagagattgttgtgaccgcctctggawcacactctgccacaatcaggcatatggctgtgtgtgcactttgaaatagggtggtcagggaaggccttatgagacagcgaagtgacatctgagcaaagacctgaaggagaagggagcaagccttgtagayatctgagataaaagcattccaaactaaaataagtaaatacaaagaccctgacgtgggaacaagcctgacaggttcaaggaatagtcgggaagccactatcaccaaactaagagtgaggatgagggaaagaatggtagagatgaggtcaaagaagtcccaggggccagaccatgtagggctttgagggacctggaagcggaaatggacaaaaggataaatgattgagattcctacttacattcataggttaggcctatgaattagattgggcttatgaattcataggttaggcccctccta

SEQ ID NO: 20494 - DNA, 600 bp, Bovine  MMBT19546
cttttaaaagcagagtatatcctgggcagtctaataagcaacaatggagcaacgggtaaggtgctgtcatatcgtcaccataaccgtcacgcactgtccctaccagaattccagttcagaaacaactcaatgacctcgtagttactgtgcactgaatattcccgaaatccctggaactggctctgccccagtgaaagaagtggctttggttgagcagtttacttctctgtgtttccattttctcttattaaaaaggaaaacaaaacaaccaagtcttctaatatygccctgctctattgyggagggtgttacctaatcagcgttagttgtggaagtasgtaactccctgggcttcagaaaaggctcagctgaagctttgtaaagaattgtgaatggaaattgagcctgtaagttcaggagaatacacttacagctttatgtatttcagtgatctgaaaaataaactgtatttggctatagagaaaatgtaataaaaacttattttgaaatggatttcttagaatattttaacatacatgaaaggaaggaagtcctaatagttgagtaacaagtaatttaagcctcagatatcttgtctga

SEQ ID NO: 20495 - DNA, 600 bp, Bovine  MMBT11600
accttggcttatatgtagtggtgtcactttcactggtgtcatatgctatagttacttagaatactgcagacaactcttccactggctcatggagtcctaggttttaaattacatactaaccaaactagtaataaccaatcaacttgtctagagagtttactatgagatgtctcaatccaggagtccctgattaatccttcaaatctactacttcccagtgtattttcttctgtttcctcccattctccttctaatcctggtgcagacatgctggctccctgcttctcacttgcttctccwtccccttttcccctcctcctctttcctcactcattttcttccttttcttctctctccttccatctttggtccttgaggaagtcaaagtccttctgtcttattctccagggcacttggtttatcttgacattcaaactgaaactgacctgtgcattgagttcccttatgaccttcctacttgtccagcttacagatgactcatagaatcagcttttaattcttattcatgaatgcatttgcattccattttgacatcccaatatttcctcccactcgtcacttgttatcattatcatccct

SEQ ID NO: 20496 - DNA, 600 bp, Bovine  MMBT10121
gtcaggagttttgaggaatcagaccgtcctgataatgacctgaactctgcagccagaatttgaagtatttaccccaagagaaataaaaatgatttccttccatgccaaatgcataatttgctgctcataaacttttttaaacaacatacactaactattgagtaacccaagtattctccatagtcatgtatagcataagtaagctttaatgaggaataaaaatgaaactgaaacctatgtggccaaaaaagaaaaacaaaccaagtaagtagaatagaaatgatttgaatctaaacagtmtataaatgaatgtgcctgagctactwagcattagaaatcgcaaaaaaaaaaaaaattatacaattaactgatgtcaatttgacattaaatgcagcagctttattttcagcattgtagaaacaaacatgcagtaagctcttgaaaagaatgaattgtcctttttatagttcagtctgggtattttaagttcccaaatagttctagatcattggacttttaaaattatatacttggagctttcactttatagcagaatgattattgtcatgaaagacatgtttgaaattgcaaaaaggtaga

SEQ ID NO: 20497 - DNA, 600 bp, Bovine  MMBT04854
ggaaaccccaaataataaagcctaattttgaattttaaaaaactatgtgaaactaagatgtgggcaataacagcatgcaagctattccagaggtggtgagcgctgctgagttcaagggttttttatgtctttggggaggagggcaggactttgactaatatttggtattattgagtcagaagcatgtgttaaaaataagagccactattaaggaaataaaaagacaatataagggttccaactaggaaggggctataaacaaaaccccatcatcctatagaaactaaagaaggaaataaragaaggataaaggaaaccatcaacagaacccaagcagacctaaaccaaacctgaatcttttggaagagctacctcccaaagcagattgcttctttcaaaatgcaaatagttctctgttcgcacacagcacaccctgttgttgtcattatgatcacaaccactttttatttcagagactgccagatttaagctgccagggtctaattaggaagccccctccatccacaactgcagttatgaggctcacccaccacaggtccttattatcccagttggtgctcagtttaagaaagcatcggt

SEQ ID NO: 20498 - DNA, 600 bp, Bovine  MMBT03674
gagttgcagttccggttgggaggggtggggcgcagcgttgtgtgatggagagggcgaggccccgcgtttgttgaagtggtctgcgtaggttctgtttcgtgtgtcgtggacgtcctctgcagtgtgtctccctttgccgaagctgatggctttcctcagctggagtcttgagaatagcgggggtagtggtgcccaagctgatggctttcctcagctggagtctttagaatagcgggggtagtggtaagtgggggcgcaaggtggtgtctgatgagacttgtagagattgttttggatcasttaggctcaggtgaaaactggagatcgaggtttggtcttatatatacaaaagtatgacagacgtggcagttattgatcccctgtcccggaggcaaactgcactcggaaagctggctaaattcagttcaagaggagtgttaaagggaatgtgggactgatagagcgataatggggaactgggagaggaaagctgttgttaggcagtcagctcaaacctttgttgctttgaccttcgggattgaaatacttatggtgtgagaacctcatttcttctaaaccaaggtgatgcttcctactctc

SEQ ID NO: 20499 - DNA, 505 bp, Bovine  MMBT18617
gggtgggagggccgggcctgcttttttcctgccttccaggaagataaggcagaaagcggggatgaaggatagaatgggtaatactctgaaaccacaagaaagggtcctggctttcgtctctgccctacagytcagacatgctcctggggcatctgggagcagggaatggccccacccccactactctggggtccctgctcagggaagctcagaaccctcagtgggctccccagacttccatctcccctccagtgtcagttcacccacaagctgtttcagctctctcactccccttcggasccctagttttcccttccaggtgagcccagcaaccctagagccaggcttttccccttgctttcctgtaccagctaaagccacagggaccctgggcaggtgacatgacatgcatgggccttgagggctggctgcaggttcatcttcccctaccctctaggatccctgcctggaccccaggcacagatcagccctagagcaaccaagg

SEQ ID NO: 20500 - DNA, 600 bp, Bovine  MMBT08356
ctcagtaaataattggcctgctaacagtgtagataatgtcctgtggtaaccagcctccaagatggccacagagagccccacctctcrgtatttacaaatgtgttcccacctcacattatacctggattgatctgagtgatcagtatggcagaaaattggtatgtcacttccaaggttaggtcataatatacaccaccttctgtcttggatgtacattctctctctcttatacctcactctgaagaaagccagctgtcctttcacaggatattcaggctgcctaaggtgaggtccacaagrcaaggacctaatgtctgtagccagtaggtaatcaggyagtaaagtctgccaacagcaatatgagtgagctgggaaagctgccttttggtcccagtggagcattcatatgactgccatcccatccagcagctgtatggcaagttcatacaagaacctgaactagaatcagttgagctaagcctctcccagattcctgactctgagaaactttctgagataagtgattctttatttaatctgataaattttgagaagattttttatgcaacattagataactaatacaatgtccctgatgac

SEQ ID NO: 20501 - DNA, 428 bp, Bovine  MMBT13052
ctcagtaaataattggcctgctaacagtgtagataatgtcctgtggtaaccagcctccaagatggccacagagagccccacctctcrgtatttacaaatgtgttcccacctcacattatacctggattgatctgagtgatcagtatggcagaaaattggtatgtcacttccaaggttaggtcataatatacaccaccttctgtcttggatgtacattctctctctcttatacctcactctgaagaaagccagctgtcctttcacaggatattcaggctgcctaaggtgaggtccacaagyatatttctccagcaayaatttcattttgtggtctgtatttttttcctatttctttttcaaaaatagaggagataattcttaaagacacattgatgaaaattattattgcaagtccaaatacacgggtt

SEQ ID NO: 20502 - DNA, 600 bp, Bovine  MMBT09017
ygccgctagcccacccctcttcctctcccattaccctggtatatttttttcacagtgcatacaaccctcagaaattatctttatgcatttgtttacctgtcttatgtttgcctttcctcttggaatttatgtgccacgagagcacagaccgtacctgtcttgggcactgcagcatccatggtctcagcacatagtaaatgcctggagcaatggaaggtgctcagacrtggaaacaaataagtggattcgcatgacttcygctggcacgcatgagttgatcttcttctctcctcctgactrtcctactgcctatttgactccatcaggttgtccctcctcaaatttatgttctaaataaaattttcttcttccccttatgctgcttgttcctcttggggttcactatcgtttaaacaaaaacctcagggtcatctttggctcttctctctcctcactcctatatacacttagtccccaagtcctgttgacttaaccttggcaatacctctggactccatcccctcatccattcgcctctcattcaggcaacagaagcactcacagggatgctggcaggagcttcctaattgacttcccaac

SEQ ID NO: 20503 - DNA, 600 bp, Bovine  MMBT19970
cttctggagtctggtaactgctcctatattttgcatctgttctcatctaactgaatatttaaaatctggttgtttttctttggccagactttcaattaggtttaatctctcctttgatgccaacttaaaaaatcttttactacccttacattaataaagtacattacttcaagcactataagatgtgggttgtgacaaacaagtatttattaaaaatttgtcttggtcttttaattaaaccccagagagctaacctgactaaacaggcagcaaaagaatctcttaatttctgggagtatmtgatgtttaaattaaatccacattttgtttttttgtttttcttataattcactgaagtaaatgcacttttttacaatccatgctggctaaaacacacccatctctacttctgtacccatccactcacagctggcctcatatacaaagattcctggtcagtccaaagtcaaaatgcaagaatgccactcctaagaaataaggtattaaaaagaaaatactcagaacatagaatgaacatatcctgatggggcttcagtcaagccaaaaccttgtgggatacaagcacccccatgtgcaccc

SEQ ID NO: 20504 - DNA, 584 bp, Bovine  MMBT04296
  misc_feature (1)..(1): n is a, c, g, or t
naaagcttttaaaataaatcagtcctgtttaaaccgcagctcagagagttgggacaactcattgtgagacttctctgtttttagctgtggagcaagctgttttgttttgactctctcataaacccaggtctaacacacatttacttggccattcttggaaaaagaaatcaaaagagccagtcctggagcrtctgagtactggtaagttcagagagctttcagsgtccaggggaggcaacagagaactcccatctgaatgactgcttcttaatggagggatgaaaggatatgayggacgcaraggccatgttggacaagcgtctcggtggggaaatctgccaaccggacaacgcctcgcccagggaataaggatgcagttagaaccaccttattttcaaatggccaccatgacaagagctgttaagtattaaacagatgtctgctatccgtgattgcatttggatctcacaacttagcggtgtcagtagaactaatgactgagacagataaagtggcttacttcctgcatggattaagaattcggtataaaagccaaaataaagtgctgcacacctgccacattt

SEQ ID NO: 20505 - DNA, 601 bp, Bovine  MMBT07275
  misc_feature (1)..(1): n is a, c, g, or t
nttgaaggtcacacctcacctgttccaacacctgctgcatcttctgctgccatatggcattctcctccttcagatttgtcgcatactgatctctctctgcctgcagctgcctcagcgaatccttcagctgcaaaaggagtgcagaagttagcaggggctgtcacaggggggcctcacctactcatggtcatctggggactcctgtacccctctgtgtgtaaagcctcacctgctccatgtgggtctccagctgtgccctctcctccagggcctgctgtaactgctggctgctatcaggggyaggttgactagaaaactggatggtgaaaaacaaagttagattggggggcccaggctgatccacacaacgcccacccccaaaaggtcagcatacaactcagggttatccttaatattgttagtaccatgtctactttattttcactaaaaaatagctttattttcactaaatactcaatgtaaacaattctgatagtaagtgttcaaagttctcccagcctccccaatccagtgtgtatccttcttgacccttttccacaggtatgcaaacatgcttcattgatgcacagtgccagggata

SEQ ID NO: 20506 - DNA, 598 bp, Bovine  MMBT07212
  misc_feature (1)..(44): n is a, c, g, or t
nnnnnnnnnnnnnnnnnnnnnnnnnnnnnnnnnnnnnnnnnnnnattgaaggtaggagaagagggtgacagaggatgagatggttggatggcatcatcaactcaatggacatgagtttgaacaaactcagggagatggtgaaggacagggaggcctggcgtgctgcagtccatggggtcgcaaagagtccgacacgactgagcaactgaacagcaagagtgatcttcacaggtttcccccggaargggcttgtcttgcatctgtgtacggtaagcatcttatcaatcccttcttgcctcygacaatcatgttgaaactgctttctagtctaggtggaaacaattaaaaaaagaaaacaggtatcagtttgaacagactaataaaatggtttgtccacatcaccttcaaagggttaggctatatcttgtcrggcatcttatgaataacctccagtattcaaaatccattttccaaaggcctgccccactttcctgcttccaccactgctggctgaagtcatctgacttccattttggaacttcccacaagaattcaagcttggtccaaaacctctccagcctccaaggaaaacagacca

SEQ ID NO: 20507 - DNA, 600 bp, Bovine  MMBT04895
gtcctttcagttttatttactttgattccctgtagatcatgtgtttatgccctgttgacaatgatatgttgttgcctaatattgtttccttcctatcktttttttttaaattaataagttagaagttttttcagagcaataaaaatgatttatttcttttatgtagaggtatagcatggatcctacatattgttatagtttacacaatatttgatgaacttattatcctaccagtaattggtgaatcatcaaagttaactttacatcccttggcatgccacttagtaaattagaaaaaakaaagttgtagagaaatgattctgtactgatgtgtgtatctcttccacaataggttatgatatttaaaagaaacagatgagcttagaaggttaagcttcttgagagctgacagctgccctgtcctattatagagagatttccttggcttgctagaataagccccgagagtcagtggactgacttgctcttgtcacacagcgattgaacaagctgagttagaagacatgtgtcaaattacaaggggattcacacagcgcccatgtgccaagttttccatcatagcatgacaaaaacaccatg

SEQ ID NO: 20508 - DNA, 600 bp, Bovine  MMBT05463
ttgtgcttttgcaccttcaaaatatatccagaatgcaactaattctcatcaccttcattgcttcactgctatcaccaccttcaagccaccgtctctctctcctggataattgcattacccctaataggtctccttacatttatgatgcccaccccatcactgtcattctccacacagcaagttgtatgaaccttttaaaatataagccagatcccattacccctctgctcaaaacccttccatggtggcccgtgtcagttgagtaaatgcaaaagtccatataattgcttacaatgctcytcatcatcttgcttctctttgacatcatttattatcccctctcatgttctctccattttagtcacactggtctatttatctcagccaagcacatcaagtgctgacctgcttcaaagtctttgcattgctgccccctctgcctacgtatctgtaggactcattcgatcacctctcttgggtatctatacaaatatcagtgaggtcttcccagacaactctaagtaaaaagtatagcacttactgcactgcctatgcccatccttgcttaatttcsccccccacaaatttatcaccaaatga

SEQ ID NO: 20509 - DNA, 600 bp, Bovine  MMBT06556
taattagtttaagaatttttcactctaataaactacatccttaggttaggagttctaaaacaacagaaatatatttggttattcatttttagaatatgtgtttcctcacatctatttctcactcagggtaacaatagatggcaatagttgtcaatagatggcaaactaaatatgccaaaaataacgtttcctaattgcttccacttcagaagacaattacaaggtggtttaaaaagaaaagtaactctaaaactgacccccaatcatcactaccttggtatctagattttaactattttyccttgttacccgaattaaaatttagtttcaatcagcaaaactaagtcaacaaaatgacatatggaggtatgaaaaaatgattggctggaaagcccattattttatatgaaatcatattcatttacatgactttggtctctctcttcgcagtttttggaaatgtaatgggataaacctatacagagagtggaacataattatcttcaaaccctttttctttgtgccttaatttagagcattgggatcatagagcagacaaaagtgagacttatcagatgagaattcattctacacaattca

SEQ ID NO: 20510 - DNA, 600 bp, Bovine  MMBT05491
gacaccaaatcgtgccctccaggcactggatttattgaaaaactacatacatattaaaacatctttatatacattttctctgttataagattacaaatatacaaatgcaaattccatcaaagtcagcatcttgtacattagaaacaactgcagaaaacctatatcctaattccatcagttaaattgggattcctcaaccagttaaaaaaaactggcacagctcacccagcttcccaagtgcagctcatgacagtgaaaccacagtgtttacatgggacgtttttccaaggaagcagtgaygtttggttccgagggrggaaaaatatgtttaaaattctgagagcctcatggtggttcggagaaaactgggactggtggcaatcctcttgacaacattttgatgaaactccttgatggtcttctctcaaaataagtaatgaagttattacttcattgtcctctgactggtcagggcaacgtactcaacccagctgaatgcaataaataatgattatatataattcttcggtcagaatgaaaaggaaggtccttgagcaacagtgtttcaaatcaaaaactgaagtcctagaagagaggtct

SEQ ID NO: 20511 - DNA, 600 bp, Bovine  MMBT05086
tgtcctgaagcttccagggtctgaggaaactgacgtggccgcaggatggagcagagccagaatgtgaagctcagtagacgatcacgacgttgagcaagaccaggccagaggagagtctgcaagtcacaccacagacgcatatgtgtgctttgtgcaatttgtggtctgcctctttgcttcattctttttttcgtaccttggcatggacccaccaaacatcaatagaggttacttcaggccttgtctgctgtgagctatcagtaactttggtttcttctttacaaactaaccttgttcatyctcaacttttttttttctttttggttgggarcatctgcagaaggtctctgcctggagatggtgtgctaacctatgtctagcagacaccagcaaggcacccaggtttgatcatggcaacaaggcaaggctttagggaggatcattgagagcaatgaggtaaaagaagctcctagcacaggtgactgctttgcacctcgcctgtaggatgtgatgttgtttgcggtgacttatttaacaagcggctagagaacggagatttgtgttttagctcatgaatggagggtgaaggcctggaatttt

SEQ ID NO: 20512 - DNA, 600 bp, Bovine  MMBT08770; identical to SEQ ID NO: 4568

SEQ ID NO: 20513 - DNA, 598 bp, Bovine  MMBT08391
  misc_feature (1)..(26): n is a, c, g, or t
nnnnnnnnnnnnnnnnnnnnnnnnnnactggagtggaatgccatttccttctccaggggatcttcccgatccagggatcaaaccccagtcttctgcattgtaggcagaccctttaccatctgagccaccagggaagcccttgggattgttttagcattatttacactaacgaatatattctgtaattaaaaattttaaggctctatagtgttagttacatattcatagtcaagatcattatcagctcttttttagaagggcataccattcctgaattctttattttgatgtatctcttayttagccgtatttcattatcaagtaggttctttaaagcaggcttcataagcgctatgtttcctcccatgttatgtgtttgaaaatgtagttatggtgcctttaacaataaattacaacttggctgaatattaacttcttgattcaatccccatttttatttcttgcctttgaactctgctgctgttattccaatgcctcttggcattgaaaattgctgtgaaaaatgctctggcctgaggccagcctgtcttgtagataatttgcttttctgcctgcaatctcatagtaatctttattt

SEQ ID NO: 20514 - DNA, 471 bp, Bovine  MMBT08113
gggagcaggcgaggtctttgttctgcttaatcaggtctctttgtccctgacttcaagcctaatccagaacagaccagcttagctggcccagacccagaataaggaagttcattattactgggtagaagggaacagttaccccattaaaggcagctcccaggcccctctgccccagccgccttcctcacgcagctgctgttttgactgcacggttcctgcacttgatattcaagttccatagtcatttcaggaagcaatctgtattaataaaatgcaaatgtatacatcgtggcatctcartgacaagacaatttcctctggcacttactttgtcctaacctttttgcaaggttgagaaggtactatctccaatattccttgttaatttttctaggcaatgccaattaatttgctgaatggattttaactttatggctttctttttactgtttggaagcaaacctctaatca

SEQ ID NO: 20515 - DNA, 600 bp, Bovine  MMBT10097
gggagcagcccactggcctggcagcctggggctcggttctctgttatggctgaagcagacatcacagctctctgtggtttctaagaactggtggaatttgcatgttgagaatcctcgttccttggcatgaagcagactcaaaagcatcgttgctcatcatttgtcatctgttggagaaagagcgtgtgatttgtttacttgtaatgaagcttgaccatacttctccaggggcctttgcaagaaggatgtgtcagcttacagacctgtccccatgaataaaaccacaggcaaatgctcccyccatcttcccttctcccctctcatttctgtgctttatgtccccactgccgggccctcttcaagggcttatctgtgggtgagttcagaaacttcagatgataaaggacacccagataattggccggttctccaaagtgtctgtcccctcagctgctgccagattccctcttaatgagtccgtgcagtgacggtggggtctgagctcctccagctccgtgggaaaatgagcttccctgcattgtaacagcttgtggctcggggggaaaatgacagccattgcacaagtttcctttgaatgta

SEQ ID NO: 20516 - DNA, 600 bp, Bovine  MMBT07489
aatggagaacagaagatcctggmaggatataatccatggggtagcaaagaatcagacacagcttagcgagagaacagcaactgcacttcagtcccttttgttgactataaatcttcagctgtctttggtgtaatcaaagttgaatttagttctatactgaatcttctytcctctacttcaatactttaactagaatctatcttgtttcttgtttagtgcaagatttttctattatactatcctttcaaactcctatacagtgattttccacaacaaccaacgtatgctcctcttcatagwtttgctctatcgttcttgctttgttgttgctctcaatttttctcaaacatgttcttaataacctgaatataaatctcttctaagtctattaaatagaatatcatcaatgtttcagctcataccacactctcccttcactcaaatagtctgtgtaccttgcattgttattctgcaaattggatcagcaaactttataattccattcacacattaaccaagcccactggagtacatttggcarcaaccttcagaatctccccaaagttgggaattcctgcaggttctactttgcactcttag

SEQ ID NO: 20517 - DNA, 600 bp, Bovine  MMBT21586
tctccatcttctccatagaattgagttcatagtcttcacacagtaactccttaactatttgttgagtgattcagtctaataggcagtagaagctttgacacacatatgtattgttttattggcttcyaaattgctaggtgtaactaaaaagtatcagaaagttccctcataaatatatactgtatttttccaaagccaggaataaaattaatattgaataattttatttatgtagaactcaggcagttttggtttgtttttttttttttttttcttagtaaatctctcccttagctctgyagagatagcctattggttttattgtgaactgtgttttctcttttcataggcttcctcatgtatccagaggatcttgtcaacattaacattagcaatatttcccacactgtatttttttaacttcctttattatacagaagcaggatccatgttttttactctttttgcctacttgatgtgtctttatggaaatcataaaacttcagccttgcttggattttgtggcttcatgtttcgtcaaacaaatatcatctgggctatcttctgtgcaggaaatgtcattgcacaaaagttaactga

SEQ ID NO: 20518 - DNA, 600 bp, Bovine  MMBT09676
gtaatgtgtcatcacagtgggcaggggtgacacgtgacctcagagtgcaggtggaatgtcagacgggggttcagagggggctgggattgggctgtgtctccatggggattcctctcgtttaaggagctaatataccatgcacttgaggggcatcaaaaaaatttcctgtggaatcacttctttctgacattccaaaaaaaagcagatatgaattccatctgctccaacactccccagttcacttagagctgcctagcatctctgcattcaccccaccctggtcccccagatctctagcaygtcacacttttcagaaggccttgggaaagtcagggagtgtctctgagcctcaacgtggagcaggaagtcctggaatttcctacgtcaggacagaactgttgaaagattcacacctgatgcgtgtaagagattttcctagtaactatccaaattggagatgttttactaacaagaatgataataataacgatactgttggctgctgctgctgctgttattagtttgaaacctagccaccaaacctgggcttcaagttctgggggccttggacaacagagcctaccctgacctacaggcctc

SEQ ID NO: 20519 - DNA, 600 bp, Bovine  MMBT04179
gtgaagatgttccttgagaccatgtcacactctgtttctcacccaactatcacctgctggttttaatctcatcgatgattcccgcctaaaacagttattactgcagtggttgccagttagtgatgtaaactcttatgtagacctcgaaatgacctcgagaaatgcactctattattaacattgtgagaataaacaaagtaaggggaattaatgaccatgaagagctagttgttatcatctaacttctgaatcctgactcaatatacaaaaaaatccctaaaatcaaacaacccaatctaytggaattagattaatccaccattgcaatgggctaacgctggaaatattcawattaagattaaaagttgtagaaggggtactaaagtctctttttrcatcttcaagaatatgactaygagaatttaaagatgtgtgtctattattctgtaccttaaaaaaaaagcacagtgtaattcagcataacactgttccaacaacttgtacttcatccgaaagaatttatttgctgaagttgttaaaaaaaaacaaaacttatcttcagaggtgttcagcagcagaaaggccygtcggtatcttctg

SEQ ID NO: 20520 - DNA, 600 bp, Bovine  MMBT19697
gggctggggaatgcagtctatccggctggccaagcttccctctgaaatgtgtgtgttctattgctaaggagctgaggatagatgtggcctggcctctgccccctcctcacagtgaatcgcctccttctggagcatacccttcttctgaaacgtgaggtctctcttcgcaacttcgastgtaaaaatatttcgacacagtatttctcagtgccaactggaaagaattaccgtaagcaatttttcataaaagatcactcctttgagaatatgttttcatattttgctttttttgacattttsggaagcaaaattacatgcaaacatttgttctgcaattgcaatgtgtgaagaagctgtgcctctgagtttcaaaatctagtttgcgccgaggcccacagaagagcgtgtcatctcggctcacgttccaaaccggggaacacttgctccgtgccaaaaactggaacaggtgatgctgctaaggaagagggtgtggtgatgaccaaattcccagggcctgcgtcttcgtgaaaggggtttcagatccccagccacagcctcagggttaccccacgtgggctgaacattaaatgacagctggaa

SEQ ID NO: 20521 - DNA, 575 bp, Bovine  MMBT17726
cagtgtgcatttgatatagtatcattcttgaagtgatcattttaaaatgaaaagtcaggkggaaaaaagttaatatgtattaattttttatttaaaaatatacagaaataagaaataaaaaattaacttgctttgtagagtagataaaatgctttatgtgaatgagctaaaagagaaggtcatataactattagtgtactagatatggccatttttcatttgttagacagaactgacaatactttataaaagctaataacactctaatgaaggaaacgtatagagtttaatgatgaagcrtgacctttttgagcttaatggatagagttgaaccttggcattaagctcaaaatcatttgaatgtgtaaaacatggtgttaatatctaattttgaatgaattttggacttcccacaaatcccttacaccactttctgagccatttcatcaacagcttgctagactgcatccagttcaccatctgggaagtgtcacttgctacaaaataaacctgctccctggatgacagcaggatacctaagcatctgctgtttcataagctgcacagaacaccca

SEQ ID NO: 20522 - DNA, 600 bp, Bovine  MMBT05719
acttaatcacatctctaggaagagtgtggtacagctaaatacagctaaatggcgactcatgcacaaacctcaaaaacagcaatgttgcttctgactgtaaacctcactcaaaacttttttcccaagtggtttcaatattcagttggaagagtgacagttgaacttaatggttttcttttctcacttttcttcagaaaccaatccatctcagtgctacagtgctttgagacctttttagacccatgacccttttggataaacttgaaaatctcatgacaccatccccactccacctctaaytcccatcttgagctagtacagggaacaaattctatttcctgcatatcctgtcagacaagaaaaaamattatggcctttawttttcaagttacatgaaaaaagatattttactttccatatataaatatattttttaaaaaattttcaaatcacataacatcctctcctaacaccccaccctgctactccatcaactaagkgcttccatatgttgataatgcatggcctattctatgcaatattgaagctcagtgtaagactctaaatgggtctaattatgaaaatagttagcatatttgt

SEQ ID NO: 20523 - DNA, 600 bp, Bovine  MMBT04950
tcatgtcagttgattgatgaacattttaagttatcaaaaggtacaaaatttggaagcagtgctatttttgtcttatgcttgtgtccctctaagcaaggtgattaatttcttttaacctcagtttccttgtctacaaaatagagacatatacagttgcattctagaactcaagagaatttttttcctattctttttcccatgccaaaactaaaaattttaattttcttattatgcaataaaactattctcactattgaaaaatcataaaattagacaaacaaaaaatagagccccattaaycctatctgcaaagagttggacacgacttagtgactgaataaccacattcctatccacccaaacacaattattcttaacatcttaactacctctcttctaaatggaattgattgcatttcttttgagaaatggcatctttccatatacactattttgtaatgttttaaattcatcctcagcaactaaatcaacattaaatacatcattcaacatcagaggtcagcaaacattttctgtagagtgtcaggtagcatttcaggcaggcacatatctcatgtcgtgatttttaaaaataatctt

SEQ ID NO: 20524 - DNA, 598 bp, Bovine  MMBT00980
  misc_feature (1)..(37): n is a, c, g, or t
nnnnnnnnnnnnnnnnnnnnnnnnnnnnnnnnnnnnnctaaccactcttgcttgtctgatgttgaaaaaccaccatgttgaaaaacatatcagtagctaaattatatccagcacatcaaaaaccaaagctgggccaaggcgaggctgtcaagtggagccatagggtctccctaggtcctgtctcccagagtcccagctgttttcccctttctgcttcccaggtctttctcctgttatgtctggagactgatctggcttgtctcatcatctcccagtgcactcccaccctttgaccctgcrttttggatcatgaactaaggtcaacatctttctggtactctagggcacacctgaatatcccatagtgttgaccttatttctgtgtaagcctgggcaaggcagcttctctttcttccagtgataacatactctgactctaattccaaccagctatcttacagcattggtcacaagggagaccaggagagtatgtttctgattctgcgtaaaaccatcctggctgctagaaaaacaaagcacaacacatgctgtatgaagaataagcccatcacatcacgctcctgtgtgagggcaggcc

SEQ ID NO: 20525 - DNA, 452 bp, Bovine  MMBT21815
tgactaataaaagtgaggaaaaataaaaaaatatatacctttcagtttatgtccaaatatttggaaattttgtagtctatagggtggtaaaccaactatgtgttacaggtgtttagacatctttgtatctggagtttartcatcaaggttaattggaatatttgttgaatttataatgtatgttgttgtttataagactctgagaactactatgggcttaaatggaatctgtttggctactaggcattattatgttttagtaatgttattaaagaaaaacaagagggaaagagtaactcrtgtatttttattgraattgttctaagctatttggcacatatgtcasagaattataaagaaggaaactaacatttctgatggagatatgaatcatatcacacaatatcttcacttcaaatacttataatcagaagaaaagtagaaggacatat

SEQ ID NO: 20526 - DNA, 600 bp, Bovine  MMBT09209
atgctgggagggattgggggcaggaggagaaggggacgacagaggatgagatggctggatggcatcactgacttgatggacgtgagtctgggtgaactccgggagttggtaatggacagggaggcctggcgtgctgcgattcatggggtcgcaaagagtcggacacgactgagcgactgaactgaactgaactaaactgatgatattaagagccctggcatattcatatgtcaaaaatttaaaagtaaaagcaattatttcagaactaattttaacttaaattacaacaaattttagacrggctacacataaagaaattgatgagtcagaaaaagagcttctgtattytttccaactctctcttctggggccattatctatatttattgctgtattactttaaacattcttttagttccacataatatttttgatatataatctcataaaacagaaattttaaatacctctatatccttctttgtttccatttcatctgaaagctggaaaaaatttaaaataaaatctttaaaattctaaatttaagaatttttagactttgtaactctactaagtatgtgtgtgtgtgtgtgtgtgtgt

SEQ ID NO: 20527 - DNA, 600 bp, Bovine  MMBT19978
acagggacagtgaacacagagattattgtatcttttctagagttgcctggtgatttgaatcctgtgcaatttagattatgagattttgcatactgtcacaggcattggtaaggaaaatatttttagagtgattccattataaagtgacatatttccagtttggagcccagctaagactaagaatgactaaccaaaaacacrgagaatattatcgatggattttgggtcttccaaggaaagcaattctcagtgttgtaacagrcagtcctaaaatccctgtcacaytgtacagttaaatcycatttttcaatcacatgaaatctactggaggagaaagagctttgttacatggtataatttgagaattcagacttctttcactttgtggggcagcatgttcagtaaacctgtatgcagatcaagaagcaacatttagaaccctgtatggaacaaatgattgattcaagatcaagaaaggagtacggcaggactgtctgctgtcaccctgtttaacctatacactgaccacatcatgagaaatgtccaactggatgagtcacaagctggaatcaagataggtcggagaaatatcaaccaccc

SEQ ID NO: 20528 - DNA, 598 bp, Bovine  MMBT06786
  misc_feature (1)..(62): n is a, c, g, or t
nnnnnnnnnnnnnnnnnnnnnnnnnnnnnnnnnnnnnnnnnnnnnnnnnnnnnnnnnnnnnnaaatggtagggaggctatgtagcatttgagaaacttgaggcattaagacttatcaactgaactttacagctggaaatatgatggtgtaggaaggttaagtggcttggtcattgtgccaaaggtaggaacatacattagggattattagtgatggctttgctatgaaattcatcaacaggcccccaagccaatattattcccttgttccaacacagaactcggagagaagggagaggcrgcaagaggaagatgattaagcagtaaaactctttctagaggaaagtgaaaatgtgtccaaagtatatagacaaggagcaatattagagtcagccagaagagacccaaggagctacaactgtttaaataaaattgccattttatattcacaatgggccagcttttatcccggtatagctcctcaggaattctctggaaaggttcctaactctagaattacttggtgtgagtgaattggggccctatgaaaatgatactcagtgatgattttatgcaactactttttaaccacctaacag

SEQ ID NO: 20529 - DNA, 600 bp, Bovine  MMBT06946
gggcaaagcagactctagtatttgcttatcagttactgggcttgtcatttctagcctctgagattcctttatttttctggcagcttaggtatacattattaatatgtcattaatattttatgccacatctttaggtgtgaggtctctaaaaatctagtatgccatatttttttgtaaagctctttgaattagttagctacttccgtgtaacaaattatcccaatacttagtatgttcaagcaataggttttatctcctaggttctgtgggtcaggaatccatacgcagtttctctttcaygaggctgcagtcacggtgttggcaggcatgtcaytcatttcaaggctcaatttggggaggatctgattctaagctcacttgtgtggccgttggcgagacttatacccttgctggctggtggttggagacattagttacttgttaagtggttctttccacaggaatacctacaacatagccacttgtttcttccagagtgagggctctgagagagggggagagaaagtaggaacacatggatgtcatggcctccttgtaactcaatctcagaagagacattccatgacctttgccatcttc

SEQ ID NO: 20530 - DNA, 600 bp, Bovine  MMBT07656; identical to SEQ ID NO: 4782

SEQ ID NO: 20531 - DNA, 600 bp, Bovine  MMBT15117
gggtgggagggaagtttcccaaagaaagggggtgtcaggccccaaacccaccggaactcaagtctcctggccagcctgccaaaagtgtgtgtgatcagtattctgagacctaggaccaggagtggagaaggggatcataggactgctgcaaggatggcactgatttccagctcaggaagatgtcagattctgtgcttcgggctcttaactgtgatgcttcctgtttggtatcaggtgcctcagtccggaaccctgaagctgtcccacctgcgggaaggagcatacacctttcagttgacygtgatggacaccgccgggcagaggagctccgacaacgtctcagtgaccgtgcttcccgtggccttctccacagtaggtgagaagaaagcccttccctcgcattcacagtggccaacagaggccaggctgtggatggaagggtggtgttaaactggcattttaggggcttccctggcatccagtggttgaggcttcgtcttccagggcagggattgcaggttccatccctggccagggagctatgatgcccacatgccttgagggcaaaacaccaaaacacagaacagaagcaagggcttc

SEQ ID NO: 20532 - DNA, 600 bp, Bovine  MMBT12353
tctactaagtaccagattatgtgccacgtactctgggtgactcagaattaaataagatgcacttaaaagtgggtaaggggggcaagacaggtccaggacaattcaatataatattgtctttgtactagagctatgaatggagcaaggacatctctcttcattaaagagagcttcagagagaagtggattttactaatggtaaaggaggtgaagttcactccaggaggaggcctgttgaccctggtacatcttrgaaggcttagcatgtaggcaggatatgaagaagatgagcctggaagrtaagatcagggcaggtgaccagaggccttacctgcttgttacagggtctagactcttctgtgagcaatggaggaagaacaatgctaattgaagagtgttaggtgcatggaaagaatgctaatggtgttgatttctgaagactttcagtcttccagagaagtgaatggcaagatttctactgagtctgagtttagcaatgtggttgtgacacktgggacagtaagtgttgaatagttgctgtaggcaaagagaaaggaagctaatcaataatgagcaagaacactggcaaactgtatccag

SEQ ID NO: 20533 - DNA, 580 bp, Bovine  MMBT05433
cctcaccggagatccaccctccctactcccgcggagagctccgcaggattaagtcttgtgaatcccgacccccaaccctcccccaggccccaggggcagatgagcccttggccaccgcccctccaatttcctgcagacccggcaaacaaaaggctcgggaagagaggcgaggctgaacagggcgcccttcctgcaggaacagctgatggagcaaaatgacccaggagggagagcaggggagggatgaaattccagggttccaggaggaccgcagcaggaggccagactcttggatctcgrggaaggagggagggagtcccggaaagtggatatrcaaggcccaggcaggacactgcagtttgctgggctctctcagatcccagcagccctggtgggggtgatgtcagccgtagggaatggagagggtggggggaacactggatttcaggtgagctctgaggcccctaggctggagtggtgggggcttgggagaggcctgaagccctgcgtcatctcctttggggcccagcctaccgccccctggcccgacctgctaccctcggtgagggccccaccctgg

SEQ ID NO: 20534 - DNA, 361 bp, Bovine  MMBT19298
cattcagaaagtaacaaagggaatgaggttcctctgggaagcaattttgcctagaagccccaaatttaaactgtgaccactgctctgagctaatctgagaggaaaatatggttttctgaacatctaaatttggagatttccgaataggtgactgatgagtgaagatggagatgggcaggaactagagagaacctgaggaccttgtactagcagcctgggcccagcacgcccacagctctcttcctgagggatactgctgacctgtgggcccttgtggaatttttgaggaggcgaagcaargtgacagatgtaacttctccctagcttggctctcgccctgggatacctgcaggtagagaat

SEQ ID NO: 20535 - DNA, 600 bp, Bovine  MMBT16263
gtgtrtttgtataatagttctaatagctaacatttgttgggcaatgtagcaagggctctgcttgagtaaaaacttactctttaaatcaaatggatgaagtagacgccartgttaaccttggcttttttaacaacgaaactgacacacattaggttgtgacttactaggtcacacagtcaataaatggtagcactgtctctgaggcacacatcattattatcctaatagtctctgtaagtgtctgggttccaaatgacttttacagcacagaacagtattcacaagtatcagattctcatmcatattacttttgttctttaaacatgaagatatattagtaaaataaatgtgagaatggaggaatttgaaagtcagcaagctccattcttccaaatcctaacattggagaatctgtacaaagaacactgcagttggaaatagtcttaactttgagtgtcccacttcaacccagtattaatttatatccaaactcagtttgtaagcaaggatttattttctagaaggtgaacagcacatgtacatggacctaataataaagcctgaaatctttcagtgatttcaaagacaccatgagatttc

SEQ ID NO: 20536 - DNA, 600 bp, Bovine  MMBT10281; identical to SEQ ID NO: 4726

SEQ ID NO: 20537 - DNA, 600 bp, Bovine  MMBT07679
ttaaaatcaaatctgcctgccgtacaagaacgccacagcaacctccctctctgatacatgcagcaaatcacattacgatcacttcagaaagggcctgccaggcttcccagaatgctgtacaaaatcttcctgtgttagacaaaaacatttcaattggaacaaatgcaggacctcaagatccaaatgagttcacatcacaaaaagcagccttcctcttattggaaacaagttacagattttcagctgtcccagtgtaaaatgcccagatccagccctttctcttctttcaagggcagcttyattcaggccaggttattgtatgttgtggatcatatttcttcccatgacaggcacataagatatgccctgtatttttagtgtattgacacatatatttctcaaaatgcccaataaaataaatattatcccaatgttacagaagaagaaactaaggctctgatactactctcctgcccctacaaactcccagaggtagtaagaggcggaaccaagtcttgaatgcaggctctgcaccctagaatcaatattcttggtttccctagtggctcagtcaagactctgcctgcaaagcaggagacc

SEQ ID NO: 20538 - DNA, 598 bp, Bovine  MMBT19544
  misc_feature (1)..(62): n is a, c, g, or t
nnnnnnnnnnnnnnnnnnnnnnnnnnnnnnnnnnnnnnnnnnnnnnnnnnnnnnnnnnnnnncgtcttgactgttgtttaaagagaacaagcaatccatcattgaaccagggagtcactttctcatagaaaagtaaaatcagcatgtgacactactcagccctagtgttttgcagattaaaatgatacatggcgactcacgtgttcctaggaagattaagtcagttatcttgttccgctgcccagacaaaagaattcccctcaagcagtgagtggaagctttacagaaacgaaaaagttsggctcaattgtacagtggtaaaacaaaatttagcaagaagatagaaacaagaatgttacttcacatgtaggcaacctccctgcaaaagatggtacaaagaagaatccatcctgaacaggggagctattaaatctttgtacaagcctctgctgtttgaggtgccaattttattaccagaaatagatacacaatttattgtctgactgccttagcaattgatttaaatacagagaaataaatgagcagccgctggccctggggcagttagcttcctaagagtaggttacaatcctgtagc

SEQ ID NO: 20539 - DNA, 600 bp, Bovine  MMBT08437; identical to SEQ ID NO: 4824

SEQ ID NO: 20540 - DNA, 600 bp, Bovine  MMBT00903
gcaagacgtgtcctaatcrggaggaagccctgggaccctgtggtgctttccaaacacacatccccaggcagtggggttccctagcctgcagggtccagaacgtggcacaggggatctgacgcccatccctaatgtagagcagggatgaagagatcatcatctgaaaactaccgaccacagtacaaaagcagcatggtccagcggctaagactccacgctcccagtacagtgggcccagggttctrtccctggtgagggaactggatcccatgtgccacaactaaaggatcctgcatgctrcaactaagacccagcacagtcaaatacatacaaaaatattttgaaaagaacaatacaaaacrgaatgaattaactgaaaaagtcatggacagtgcacatctgcactcacagggaaacagaatattctattaagttgaacatgtgctccccagtgactttgaagaagtgggagtttgtattcatggaaaggaggttggaactgagtgctgaggaagggaatttggtcactgactttaattatcctaaaagctttaagatgtctgaccagattatatttgtaagagacttaagaggagtcac

SEQ ID NO: 20541 - DNA, 598 bp, Bovine  MMBT02582
  misc_feature (1)..(89): n is a, c, g, or t
nnnnnnnnnnnnnnnnnnnnnnnnnnnnnnnnnnnnnnnnnnnnnnnnnnnnnnnnnnnnnnnnnnnnnnnnnnnnnnnnnnnnnnnnnctggaaactgaagtgtggggcaagtaatattatggtaatattgtgtataggagagataataacaactgtgtatgcctgctactgctcatcagaaataattattacatgaacacagtccaccccagatggtgggaaatccagccactactactcctgatacagaccatagttgggagacaaatacatggcaatgcagggcgggcatggaaarcactggtataggacaggaattctcctgaacaactaatccaaaagtgaggtgccctgaaatggaaccagtcagccctcagggtggctaggtcaaccacaactttaaaaacccagtacatcagggaaatgtatagaaaacaggtgacccaatcccaatttcccatggacatccacttacctttgggatatctgaatggtaaacagatgggtcccacacaattaggattccttcattgtacaaactgtctttgaggaagcctgcttctgtggtgaccaactgcaggaagaaacagacaggc

SEQ ID NO: 20542 - DNA, 600 bp, Bovine  MMBT23240
aagaacatagtaattaattaaaaaagaaaatatgttgacaacaatttaaaaaaagatggaggaaggggctacaaactgagaaatgaagctctaggatgaaaacaaggaaatagattgtcccataaggcctccagaaggagccaggccctgctgacactttgattttggcccatgaagctggttttggatttctgactgtcataactgtmggaaaatattttttwwaaaaaaactagtttatggtaatttattaaagcagcataggaaattaatacaaagggaagagatgattacttgatsctttaatgtcacattgaaagcattttccaacacacctatttaggtgtcatctgactctttaggtctagagaagtataatttagcacaactaatgaggatttagtcattttacaattctgtaaaactgatgcaatgatattttctgtccacctaaagaagacatcacgattttggttcttattgccctcttgggcattaatcaactttgattctaacttagcaatgttattttagcaatcctttgtttttttaactgactgtatataaataccagttctcacatcctcttttgagttaact

SEQ ID NO: 20543 - DNA, 600 bp, Bovine  MMBT11779
ggactgttttccaaaaaaccttgcctggctctgaactgtctgtccyacaagcccacttccattcagttccaaacccttgaggcagcaaacccaagctcagttgactcctgacttgactttgtatatgttcttccagttatttgacttggacttccctctacaattgttagcttggtccacctgtgtgctctctgtgtcatctagagacttttgcctgactcaccccagtacctgcccccctacaagaagtcacagttccaccaccaccattgtgggactyctggagaggataagccagtyagggaaataattttayggagaggagctttttgattttctttaattcaccatgtaggtcaggagattatttctcagaaggaaatataaaataggggatgtaaacctggagtcttggtctagtcaagaaggaggtacaaacattttaaagagaaaaagtgatttaatctctctcctatcattccgccagatggaatgaagtcctctgggaatgtcgtgagggaaacatttatcaggaggatagtaaaggacttaggattattttgttatccaccttctgtaagcaagcacttctttttgctt

SEQ ID NO: 20544 - DNA, 600 bp, Bovine  MMBT18849
aaccttgcctggctctgaactgtctgtccyacaagcccacttccattcagttccaaacccttgaggcagcaaacccaagctcagttgactcctgacttgactttgtatatgttcttccagttatttgacttggacttccctctacaattgttagcttggtccacctgtgtgctctctgtgtcatctagagacttttgcctgactcaccccagtacctgcccccctacaagaagtcacagttccaccaccaccattgtgggactyctggagaggataagccagtyagggaaataattttayggagaggagctttttgattttctttaattcaccatgtaggtcaggagattatttctcagaaggaaatataaaataggggatgtaaacctggagtcttggtctagtcaagaaggaggtacaaacattttaaagagaaaaagtgatttaatctctctcctatcattccgccagatggaatgaagtcctctgggaatgtcgtgagggaaacatttatcaggaggatagtaaaggacttaggattattttgttatccaccttctgtaagcaagcacttctttttgcttttgtattttttttttt

SEQ ID NO: 20545 - DNA, 600 bp, Bovine  MMBT17665
aaagcagtgagtctcagaattaaggatttcatagatctagaatttctctctgagtggaccaactttgtgtcctatcaaaataacagaggcaaccattaattattaccagcgtcatttttgatttcttaaaagacattttgacatcagctcaagatcaagcatcagccttcaaactgtacatactttgaagttttttggggaaaacctgctactctgcccttatttccgtgtcattctgccacagacggtggagactgtcccctactcaaggataggggaccagagacagaacagtgatcrgctgttcctggtattcaatctcccctatcccgccacttgggaatgctggtgactggagaggtgtctatttcctataattactgagtcttaatgtaatcaccgaagcagagagccagctggaaaggatggagtctgacatcccgcaaagagagacagctaaataagtcatacggcttgcagacagcctggctgctggcttatgtaatcacctccgcttggctccctttccgttggtccgtttctccgtttggccttttcgtgcttttgctttctgaggctgagcctctacaataggcaggg

SEQ ID NO: 20546 - DNA, 598 bp, Bovine  MMBT05022
  misc_feature (1)..(50): n is a, c, g, or t
nnnnnnnnnnnnnnnnnnnnnnnnnnnnnnnnnnnnnnnnnnnnnnnnnntccccaccctcttatcttccttaactaagccaatgcactatttgagttcaatcttcaatcagaagaatatcgaaacacccaagaggtgctctctttgcttacacactgaacatgaacatgtattctgctactcccacacaaggggatatagagggactctgttacttaatctatgaaggcatcctgacataaatgtcctctcttttcagattcaaagtacaaatgaagatctactgaaaacttccagaayttagagatctatttctaatccgaggggaagatagaatctgctttggctcatcacatttttctatatcctttgagtgctaaccacaggaaatatttttaaactaacaagtcaagatgtaactctttctttcattccagaatctgactctcctctgaggcaacatgtgacactgactatgaaagaaataggaagcaaaaagaaaaaatgtgatttcagccacgaatagaagactgaaaaaactatccttaaattagtagagctttgtatatagatgttggttccctagggttaggctctt

SEQ ID NO: 20547 - DNA, 600 bp, Bovine  MMBT14238
catcttgcaatgcagaggacaccagtccgatccctggtcggggaagattccacatgcctcagggaaactaagcctgtacagcacaaccactgaagcccgtgggccctagaacccatgctccacagcaaggagaagtcactgcagtgagaagcccgcacaccgcaactagaaagtagccctcgctcactgcaaccagagaaagcccacacacagcaacaaagacccagtgcagctaaaaataaacactttaaaaaaagaaagaccagggagaggggactgttgctgtaattgaaagctgayctgagattttaaactcttctggcccaagtgagtttggtatattagctcaaatattggtcagatccccattcctgtctgttctttggaacttctgtaggctaaataaaccctctgaacatcctttccctcagagataacgtgggaatattagcccctgtctaccatgatggtttgaggagattaaattttataacgtagggctctcacttacgtcatagaggtgagcgccatctgaaattatgatattttgatattgctgatattctgtactccttatttcgccatcacccaaggagggat

SEQ ID NO: 20548 - DNA, 600 bp, Bovine  MMBT15045
ggggcgcgtgaccccgggcggaaaccgtattggatggggtgaagaagggggctggcattactcagcagaaaccttttgattggtcaagggatctaggttacgtcatgggggcgggacctactttaaagagccggcgaggttaaaaaggctgcatgtaatcatggatgaaataaaagtccgagaatttttgagaaaacaaaatagcaattttttaataaaatctttttactacaaaagcgtgatctggaaggcggggaggctgtacaggcgggagacagtccaggatcagggctgcatctytcacttcttcctcttcttgtctcccggggtccccttgttcttcttgccaagaatcttcagaaggctcttggacatgtagtagggccggtctgctgagccatcattccgctccaagtcttccactaaggcgcgacagagaccgtaagagcgaacctttgggaaccaaccccactacccgggaaaatgagggactaagagacagctgcctggtttccagactgcaccaccaccggctggtttggggcgcagtttttgtaacctatgtaatcgtgtcctcatctgcaaagtagggtgaacgat

SEQ ID NO: 20549 - DNA, 600 bp, Bovine  MMBT17465
cttcagcatccacttggagtaacttgggaccagaaaaggaatttactgtatgtggcagactcttacaatcacaaggtgagtcttgacagaattatataataccctgcttttcacttgtggtatttaaaatgctgaaagatctgtgagcctcctacaactgccactctaaactgtagggaggagtaacagtctttgacaactgtacataagcctctctattccttttttggtcctttctttgcagaaatgatgtgttagtactctgagctggggaaaggactaaacaaattcccaatgacratagccagaaattgggaattgcaagccactaaagctgttgagtaacatcttcagtaaataaggagaaggcaggtaacagggaaattaatatgtcagttaacaaatgaacatttttgagcctttgcatagttagcaaataattcgttttcatcaacatttctgttttctttgtctattttatttttactatgcatttttaaaataaaatcattggaacataaatattagtattttgtgatgagaagcttatgaatttaacgtaattgaaacacaggaatcacagcgtctaacataagtagc

SEQ ID NO: 20550 - DNA, 600 bp, Bovine  MMBT12226
acttcagagattctgtgtggacatcaacacgtgtcacttccagtaaactatctctgtaaaaaataaaacaccaatacttaataatgcttaaaaataaaaacagtggttttgtgagaaatcttaatctcccctcctcattcaagaagcccaccctacctgctttaacaaataggaggtccacttttgttttaatgctagttatcagaagctcactcttttgtgagtactatactccaaagacaagtagctctattattggtcggcttctggattatacttaactgaaatatcttacaatckctaatcgctaatctccccttccctagaagtctatcttcatcaaagagatggcccttcaaaaatttaataaggatctgtcacgtcctcttcttcagccttaacttccacagactaaccacccagattagcaatccaattcccaaaatcgactttaaaatataattcatattataaggtagacaccccaaaaacaaaggaatagacataaatatgcatttattttcacattactgttagataaatcataacacttaaataaatccactgagcagctatttactacaagactcaaaaacacaa

SEQ ID NO: 20551 - DNA, 600 bp, Bovine  MMBT14135
cttcttttttaaaaaatgcatttgtttttaactgaaggatagttgctctacagtattgtgttggtttctgccatacatcaacgtgaatcagccataggcttacatatgtcccctccctctttcctgaggatactctagttattatctcaagatgtgcgcgatcctgcttaaccactcttcctttacatatacaggaattagtcactatgacttagagcagggatttcaaccctctttagcctctagccagmgatatacggtgcaagactgtgtaagacaartattcctgctcctcttcckttgcactgtcaaacccagtgcaagcctgaactgrctctcacctgttgcctttctgcagcctaaaatttcattcaatttgaaggattcctctggctttattcttttcacttctttctactgtctttaatgctcatctctgtcttttctcttgtaaaattgtgttaacaagtcagcaggggtaagcttgctttagggaacttaaaaaggctctcccttctgccctccgctacattgcccccgtccatcactttgcattccgggcgcggcctcctccacagcctgagctcttcgtgtcgggcg

SEQ ID NO: 20552 - DNA, 600 bp, Bovine  MMBT05106
cttcctccctttgtgctaacaggttttgcacataagctcttaccaaaaaataaaattctctttgaatgataaattagcaggcacattcctattcacacgtggtggaaattctatcctagcaacagtcaccaaattaattgtcatccacaaggattgggtctgttttcttctagaaggagatttaaaaccattagccagacttttccagattcttttatgttaaggagttcattaggagataaaagcagggaaacaaatcccactgaaatgatctgtttgaacttctgactttttcmaagmgtattttgataacattctgtatgaaaaacatttgaagtgtggagcatgtggtctcttcaggtagctgtggtctcggcgttcagacacaacagcctgtatccgtcagcgcagctgtactttgaacaacctcatccggaagggagaacaaaatgtgaagggataagaaaagagagctgggtgagataatgtagctctacttaaaaactaatttaggcagataaatctcagcccaaataacctgatctttaacaaaagggggagggaaggaggaagcttcaamgttgataaggaaaagaggtg

SEQ ID NO: 20553 - DNA, 598 bp, Bovine  MMBT17026
tctttctatacaagtattgatctttggcagggttgagattgctctttacattaagaatgaacttgttcaccaaaatataattagcacaagaagacggaatattattaggggcctcattaatttcaccaagtttatttaaattgcagcaggatgtcaaatcaataatgatggctaattaagaaaaacccatctgatttccttaaagtacatggagggggtgccacaaaggctgcagtggggaggaaggtgagaagtttctgataaacagagatggtacctcctctcttaaatggaggggayygaaggtgagctaggtaggtgtccttgctgaattagggaaagggttgcctgcagtaggtgtgaaatttgaagtgattaactccagaggcactagaggcytgagaccccatgtcatcatgagacgtccctcttcccctctcagatttcattagaagactgtgaattagggtgaaaaataaggaatcagaaccagctggttttgaatcctggtccttccacttatccctkgggcaggaagatcccctggagtaggaaatggcaacccactccagtatccttgcctggaaaatcccatggt

SEQ ID NO: 20554 - DNA, 600 bp, Bovine  MMBT10583
ctcatagacacaggtccaaactgacatttatcattttttcttacttctaatcattctcaattttctcttgtggtggaaggctcaccatctgtccagtcttacaagctagaagcatgaggctcatcttagattccttcctctcttacctcccacctccaatcaggctccaagctgtgttgatatgactgggaaatagcccccagagctttccatttccagaatttccatcttgctgcagccgtcagtgtttatcaccactggtttgcccacagctctttcaccagcttccttctctccttmctccggtttatcattaatgctgctgccaaagttttccaccaaaagattatgaatctgatggtgctagagatccataatcctttatctaaaacttggagtgttgcaaaagttcagaatctttcrgatgaaagaaaatcaagatkcaggacactgtgtaggccttgtagtgtactctgagccatcactctatcctgaaatgcaaaagagcacttacatgaagagggacaaataaagattacaaatagcgttcatgtaagtttagtgttcactgacaaatgagtttgtgccaaactcatgaaa

SEQ ID NO: 20555 - DNA, 600 bp, Bovine  MMBT17377
ctgctctctggcaggtggattcagagctaagctccaagtctccagctctaattggagaaatctctgataaattcccacagcattccatttggatacgtattgtgttctgttatggatgttctctgccctgctcccacccataacaagtctgctggtataagcctgtcctacaaactgctgtggtggacagtatatctttgtattgatttgatggagctgggtttttctttcctagtctcagtggagatatctgtcagttcagtatcctattttgtaggaataatggacaaggcaaagtgrtgataaattctgatggtaagccaagctgtattttcttgctacatgagaagaaaacactcatcctaaaggcagtttgttctccattttaaattactcaaagaaagcatttttacccagatgctaccccctgggtctcctttgtcacctcaagcagcctaactcatccttcccccccgcgccccctgacacacacaaacccttcgttaattttttatgacttgtgaaagatctccactaacgtgaaactgtcctacagacactgtgttggccaaaaagtttgtcggtttttccataagatgt

SEQ ID NO: 20556 - DNA, 600 bp, Bovine  MMBT10322
ctcccagagttcactcagactcatgtgcatcgagtcagtgatgccatccagccatctcatcctctgtcgtccccttctcctcctgcccccaacccctcccagcatcagtcttttccaatgagtcaactctttgcatgaggtggccaaagtactggagtttcagctttagcatcattccttaaccaacatttattgccaacttcctacatgccagatcttattcaaagtgcttgtcacataataactaatttacttacaaaattcttatgatgctgaatagagctcctgtgagggtccccratttacagaygaggaackcaacctatggagccaaatggtggcactggaactcaagcctgtgtctccagagtcatcctkcttccactctgcaaagccrcctctcataggatgaaagcttctaagtctcttagcatcctggaaggcacttggtaaatcctccaaagacgagacatattattatcattattggatcccctcacagcttcttgaagaatgctttgtgcaaggtagtttaataaatttatgttgatttgatttagaaagaactctgttgtatcctcttgagcttctaagggatat

SEQ ID NO: 20557 - DNA, 600 bp, Bovine  MMBT13153
gattaggtctcttgtttggttgtgctgcaagcattatccaccctgaggggaaccaggctaaatacaaatcttcagattgatttaaccacaaatgtgtatttataaattgcaactgacttttctaattaattttgcatcgtgctaatggtttttctttgtaaccactgattatatcaggagggatccaagcyrgatctggagccatttgcagtcactgttagtgtagagagaaatgagaggaagcaataaagaaagcagcttcyagggacctaactcctggaaggtagttactgatttcamcaaatgtctagagaagcaatgcaatccasagcatcagttaggaagatccaccctattacccrttttacagctgggtttccttgcaactgaatttttttttttttttgctgaagaaaatgtttaaatgattattgcaaagtctgtgtcaaggttagacatcaaagaatatgaaatggcttccaattatgggaaggaaaagtcatgaggacagattttcaagaaatataaggtgtcaaagacagggctaaggaggaggagacctggatattcagggtacttttgcttcttaataagattcat

SEQ ID NO: 20558 - DNA, 598 bp, Bovine  MMBT07940
  misc_feature (1)..(69): n is a, c, g, or t
nnnnnnnnnnnnnnnnnnnnnnnnnnnnnnnnnnnnnnnnnnnnnnnnnnnnnnnnnnnnnnnnnnnnncgacgggggctgacgaaggacagcggctcagatcctgaccacctgggcggcagcacacggactctgccgcccctcaccgcctgtggtctgcctcctgaggtagagtcggccgaaggtgccccccacctggcctttggtgaggcgccccgggttcacacagacgcagccgaggatgtcctggaggggaggaaagagtgactgtgggtctggaaaggctgaaaccatgggcayggatgtgaagaagctggactcatctaggggttcagccccagaggatgttatagaaactggaaacaaaggcagacgaaaaccatctttgggccaatgtgttaatttattacagaaaactctgagtccctcttgtgtctccaaaacaaaataaagaaggtgactcagccaattcccaaacgtggagacaaacttgctctattggtttcacagcgtgaaaggtttacctcctgaggttggactggctctgctttggcaagaggaggttgatggggtacattcccccacgagagccygaacc

SEQ ID NO: 20559 - DNA, 601 bp, Bovine  MMBT09366
  misc_feature (1)..(1): n is a, c, g, or t
ntcccctctttcttgttctgggtggtgagttatacttagaaaaatggaggggatgttctggctcattctttttatgcttcatctctacacaaacttttcttttttggccacttgttatttttataatttttaaaaatgtaaaaaaggatagatgccacagatgctgcatattataaagggagytggacatggtgggaatgggttagtttgaagacaaactggcctagatctgaatacctcttcagccacgtgctaatctgagtttttagttaacatatttaatctccctgggcctccctckcctcttcttgaaaacagattcaagacttagatggcaaggtgagtaatatagtgtctcygagtatctcttgatttggaagaagcacatgcattgttcagcttgccctgaacacaggtctagatgacgatgtttaccatattgaagaaccttctagcaaatgcctrgggcccactggaatgatcaaattcactaaaatgtatgtttgacatgacagtgtggaaagtatttgtttcaataataggaaactaaaataaaacagaaatggatgaaaagctgtttgtaacggatagaaccttccgt

SEQ ID NO: 20560 - DNA, 600 bp, Bovine  MMBT08211
ctagtattaactagtatactattcgtgtgactagtataactattctctacacttatgtgtgttcaatgttttccataataaaagttacagtagaaaaaaatcatcagtcattcttattataaaaaagrttaagatattaagagatttagtatttaggaaggtgagaaggaatagtattctctgggaagagtgtgggacagggtgatgaatagattacagaattgtagggttcttttgttaagatttgtaagcgaagaagcatgtttttcaaacatttgccttgtcaaggaagtcagtttytcttgctcccytttcaggtatggtctcatgaagtcctgctggcrttggagtgaggacagccgcccctcacttagaaagctacastcrtgtctcgaaactgctgctcaaagtgcaaatgacaaggctgtgttgcaagtaccggagttggtggtacctgaactgtacgcagctgtggcaggtgtcagcgtggagagtgtctcctactgctacagcatcttctgaaggtcctgggacaacacccactttggggagatcgtatactcttgaaagcagtttctccaagaacaaagacttttctag

SEQ ID NO: 20561 - DNA, 600 bp, Bovine  MMBT18802
cggggcatacactgaggcaagagcagcagctggtgggygaagggaaggggagtggggaggacgctgtcctgccagggcacagcccagtctcaccccacagtgggtctggcagccaatcagggttctgctgtacatggctcgggttaggacatcccagaggctgtcaggggcttctgacagcttgatggtcattgtcacccctccagtgaagtccacaagggcttcagacacctgtccacgctgcaagtcttcataggagccagagagcctgcccaggaaaggaacagatgtgagagaagraagagtgtttctactgtacacaggacagtccaaacaagtctaaagaaccccctgcttggttattcccagggcatgtgtctgctatcccttcctcccatcccaggggcaaaaaagaaatatatactcagtttctattcctactgcacaagtccatccatcagggaaaggtaagactccagaaaggttgttccagtggggtgacccttacataagagaccctggatgtgtcacttctgtatttgctgagctaggcctcagtatctcacttgataaacttcccctgcctcctcttgccctccc

SEQ ID NO: 20562 - DNA, 600 bp, Bovine  MMBT19238
tgtgatgatgatgaggatgataatgatagaatgagttgataatgggcaggaaaaaaatgttgtggaacacagaatatcattacctaatgttgtttctggagccttggttgtatgagtgacaggttcaaygayggtaggaagaactagccaaaaacaataaaataaaccaaagagatttttaaaatgtatttgaagactaatttcagaagctaatttttaagcttcargacagagagaaaagagacacatacttgttctttgcagatctgaccaaattatggccaatatccattaacctcrtaagacaggttatgcactttgttcaatatcactgtggtcaacaagaagctctagatgtttggttatctgacccttgctagcatggaagactttgctagatgagctttctacacgtttatgaatataaacatgttagacttttctaactactggaaaaagcatttatcagtctatttgcacttctatacaagttgacatataaatgtctactaatttgttcactctttcaataatcgtgggtataataatgaattcacacattcaaaaggataaggatcaatgtaaaaaatgggacatgct

SEQ ID NO: 20563 - DNA, 600 bp, Bovine  MMBT20970
tgactacagttcatggggtcacaaagaggtggacatgactgagcgactaagcacagcacagcacacagcacacatgtattcttttaacagctgttaagttacagtataacacatagatagtaaaactaaacaagaaagcacacagccagaatcgcttcctatcattttttatattcccaaggagtagcctccaattatttttttaatataaaaaatattcttttaatttaagtttaattccatatagtcctatagaacaatattcctatgaaagtatataaacactaatttgcattcagygtaatattttgtttatgcacaaaagtcaactaatcctttcagtgagatgttttggtactatgagagtcttcattgaaacaaacttttaggagaagaattcatattaggaatcagaatcttctgataccatgacaactttgtgttgtaacagtgaataatttaaacccatgtaataaatgaacacacacaaataatacacatccattaactgatggatggcgcagaaaatagcaatgtttttgaaaccttgaaagaattttcaaattaaattttcaaatcaaattttcaaagcttttctca

SEQ ID NO: 20564 - DNA, 600 bp, Bovine  MMBT03813
gttaacacagtggctcttcaggatggagcatctttgtctctggcctcagtggggtagccaaagtacttagcaggcactcagtgcaacttcgttgaatgaatgtcgattccagtagttaaagcaaaggtctgaaattgtggtcctcaacccccacctccaccgccacacacacaccttctaggataaatccatcagttctagagtttaaaatagccccaagtgattttgatagaaactcaccccctcaatttgaaaactattgactgaaatataaaaacgcagcttttggagttgaagaaraggacatacagggtaaggagaaatgtattctgttgataaattgttactagaggacaaggaaaaaaagttgtctttctcgttcttttgcacaattaacctttagtaaaagtaaataattatttcaggaggtacactstgaccaagtgtgactcttgatgatagcatastgktttgttttctcttttattgttagacaaaaataatgccactttcaaagaactgataaatctgagtaaaactctttacagaagggaacaactgagtccctgtagcctattaagtaaagctccacccttggcc

SEQ ID NO: 20565 - DNA, 600 bp, Bovine  MMBT05003
caaacagttagttaaacctatctcctgctatgcagatctaatccagtggattgctcctgaatgtgtaactgtgtttaatgctaactttgggaagattctaggagaatatggccactcatatccctctgatcaaagtatttcttttgaagtctttttagagtggtaatatatttcatgttagaactgttaaggatgagggacccaatggcacctttgtctggaaagaaagaggatacctaataattaagtgaaatggcaattatacctaccatctcacactaatattctacagccttctgmaagtcataaatcaactaagaaattactccgtgtcctgtgatgtcttcattttgaatatgattagaaagtattaaaaatatgtgtgtttattttcttggagtattgggtaatctacattataatatataaaataattttcaataaagctggtcacaatattccttacctcttctgataagtagaattttacatcatagtggtttgaattttgttttgttttttcttgttgtcttttttattctttacggtatgacaagcttgtttttcaacttagaaaaaatagttggacagttatagatt

SEQ ID NO: 20566 - DNA, 598 bp, Bovine  MMBT01756
  misc_feature (1)..(224): n is a, c, g, or t
nnnnnnnnnnnnnnnnnnnnnnnnnnnnnnnnnnnnnnnnnnnnnnnnnnnnnnnnnnnnnnnnnnnnnnnnnnnnnnnnnnnnnnnnnnnnnnnnnnnnnnnnnnnnnnnnnnnnnnnnnnnnnnnnnnnnnnnnnnnnnnnnnnnnnnnnnnnnnnnnnnnnnnnnnnnnnnnnnnnnnnnnnnnnnnnnnnnnnnnnnnnnnnnnnnnnnnnnnnnnnnnncctagtattcatggtgataaaaactactctctgaatgtagagagatgtgaaatttgtataattctagacatgtttrtcttaactgcagaagtcccagaagaatagattttctcacgtctccatggggtgtttcttaaatctattactttatgaaattaaatattggcatatgaaaacctcagcagctcacttattacctaaattaaaatgtgttataatttgaattttgttcattttaaattgagtgaagattaacagcataaaggaggtttggtaatggaaggtaagaatgtaaaaagataaggaattggcaggatatgcgattttgtaaatggttcagtgatttactctttttgtcccttttgtataacagt

SEQ ID NO: 20567 - DNA, 600 bp, Bovine  MMBT11296
caggggggtagggaatgtgttgacattttggccctccccattttgcaaaatgtgcagagttccacatggaactcgccatgtcggtgtagctgcatgtcaaccttggtgcttttctgcagagcatgtctaatttttgcatggctgtggacagtaatcagtaatgaagtcattaaatgcaagaggggtggagagagaactgtctgccaaccttctccattaaattcaggtactttggcacatctctaattaagatcaggaggcttgagttccaattgacaaagcactccatccccatgatamgcagtcaagagtgctcgagggcagagytaatacagtgagcsgggtaatggcttggataattccaataaagatttccagttatacgagattctagaggttaccggagctctccagagaaggcgctcactctaggtgtgtggctagggtctcctagaactacagagacatgatagtcacgagggcacagctgagtgattcacctggagtccaagggtgccaccttagatccctgggactcagcacccctcttatgaaaggggtggcatctccctcggagctctgagatcttcagcattaagt

SEQ ID NO: 20568 - DNA, 598 bp, Bovine  MMBT18117
  misc_feature (1)..(81): n is a, c, g, or t
nnnnnnnnnnnnnnnnnnnnnnnnnnnnnnnnnnnnnnnnnnnnnnnnnnnnnnnnnnnnnnnnnnnnnnnnnnnnnnnnnctgctaaaaaggttaacatctccgagtcgccggttaagttcgcgctgcagcctgatgatatacttaacagcagcaaagcgcccagcaaatttcctgcaacattagctgcatttaaaagtataatcttatgcagctttttcttgctcaacaacgtttcagaataatgggggaacgcrtctatttacaagggagaaaataacacacagtatttaacactcygtgcgatgcttacaattcctttaggtgcaaacccgtaaaaacagacaaggggcttgaaatactctccacaagcagaaaagcgytggaacctgggggaccataaccaagtcgcaggttatcaaaggctgaggyttgtctaataagtgggtgcagggcgcacgcgtgkttttagacgtaattactatatgcagaagggaaaggcttagcccttctaactagcacgtaatgagcccctcatcaatagggtcctttataaggcttctctctgtgcagcagggcagaactgactgctgggctg

SEQ ID NO: 20569 - DNA, 600 bp, Bovine  MMBT03946
aaactgctgagaatgtggcacccttgtaaagaatgagcattcaaagcattcaaaatttaattccagatatacaagcaataattctcaaactgtccaggttctgctaatacagaatgacacatttgagaagaaaacattcatttccttcctggtgcatttccaagctgtctgagaagctgaaattttctattacataaaaaaaggccacaaatattcttcagtgattgtccttgatacacagtccctcaggctcaaaaagaaaacagctctcattatgctgtcactacaaagtgcacataytgtgtgtataaagagcaaaagcaaataaataaataaagtccacaacagaaacatgagcgaaaattgctgcaacaacttcattactagggattttaagatgctaaagaggtaacgagtaggaaggtacaaggagaaaaaatggatgttaagatctgcacaactagtgtggattttcccaagggcaaacttcacttttattaaccatctaaggcagaaataaatataacgtatggtggtatctgcagactgctatgacatctttactgtttctggtaaaataatttagcaactgcacccaaa

SEQ ID NO: 20570 - DNA, 600 bp, Bovine  MMBT08599
ctgcgaccccagggctatacagtccttggaattctccaggccagaatactggagtgggtagtccttcccttttccaggggatcttcctaacccagggatcaaacccaggtctcccacattgcaggctggattctttaccagctgagccacaagggaagccttagaaatcatttaggaacccaagaacattgggtttccttgccttcatcttcccacattggtctttttctaaagaaaagaaaaaatatatagctgcagttgtacaagtgaacacttccactggaaagaatacaatgatayagcccattgaggggaagcatcagaaattctaaggacttcacatgctaaacacaattattcattccttgtatggttccctcccaactattttcttcctattcacatmgtcactcattatttttaatatttattttatttatttatttggctgccctgggtcttagctgcagcatttgggatctaattccccaaccaaggactgaacccgygccctctgcattgggagcatggagtcttggccactggaccaccagggaagtcccaccaatcattactgacgatgcaaactttgtaaccata

SEQ ID NO: 20571 - DNA, 600 bp, Bovine  MMBT00998
taagagtgcccactgtggatgctatacagttattcaagtataaaaattcatttacgatataaaaactcattttgcagaatttctttatggaacaagatacaaactacatcataaaaacatcaattttattaattttctttgtacttgttcactattactaatcaaaaactatcatatytgtcttgattgttctcatccagtagagttggttttattgttatttctcttgagtctttccagacctcagattcggtctctgatgatgaaaatgtgttgtgtccctaaatactgggaaaaaakcgacaatgttttgagagtcatcccagaaggcctcctacatgtcacgttctgaactaaaacatctgcagacgaaggcgcctaaggagatcacttttgaaagagcattgcttagcttgatgtgcaattataggagatcatttkcccgcatatataaaggaaaataagttctaataytgagtgagattagacagaacttctagaattatttttgctactcaacgtagcttataccatatcccttaaggggtttgtctcttaacagtatggagagttrgatcccaatcacatggtagtatttca

SEQ ID NO: 20572 - DNA, 602 bp, Bovine  MMBT04736
  misc_feature (1)..(2): n is a, c, g, or t
nngtaagtcctttctctcccttttctgtataataaaactttgctcattgttcaaacctcaatactgcttttgctctgaagggttgtcagatctctcccccctcccaagaattggctgctctctctactgtgggctcatagtgtttcctgcaacttccatgtatgtgacagctgtgagtcatttaaaggaaggacctttcccttatccataatgtaccccagaagccttgcatagtgcttggcatctcgatatgaatacaattagacactgtcaacctgacttcagtgcccgaagagactagkccgatccattttacaacagtatgtgattactcgaaataaaattaaaaagcatctgctatggtgtgttgagggtcaaatcttgccagagtaattgagttttgttctatgataaygtgactgatggtagcaaggaggaatcatagggtgactgtatactgaatgaatgacccactctatcatgattttgataaagctcttaattttttccagagagctttctcaatggtaatctaggaagacattttcccaattatacaattttagtagatgaggaagtaactatcaaagaaaggcttctat

SEQ ID NO: 20573 - DNA, 600 bp, Bovine  MMBT07206
taaggggattttaagtctactgtcttaatagtcctttgtagttctttggcacctggcttttcttgaagctcaaagtattttgcaaacattagctcattaataccgccagcagccttgtgaagtgggtagtgtgaatgtcttatccccacttgggattcttgaatttgaggggaaaaggggttctggctggtgactagtgcctggttgaagagaggccccaggggttggaccaaatttaatactcatgtttgtttctcatcccaccagaagaacrgtggatggtgagagaagcgcaagccmaatctggataccagttgaaactaggcttctccagctgtgtgaatttggaccagtccctcaacttttgtgaaactgagttttcccttgggaaaggggggctgatgataagaattataaatgtaacgttgttgtactgagttgtgtcttacccttttgtgaatctatggactttagcccaccagactcctctgtccatgagatttcccaggcaagaatacatggagtgggttgccatttccttatccaggggatcttcctgacccagggatcaaacccatatctcctgtggctcctaccttg

SEQ ID NO: 20574 - DNA, 600 bp, Bovine  MMBT07966
gaagtccaaaggtagtcttgatttgtagcatttgctgatctttgaggtgctcaagccataatcaagctagcaatgtgacgtcactgaagtctagagaaagggaaaagatgcccagcagcacaccattacatagtacttctaccatacagatgcgtgagatataaataacctcaagagcatagataatagcaaagttgtagtaaaataattaagaagtgaaacattgtgaggattttaaacctgtattttaaagtaattcatttaaatgtaagtttgtgtgatttaacttttagcaatgaytgtttaacatccagttytcaaaattcctgaaattttaagagtcggctctttgggctgatgtgagctgactctagaaccttcgttgcatccccctccttacatctaacttattttgctggattgaattattttcttcttactgaagtatatccacttgtattctttcagcaaagtttgtgtaaggtaaactcatcatcttcgcttgtctgcaaatggctgaaaatttggtgtcacttatgaatttaacttgtgcagaattgtagtttgaggtttattctctttccacattttgaagatatt

SEQ ID NO: 20575 - DNA, 598 bp, Bovine  MMBT02806
  misc_feature (1)..(3): n is a, c, g, or t
nnncccctggtacttaggatcagagaagcccttagttaactactaatatattacacaatatcatagaaagtagaagcttcagaaatgaaaaatgttctggtctgtttattttaagatatagctaaaagcttgattttatgttatgtcagtttctatagttaaaagctgcattaatgtggctgaaatactttgaagtatgcagagataaaacaaatcagcaggtatttaaactgagggctatgaggtggaaaaatcatcactttcccttcaggtagaggcctgaagatatatctttgttartgaggtttcctgctgtcctgctggatcttcaatcatttaaaatgcaaatcccaaagaatgaagtaagagctatcctatataaaagaaggtggctgatttttttttttttttaataaatgatcatgccatctgcttacctcatcattctactgactatgaaattcacttatgcaattatatgaacttgtaaactataaacaacataccttagaagtccgcaaatggaattattacttttcctgaatgcccaatctcctcccatagtttagagtttattcatatggtcaggaaaacagga

SEQ ID NO: 20576 - DNA, 600 bp, Bovine  MMBT02456
ctgaatcctttctcctttggcaaattctgatctttccaaaaagaacccctcccccctccagattcatattcaaatgctcctatgttcaatgatccttataatgcagtttgatgttttagtatctcaaatgttgattgagttcaagtttaaataatactgtcaaagttgccatagatattttgaaaaggatacccaaacaatgtacttcacaaagaaagatgaataaaatgatgcatgattggatacatttcacattgataatcaacttgctaattttagccaatatcaaatgttaagcayacaattttctgtctgctgaggttgtacatagacctgtgattatttctggccactgatgtgtgagtggacgaaatgggtttcacttttggactgctaagctgctgctaagtcacttcagttgtgtccgactctgtgccacccaatagatggcagcccaccaggctctgccgtccccgggattctccaggcaagaacactggaatgggttgccatttccttctccaatgtatgaaagtgaaaagtgaaagtggggtcgctaagaagtcggacacgactgagcgtgtccgaatcttagcaacc

SEQ ID NO: 20577 - DNA, 600 bp, Bovine  MMBT07655
ggcagacatggtgctgtcaccttgcgcttcacatgctgccttttggtgttgatactgacttcttcatcaacttcttgtgaaagggagaacccgctgtcacaagcagtctccaaaggacctggtctggaggaagctgcatgagcacaagaaaaagcagccacagaagatccgagtcgggtcaactcattgctctaaatggggtgtgagtgaagtagtttggtccaaagataaaactcatgggtctgctgttccctccggctcaattatcttccaacttcatccaggcttttctcagctgtyacctcccaagagacaccctctgaattaaatcctccaacattctgcatccattatcctgctttgcttttcttcatagaattttacatgacagttgctcattaatttctcgtctgcctcctccccaagggaaaggcagggatactcacctgttttgttctctgctgagcctagaacagtgcctgacacatacacaggaggtgctmaagaaatatttgctcagtgaatgaaagaaggagaggtcctctcctggcagrcataaccaccagyattccaggcaggactgcagagttgacacccttc

SEQ ID NO: 20578 - DNA, 600 bp, Bovine  MMBT09850
ttgcttcagtcatttccagctctttgcgaccccatggactgtaccccaccaggcttctctgtgcatgggattctccaggcaggaatactggagtgggttggcatgccttcctccaggggatcttagattcctttactaaataaaatagacagattatttggatttttgcttaattgcatttgtaagtggccaaagtattaagccatacataggcaggaacaccaaggccttttctaagtctagtctacaaaaatgaggctgtaaactcctagagaatgggcagttatcttttggattatytgttttaaggttatcccttactgagtttttgccttgtcaaagaaatttgctttatttataaactttctttcttgctgagaaattgcaactccaaaattttaagaacaaaaccaaagtagtaatactcaataatgggtgaaaaaatgtttaaaatatcctactttctgtctaatattgaatagtcattggaatttgtgacgtctactggagacastgtrtaacagctttaaaatatttccttaggtaaaagtgatacaaataatcctggacctgaaattaataagattcgaacaccagaga

SEQ ID NO: 20579 - DNA, 600 bp, Bovine  MMBT11077; identical to SEQ ID NO: 4530

SEQ ID NO: 20580 - DNA, 600 bp, Bovine  MMBT01372
ccctgcacttcagattcctcacctcaaagatgattccttgtactcttctcaggactgttttaaacataagcattaatatctgaggatagctggagaaaatgaaaatgttattctaatgttaaattaatttgcattccaaagtggaggrattctgctcgagccagccctcccttccttttccttctatccatttagcaagtgctgagtgccaaatgcccttgttgggcctgggctacgctgggcttacccgcacttcacagacaatctccgtacctggtttgactccaccacctttcctgyctagtggctcacgtcgtctcacctcttgtaaccacctgctgttcacagccttggggcaaacagtagtctacccatttcatcttcatcatccctgcgtgaaaccctgaggaagaaatcagctcgcacactgcgtttcaggcccactgttacccccatatgatgaaatgtacacagagaccctcaaaattggtgttaaaagcacataaacctcttggattgttgagattctagcccaagcagggtgtgtgtgtaatatcactaaaagcaggtatgatggataaaaatgaatgatggcccctt

SEQ ID NO: 20581 - DNA, 598 bp, Bovine  MMBT05874
  misc_feature (1)..(184): n is a, c, g, or t
nnnnnnnnnnnnnnnnnnnnnnnnnnnnnnnnnnnnnnnnnnnnnnnnnnnnnnnnnnnnnnnnnnnnnnnnnnnnnnnnnnnnnnnnnnnnnnnnnnnnnnnnnnnnnnnnnnnnnnnnnnnnnnnnnnnnnnnnnnnnnnnnnnnnnnnnnnnnnnnnnnnnnnnnnnnnnnnnnnnnnnnncagagcagaagaatgagagtgtggtgtctaaattaacagcaagttgatattcagggctgtgcttctgttaaagaaccagggttgtctcttttgaaagcctgagcccaggctgcctyctccatgcccctgaacaggagcaactcttttcccatgcagccccagccccaggcctccttcaccccaagaagtaaatgcagggagatgtcctggccagtcccaggccacctggtggttacaattctgtgttatttactccaagatcacatgaaacacacacctgtggtgggaaatatttaatgcagatgttgggaagcagctttgccaaaattgtcagaaaagcgcatgtgaggaaattacctcctggtccctcggtggggattacgtcttttatagtctccgtattttgaagtattt

SEQ ID NO: 20582 - DNA, 600 bp, Bovine  MMBT00831
ttgtcatatatacactgaattttatggctaaatttgaattatctattatccattctattatcaagtaaaatacccaataaattacaaaatattaaacatcgataacactaaaaagaagtaaaatatctttcagagctagtttaaaataaaagctaacaatatttcttttaggttaatcaaggcatcaaatctctgtatattgttctttattcataatcctctctagagtacaaccatgtgatttttgcacttactgttttactgtagattgtcacattttaaaaagaatcaaagttacayagctactaggtaagccaaattattggtattaaatgaactgtgattattaaatgaacacaccacagtacttgagcttaattttcacattttcagaggaataattttctgcatattttagatatgatgtcaaatcttagaagtatgtgctctgtgaaccatttttgataagcacagcactgtgtcagttctgtatcttgcattgttttgctacaacatgaatatcatatgtcctaagatgcttggtctagtaacactgttattttgttatgcattagtaaatatagtttcatagcctgtttt

SEQ ID NO: 20583 - DNA, 600 bp, Bovine  MMBT11775
aaatatacatacatattcatgattccaagtgtatgacatctggaaaagataaaatcatggaaacagtaaaaagtcgtggagacagtaaaaagataagtggtttccaagagttcagggagacggaggaatggatatgtggagtatgggagatatttagggcagtgacactattctgtaggatactctaatggcagattcatgtcattgtacatttttcaaaacacatagaatcaataatacaaagaacaaaccctaatgtaaacatgtcaagtgtggatttttgttaataatggctttaaycaatattattcatcaatgtatggcaagtgtaccacattaatgcaaaatgctaataataggggaatctgrgtgggtaaggtaggtttgaagaggtatatgagaactctatgtacattycactmcatttttatgtaaacctcaaccagcccattctgaaggagatcagccctgggatttcyttggaaggaatgatgctgaagctgaaactccagtactttggccacctcatrcraagagttgactcattggaaaagactctgatgttgggagggattgggggcaggaggagaaggggatggc

SEQ ID NO: 20584 - DNA, 600 bp, Bovine  MMBT10179
atgaaggatctgataccactttcaaaaaaatcttgtttcacagaggaacaggctgagtctcctagagtcaagttttagggtgctccgtctttggcctctcctctaaaaatgaacacctgtccttgactcctttctcccccacacccaattcctcaataattctgtccaatccctcccaagtctgtggagaatccatacgtcccagtccttgtcatcactctcctaggcagttaccatcacccagttctcctggcttcaccctctacagagagcagaggcagttgtaaatgcctgagcctrattaagtccttcctctgcctagaaccttccaggagtactacttcactcagagcaaaagaagtttctcccctgggtccataaggctttgccccacctgccccattattttcctttgtttcttctctgcctctccatccttgctccaatagcactaagatctttgcttttgggagaacacacaggcatattctagccttaggacctttgcacctgctgttccccaattctgaaatgctcttccttcagaagttcccaggacaaggaattccctagcagtccataattaggactccctgcttc

SEQ ID NO: 20585 - DNA, 600 bp, Bovine  MMBT10485
aactgtatcatacactcatgtttaaattagggataattttggccacaagtaacagaaaatctaacagcagattaaacaacatggtaatttgttttttgcccaaagtcaattcaaaacagagacaagtgtcagaaattttcagagggagtgctctcagaaacatcaccttaggggatttgaagcaagcaggactctgggtagagggagagttggcctgaagttaatttataataagacctgaactgaacttgtggggagctccaaagatggatggctcttcagagatggttttcccatgtyraagagagacacccaggtatttatactcccacatcaaccagacgttgaagaggggcttctccagggaggaggcaaacatatcctcagtagggaggtgttcttcagctgataaaattctggaagatggcttgacagctgagggatgttagctcataatcttagcagttggaagaataaatccttcggtcttgaagggggaatctaggagcccataacctcacaataagactagctatttgtagttgctatggttttagttcacccactcagagatgtcagaccttctgcatatttgtttgt

SEQ ID NO: 20586 - DNA, 600 bp, Bovine  MMBT16526
aacccccattatccccagcccctcagcccctggcaaccacccttccactttccgtctcggtcaatctgactgatcttggtatctgatgcttctcagcaacccaatggtccataaaccagcagtgagagagccctgtaagttaatgcagggaaaaggcaccataaggcccaggccctttgttctgggcctaagtcaggttcacaggtgaatgaatttgtctcctgtaaaaatactgagtcaggtaagttgtcctgtaagtttgttaaagacattttatcaaataaactagccaatgtatcrtaacatatagacctaactgtcctggaaagacagaagaaacaggcaaagcccaagcaggggaccattttgcacatgggcagaatgctgcctcagggagtcaatccactagaatacgacttgcagcacatatgacagctgagacttaatttgatgattcaggattatcaaggaaagagtaaatactgttccatgtatcatttactagagtagtaaaacagtatatatttaagggggaaaagttctgaaaaagtgcttgtgtgtgtgtgtgttagtcgctcagtcgtgtccgactcttgcaac

SEQ ID NO: 20587 - DNA, 598 bp, Bovine  MMBT16766
  misc_feature (1)..(174): n is a, c, g, or t
nnnnnnnnnnnnnnnnnnnnnnnnnnnnnnnnnnnnnnnnnnnnnnnnnnnnnnnnnnnnnnnnnnnnnnnnnnnnnnnnnnnnnnnnnnnnnnnnnnnnnnnnnnnnnnnnnnnnnnnnnnnnnnnnnnnnnnnnnnnnnnnnnnnnnnnnnnnnnnnnnnnnnnnnnnnnnnatgtgtatgtgaagccaccatatataagtacttactgtatacaagaccctgtgttaagtacttcgtgtacattatcgagcctcagtacatggcactagaactatcttacagataagataaagcttrcaggtgatgaacttgtctaagatcatacagttattaaatgacaaatctcagatgtaagtccaagccaaaaattcacaataaccactgctactgtgtccatgtgatccacagaattctctgtgagactgagccaaatcagcaggcagtgaacactgtgaaaattcctgcagtcaaaaacacatcaagtatctaatttaaatttatggagtaacagccaaacttacttgctcatggagtcctcccctttcctccatacctttaaactgctcttagacatattaccctttagacaccatga

SEQ ID NO: 20588 - DNA, 600 bp, Bovine  MMBT04462
gttaatttcttcttccctgccattcacaggtggacagggtcctgaacaaaggcactttagtttaacagtaggcagaggggcagggttttctgagcaagccatcctgtatgattataataacaaaagcgatgaaaaacaarctgaagaaacagttccagtatggagccacaactggctcctccctgcgacagaactaggtcyaaggccattgtgtggggcacgttgaagagacctcagaaatacgcagatttgactcccagtcctgctaccaaagttagctgggtgaccttgggctagatrcatcatacctctgactgtcggagagagagaaaaataactaataatacttcctatgaaaggctgttgtgatgattaagaaatatctataacaaagaccaagcacagcacccaacacttagcaggtgctaaaggaagagtagctctgaggagagaagagctttcaaagaacgtgcagtaaagwagagaaaaatgaaaggacaggagaaagcagtaaagcaccaaatgcagccttrattttaacctcccttttcctcacttgctctcctgcaatggccaagtaasatcacagccggttaagta

SEQ ID NO: 20589 - DNA, 600 bp, Bovine  MMBT15013
accataggatcttaatatgcaagagctttttgctcacatgctcatgaggatgatctacatggtttaagcaaagagctttggtttgactttttcctcctattataatccatcctacccaagaattcaaatatgcaaacaattattgtgtacctactaagggcaaatgacagtgttggatatacacaaaaagaccccaggcaccttaaagtaataaaactgtcctccactccttatgttaactgaagacatattatcagcagaaaaagcagcacagttatcaaatccaccctgtgtaaatayagtsaggaaaaacatctttttcttttttccatcatgcctaatcatctttaacactactgtttaagggtttgctcctattcgtggagacttacagactgagagagatacaaagcatagtcccagactttgaggactgtctaataccccaactctgaacctcttcaaatatctagccaagggcaatgcaaatgatgtaatgctgaataataaaaatggaaggagcaatggaataatwaaaaagggaaaaatgtagagaagactagcaacattcaccaagagataaagaacactttctagaaa

SEQ ID NO: 20590 - DNA, 601 bp, Bovine  MMBT19034
  misc_feature (1)..(1): n is a, c, g, or t
ntctgkggcgtggttaacatttcattactaaattggactttgaaygcatactacattttccctcacctcacagatgtctcttkaggctcctcatgagttatacatctgtggcctgctggcactgccccatgatgtgctgtgaaagaaattgccaygatgttaatttgctttcatctcagaagtgagatctcatccctcttttctgtgtgtatgtatctctaagttaaaatgatcattgcacgttaaaacattttggagagattgctttarttttatgagtatccaaagcgagtggtacagycccttataggctctctagacagttatttgggtttggattatagaatcagtgcctagttaatgttaatgacctttatctttaggtcattttgctaatatattattgtaaaggaaatactgtcaacgtgaataccatgcgtttcttatatgattaaagtaatgcactaaggaaatgattcagataatccacatgattcttggccatgtttcaaggaaagaatgagaagaacttcctgaactaatttacatttaactgattgtaaattgtactaagattctcttgtcaaaaattctacttggt

SEQ ID NO: 20591 - DNA, 600 bp, Bovine  MMBT03978
cagagtctggggaagaaagccaccaggcctagtttaatttcagttcggcttgggagtcctcctataacaccgggctggtcccacagcctgcgtatgaaggtggggttgcaaacacggctgttatatttgaacctccgtaaagctgcaagcccttatccacagcatttgactccgcctttggtccatcccaggggcctagcaccagggcctgcacaaggctgttgccagaaaaactatttcataagcgttccgtggcccctctcagccccccagcacccaccgtcatgcgattcctccagwaacggtaaactgttatctggccctaatgacttctccaaatggggcctgaagggaaggtcccagtcagggcaaaacgggaaggaggcagccgcgagcacccctgcgcacagcctggaccaggagggacaggcccccgagcaagagaaggggccaggcagaggctcgcggccggacccggcttcccaccccggcccaggcagacaccgccccatgtgccactcacagcttctggttgagcccggcctggctgctgggctggaagtcgctgacgataatgccgagctgccggatgttctccac

SEQ ID NO: 20592 - DNA, 598 bp, Bovine  MMBT05829
  misc_feature (1)..(225): n is a, c, g, or t
nnnnnnnnnnnnnnnnnnnnnnnnnnnnnnnnnnnnnnnnnnnnnnnnnnnnnnnnnnnnnnnnnnnnnnnnnnnnnnnnnnnnnnnnnnnnnnnnnnnnnnnnnnnnnnnnnnnnnnnnnnnnnnnnnnnnnnnnnnnnnnnnnnnnnnnnnnnnnnnnnnnnnnnnnnnnnnnnnnnnnnnnnnnnnnnnnnnnnnnnnnnnnnnnnnnnnnnnnnnnnnnnntaagtacatattggaatcatgtctctaaagcctaatttcaccatgaagccagagttattagaagcatatctttcytgcaaggaaaatttaaaatttataaacatactggataatggtcttggtggctcagcagcaacaaatacataatttagtatttgggcttattctgattgccctacacacatcaattatcttcactcccagactgtatattaggttgacaggcagtattcaaatttaggtctgtagtcaccgttccactttctcatcacaaggattattacagatatgtcaagtatattgggaaaattagaaacgtatctaagaatattcataattaaatgtttaaaaatttactgaagatgatataatt

SEQ ID NO: 20593 - DNA, 598 bp, Bovine  MMBT05435
  misc_feature (1)..(74): n is a, c, g, or t
nnnnnnnnnnnnnnnnnnnnnnnnnnnnnnnnnnnnnnnnnnnnnnnnnnnnnnnnnnnnnnnnnnnnnnnnnnttgtaacagacggggtttccgagtatgaatgcttgaaatgggactgggtgggctcatgaggaaggtcaaagctcgacgactcctgcactggatccagaggcaccatcccccttgcgagcatctcaggcccatgaacttgacctgggacctgaggacaaacaggttgggcttgtgggtaaattactttttaaacaggaatttagacaaacaaaaagacagtaagtaygccaggggctgggcgagggccagggccagaatacttttttaacagccaagcggagcaggatctaagtaccacaaagactataaatccaagctttaaatcagtaactctctctctgctccagtctcaaagtccacgtgctgctcacacatcacatgcgtcacctcgcctcacctgctgycctgacaaatccagctccagatcctccagcaaggtcacggcctcctccccgctgtcaggacggtactcctgcagccaggcctggagctcccggggcagaatggagaggaactgctcgagc

SEQ ID NO: 20594 - DNA, 512 bp, Bovine  MMBT22319
ggccaaagccacatacttaataagcagcagatccaggagttgcctgtttctgacaatgctggtacgaggctggggctaccttcaccaaccccctatctccgccggctgttgcttttcagtggaggatctcacgaccacatccaagggtatttggatatagaggacttccgacgagccacggcagcctcttcagtgatggtggcccgggcggccatgtggaacccgtccatcttcctcaaggagggtccacggcccttggaagaggtcatgcagaagtacatcagatatgtacgtctacayactttttcacaacaaacttttctgtctgtctgcccgctttctgcagaaagtgctttgggtgagcctccggtccccggaagcccatgtggttcctctctttttctttgttgtgttgcgaggcattgggttttcctggctgcagtgtgaagagtgggctgctggtggggagggggtcatggccctaccgtcaccctcttctaaagcctccaagg

SEQ ID NO: 20595 - DNA, 600 bp, Bovine  MMBT09613
tcttcagaatggtttgattttcattaagactcgtagctggtctgcagccagtgtgtggatgggcatcctgtgtatgaagagtcctgaggcattttgaacaccccatcctgcattccctgtgcacatctagagtgtttccatgcagagatgtccttgtgctacctgcagagcagtgtttggaggctcaagtgtttgttgcctgaggcaagaatgagtgcccttcccaaaaggtacgcctgagatattgagaggttggtgacttaataaccagaagggataccaatcaaactgtaacacagygccaaacactgacttgtccccttcccaattttctcctgacctaggctttggtaacctaacctgggagcttcgtaagaagctccatctctctggctatgctctgcactaaccctggtaaaagttggcagtcagaaatattagtggactctctgtggttgtaaccaattaattcactcacctcctccctaattgcagtgggtgagatgctcaccagctgtgattacaaattggttctgtctagttgacaagaccttatcaggaaattaaaataaagtgatctggcttacaatacatgaagca

SEQ ID NO: 20596 - DNA, 600 bp, Bovine  MMBT12877
catttatcctggaggcactaaagaccaattgggtcactgagctgtttctaaatgtagaagatagttcccaaatcaattatcaggagatgctgtgtgaaaatattggagattattgattgactgaactatatacatttcttccatgaatagaacacagaagtagcctttatgtaatggagtatacctaactagtaaacaaaaaagtatatagacatgtgttagagtaaatttttaaaaaattggaacctcaatccccagtagagaagttctttgtgtggcttctttgcagtcttccatttytggtgcttgcataaacttgaatctatccacttgagagtcaatgccagtcaaccagaaggtcatgatgcatcttaaatyctgttatgatgtcaaagttatgggctctggcttcacattcaactgagggaaagagctgtataatatgataaaagatacacactgttagtgcctatagcaaggacattgtgctaatactacaagagaatcacatgagggatttgtgaactctgctgtggagactttcagtgaggagcagatatttgaggaggaccttgcaggataagcttgtctggctacagt

SEQ ID NO: 20597 - DNA, 600 bp, Bovine  MMBT20214
atcaggagatgctgtgtgaaaatattggagattattgattgactgaactatatacatttcttccatgaatagaacacagaagtagcctttatgtaatggagtatacctaactagtaaacaaaaaagtatatagacatgtgttagagtaaatttttaaaaaattggaacctcaatccccagtagagaagttctttgtgtggcttctttgcagtcttccatttytggtgcttgcataaacttgaatctatccacttgagagtcaatgccagtcaaccagaaggtcatgatgcatcttaaatyctgttatgatgtcaaagttatgggctctggcttcacattcaactgagggaaagagctgtataatatgataaaagatacacactgttagtgcctatagcaaggacattgtgctaatactacaagagaatcacatgagggatttgtgaactctgctgtggagactttcagtgaggagcagatatttgaggaggaccttgcaggataagcttgtctggctacagtccacagggttgcaaagagttggacaygactgagcaactaactcttcttcttctttgcaggataaggggcttccctggt

SEQ ID NO: 20598 - DNA, 564 bp, Bovine  MMBT00774
  misc_feature (1)..(15): n is a, c, g, or t
nnnnnnnnnnnnnnncctgaattttatctttttcaggaatgggatatggagacagaacaagcacattttgtggcactcctgagtttcttgccccagaagttttaacagaaacatcctatacaagggctgtagattggtggggccttggtgtccttatatatgaaatgctcgttggtgaggtaagtagtataagatagataaaagggaaagatgattgagagaacaaagcatggcatttataaaaccacttaatatgtttcctgcataaatagaacttaagctttataaatacttacatgyattagtaatgctcatgatcctatgtcaccttcactgtcttttttaggttgttatgtttgtggaatgtataccagtggtttgaaaatagtttatctgagtgttgctatgggcttcccaggcagcgctagtggtaaagaacctgcctgcttgtgcaggtagacataagaaatcaggtgcaatccctggatcaggaagatcccctggaggagggcaaggtaacccactccagtattcttgcctggggaatcccatggacgaaggagc

SEQ ID NO: 20599 - DNA, 600 bp, Bovine  MMBT00061
gtggtcaacttcgtgctgccgcctgtgttcaagctcattgcacccctggagggctacaccaggagtcgccagatcgtttttatcctactcaggttctggactcttggcgtgggctgggtctggccgagggacattggttctaccaaataagagactgacatcgtcaagatatgggatccggtgggatctggattcagatcccgactcctcctgtcactgagccccagttttcttcatctgtgaagcggggagaactgtgagcacgctccacacaggagaatccggggcacgtggtgggcrctccatcagtgttgatgccctttttctcttttccacttgccaggacagtgtctctccgcctggtctccctgctagtcctgctcttctctctctggaatgagatcacttgcgggggtgatgcggcaggatgagaggtgcaaaacctgtggctataattacaaagaacttccggggaggatgcggggactcctgggtccttgaaggaaaggaacaacccggtgggtcccagattcttggtttgggaggaaagaggagcttgtggtgctagaataccttccccatgaggacaggggtatggat

SEQ ID NO: 20600 - DNA, 600 bp, Bovine  MMBT11137
tctaagtactatgtatccatctcattaaagctgcttgcagttcagaaacaactaacaaaaaatagaaattaaggtaataaggttttgacccataaaaagatgaatgaaaattatgcattaatgtgcatctgataataattagcaacattcttttataaaatagatgtctatctgctctctacaatgttgtatctgtcttttgccatctcccagaaataaatctttgatttattattgccccgggctaactgaagaaaatgttaagtctcagctttgtgattcatgcatattgactatgcrgtcagtgaagaagaaggaaactagagattttgtgaaacaagggccayctgtgttttattttggarctgattaaacgtggtgcaayctatggcaaaattacaacagttatggacttcagtatgcaaggattaaaaaataatcatatttaagagtttataattgtctaataattattttccaagtgtcattatrccttaatttccacacacatcttttggtcatagccacagtactagtgagggcaacatttaaaggaaaagacactattatttctactatggaaaaccttatacaaatgct

SEQ ID NO: 20601 - DNA, 600 bp, Bovine  MMBT16978
gccaccagggagatgagttaagggacgtataaaggacaaagaagaaagactggtagaaatacagaaagacaacattttggggaaggtttctacatgagggattttctgtgaagtctacatattctataaaactgagaaaaactcagattaaagtcaatcgaactcaaagaagaattattcacagtataagaattaggactgaaaatccttgaaggtgggtgttgaaggtgtttcctcttmagatgtccagtggtaccctgggatgaaaagacttgtcaagaccgaaatgacagcagagaragtctatgtccaatcacttcttccttcattatgccagcacttkacaaagatttcctctcacagaaactagatctaaattctgttctgccctggtgtttaaattcttccccctgaaagtgatactgttataagcagtagattcaatcaaactaacatcgtatttgtctctacgcaagacgtgagttttgcattctggagttgatcaaatttaattatttacttactctcttacatcaaattcacctgctgaaacattttcctaaacaaatacctatttctctatgtagtacactggaataa

SEQ ID NO: 20602 - DNA, 600 bp, Bovine  MMBT05312
ttacacttagtacagctttttatttgatcaggtcggaaatacttaccactcagaagaacatggctatgcataattatacctgaccatgggaaaaataagtacctcaaatgcatgtatttgcactggtgattccaactgcacaaacctttgtgccatctgtgtgtatatgtatttttcacatgaattgacatgcacaccattttcattcagtatgaaccttgaggctgctgccattttcccatttaaccaaaccgatacctgtgtaaatagcctaaaggtgatccttgaaaacttgtttcrtatatatttcagaagttattttgcataaatattaaaattccaaaaagctgcagggtaacttaatgtataaaatattacaagtatggattgcagacttcatacaatagatgatagtgtataaattctattgaatgcatgctttctgttttaagcatgagactgtacacgtttactgtaagtccttgcatctgtggtgctaggtgagtgtgagaaggtgtcaaggactgaaaaaatattttgttgcctaacaaaaaaaaaaaaaggaaaaaaaagttgtctgtaggcatgttaaatatgctt

SEQ ID NO: 20603 - DNA, 600 bp, Bovine  MMBT04345
tgattatttaatagaattatttcttagaattcaaaacaaagtacttaggctatgattagctgtataaatccaataatatgcacaacaggatgtatttcttgctatattttttcccatttacattccmatgcttatggcaatctttctgaattcycctgtctttgcaaatttccaactcctagtcctttgtcatcataatttaatggatttctgagtttcctatttttctgaggtgcaattagagaccatccagaggttcctactactttccctccccaccttcctgcctatgcagccacwcattcygtgttctctcctgttactttcaatcagttgtccatgctgacatctgaggccaatcctgagacttatgcccctgaatttcattccctttcacctactcaaggatatctcttcaacagccctaccccttcctctcagcgtgcattttccatctctgctgtatcatgtctattagcatactaacatgctctaatttctcccatctgaggacaccctatcttagaccttctattacccttcagcagccccacttttaagatcctcattatagcaaaattgcataaagaacattttttt

SEQ ID NO: 20604 - DNA, 600 bp, Bovine  MMBT05405
agttgagcaatgtaccgccaggctacatctatcctccttggtccttttgtcgaacagaaggaacacagggaggaaaatgagtgaaaatcaacattctcaactattcagtgtagatcattgcttagtgcttatcttctagatttgggcaaaggagccaagaaatgtttcaaaaagaaaattaaaataatcgctacatgtgatatacatttatacctgtgactattgatctgtctatttcttctttcacttatccattcgtttctaaatttgagaacacaggactagagtggttaaaaggcrtatctctacataaccagcatggatgcttcctacactactatgcttgattctgtatcagtcttctgttaagataatgagctgtgtgatctctgaacacagggaacacggacagcaatacttggtttccctcccttttttccatctggctaacacaaagttttcagatgggagtttgcatgggatgcctgggccaaagaaaggctttgcatctaattcagaatcttttcacgctgtaagaaaacagtgactagggcctgtgccgaaaactggtcttctaaggacaactgctgttacctggca

SEQ ID NO: 20605 - DNA, 600 bp, Bovine  MMBT05998
cagaatttgtaatgttaggcacagcagctgaacatactacagaggagtagaaaaggagaaaaaaatgatgccattaaccatgcaaatgtgtgccacatctgtactaaattgccatttgcatgaatacagctaaggcaagcaggattactgtcattagagcaatgctgtttgcactgctatattgcatttaaggttgtgtgggtgtttccatttatactgccccccttctttttaggggtttataatttggttgtaataatctgctttgggatgaaacattactacaagttcacagagggrgagcaatttttaattataaaattggattcaaattggttcagccatattgtagctagagaaaagcatttaagcacactaaccaaaaaaatatgttttcttttaaaatacaagtcttttgacttgaacttttttttcactttaaggcagaaaactatttttaccgtagcattttatgtttgttgatttttgtgtagtgtcccaccagaagattgatattatatacacaaattgtccactttaattctcaaacttccaaaagaggttatttcaagtacatgctttattaattatttaaaatat

SEQ ID NO: 20606 - DNA, 600 bp, Bovine  MMBT02858
taatctaattctgcatttggtctgaggccaacgcattgagggcattcaataaataatggtgctcggtgtgcatttcctagatcctggctatgtaggtctgagayggcactgggatcccaggtggccagcttgagagaggtggtggatgaagggtggtaggagtctggaggccacgaaggcaaatgtgttcggattgtctgacacagagattatacacctgtrgggcttgccgaagtgaaacctacacatgcaaatattattctactgagtcggttagggtgtgaccttcttcctgacatsattttcccagattcaatctgggtaaaagtacatcaaggccttactccctatgagcacacagaccagtgtttacttgtcttcattaagggaattctctttcctgtgagtgggtggttctgggaggggcaaggcaggattatctgggcagtcccaaaggaggaagagcatgaagaagacagaaaatcctcagaatagaatttccttgacaatgtaggtccacctaatccattcattcttcttatctatctaccaagagattggtggtgaagctataaagatgaatgacataagtcctcctgg

SEQ ID NO: 20607 - DNA, 601 bp, Bovine  MMBT03406
  misc_feature (1)..(1): n is a, c, g, or t
nctattatatgaagtagatattagatcttttattctgccagtgccattttaatcacagcagttctttattctaaatagtttaaccttggamgacctttccccagggcttcttatttatttagatattgttatgcaacacacacacactagcatcagtgaaggcaggrcgatcccttcttaactttcacaggagggattgtacaatacataaaggagctggttaaagaagtggttttctaaattcctgggtaaagaggggcagaggtgagagttgaagacctagagcagagatccctccaakttgcagtttaagtgatggagaaatggatttggagattttgttctttctctctcttctctttctttctctacttaactcaatctcaggacacacttttagtcttttcacttaaagcaaaaggctcatgtttgmtgggtataacttgcaaatgactttgaaaacttttgaatcaaatgaaaaaaatcaggaatttcatgtaaaaatcatgattttcaacttctgatgaaatattagagaatctggctacccttggtccagagtccatcaagacaactactgccaagttttaggcaataacca

SEQ ID NO: 20608 - DNA, 600 bp, Bovine  MMBT09753
gctgggcctgaaagtgggtatcaggtgtctacaggtgcagaggaaggaaaggacaaccccarggtggggagcagtatggacaagggcatggagtgtaaagggaagacacaggacgtgtgtgtatgtgagtrttattgctggaggtagccagagatgaggctgccaagaacggggctagagcaaaacatttccagctgtgaactcaggttgttttttataaaacactgcaaaaatggtcatgcactaggaagtgtggcaatgtcaartcatgataaagttttctcaaagatgagtcttcayttctgtactcatcttgtggacaacactttgagaagccctgccctaggggtcctaggatgggctgcagaggtcagggaggcccacagatttcttgcagctggtcatgtatattcatttgtttagggaagggggcaaagcttttgtcaggacctcaaaaggttcaagatctccaaaggacacaaccctctgctctagggaatggtcactgaaggtctttgagcagaacgatctagtgaggctttagagctgaggggagcagaaaatgtgcctgattcagcctgagaccccttccttccctgc

SEQ ID NO: 20609 - DNA, 600 bp, Bovine  MMBT08093
aatctgccttttaatacaagtttgggccccaaatcaagtgtgtgagactgagatgctttaaatttctgaggcgactcctaagtcatcttactgtgtatgctgtgagcgggagagtccagcctttggaaccaggtacgactgcttgcagatccttctgggctcctccaagggcaagctactcagctgttagcctcagttttctcaactagaataacagggcggagaagattaaataagtgtatatataaagtgggtgcttaatagatgtgatcttttcatgggtggctcaaccgtcttccwtgacaaccaatttaattgtctctccttttacctatttctgtacctaaactgcctcttcatacattatcttgtttcctctgcatccatatggcttactgctatctgacctgatctctttcatctatttgccttactgtctgctgtccgtattggctcgtgaggtctgggagagaagggatttcttctgttttctctatctttgcctctcctgtatttaaaaaaagcctgatgtgtaatatgggattcccaggaggctcagtggcaaagaatctgtctgcaaatgcaggagatgcaggagac

SEQ ID NO: 20610 - DNA, 600 bp, Bovine  MMBT11514
catttaatgtcttataataaaccataatggaaaaaaaccaattcattccatggctcctggcaaggtcctcatgggaactgctgttactgtgcatttaccctgtgccctgcatgttctgagctctatgcattagttcactttacctgcaccaccaccctatgaagcaggcactgttaggatccccactttatagaggagaaaacaagacagagatgtgtacaggagacgcaaatgcagggcacctggaactggccatggcatccagagccgctcaaagtatgaatccttcctctttgaacrgatgggggcagggcttggggtccctgagaccaacaggacagcccttgtcccaaggagtccacacaccaaactggtctccacacagccctcaacacaaacctcctgatcccaggcatccagaaccaggagtgctgtggattccgcctgcccaggggaaggctccccagttccccatcgggggtgctagatgctccaatcactgtctcaggccctgtgcagcctctgattccaagaccatggccagggagacccagggcagggaaggcactccggatccctccaaaccacacacgtttaaag

SEQ ID NO: 20611 - DNA, 600 bp, Bovine  MMBT01785
cccgtgagcactgctgtctacaccacataacaccacatagatcaagagtggggagaggccgaagtcatgaacaccatagctttccataaaagttaattaatgacagaagcatattgctgggaatggcaacacggctgttatttatggctcaggaaaccccaactgtagggatttgccttttcctttctcccagtcccagctctacccacgagtttactcaccccattacagtaacttcgtgactcatttgccaagttaacaagactatagcatggaatctataaaaattaatacaacagytggacatccaacacgcatcccaggagaaacagaccaccctatggatgccgccctgttcttctctatccccacacctcaacacttcttcacacttcacatttctactgttggcaacagttcccacctgtcacccccaagaaaaggatttccccgaggaatccttggtgctgaaaggcttctagacacctcctttccccacttcccagccataccgccccacacaggcatgggccaacccgttaggtgttaggaaaacggctcaccactgacagaccattaccgctttgagaggctgtgtag

SEQ ID NO: 20612 - DNA, 600 bp, Bovine  MMBT07689
caaagcactttcagttctcagaatcgaaatagcccaaatggaccccttcacaagttaaaatccttttaaagcatctgaaactgttgccaattagatttgatgcttaatattgctgtgtacaaactgtctcagtggagggcattccccaaaaggaaacaagaatgttatttcaccaaataatgtacttatcacataaacaatgatataaaatctrtgggggcttaattaagaactgccagaagcactcctatcaagtcaaaataaattaacaaagatgaatttcttagatgaagaccgagrtgcacatttaaatcaatgcaaagcttttgaatcattaacaatatttacgggttttagtgtttaaatatttaataatttgtagtacaaaacagtaactcttaaataaaccttcaatagcagctgttattgttaagtacctatttcatattagactctatcttgacacttcataagtttgctcctcaatacaaaccattctatcttacatgtggagaaacagatgctgagagaggcaaagtcaactgaggtcattcagcaagtggctttattaggatttgaatccaggtctaactattccta

SEQ ID NO: 20613 - DNA, 600 bp, Bovine  MMBT20855
tctgtggtctactcatcccttccctggtggctcagatgataaagaatctgcctggaatgcaagacacccaggttcaatccctgggttgggaagatcgcctggagaagggaatggctrcccatgccagtattcttgcctggagaattccacggacagaggagcctagcaggctacagtccatggggattgcaaagagtcaaacaygactgagtgactaacattttcactttctgtggtcgattaggtgagggaggctgtgctagaattgtgcataatgtttttgaatcatggtagcagggmatattttagatatctggaaagaagtgatcgacagccagacagctataagtaaatgttgtagacacttttagagacatcawcgcagctcacaacagcatgtccttctctgagaaccaccccagagagcaatctaccctccagtaaacctgctccaaggtgcagctgctgaaagcatgaatggatgctacaccatttggcttttcttttccaggaatttagagttctgaaggaagaaaccttgagtctggagatagttggagcttggtcatatatgcagacctttaggggaagttcacagtt

SEQ ID NO: 20614 - DNA, 600 bp, Bovine  MMBT07944
gtcttttccagtgagttggctctggaactcactggaattaaccatcaggtggccaaagctgagcttcagcttcagcatccatccttccaatgcatatccaggtttgatttcctttaggattgactggttggatctcctcgcaatycaaaggattctcaagagtcttctccagcaccacaatgttagaagccaagttgtagkctgaagtttgttcagcagcatgtgctctcaactagggagatggtggagtgacttggaagcggatcccgttgtcctgagcacacccacccaccttcctcrggcagttgctcagtgtttcagcccaaacgcagagctgagtgcctgctctgggccccaagggcagcagcctcagttcatggtccagtgggtcctctggacagatggccacattyggcctgggctctgtgcattcctttgttctggctttagactgacagcccacgtgtatggacctgttttctctctaaataagtaaataccatcaggctggatcttccacccaggagacattcagtctttttgagagatctctgcagtatctaatttcactggccatgggttaattcttttagcctaatt

SEQ ID NO: 20615 - DNA, 600 bp, Bovine  MMBT07059; identical to SEQ ID NO: 4697

SEQ ID NO: 20616 - DNA, 600 bp, Bovine  MMBT07371
ggtgggctgccgtctatggggtcgcacagagtcggacacgactgaagcgacttagcagcagtagaccaactagatgcccaataaagtagagagaagctgtcttcttgggattctattatatcgtatacattatctgattaaggagacagccaaagaaataaaccggaccatatggatttaattaatgaaataattagatcattaattcggctcaagtttttaacagacagaatttctgctttcagaaacctgaaattgtatattactatttggggtggaagcattaacaagtacaaaaartacttcagggataaacacatatcatgacagtgaactacctaggtatactacttgataagaagagtcattaaaatcaattgctgtagtctaaaaattaattagtcagttgatataaattgtgtgacaggtttgaggggttgctattgttactattagaaccgcacacaatattctaacaattggacacccataaaaatagggagaaatcatctcatttctgttattggatctgaggtggtggagggactatattataatatgatttgttattttattgggggaatatgatgtaacatttca

SEQ ID NO: 20617 - DNA, 600 bp, Bovine  MMBT01724
gaggaaaaaaagaagaaagaaaggaaagaggaagggaggaaggaaaaaggaaagaaaggagaaattttttaatctttgtgaatttacaactttccctaaagaaaaaaaagagtgaaattggtgatggtgaaagcagtggtggttatcaatgctcagataaagttcagatccagtttagatacctcagcttctcctaggacagttttcatgacctcctcgccatctcctatttctggctttagggaaacgaactcctcaagattaaaaaaaaagatgacaagatgtgaggatggtctccaygtttcctcccctgctgaccctttctgtttattaaaagtatgaaaaattattgatgtgtatgagatttatrtgaccttcacatcaattaatttgcatttctttagtacatgctatgaggaggagatgccttagaactaggcagagatgtggacttgatcaattgcttcaaataacttgtattgaccatgggcacaaaagtctgtagtatatttatgttcaacttaaaggtatatttcttgactgtatgtgaatgacattcaactgaatagaaactaagatattacaatggagagatgtata

SEQ ID NO: 20618 - DNA, 600 bp, Bovine  MMBT04901
aaagtcatatttagattgagaagtgctgagtttttgtcacatcgtgcctggaacttggaacgaaaagcagaatgttcccccttcctgcacacccccatctcctttattcctgtaaacctagcctgaagtgacattctctgaccactagatggcactcctgcacaggagagtcacatcccgatttaccaagggcggggcggggctcagctaatctcccccgctacatcttctggaagtgacggccgcgcttggtaaacgcgctgttgcaggaggcaggaagtcaaatgctgctgctgctgmtaagtcgctttagtcgtgcccgactctgtgcgaccccatagacggcagcccaccaggctcctctctccctgggattctccaggcaagaatactggagtgggttgctatttccttctctgagaaagtcaaatagagttgtaaaagattttcaggaaatcaaatcgatgatgtttgaggtgacaaaaagcaggaactgcctgtctgcttttcacatttacatttttaaaaatgtgagttgcccgaggcatgactgtctttgagccacaggcaagggaggcaaattaatatgcacagaactga

SEQ ID NO: 20619 - DNA, 600 bp, Bovine  MMBT01107
aaaaaaaaacaaaccacactgacctcaagtgtgtgatgttaaaacagaacctgagtctgtgttgccctggcggaaaaaacacaccgacttagaagagttcagcaattgctcagaacgtggagtcatcatctgacccagcaaccccactcctaggtgtacacccaagagaactgagaacgcatattcacacagaaactggtacacaaacagcaccatcgtctgtaacaaccaataacgcggaaacaatccaacacccatcaacccatgaacggataaaccaagtgtggtcgagtcatgcartggarcagkatttggccacaaaaatgagccaggtattgacacactgctacaacacggataactccgaaaacattaggctgagtgaaataacgcaagacaaaaaaggccatgtattggataattctattcacacagaatgtccaagaacagacaaatccatagggatagaaagtagactagcggttgccagagtctgggagacaaggggagggggtatgactgctgatgttctgaaattagagagtggtgatggctgtgggtaactttgtatatatagtaaaaaccactgaactgtatact

SEQ ID NO: 20620 - DNA, 600 bp, Bovine  MMBT04124
aagaaaacagcctgaatctctcacataaaataacaagccagcacaaagcagtgagagatcagtgaastggagaaggaactgatgcaggtttgggtcctgactcctctcytagctcatttcgttcagatctttactcaaaagctgcttctgagtgaggctttcttggtcactcactcaaatatttgatacctcctagccctgaaaatttattctctagtttttttaaaaaattccttatcatttagtactttctggaatatttttcttatcttctttccctctgtctccttcacaagaatkaaagacccatacaaagcacagttttgaccgtcctgttctttacagtattcccagagcctagacagagcttgacgcacagcagatctgatgaataagtgaattaagttataaagtaagagagatggattggatgatccacatgatactctctagctctaacacaatgatactcacatgtatacatatcaccataaagctatggattacctgagaatacctcaagcgaatcatgccctcatgaccattgtagatgtacacagctccagagttctgattttccaaaggcgaaccaacaatcac

SEQ ID NO: 20621 - DNA, 600 bp, Bovine  MMBT03716
taccccaatgatcatctcattcttaagcttactaagaaataaatgaatgacctattgtggaagtgttggagatatggttagttgctgaatgtgtaaaaggtgatcaatacatcaaagaacaaatacacaaaaaaggaagaagcatacaccatgtgtacagaattatgttgacagggaagaatttgaattattatagaataaagtctgcgggaatgacattaaaataaaccatttcacaaagactttcaataagactgatgagaagctaatttccagagacagagaagaggaatgcagatmttttataagagaaaacattgagatgaagtcaacatacacactttaggagcctgtcatgacagttctccaggtagagcaagtaaagacactgtaactgcaacttagatcaaacctctaagagaaacaccaaaattacagacaaaccagaatcaggcaatctgaaragtggagraaaaaaatctatcacaataggaaaaaatcatggggaaataaaatcaagcagtagataagaaaacatttcatagtatcagatacaatggacatttattacatattctaggagtcaaatatcagctattc

SEQ ID NO: 20622 - DNA, 600 bp, Bovine  MMBT11305
ctcagccttcttcacagtccaactctcacatccatacctgaccacaggaaaaaccatagccttgactagacgaacctttgttggcaaagtaatgtctctgcttttgaatatgctgtctaggttggtcataactttccttccaaggagtaagcgtcttttaatttcatggctgcagtcaacatctgtagtgattttggagcccagaaaaataaagtctgacactgtttcccaataaaaatcatacatatttcatgaaactgcatgatcaactgtatttcaacatacagaaacagagcccaktgtactttagtaatataggtaatatggcacttaaggcttttcttaattaaaagccaagaatcttatttgcatttctttgaaggaaaagactgtaataaggacaaagtattggcaaagtgatgarccaaacagagaggaaattctaattatagacttcagaattcagtttaagatgtatatgtatgtcgctttatttttttttttttacagttttcacataactcrttatttattttggatatatttcattttaaagtatagttaatttacagtgttatgttaatttctgctatacagcaa

SEQ ID NO: 20623 - DNA, 600 bp, Bovine  MMBT13533
tggtacaaccactttggagaatacttcagaagttaggtataaaggtaatcagatgtttacctatgaactagtaattccactcctaggcatttgccaaagggaaggaaaacatattttcaccaaataaataaataatccctttgtaagaatacttaaggaaactctgtttatagtagccaaatactggaaatcatcttgaatgtccatttacaaaagaccagataatcaaattgtggtttatttatatagtggaatattacccagaaataaaaaggaacatccacatcacaatcaacaacrtgtgtaagtctcacagatatgaaatgatattgagtgacaaaacccagacacaacagaatatatacacggtgtttccatttaaatggagtccaagaacaggcaaagctaaccaacagtgatacagtcagaaagcaattgcctctgaggagaggaattgactggaaaggggtatgaggccacagtcttagattttactttgttagtcacactcagtcgtgtcctactctttgtgaccccatggactgtagcccgccaggctttctctgtccatggaattctctaggcaagaatatactagag

SEQ ID NO: 20624 - DNA, 600 bp, Bovine  MMBT05132
agttgtgctgactctttgtgaccccatggactgcagcatgccaggcttccccatccttcactctctcctggaatttgctcaactcatgtccattgagtcggggattgccatatgactgtctcatcctctgttgccccttctcctgccttcagtctttcacagcgtcaggtcttttcctgagttgactctcggcctyggtggccagaggcaggtgctgtcgtttgtgctttagtataaacctcagcagagaaggygtgtttctgttgatgatactctggagtgaatttaatattggcaatygcatttagtcatgtcactagacaggatgattcttcttgtgactgggatttcaaccgggatagaactgagatttggatacagatggcagttgacagggttaagtgtgggcctgagaatctacagaggcacttcaactgtgggcctgtctggaggtggccctaggaggccaaaccatgatgggggaagtgtgtgtgtgcatkgctgggggtatgcagtgatacattgttcactaaaaactatcaggagaagtcagaggcagtgggttctcatggggaatagtatgcagggtatggtrtgttt

SEQ ID NO: 20625 - DNA, 600 bp, Bovine  MMBT04058
cccatggactgtagcccaccaagttcctctgtccatggggattctccaggcaagaatactggagtgggtttccatgccctcctccagggaatctttccaaccaagggtcaaacccaggtctcctgaattgcaggtggattctttaccgtctggagtgcatattagatgagtttaatatttaggtagaggacagatagtacagtcttaacgtatcatgcttatggcttatcctaaagagatttgggaaagggagtaaaatgatgggattcacaagtaggagtacagtactatgaatgtagrcatgaattcatccagaagcaaggaaacmtttaggtccttcctcaatttctataattccagccccctctctggcacactttcatgggatgtaatttctctacagaataataatagatgatgacaaaaataagaatgaattaaaaatgagatgtgaaagccaaagggactccttggtagaagcaaagaagccctcatgtcttgcagcaggaatgcagagaaagcctagcatgaggcctgagatttatcattctgcatgactaacttcaaaggaggttaaactcagcagattggttgggccgg

SEQ ID NO: 20626 - DNA, 600 bp, Bovine  MMBT07665
gtccaggttaaagtctgacactgtttttctggtacatgcatacataaaatagaccaataataggaccctcttctgggatatgttatgatgactgaacgagatgatccatgtaaatgatcaatataagtatgaagtgtacagcactgagtgattaattcaaaccttaactcttattgtaaaaacccattttgtttctacattcagtaagcactgttgcccactcacagtgattaagagtagggttgagaagttactaaaccccaaatgaaggacacacccttattctactgaacaaccctyctgttcactgttactgtgaaattgaggaagagtctggaggaaagtggccacccttgtctcagggcaagttataaagtggatgtaaaagtaacaccctgaaaaaaattatgtcaaacatatgggactcaactctgacgactgggtttgtaaagcagaattaattaccacaaggcagaagagccagtcataccatgctagccacttacactatcaggtaaaatttcctatgaaattactgttgaaaagacactagaaaataatatacagagacaatctgtacatctacataactcacataca

SEQ ID NO: 20627 - DNA, 600 bp, Bovine  MMBT15674
cactcttctgcttccccatctcttcaccagtctcttctggaagcactttgttcataaatcatttgttcccgaattctcctcttgacatctgcttttgaagaaaccaacttaaaatgggcagttcttaaaatccaggtgtccctgagaagaatagcacctttgagayacaaacgggccagttcattatttgacaagtgcagtcccattaaaaaactgaaaataaaagtcactctgtcrtgtctgactctttgtgaccccatggactgtagcttaccaggcttctctgtccttggaattctycaggaaagaatactggagtggatagccattcctctctccaggggatcttctcaacctagggatcaaacacaggtctcgatttaattaaaaagtgcttgctccttggaagaaaagctatgaaaaacctagagagtgtattaaaaagcagtgatatcactttgctgacaaaagtttgtataatcaaaagtatagttttttccagtgtacgaatgtacgaatgtgaaagttggaccataaagaaggctgaatgtggaagaattgatgcttttgaattgtggtgctggagaagactcttgagag

SEQ ID NO: 20628 - DNA, 600 bp, Bovine  MMBT03633
tttttgtacagtttttctgtgtattcttgccacctcttcttaatatcttctgcttctgttaggtccataccatttctgtcctttatcgagcccatctttgcatgaaatattcccttggtatctctaattttcttgaagatatctctggtcttttccattctgttgtttttctctatttctttgcattgatcgctgagtaaggctttcttatctctccttgctattctttggaactcttcatttagatacttagggcccacttaatgaccttacwttaacttaattatcctagtaaagacyrtgtctctaaacaaggtcactttcagagacaytaaggattaggacttaaagatataagtttcaggcttcccaggtggcactagtggtaacraacctgcccaccaattcaggagacataagaaatgcaggtttgatctctgggtcaggaagatgccctggaggagggcttggcagcctactcyagtattcttgcctggagaatcccatggacagaggagcctgatgggctacagtccttagggtcacaaacagttagatacaactgaagtgacttgacaagcatatgatttcaggggacac

SEQ ID NO: 20629 - DNA, 600 bp, Bovine  MMBT04769
ttgccatctcttcttaatattttctgcttctgttargtccataccttttctgtcctttatcgagaccawctttgcatgaaatgttcccttggtatctactagaaggatttaagggataaaaagcactttcttttaaaagcaataagggaattttaattggagtaagtgtatgaataatacatcaaatatattctatcatttttattatacagaaactgctgaggtcttagagatgatgactgttaattaagtttattaagtcaaagccttaacagataaagaaaatgttaggatgaattmaaaataatatgaaatgagcttttttatcagtaaaaggagatttttgtagtaaaatgtctataagtaactggtactttagttgttcagcaggtacagtatacatagatcattggattaaaaaataattctatacttaatttaatgaggtgttcagaagttacaagtagttactttcagtctcattattcttcatacagtttagcaccgtcataccttttaggatgtttctgtcattgaaaatgacaaacatgttaaatataaaactacacatgatgacatggtttagaaaattatggatgt

SEQ ID NO: 20630 - DNA, 600 bp, Bovine  MMBT11327
gctaaatgaacacattcttcttttgtttaaaaaaaaagcctatttcaccatttttcttgaatagtttaaaaatcaaaacattaagaattaaataaacttagaatttaaaagctggataaatataaccccatgaacaaaccactgcacggttcttgcttttctctttttgcttcaaatcactgaaaacagagtcccaacctattgactggcaccagggtaagaattaatactgggagtatctatcctttggccacttattaacaacactttgattttgaatatagcttggaaaaaaatagsatggtatttcttagaatcatttataactcagactttccactaacttcatctggtttctatcctcccccaccatacaattagtctgaatatttgaggttttcctattgtctccagtaaggttcttggagacaaggtcaaactaagggcaagtctcacaggtcagagtattgttttgaaccatatgaakgtttctctaaataatttttaaaaaataaaatcactgagtaactgaagttttttcagtgttcaaaccacataggtgactaggttggggccaaaactcaagaccatattttaaag

SEQ ID NO: 20631 - DNA, 600 bp, Bovine  MMBT01839
acgatgcttgagtaggcagtcaaccaatgccaggtgttcctgtttcactggattatttgttcctatttaaagaatctttcatcaaggtttactgccaatagatgtagtatttctatgtgacagagttaaatagacccagatttgacttgatgtcttaaatcaccggggagatggaattgtgagatatttgttatgcaactgtatatttgttgtaagttcaattttgagtcctttatcatagaaggtagtttgactaataagtgtagttgacctgaagtcaaaatcaactctctgggtgcktctaagtatatataaattatcaaattatgctgaaaataacctctgacaggctcactagaagttgaaaaatgaactgtttcaaatcaatggagatagtatagacaccatgggatgacgagcaggatttttgttggtatttatatacatgtgggctgactggtcaacccacagtactcaagctccctggttgaggatgggagcttgcgctctaatcagaaaagatccaggcatctttgttacatmatttaaccttatcctaaattgcacaaaaggtggaaaagtccagcagagggggagctg

SEQ ID NO: 20632 - DNA, 600 bp, Bovine  MMBT07800
cccgtccctgggattctccaggcaagaacactggagtgggttgccatttctttctccaatgcatgaagtgaaaagtgaaagtgaagtcgctctgtcatgccaactcttagcaaccccatggactatagcctaccaggctcctccgtccatgggattttccaggcaagagtactggagtgaggtgccattgccttctcctggcagcctgctagactggcccaatgatgattaacttcaatgacttgaatcgctgaggaagagggaagctgcttccattttaattatgtctacaggagtacrgcacttttaccccagttcattgtcctgaaacaaaagacttcctgaaaggaagattaaaaaacccaaagtgtggtggtctttacttacaaagatcttttttcagtccattcagagccacaacttagctctatattgggaactcttggcaagccattggggtttgcaagcagatcagaagatagaaagaaagcatcattcagtttattttacttgggcaattaaaatgcattgagctggtccagatatgaaatagcatctcgccatagtatgtgttctgcataaaaggaactctgacatgca

SEQ ID NO: 20633 - DNA, 600 bp, Bovine  MMBT14225
ggagctcacaaatcagccatgaatgttcagcctgagaggggctacctagaggaagatatttaaagaagatagaagtgagttccctgaaaatctatggtccataacaccacatccatttttatagttgcaatcaacaagaaagcttgttctatttgctttccttgcttgataatataatttcagagatggatgaaaaatgctttcagcactagaatcaatacttctgattacggctgcttttgtgctcgtctctccccagtggaaacatagccaggaaagataggaagatctatggaaagyctacaaccctgattttttttatctcttccaaagttgtctgttctcatcaaatgctgcatttattttgaagaatttgaaggcagcctagggctcacagaagagacatgrtaacttggaggcatttgctatatgagctgtgctacctgaaaaactacagacccattcacccacctctgctacagaatcacatctttcccttcagattccacaccaaaggcatcttctgaaagctcttagtgtagttgagaggtgctccattgtcctcttaatctctgctcccaaggaattcttgttcaggat

SEQ ID NO: 20634 - DNA, 600 bp, Bovine  MMBT08485
ggtgctacttactgactggtgtctcctgagtgggggccagggatgctcttcaactttctgggatgcacaggacagctcccatggcacaaagttagccagttcaaaatgtcagtagtgttaaggttgaaaaaatagtaaaaaaaaaaaaatctcacstcctccagacagccttccttgattccttaaatggcagagatatgttctttggctctcatgcacttctgatcttagctgtcacagcctctcccactctgtggtccctgaactccagggaaagagcctgggtatcattgaacctamatctttggcttcctttctctctagcttgtgaatctctggaagtcagggactattgtcatccacacaggtgtctcagatatatcatagaatctgactcatggtgggtactaagtaaatacttgttgaaagagcaaatggatggatggatggatggatgaatggatacagttgtaggctgagactcaagaaaactaagttgtcttctttttatgtgtgttagttgctcaggtgtgttctgactcttcaygaccctacagactgtagcctgccaggctcctttatctatggaattctccaagc

SEQ ID NO: 20635 - DNA, 600 bp, Bovine  MMBT04318
caaacacctacgtgcagtgatgcagttttgggggtgggggactgttttttccctcttgcttttccttcctggtaagacatgattttatgcctttattccccattcagtgatcctaatggtcgtggcataaattttgcccggtgggtgaaacaccgcctctctgggtacttcttgttgttttggaggattttcttggaaagaaccaaacctgtggtttccttagagggctgcctggaaagtgaggggtccctgcccagccaggctccagacaagtgtctctgtctcttcttgcccaccccmctcagtgactgtgactccctctcccctcaatttgcaatctcttcctgttcaagaaaaagatgctgtaagaaagggctttcagagtcaagagaggtctgtgaggcacctgagaaggctttaggggagagtccttgaaagagttgagctaggactcttaatggtgcttttgaactgtggtgctggagaagactcttgagagtcccttggatgcaaggagatgcaaccagtccatcctaaaggagatcagtcctgggtgttcattggaaggactgatgctgaagatgaaactccaatactttg

SEQ ID NO: 20636 - DNA, 600 bp, Bovine  MMBT15847
atctcacatccagcctggtgttaagacagggcacccatttaaaacctttaattgagttaaaaataaagtggatttttaccagcatttgaaaagccatcaatgccagttaacccattgaccttggcctaggaaataacttgcttgtcttctacttgtggctgtgtgggtgtaaatatacaggaaacccatttaaggatatttgtttctatgactgatggatgtaactaagagatatgaaactgacagtgtggaaaatgtgtctcttttctcttttctgcactaaaacaaaaaagcaagcaraatttttcatctgaagatgagcgagagatttcataaagaaagaagttggagcatgtgatgtaaatacatgagattatcttttgtgcattttcaaccagagtcaaagaaatatattttcataaattagagcagatatctgattttaagcaagcattcttgtttaacatagagctagagagagatgggtatgcatttgatgggcagatgctgactcagcaactcatgtctcttggctcttattaataggatggggaatgggaggtacttggggctttcggaaggcaaaggctgagtcttgga

SEQ ID NO: 20637 - DNA, 600 bp, Bovine  MMBT17214
ataatacctaatgcactagagcattggaaattttctttaaagcaaatactttaccatttgcttccattataatttgagagttattttctagtggaaaaaaagcgtggctcccacacaatgaaaatcatcttcaggagtcctatcattctgctttcaaaatatgtgaatgcttggtacatttaattccttgatatattatacaataaaatgataaaatgtgcttaagttactattaggattgaatatgtatgaagatggaacacttacatagtaaacactaattattagcatacgaaaaastttctagacaaaataccctaacttttatggttatcagaattcacagtcattaaaatatttggttagtattattaaaggtaatcccgtttttctttgtaatttgtttagattgaatgggacttaaatgtttagctatgcactaggaatatcttagcttttctatttaaaagaatactgcagagtatcatgaaacaagtttgatgtactttcattctaacatttgagtacatatgatgtgctgtgactattcctttcttttcctcccccccacctctctcttctctctttcttaccctccct

SEQ ID NO: 20638 - DNA, 600 bp, Bovine  MMBT12474
ggacagggagccctggcggactgcagttcatggggctgcagagtcagacgagactgaatgactgaacaacaagaccagcagatacccagcttttcttgtagcaaacatttctaaagggactgattcatctccagaaatgcctggaggccatcggatgctagccaggcctggagaacattcccagaaatgcagttacctggaggggaggttctttcagtgtctgagatctctcagccctccccaaggccagggcagcaggtggaactcatccagccaaggccacaagggtgtcagttgatkcgtggtgaaatgggactttgaaagggattctctggtccctggcccataccctcaaagctaataatgattaactagtacaaggctatggagctggatagtctccatttcagtttggcttctccaccaaatactgggtaaatgtacaaccaagaagcatcttatcaggtgctattaaaggaatgaaaactactttttaacactgacttcgcaacatgtgataaggaagattaacagatgaaagtgttacataatccttggttaaacataggttgtaattaccctctgtttttcattgtgttt

SEQ ID NO: 20639 - DNA, 598 bp, Bovine  MMBT06718
  misc_feature (1)..(68): n is a, c, g, or t
nnnnnnnnnnnnnnnnnnnnnnnnnnnnnnnnnnnnnnnnnnnnnnnnnnnnnnnnnnnnnnnnnnnnaataactcccttagatagctcttcacagatgtaacactcttaaccctaaaagtcccgagaattgttaactatgctccccagggattatatcctttctcctcccccaaggaatctcattctgacatcaaaacaagcaagcaaacaaaactcaaataacttaaccctagctaggttccacaccatacggcacgtaggatgcaggacgcaggatcttttctccctgattagggaytgaagtcgtgcctctgcaccgggagtcaggagtcttaaccactggaccaccagagaagtccccgtgattgccttttaatgtcctactgacaattcatatttttctttcagtagttaaatataaaactgaaactaagggaaattactttttcaatatatacagatcatacttggttaagcaacatatatcatgctcagggtataaacattcaagattaacagaactgctttgaaaatgtaaattcatatgacaatgagttgctttctacttttcatttaaatttttaaataagctacct

SEQ ID NO: 20640 - DNA, 600 bp, Bovine  MMBT12892
gctaaagctctaatattgaagggtctggaccctgtgtcacagtgctgtgtacaaggacaacccagctaaataagatacctttgtactcacacagggttttagagttaaatttgggtaagacgacactgatataaagatacatcacaaaggccaactaagtatacacagttgtgtaggtacctaaaaggaaacgacctcttgaggtgacaagtaaaaactccatggaacatttaaaaatccattctatataaagcacccagattcacaaatgaaaaccaccacattaaagggctctagagrtgatgaacgttacataaaggttaggttgataaaggtagtaaaaccagctacaatttactcagcatttcctgtgggtcaggcaccatgttgagcatttcacatacattttcttacttaattaaatggctcaccaaaattatttccattttataactgaggaaattgaggttagaaaggttaaaattacttatccaaagtcacataagtaagtggtacgtctaagttaaacaagtcaaagcccgtgttttcaggccgcttatatgtactgcctctattctatttccccaagtcatttttgtt

SEQ ID NO: 20641 - DNA, 600 bp, Bovine  MMBT07112
tgtctttctgttcatattgtgtctgactctttgtgacgccatggactgtctgtggaattctccaggccagaatactggagtgggtagcctttctcttctccaggggatcttcccaacccagggatcaaacccaggtctcctgcattgcaggcggattctttaccaggtaagccacaagggaagcacrtatatatatttcttatcttttgaggtcctatacgaattaggtacacacttaggaaaaaaacacagtctcttgagattgtaatatgggagctagacatctttatgttcagaaasgttagaggtatatggtctgacagaggcagaacaacttcagtccccataattcagctactacagaatttgagaatagagccactaaattgatgatatggccatagcgtttacaaccagagaccgtctaagttcttatccatgaaaytcgtaacagctaaccttcttgaggactgctttgtgaattttcaatcagaaggacagtccccaaagggtggctgagtctggatcattgttatggaaagtgattgagtaagtaaaaatatgtgtcatgagaagaagcagccagtagcttccttttag

SEQ ID NO: 20642 - DNA, 600 bp, Bovine  MMBT04220
taaatagcaacgatggtaccgataacaaattagatgagggaagccagttcccttcaggaactctcaattcaaacagagggcatttatgctgagaagaatggaagatatgaaaggcagaggccaacagacaacagggacagagattagctcctgtcatcagtcacgaccgacactgggcatttctgaggttgttgatggttaaggaaagaaccttagaggagaaaatgaatctcttagaagatgtgaggttgcttaatctggaagacagaagagaagtttgaagaagacgactggagtgaygggagagaaagattactcggggagaattttgaactgactgaatcagagaggaaagaagatgagtttgcagtagttgaaagtaccatgacatcggggaaggtggtgtggtgatggcaacgacaatgatttcagagagtataagagtgcaacacaaaactaccctcagagataccaaattactttcatattcatcttttcatttttcccccataatgccctgggggtacatagagacatacaagtcagaattcatccaaaaagctgtcaagatcagaatttggggagaagggatgtaaaagt

SEQ ID NO: 20643 - DNA, 600 bp, Bovine  MMBT22308
tccagaaatgtgtttgcttggtattagttgaatcccttcctctgaagaagccctggtcctgggagctgtcaggaccccctcccagcaacactcttgctctctgtccgccgcaggctctggacacccactcccagcaccagcagaggcttgtcttcgatgacgggggtacagcccataaactgaaattgaatttttgctggagtgtggctgagggaaggaatgtggggtatgaggcccttacccccagccacttcctcgtcactctgggctgctgtctgtttcactgaccaattcccctcrgagtcgcatctgagcccctggtgtcacrgacacccagccccaccctccccatcagctaagctttcagtttagggagaaagggcggttgtggggatgggagggagaggcagagggagcagaaggtgatacgggggagagggatggcagggaaggtggacaaggaaaaggggagagatgagaagtgggggtggggtttggggagcgggaagtcagaaggatggagagagagggcaagaatcatacctggattcctccttcgtgccgtcaagcggattatcaatacataaagcgcgtgaatga

SEQ ID NO: 20644 - DNA, 600 bp, Bovine  MMBT18611
agtaggcacacataaatataaacaaactgcatataattccatgagaggattaggtcctaatggcccagcatccactctttgaattaacttctgtctcaatgcatcaagaatggcactagctatacaccattcttggaatgagaaaatatttgagaaaacagtcactcaaatcacttgtgtgttgtggttcaaatgaggaaaactggttgagaaaatttaattcatgagtgmatgtgaggataaaaagtctcacttcctctaagttgcctcctcagaccatccygtttcagagttagttartgatacgtcagcaaaattaacagatcgttgaatttccacacagttttggtaattctgctcgcatctattatgtatgtcatggggtagaaatggttaaaattgaaagacccctgcttaatgactggtgtgcacttaggagacagatacacagccatcccagtaaggtgactttggggaccctgtagttaatggctctgtaagcagatccggccttttaatggtttcacaaaaggcacatacacaattgaggctgcagttttgagtactgtctggtcctgataaggctggctgggaacaccc

SEQ ID NO: 20645 - DNA, 604 bp, Bovine  MMBT14383
  misc_feature (1)..(4): n is a, c, g, or t
nnnntactgactgggtctatgaaataaatatagtgaaactgtaagtaaatttagaattcaacctgttgttcagggtccagaattgttattgcataaatggccgccaaatgtaactatgctgtaggtcaaaagaaaacaaagccaaaaaacaaaaacaacacacacacacacacccccccccccacctcttcagctaagtctacaaggaaaggtcagaaaggtgcattttgtgttgctgcttaactttcaattcccaagggtacttgtttgagtgcaactgcatgtgtactgctttgagaaggasggactgtttggagaacctagaactttggtgtgaaataaaagatttgcaaagtactcttagggagaggagggagatccagacagcagagtaagaggatgtggaggtcacatccctctaggaacatatcaaaaatacatgtacaagacttccctggtgttcccatggctaagactccacacgcccaatgcacagcatctgggtttgatcccggtcagtgaactaggtcccacatgctgcaactagagttggcatgccacaactagagatcccacacgttgtgaagactgaaggttccctgta

SEQ ID NO: 20646 - DNA, 598 bp, Bovine  MMBT06845
  misc_feature (1)..(108): n is a, c, g, or t
nnnnnnnnnnnnnnnnnnnnnnnnnnnnnnnnnnnnnnnnnnnnnnnnnnnnnnnnnnnnnnnnnnnnnnnnnnnnnnnnnnnnnnnnnnnnnnnnnnnnnnnnnnnnattttcttgagatttcatctttcagtagagaaagacccagtcaaaaaaagtagtttaaaggagtatgtgtgtgtgtgtgtgtgtgtgtgtgtaaatggagggagagggcgaaggatagtagtagtacaaatctatttgtacgtttgaggtcatgcttagtcaagtacatgattacacctttgtggcaccccrgataaaatccatctggtatctatcaagctatcttgttcttagagataaaataaccctgctgtctctataaagtaagcatcctgagaatcaatttgatgtctttttctctattatgtaatacaatgtccgtcatataataggtgctcaataaatatttgttgaatgagcagctacttgaaggcagtagctcttgctgcttaataatttaggttctggatttatagaaacgtgcgttcaaactccagtttcctcatttgctatctctgtaattttaggcaacttttagatgtttatctgt

SEQ ID NO: 20647 - DNA, 601 bp, Bovine  MMBT06256
  misc_feature (1)..(1): n is a, c, g, or t
nttatttttattgggtaagctgccatctaaagtatcagtcaggcaagcctgctggttcatccttcctctatgcccaacagctaaatgatgatgtcgtaacactatgggcaattcttggcatttacttcttaaaaaaaaaaammaaaaactaaaaacgcatagttggctaactccattcttaaagagcagcttatatcacttgtactctcctgacaccagaaattcaaaaagaaaatgtcaagagttacggagttctattttatcatcatcaaatatcctgcggctttagagcaattatcaytgcgctttacccatcagctaygcaatgtttattcctggttttctacggacacaaacatgtttaggaaatcaactacaaagataagtgtggccattggggacaattctcgtgctaacgatcattttcaccaaaagcagggagcagggttatgaatcatctgtgaccacttatgcttaagctgaatacattaaaatttaatggtttcgacacaagaagccagtcataagtctgcacatcaaggcactaatgtgtcgggcctaattgtacttagatgaagtgagtcaggaatgcatggcagcc

SEQ ID NO: 20648 - DNA, 600 bp, Bovine  MMBT21628; identical to SEQ ID NO: 4844

SEQ ID NO: 20649 - DNA, 600 bp, Bovine  MMBT12276
cacgctgttctcctgctcccaagatctgggggctctgctccttctcagaaaagccaggacgtccaaaaagtctgggagctgggtggccaggtccacagacaggaggggaaggcaccccactgaccagggggttctcttctcagttagaccaatggggtcactcagatgggtgatgacgatgcacgttagaaccgtccaagttccaaggagccgggatgggtgaccrtcagtgatgcattaatcccgctgggctggcctctcccagtccctcggggtcagaaggttctcctgaaacattcrgcactcagcagtcatgaggaacggggaccctaactcactccgggggaaccaacagaccaccactgctcctcttgtgctctgggggaatcttccggggtgtatcagtcagctagggctgcataacaaagcacctcagttgcccagcttgcacagcagacattcatttctcccaggaacggaggccggaagtcccagatcaaggtctgrctgggctgggtctcaggtgcagcctctctcatcggcggaagacactgctctggcctcacacagcctttcctctgagcacacgcagacagactg

SEQ ID NO: 20650 - DNA, 600 bp, Bovine  MMBT09059
ttgttaagcttttcaaaatattgcatgttcctgcgtcataatactttgccagtatctagcacctattattcttagaactcattggtgttcaaatgctgtcttcctaactcctatgtttaaaaatgattattcattttacaggtataaacttgcatcacagttttttacaaatatagttactagcttacactctgattttacagtgcttaatttaactcatgtttgtatggccattgaatgatatcttccaaattgtaatcacttctactgcgtcattgccttcttctacaatatcctacrtgatatgtaatttcatatgcctctaaccaattttttgtcatccactggtagttctctctgayacattgactgagccaatatcttgttgtcccccatcccttatttctagccagtgaccaaactcttgtaattttgcctcagcaggggcactctagttctgcaaactgtggccgtgggtcagttcctgccagcttccttgttttgcaaataaagctttattgaagcacacatgttcatttgttgacatgctgtctatggcagggtcgaacagcaaaggcacaaactggatcttatgattta

SEQ ID NO: 20651 - DNA, 600 bp, Bovine  MMBT02352
tcaatagaccttgaaataatgattgttatggtaaaaaaacaaaagcagaacacctaattgtgtggcctgctactaaatgacatgccctgatgaaagagagagaagaagaagggatgtgtgtgagggagagaggtaaacctggccaaatgaccccaaagctaacatcatcagtagcctgggaagagatatcctcttggactataacctgcgagtcaaggcctcctgagctctgctctggggaggtgaaggtgccgtttcttgcagtcctggatatgtgctttgttgcaggccccccacttkgcttgtctttgcagggctgtcaccgggtgattcataactcagtattaactgcagacgagggaggagtgaataggggaatttttttcatgtgacataaagtaaccrgcatcagggcttttccacagaagcattaattacccttgtcagtctaaccaagaacagattttaacttcaaccaaggaccatggtatttcattggcacccagcaaatgtgcaatgaaggctttgctcttcatccatgagtataataaggttaaagtctcttgtgatttatgatattccccctttctgtttaaacga

SEQ ID NO: 20652 - DNA, 600 bp, Bovine  MMBT03691
aatgatcaaagattttttcctactctatcacatgattgaggtattaaaattaaattcctttctatgcaagaagttcctaaaatcttaaacactgccttaaatttcctaagtactcatggaagagagggccttgaataaaattcccttaggcatgtaactagaaaactttatatcaggccatggaatagtgagatgaaatatcaagaggtcttgtaagtagtgtgattatataacttatcatccagtgtagtatgtaagagtggaagcaagactattaataattacacctataaacaggayagaactacctggctgttccagataaatgataacaaagagtcacagtgttgatcttgaggctaagaccctgctgacctctaatcaaatctggaacaagctcttttcaatattgcaacttcaaagaactcacagtctttgtttcactttactaatatcatccatctgaaatcctctacctcttagaaaaattgtgatggacgaaggcttcctggcaagtgtaagcatgattcaccgacttatcctgtcctgagtgaaagataaacaagtgaacaatcttagaaacatatacctaactttgca

SEQ ID NO: 20653 - DNA, 598 bp, Bovine  MMBT11997
  misc_feature (1)..(15): n is a, c, g, or t
nnnnnnnnnnnnnnnatctgatattttagatgtatccatatttataaaagtgtaaagcacaatggaattatgctggaagtctcaaataatatttttcctactttatattcatggaagagatgagctaaagagagaacaataatgagaaatggtggtgtgtttttctaagcacttaagacataattgccaactgaaaccctaaaaatgtttacatgtcattaaggtttgcttcttgtaacaattttaaattgattatgaagggattgggtttgtaatctgtggtagtatgtatcctagttsccatagtgacgtaagtagggttgtgccaaagcttactttgtttatatcttaaattgttggattacatcatcaaagcagataaaagatatgcagaactggtttacctgattttcttttggctagaattaatattcatagtagaaccttattaaaatgtrtttgtattgtaggtggtgtttgtatttttatgaatatgtatggtttaaaaatattttcagtatacaagaaattcaactttcccaataaacgttcaacttcacgtactctaaaaatgtttgccttttttctatccacataa

SEQ ID NO: 20654 - DNA, 600 bp, Bovine  MMBT21637
acaaaggaagaaagtgaaaagaaagttaaaggcagcttgagctaccaaaactaactgcatattgcaaaaggaaccatttcacttgactgaacagttcaaacaaatttcagctcctgagcattttaaacacggagagaaaacaatataaataatgtatgtgtgtgtgtgtgtatatgtgtgtgtacatacatatacatacatatatatctatatggctgttaatgaatcatttgcaagggacattttgaatgtaaaatggtgtgaatttctacactcccttctttctggctttccaggcamaagtcccatcaatctctaaaccctgacaccaggcagttcattgtttttcaaatttatgacatttttcagyccactgtttttaaactgtcgccctcagtgggtagctggcacaactcattgctactctcagctcccactgagctcatcgccctaggagtgatgtgctagcaaaatttccagttgactgatctccaggatggtaaacactctctgtgtgcttcctctgatgacatcattagttttgtcctccaaccttayccagaacagaaataattaagattgtgwttgtccatcccaaac

SEQ ID NO: 20655 - DNA, 600 bp, Bovine  MMBT10879
agctccccaacctcccaacatatgcaagtccagtcttttgcaaggaaaggctttatcaagtaggggtggttattgcaatagggagccacttaaagaccaagccaaggaaagtgtataagtagagactgctggatacatggctgggaaagaggaacgggagtttctaaaacctgctagaagaatcttgaagcttaacaaattacatgaaatgttgcagtaacaggaaaatagaagcagggaatgtttgcacatggggcagaaatctgagcctgagatagatcaaagaagttcaagtgtgcraagttcacataagtttagagactagatgtacttgtcacaacagcctaaagttatgtcaagcacaaaggttgattatccttgtcatttctcaactgaatgggatatccttttaagtaaaagttacaattttctatttaatcttctattttatatgaagacttactattatttctacttgtaaggacttacttgagtcataaatttagagaaggcaaagttatacatcagatgcttttcctttttccttttgttatataaagacagttttccagaagaaaaatctgttgtctgtcagcaagc

SEQ ID NO: 20656 - DNA, 600 bp, Bovine  MMBT04958
aagtattcrgagtatgcttaagtcttagcctgtaaaatatatctgcaactgaaatgttacctttttctgaatatcaaaaatctgtgtacaacttccaatctgatatggaatattgtacttcagatctcagtgagattatcttcaagtttactacttgttgaaatggtatttattgaaaattggacattctgtcacacacaatctaacttggtaacattagaagtgatgccaagtttcctacaagtcgtctctgtctccctgaaaaatttataaggggaatcctagcagagactggcagtrctaagatttaaatatttttcatgtacttaaactttaaaatttgtaaatttcactaatgaaagtaggtaagaaagtactgcatttagattaaaggacatgatgttaaaacttgccttacagtttttagtacatctcaagttggaataaatcaaaaaagataaaacttaatgagtctgctgttatttcttataagacacttgcttgtaaaaatttttctctgccttcatttatttttatgtttagtttaaaagctaaagccaagccaggaagaggaagacaagatgaggaaccccaaatcaa

SEQ ID NO: 20657 - DNA, 600 bp, Bovine  MMBT18575
catggaataaacaagatgaagaaatcattggttatcacttgataatgctatgcaatgttgaaaaattataccatttgttacactgaagtgtgtgctctttttaaggaagccaaactcttctgaaattattgaaactgtcccatctccactcctctgaatatcctattttgtggcacagatcaatacactgaagcttcatgattccctgaagggctgttaggacattggtagtgccacttctttatactcaaaacctcttgggggaaaactgctagatgtatcatctgcctagttctgctmtattcccttcttaaaccattgatctctgctcctaattctgcttcagcaggaatatctcttaaacagatgtcttctccattttctgtagacactccttaggtcttttgaacttaacagacttacaagtctttaatcctctattcaatttgttctaaaacctttgcttatgaatctatgtaaccagttttcaagacactttccttatttaaagaaatgtaaaaaacaaatccccaaattatccatgtaatatgaaaatgaagtatgattttgcatttaaaatgttttggtttgggttttaat

SEQ ID NO: 20658 - DNA, 455 bp, Bovine  MMBT19008
tccagtgaaatcatcatttctcagtgagaaataagcagtgcatttggattatttttgttacatttgaaaatttttttgagtgtggcccactagtatccacgcggaatgtggtaagaacagagtgctatagacacaaaagagaggacgtataagagggagaaaacagaggaaaattctactgccacctctttcccctctacacgatggcagatcttcagggtccaccacccaccaccaacaggaacaagttccaatgggctggctctgcatccatgtcccccagccccaccctctccacgmacacacctatcccacctttccaccttcctyatgattggctataggaaatcctggggtttcaagcttttctcaagctggtcctggcttcctcatccaacccattgaggggcctggcacctgagctgggtcctggagcaagggaatgaatgggttgg

SEQ ID NO: 20659 - DNA, 598 bp, Bovine  MMBT00511
  misc_feature (1)..(15): n is a, c, g, or t
nnnnnnnnnnnnnnnaggaagagataactccagatttttaagaatcagaaagcaattaactcagtggaaaccatttactgtaacttcttctccatcataatgcaagttataatcacattatggatctgtctacagaaagtcaaattccttaaagtaatgtcacttctgctgaatactacaggatcgatagagccaaacctcacacacagcaggaactcaataaatgtttcctggaggtaactgtgatggtggtacccggcatgataagcagaggatcgttaagataacatttatcccctrtcytttaactgatatagcctcttccctctgtttcaggagagggatctcttttgtgtttttcaaaagcatttccgagacaagtataaacagtgattacatttgccactgagtctaacacaacaactcagagtaagccaatgctgattattttgactggagccaaaagtccttaactgggggtgattctgcccccatgggatatctgacaatgtctattgccacaactggagggaagggctactggcactttatgggtagaggccagggacgcagttaaatacctgtaacatttaggaca

SEQ ID NO: 20660 - DNA, 600 bp, Bovine  MMBT13740
ttcctgaaacagtacttgaatatatctggccacataaaatcagtttcagagggaaaaaaagaaaaggtttttttttctaagtgtcaagaaatatatttcttatttgagatattttatagtaatattatgatacattttatcacatcaggaggtaaggtgtctttcaaatataaaaaacctccttaaaatgaaccacgtgccatgtaatgtattttgatgctacatttgcaaagcctgtctaatagtgtcaagaaatctaatattactgaaacagaatgcttgtaggaattatgagcttgratattaagtgctaagaactcttcagtttaatgaataaaagaattatcttgtcactaagagaataaattcaagccaataagcaccatacactgtaggtctgagtgaaaataattatttcctttgagaaaatcaaaatagatcctttaaaactgtaacctgcattagattttttttttttctaaatcctgcatggatttttttaaacacctttccaaagtagtctataatttagtttttatacagttatagtacaggtcattaaattaaccatcatttctgccagcacatgcattcagtaaa

SEQ ID NO: 20661 - DNA, 600 bp, Bovine  MMBT14912
tcttttgtaaatattaaacaagacttacaatttccaactcctctcaaataagaacaatgtatttttgtcttaaggatttctattggtaaaagtaagtagatcaaaccaataaaagaaaaggattaaattcctctgactcaaggtaatgcaactgttttcaatagcaagtgaattgagtttaattttgcttttgcagggggaatgatggcttctcagggaatttcaaccttttacaaaacaagtatagcacattcaacaaaaagaatatatacttatatctccttatttgagatttctgtrcatatcattaactccctagctgaaaatttttattttgtaatttcagaatcactgtacatagacgttaactctcatagcttttcagggctttattttcttatttttagagagcacataaaggaataaagatgaaatgaactaaagrtatgtycagagttcgtatcatgctgctgagagttgtacatattacttcttataattcagattaaatgtaaaaaaaaaaaaacttcctcataatgatttctttsatgtaaaaatattgataaaaaaagaagtactggatttcttgctctgaagtct

SEQ ID NO: 20662 - DNA, 602 bp, Bovine  MMBT12402
  misc_feature (1)..(2): n is a, c, g, or t
nntagatgacatattcagaagtgaaaattttaaaaatcttttgcctgcagagagaaatggacagcaacatattttatttcctttttttgttacttttactacacacacacacacacacacacacamatagaaatactatttctatttgcagagatagaaatgccagaatgagtagaaagtagagtcctgctgtcactgagagtacttgaatctctaattctgaatgagttatctgagggttgctggtaaataaaggaaaattcttgtcaatctttacttaatttgatgcacttacttatttrtatctctggagagaaactctctcaaaacagtggrccaataacatctataattaaaatactacacttaaagttttgctttcatttaagtcagacagatttattcttttaagtttcatatgaacacattaacatgaaatatatgcaacaaaatctgtgtaaggtgaatatatatatgagtttgagttttaaaaaaaatttgtcttggatctctatcatttctcaataattttttccatttttatgtggaaataaatcattgttcgttcacatttgagtatggtgaagtgtagtgacattcca

SEQ ID NO: 20663 - DNA, 600 bp, Bovine  MMBT02654
ggggctggagcctgagttagaagcatagttgacaaccatgacccgctgttagcatctggagttggaagagcggaggggaagtcttgcgagactaaacccttaacttgaaagccaaggcagggggtctttggaccctccagtccaaagccagatggtcagaagctcaggtgacaacctgggcctgggactggtgtctgaactgggagaggggcagtttggtgggactgagccctcgatattgtaatctgataccatccctgggtagatagtgtcagaacggagttgaattatagaacagamagctggtgtatggagaatgtcttgatgatgtagggaatacccccaccctggccacagacattggaaactggtattcagaacctaaaatatggatgagttggatagaagtggagagagggagaggagccatggatgcctcccagggcttgggtctgagctcttgcattggatagaatggtgcattttgtgctacgcaggggatgttaaaatcacattcaagtctgacttgaaacatttacaaattgggctgcacaccctctaagcgagtttatcatattaatgaactccttcccaaaataa

SEQ ID NO: 20664 - DNA, 600 bp, Bovine  MMBT22167
aaaagttgatttgaaagtggacatttgagatttagaaacttttcctccatgttttcagatacccagttaagacaaagctattacaagacacgcataaatcataattgctacccataactttgttaaaatttcctccagatgatttgacatagttaatggtaatatactgtaacaatgtttctcaaacttcagtcacttgagtgcatttttcagaagttagatcatacttacttatctattatttccttaatatagtcttgattcaactcaatgtaaaatgtattttaaactgtatattayttttgtaaatgaagaacacttttttctaatacgtattaagtgggtagctattcaaatatttgtgcttcctgagaggtctgtgataattagcaaagtaaaagttgctcagtcgtgtccaactctttgtgatcccatggactatacagtccatggaactctctaggccagaatacttgagtgagtagccttttccctctccaagggatcttcccaacccagggatcaaactcaggtctcctgcattgcaggtggattctttaccagctgagccacaagggaagcccaagaatactggagtgg

SEQ ID NO: 20665 - DNA, 600 bp, Bovine  MMBT15884
tgtcaactacatctattaaataaaagctgaaatctaaatgcattgtacaaaaaaagaggttaaaaaatgctaagtattttaccattgtgcatgctcagttgctaacttctgtcggactctgagaccccaaagactgtagccatcgaggggatggcctctgtccataggatttttcaggcaagaacactggggatactactccaggggatctccctaccccaaggagatgtctcttgtgactcctgcattgacaggaagatggattctttaccactagtgccacctgggaagccacatttyacccaaggtcatcctaattaaaagatgaactagaaataagaaatgaaatttagtaaacgtctgcctgactgggctcttaatattgcaaagtcttctaattggtattaatattacaacagagatgtcaattccagccttccatgctgcctagtacagattgcattttattagtctaaagacacaaatgatttgaagtgataattaaaatgtttctttagtcagtcctattttattccttgtcaactgattcaagatcacatgccattgtccagtgttacattccacactttaagcattttt

SEQ ID NO: 20666 - DNA, 600 bp, Bovine  MMBT16782
tccttactttgctccaggtgctctggccaccagaagtcagctccttccttttaggcaaaatccaaaaagtcacataaagtgtaactcctgcaaataaagaactaagcaggtccaagacctgtgtttcctgctagataattgccactcatatggcccaactctcctcaggttcaatatgggtgaactgaacccttcctgcaaacatagcctcctccctaccactatcccctgtctgtgtctgctagcaaaattctcattctccccagaggtaaccagaccctcagagatctcttgcctccyttctctcaactccactcctggtcaccaagtcctaaccagtctttcctgcttgctgctctcttcctctggccccagttctacaaacctcatacctggacaatgagacagcccctcactggcttccagccttcctctctctctgtctctctccctctggtccatagctggcccagagctcagtgagagcaaagccaccaaatcacctctctgatcacagcccattccacatgcccactgcgatgctggggtagacagtcacccataagcaaagtcatgtcctattaccctgtgatcaccagt

SEQ ID NO: 20667 - DNA, 598 bp, Bovine  MMBT03130
  misc_feature (1)..(39): n is a, c, g, or t
nnnnnnnnnnnnnnnnnnnnnnnnnnnnnnnnnnnnnnntgaacaagcttggggaatatcatcttaatgaaatgataaaactagaatcattagtaatgtgacaaatcagttacatgctctttgacaagatgcaatgagaagaatgcagcatcacttctatgctatgcctgagagaaataaaactggatactctccaaaaaaaamacaaaaacaattctgtaatccctcaaagtaccaagatcctgaaagtcaagaaaagaagaccaaagatagaggcaaactaaagagacacaactaaaygcagtgtgtaattctgaactggatcctttccttataaagacatcactgggacactgactgaaacctcagtgaaaggataagataggatggtattaatagcatatgtcagtattagtttcctgattttgatggttgctgtggttatacaggggaatatyctcatttgttaagagtacaatctagctttaaagtatgataggggcatcctgtcaaaacttactctcaaatgtttcagaaaaaaattgatttgttgtaacttttatgtaagttcaagatagaatcaacattttaaacttca

SEQ ID NO: 20668 - DNA, 600 bp, Bovine  MMBT04601
gtagtaaaggtctgaagaaggaaggagaaaggaatctcaactaaaggacagcccagagctagtttctggaacgtgttcagagcagtttttgacttgatctcaagtaagttcatcagagtaaatgttgaggggttcaagccttccttttatttttaggcaaaataaaaactcagccttcacagactattgtatattaaaaagtccttctaagaaggatactattcaggaacccctggaaatcgattttaaaaggttaattcttttcaatagtgcaccaactccctcctgctgtattttctktttgcttttgctttttcccccctgctttatagaaggtacatcmgagttgatgactttcttccatttcctgcttctctatgtatttgaaaattaattttgcctgtccctcccctcmgccttaagcagagtctctatttccaactaaagattttaattatttaaaggtcttagggagtttttattttctctatcatgaattgtcaaaagtcctttccttgaatcccaagtttctctttgtaacgcagatttaagcattttcattcctttagttccaccgagacctttagtaaatcttaatac

SEQ ID NO: 20669 - DNA, 600 bp, Bovine  MMBT06856
tcctccctcttgagtctccctcccttcccccatcccacctctcttggtcatcaccatagagttgtccttgaagcaccaaaggaaaagccttctgcagcctttaaaaaagcttttaagctttttttcctgaaggtcttcctgtgttgctgtgatttttctttaattgtgacaaaacttgcttgggataactttaaaacattaagctaccggcaacctacataagaaccaagatcacttctgatgttttaagaacatctttctctttaccagtcatccgtggaataatttacatcaaagaawtggccattttacaaaaacaaatcctcctaattcatgtgctgtgtaaggttcctacatcatgttgtgaatgccagattagtctctataaacctctgtctccttggctgtattccgaacttgattcatcattaatccatgccagagttttacaataataatacagtaaacacgattttgcatgttgactagcagtgtagagttgctgtgcctggtggtggtggcctttaaggaaggacgaggtaatatctttgaaaagaagaaagaaaaaaaccacctctgtaagtagttctaacatagttt

SEQ ID NO: 20670 - DNA, 600 bp, Bovine  MMBT08233
taaacacaatgcagttttctagaaattatactttgtcattaatttaaatttcaaggaggagctggtggaagtaaaaaaaaaaaaaagcaaaggaaaataaatacagttctctctgtaacagaattgtctttgtaatctctagtgtttggtgtgatataacaaacgaatttattatttctttagagagacgtgttcaagtggacaatgattcttcctcaatgaaaacttttaagaaatttgattgagatggaagaaataattctcttctatcagagggaattttgtaaccttatcaactcyctattttgtgactaaccaaaatccactgtacaatttaaaaaataagaacctattcattgctttgctcatttagcactataaccagcagaaattaagcctgtcaattataagcatatgaacagcttttattatcaaagagaatgacagaattctctactttaatgagtaatggctgaggccaaccgatacttcattcacagatgacaggacatcctattgttgatgctgtgtgtttcagcctggaagttatcacttatagatttactgtgcccctattataatgtaaaagtacaagtaaac

SEQ ID NO: 20671 - DNA, 544 bp, Bovine  MMBT07433
tattcccattgtttccctcccttctgaaattcttcagccttgccatcaaacatttttactatgctcactagaattatgcttttatgaaacattgatatgctaaagaatacaatttcaagctacctaaccattgcataaatacagcctggaaggagataccatagtgactcacataaagttaatgaaaaagaacgactaatgcatagcagagtgttagatggtctgtttttattaaatcaatattcgtgcataatttacagagtaaaatgtactacaaagtttatcatggataacgagagkcattcccttccccacacctctttccaccaaagtcctgctgcccagtggcaagagcttcagctttttagctgattctttcagtgcttgctttcatgttgcgaaatattataattaaattcagaccggatatatcaattctcttttaaaataggggaggatttaactctcttataccaataaatacacacacacacacacacacacacacacacacacacacacagttctctgttacccattatcc

SEQ ID NO: 20672 - DNA, 600 bp, Bovine  MMBT07042
agggataagcagagagcttcagatagagtcagttctaaattaatgcttgaaatattttttgaatgcatgagcacatgcctgatttcctgtcccaaatatattccagtgtaaccaaacaatagagctcttgaaaatcttcacaaattttaaaataagaaagctttcatatgtgacattatggtcaaatattccttctctgaagcaatagccttctttatatgcataataaataatcagacagaattctgccaatatcaactttatctagcttaatttttttttagtttttccaagcttctwtattaatctattttctagaataatatcccagatatagtttacaacccttttgttatactatttccatatcaagtcatggtattataattacattgtaagaaatatgatttcactggataaaacaaaattcatttgagyttgatggataaaactacagagctacttgcagaatcgattccatcccactggtatccaaaagtagttcagagggyacaccagaggcaactgataccttatcacaaatgaaaccctgtttctcttaatgcttacgacaaaactcactctcctgggcactcatgc

SEQ ID NO: 20673 - DNA, 515 bp, Bovine  MMBT14659
taagcataactgctacttacactggtgcatctgtagattgtgtttttgatgacacagacttattttgcctattctttcaaaacttcatactctttgttttcattattctttaaaaaacaaaaaaacatgtgstagaatgtttagagaaggcattcaaaattcaatgcaaaaaaaacaagagcaatataatttatcgtactgttggattcaacaaatttgtttagatgttccaaagcccatggacatgaatcaatactggattaaaagatcagaaatgttagcatatgcatactctactamtttgctagtgtttgaattaaatgagatcggagacaacacattattatagtctctgtgctctgaggttaggattgaagatgcctaatgatgcacttggacattactatgtattatgtgtgtatgtgcttaagttgctcagttgtgtctgactctttgtgactccatggaccatcagactcttttatccatgtattgagtgcttactaagtgccagg

SEQ ID NO: 20674 - DNA, 600 bp, Bovine  MMBT11144
ggckctggctgacagcccttggggaaaaccctctctgctacaggaaatatcagttatggttcagaaagaggcattatttcctttaagtcagtattgatcctccatcacattgtggttctaatgggcactgggttcttagaagtgccaattctcagatgaaatatgaaatagagctcctgccttttgtggtcaatggtgagcctgtggtagtttgacaggaggaagaatagagaactctggtgtcctaaattgactgcatctcttcagtcttcctgaaatttgatctctccttacagttcyttaccttttgctcttaactattactttgacctattaagcagctgtttggtttacccagtaataccatttctttggcaggagaaaaaatgacccataaatataattttaaagcactactgggcctacatgatagtaaagtgtgtgacaaatatatgtttttaatctatgcaataactgaagttactgctggccacctgcagcctttacccctgtggttttccttactattgatttactggtgctataaataattgtcttttctttgcttcatttttgctgtttattttactttttgtattg

SEQ ID NO: 20675 - DNA, 598 bp, Bovine  MMBT07889; identical to SEQ ID NO: 4610
  misc_feature (1)..(50): n is a, c, g, or t

SEQ ID NO: 20676 - DNA, 600 bp, Bovine  MMBT17213
tagaagctccgggatcgcggtcaggccctgagcccgctgtcctctccggtcgcgctgtacatagaaaccgttgctacgggctggaggatgccgtttcctttccgtctccggctgcaggtggcgcccagccttgtggatgctgggaagaacgtgcgaaggtggaagtcaaaacagtttttcccgttactagcgcattgcagtttgcgctggagatattactgacaaactgatgagtaaatgtgggaaatggatgtgagttaggatggtggagaagttaaccccaactaggaccacaatttycctaatcagagacaagttgcaagcagatgtggaagaattctaacgagcaaataaagtataacttgtgttttggagtttgagagttaacattaattgatcttgagaatgtgtatcctccccaccgcagtcctccaaaaaagttctcaaaaaagattctcagaaactttaaaacagggtttacgttgaaattctcttaattaggtaagagatgtctttatcatttctaacgtttttcactatgttttattcaaatcataaaacctcaggggtttcaagattcctttaattgaaggtaatcta

SEQ ID NO: 20677 - DNA, 600 bp, Bovine  MMBT20571
atttactttgttaggagtacactttttagagggccaagtcttaagaaaagtcagagttaggctttgttgagttttattgctgttatattagatttggtaatatactgtattaactgtgtgttcaatttaagctattaagttttaattgtcaaaaacagataaaatggaaaactaaaattttctttctccaaaattagrgaattcaaatatggtctaaaatgtattcatttgtcttatgcttttgttctctctctctgtctcttcaatgtaatataatatgcataaaacaccattttaacyctttagagacatacagttcggtggcctcaactacattcacattgttttgtaactatygccactgttcatctccaaaaggttttcatcatcccaaactgaaattctgcatccacaaaacagaaacaccccactctactcacccccgagctccaaataactgctaccctaccttctgcctttgtaaattaagatggaatttggctattctaggtacctcctgtaggtggaatcatatttgcacttttatgtctagctcatttcacttagcataatgtcttcaagtttcacccctgtagaata

SEQ ID NO: 20678 - DNA, 600 bp, Bovine  MMBT22432
caatattttgaagggtagacccacactttcttagtctcaatatgcaatctccacacccgccccctccaacagcatactttagttactgaaagtaatctctcaggaattctattcaaaatcttcaccttcaatggtttaattttctttctgactcaaatttttaaaaggaagtgtcaaaatataagaaaaaaattaaaacsatggaaataactccttttccccaaagtttttcactattattatactctaaaatggtaaaaaaaaaaaaaaaaagcgttcaaatttggcttactcttgtgrctgactttcatgggtctttctaaaaaaaattcttttcttaaaaatgcagagttaagaacttgcctcatggactaagttaaaaaagaccaaaggaaggtggcttcatartacattctgaagctggaaaggtaatgcaccctacagttagaggaggaagtactcaacttcacmcccaaatcaaactcagtcygggacactccagtattaacaatgagcactttccactgcagagattatctatatttggttcacatatactctgttcagaagtccatctcaatatcttttgataatttataa

SEQ ID NO: 20679 - DNA, 600 bp, Bovine  MMBT16739
tgtctaagactgctgataatgtactttttgatgacactgaaaacaagccaaatattcacaatataaaaccatgtgataatatacgtgtaatgtaactaaatttctccaaggttactagaaaattatacatatatttgggagataaagactttgaaagcaaacacgtgcaaccatttgagattccacagtcagtttgacataacatcatttacgaggaagaccaagaagatttttaaaaagggatacaaacaagcacaaacgttaaaacatttttaattcttagaaactcatgaaaatttyctgaaaattggcagctacagaatgatgtggttaacttggatgtgcgctttacaaataaatagcatttaccaacagtaaatgcattttaatgaaaaattacttgcacttatgaattaaggtttcataaaagaaatgttatctatagctgatttccctgattatgggcaagtttcaaatttaagaagtatttaaagttttaagaaggagaagaaaaaataaaacttaccacctcttctactaagtcttcaacaataagaccttgttcatctgttcttagatttgtaacccacatccatccat

SEQ ID NO: 20680 - DNA, 600 bp, Bovine  MMBT13546
cctgaccagcacacgggtaattctagaacctggagcagtgtgaccagtgctagcacgaaacctcaggcttgcatgacctctgtactatgtaatgtgtacatacgtgctatgcaccatgtacgggtcctgcccaggtaccgactctcagcttgcttcccagagaatgagcatttcctttctgtccaactttctcctgacttctagctatctgctttgactttccagagagaaataagtacagtctctatttcttcagcaactactctatgttaggtgcgttactcatatttgttatctcaytgaatcctcacaacatattggcaaggtgttatttctctaattttacagataagaggatcagaatggggtagcttgttttaaaccctacgtcggtaagctgcagatctcaaatttgaaaccagaatcatctgcttccaaaagttactttgaatctctctgggagcacccytggggaaactgtcctctcactgactctgtttctccatttctgaaccctgacttcactctccrccatctccatgagcctcctgtactgattagtaagatttataaacattcagcagccagttttgttaagag

SEQ ID NO: 20681 - DNA, 600 bp, Bovine  MMBT20216
atgatattgaaagaaacaaatctatgttaatacttctaggatcacaagagttaaataaaatttaactcttgtaaaatgtttacaacattttaaaatcatgcatagttgaaagcacacatttcttcatcttggcccccagaggagccagtgcagccaggaattagacagaaagagtgtgaagcagctaaggtggtggggggaagctgttttctgctgggagggaaggaaaggatctggggctttcaggagatataaaagtgtgacaggctgcaaggtggagggggaagaggagtggtgacygtgcctgaaataccgggggctgggatgcccctggggctggaggtgctctggtgataggcagtcagcatcctctggacctgatcagagggtgctcagtggttgcagataaataggacacccactcttcttctttctaaactgaaccaggagtgcagtctctggggaagagtcttcctttcttggcatactgaagtctccagcttgctcctctgtcccctgaagcttcctctcctcaggttttgcccccctcagctccatctttgtccttgcttggctcacctgtgtttgctcacctcagca

SEQ ID NO: 20682 - DNA, 600 bp, Bovine  MMBT00954
cgtaacgtatgactctggagaacacaaacaagtgctcaacgaacatgtctaatgggcctaatatgtgccaggcctattccagtggatggacaaagatacatatacaacactagcaccctcaagaagctcagccactggtaaagaaggcagacacaaggaggcaattcaacaggaaacactcagtggtaaaaccacgtgcgggttactaggggcacagggggcgggcatttcatggaaaaccgaccgagccactcttccattcgcaagataccttcgctctaaaatgagaaaagaatagaygatgcctagcccctctggacagtaaaagcctacaaccctgtgaatgtgagtactgacaaaaaagtcaagtctccaaacctcagctcatactattattgaagcacagtccctaaccgcacaccaaaatgctaccagactctgagtgacatggagggcctggcacctggcttacctctggtgtggcctgagcaactttgcagactgtttccattcctcccagcttccagtgcccatcttcrctcacaaacacagacgacacgcagacattgttgtgtgtgaggtgtccctgggaaaaaagaa

SEQ ID NO: 20683 - DNA, 600 bp, Bovine  MMBT15704
atatatactcacataatagcatatcatagggcttcccaggtggtgctagtggtaaagaatccgcctgttaatgcaggagatgtaagagacatgcatttgatccccgggtcgggaagagccctggagaagggaatrgtaacccatgccagtactcttgcctgagaacttcatggtcagaggggcctggtgggctatagtccttgggatcacgaaaagttggacatgactgaagtgacagctcaaacacacacatatactcatataatagcattataactgtagttcaatgttttgaataayacttttacagtagagattgacctttctgaaaatagcaatgggacaattgtacaggatagttttgcttacccaggttcgatgttcttcagaaataagactgcaacaacaaaggaaatcagaaggcctctgacacatggtgacagttctctttatgaactggaccatgttgacataatctttgaagtgcagagtatctgtgagatatcaagagaaactatcttcagatcttgttaatgaatgtaatctggatggtatagaaaaagattagatagaaaaccaagttggagaccttttataatg

SEQ ID NO: 20684 - DNA, 600 bp, Bovine  MMBT13179
ttttcaaaatacctaaactgaaggttaaaaagcatcaatgtttcagcggctaggttagatcctcatcagagaggtttggatttcttggaggattttcctaaccactttgcaatttccttcagtccactcactaaccttgaatcagacaatgtgtctgcacttaatggtcctttgacacacatatgctctacatttgagctggaaaggctataaatattttttccttgtcttgagccaaatatcttgcctactgtggatagctacagggtatttaaaacaataacaaaaatgttcatgtayttaactgagatatagcatgttaaaatatttacagttaatacaacaatgcttctgtacttgttttatgaacttggcctcaaaagagtaaggggaacaaagtgttaaacatgcatgagctattattgtatttgtctccctcaacaaggagtaatattgactataggacttgagaaactataactaatcccatgtctaagaagaaaaatctctacttatgtagaggccatgttcaaatgacccaaatgtcctcagaccccataaatcatgagataaaatgagtgaaaattaagtactattaac

SEQ ID NO: 20685 - DNA, 600 bp, Bovine  MMBT04900
tcatccacatttcaactctaattcaagtgccttttattctcaaatgctaaactagatgcatgggaaaaggagattctagaaaatgtagttgttggtctctcatttgtgatgcagagaaattaaatrtgggtagggatgatgcttaattgataacagacaatacagtatgagcatattttcatttctagtggtcatatggatattgtattttgtgttgtgtttgttgaattatcttgccaattatttgtctgctaatcttttttatttgtagataaaatgttttgatattcgagatacaarcctttcatgaatgataggttttacaaatagcttttcctattctgttgtttgccttttctctcttaatggtgtcttttaatgaatagaagttcttaattttaatgtactgcattttagcaattctttccattattgctagtgkccatyatgagccatttaacaaatctttctctatcatttgtccaaactttttaaaaattgaaaataaaagattctatttttaggtatgtgtcttgtaaacagtcttttgttattttatttccctctccttccctgagtagcttggtatttttatgctgc

SEQ ID NO: 20686 - DNA, 600 bp, Bovine  MMBT07638
aaatcagtgaaaatttgctggacagtatctttaagtgtactgtcaagacttaaaaatgcatttctctgtatgttcatgtttgttcacacacatatggagaaatttggggagtgctttcactagcacttagctttttcacctgatatttggggacatatttgagacagattaccaagtactatttgcaaaaggagtttgaagaggtccatattttatttaaaggaaaaaaaatctgaactttcaatcatataatttcaacttaaaattctttgactatgggagttgtatccayagagcaamaagtacagtgctaggcatatggatatgagccatatamataaaattgctattttcataatctttactttcgacttgggttcatctttgacctataaagggaaggaccatctttttggcatcttgkgaccagacagttgtgaatgggttgaaaaaacaggatgacttgtttatgggtctcctattttcaaacacatgaactgtaattgacttctgagcaatttctaagtataaagtgcattctttaagataggtgtctgaacttcattgaactctgactggcttaagctgtaagggaggttt

SEQ ID NO: 20687 - DNA, 600 bp, Bovine  MMBT05943
catttttatttcatctaatgaagacaagaaaaggatgtaggagtatataaaaaagtctttgactttctacctctgtataagaaaaagatgcttcatagtatttattcatttgcatggrtgtctctgagtgaatttcaatgcaaaattaatgagtgttgaattatctgtcaggtacagaggatcatactgattattttatataaccaaaaactatcagactaaagctgaaaatactataattatatatacctctctactgaagactaytcaaaacttattttgcattttaatcaattacayagttgaaggaagtctttcattgttctttcacaacatttttttaacttaaagacatttttattatttgaataaatgtgaagactgactcatatgaatgggtctctggattatagtctgtcatttcctagcctaataaggatctcaatacatttgctacttaaatttttctaaaataatttttctaattatatactgtggccagtccaattattgaatcactctttttttataataaaaaagggtaattgttccattgaatcattttgaatataaatcaaataaataaatatcaaataaata

SEQ ID NO: 20688 - DNA, 600 bp, Bovine  MMBT07123
ctcaattatacaaatacaaaaatctaaataaaatggtagtcaaatgttaagagcaaggacttttaaagatgcatcatggggacttgcctggtggtccagtggataagactcgatgctcccaatgcagggctgggttcagttcttgtttggagaaccaagagcccacataccacaaccaagcctgcacaccacaagttgagagcctgcatgccacaatgaagacccaaagcagccgaaaaaaaagtcttaaataataaagacatcatctttcttgaatatgcatcaaaatgataaaggatrggcgttgggacatatagaagaccagattgtgagstgaaaaatcattaaagctgggttatgagtacagagaagtttgttttgtaccattttgtctctttttgtatatgttttaaattcacataataaaaagttgggggttttttttgtaatgcattgtggccaatcagtatttaccccaggggaacttctttgtgtaacactctagggtgtcctatgtaaacttcttctgccttctctggaaaaatacaaaattatcacgatacttttatccgaaagcagctttgtttttagaggatttga

SEQ ID NO: 20689 - DNA, 600 bp, Bovine  MMBT11785
tctataaataattaagagctggtcttgggtcttattttatgatcaaaaatctgaatcattatgaaattaaaagtccctttgcaagttgtgttttcatttggcctttaataagtaactttcaaatgtcttctttttgtaaaaaaaaaaaaatcatatcataggttagaaaagggttctactgagcgatatttttttttccatgtgagcactatcattaagacaattatcactgatcaccttttaatgatatttcaaaaccacttgaaaaaaaattttaaagggtcacataaagctacatarcttatgaagctgaacagcacaaatgggacttttgcatttgttcagacatgtaccaggttttagttcctacaggctcacagacggttttctccttagcagtttgccaaatgtattttagaatgtccaaaatttaaaatgttgatgtatgtgaaccaactacataatgaaagaatccatgtaccattaaaatgataatgtgagtcactcctcagttccctcaaatatgttaagtgcaaataactagaccccagggagaggatcagaaaggtaaacaggtattattttgagtaaaaaagctag

SEQ ID NO: 20690 - DNA, 598 bp, Bovine  MMBT06487
  misc_feature (1)..(40): n is a, c, g, or t
nnnnnnnnnnnnnnnnnnnnnnnnnnnnnnnnnnnnnnnntaaatgagatgctggaagtactcagtatcaataatggccattattattgaaatcattattgctgacaagctagaatggaacaaaggtggaaaccaaaggaaagcagttcatcctctgaaactctcagaggctaaaatcgtagaacatagtacattttggttttatttttaagattggtattaagtgataaacatttcagttttaattgacagcattttcttctcaatatcctcaatattatacaaattaatagttctctytttccccataattgagcataatgagtgtttccagtatttgcttctacacataatgctataattagtgtctctgtatatatagcattgcctttgtttcttctgtttaattatttcctaaggaaagaattcttgggatgttatttatgctttgcaaacttgctgagcaaatttccatgccacacatatttttactacaattactcttggatttgatgttcgcatttccttttaatttgctgaggatttaatagcatgaaaatgatgccccaaagttggttttttttttttttttatttcc

SEQ ID NO: 20691 - DNA, 600 bp, Bovine  MMBT08419
ttatacacatagagatgggttgtatattttattttccctcacttgctaatattttataaaatcccaaatgaaaaaaatacatatctaaagttatttataataacaaacatgccattactgaaaaaatgctctagggtaattattgtatacatatcaaactgactgaattcaatattaagaagatatttacatatattctctctctctttttttttcttttttttctctctctcttttaaagcatcttttccatgtctatacttaccataacaaaagatgaagagaatacatgtgagattmttttaatcattatctactagtcattttgataatatttagttatcctcaaatataaaastaatgttaataaataagcaaaataaaaaattcatttatcaaatgcatgttcattcaacttgcattgcacaaataatctaagttactgttagatttaattctgaagccgtgatttgcaggagtcttgttttcatggtcaaggtgacttctggatacactgagcgaatccttacacagaactgcaccaaagagaaaacaacatgtgtcaaccctgtgggtggaggtgacacacaatttaaaatg

SEQ ID NO: 20692 - DNA, 600 bp, Bovine  MMBT12250
tgtcgtgacccagcgtgttattttaaaagtgagttatattaccacctcacccacttaaaaaataaaatttaaagaacattaatgtttttagtcgatattaaaaattatcacttataaatgtgatatatgtgctatgaaaattaagaaaggagaggaaggagataggaaatacgtgctcactgggagataaggaactaacacaactatctgaggcacaaaaacataggcccagactccagacttgagaagcagaacagggccatgctggcaggctttcctctgtctacaactctaaatccygrccttttcattcagataggagattcattccaactgctttcaagcgggtatcataaagataaaatcaccaggtagtatctrgggcttggattgcaagtctgagaatcctgttttgggatagagcaactaaagacttgaaaaatgaggctgatttttgttactgacaggcaaaaattagaattttcatcaattagcataaaccagaaggcattaggttgaggaacaagggttagtcacccccttgtcagtgtccrtgatacctttcattaacagatacgtcaatagtggtgtcctctggct

SEQ ID NO: 20693 - DNA, 600 bp, Bovine  MMBT06011
gttaagatgtcaataacagttatcctgttttaaccaacaaggtagcatgacagaaagaaaggggaaggtggatgggtgtcctcagataagtacaacaaagaacattttttcccaacaattttcacctttccagaaactagggagatcaataaagcaccaatcaattcttttaagaaaggcaaaataaagtataaaccttaaactccctcttacaagaaaaggagggggtggtgaaaacaagttgagagagaagacttkattcagtaagtggtgcggacattgaaatgactggttaactcyctataagaaacagttaagcccaaaccaaaataaatcccatacataataaagagttacatttaacacatacagatagagaggagagatatacagacagatgtctagggatgagggcttccctgggggctcggatagtgaaatggccacccataccaggatcctcatctggagaattccatggacaggggagcctggggcctacagtccactaggccacaaagagtcggacacaactgagtgactaacacttttcacttcacaactatggataaatgaaaaaaatatatatttgaatataaa

SEQ ID NO: 20694 - DNA, 600 bp, Bovine  MMBT21292
tggtgaagaacacaacagcccagagtttgccactcaacatgctcagtagatattatgttttgttgtcgttgttgttgtttttaggaaagaatggtgggcatcctgatgaacctatttagaagggtgggcagaaagaaaatggaataaagtctgcctcaattctcagtctataattctgacagctggaagttagtatgcaaggaagatgaatacaaacacccaacagcctagctctaaaagcaaactggtagacgatgtaaagtaagaattctggtagtcctgttagaggcaccactgtcrtcttacccaccttctgggtcattttgacagcaactaagcactaagaaagggaggttttgcccatgaatgatagagagcattcccttttccagggactgaaataaaaagacaataatccgagcctgaagcctgatacgtctgtctgggttatatcccagtgtgaagaggggacaatgggttggacctggcacatgctctcacgctgagactgtaagccaggaatatttttcctagaaagcaacccagtggggagcctctgtgagaaagtgaaatataaattattcatttccttttctttgt

SEQ ID NO: 20695 - DNA, 600 bp, Bovine  MMBT08553
gcctgctttgctgctcaattccctgttggttgctttaaagccaacaaaggttgatacccttggacagagagagaacagttacaatgctaaaattagggtgggaatttgactctgacattgttcaatgtttgccattcactctaggaaaactttgtatctcttgccatctgtcaacctagtagtgacaggtgtttttttttacttaattaatttttgtctgtgtgccaatatttgatgttcataggaatttttctgcaggataagtgaaaactcatattttgtagcattggtttgcatttrttattaaccgttctgattttgtggtgccaggcagatcctgtaggctctaaatgcagttaggatggtgagaacctttctgaggatgtaagttggcttttcaatggagtgggtctccgtttagggtcgtgactccaggcggtgatcttgagctggagtgctgaggactgcctttttccttactcattaactcagtcctgtcctgcttcacaggagtgccgctcctgtgttttcattaaattgacccagagggtaccccccccacacacacacccacagttatctccctgtctttctcttctg

SEQ ID NO: 20696 - DNA, 600 bp, Bovine  MMBT06390
ggggaaaagagtttgaattaatcaatttgaaccatagaggaaattatgatggcaattaatataaatgagaatattacacactcattggttcctatagacctttcaggctcttttctcctcttacttgttatgagatttcaaggttttttcccccagactcttggctttgctgcttgagtggcccgtctttattcctctcctccaaatcctcctgattgttcaaaggactccttaatgttcaagagagtgactgaacagttcttagtatttaaaatgatgtaaagccatcttcttttcgtraatastcagtaagggctagtatgtttggtttttgtattctctccaaccaccttagcaaatactctggggttggttgrttggatttttaatgtgagatatccagagtgggatctcttcagggaatgtttgctgctacccagcgtctgcagctcccatgacacactctcctcacacatactcacacacacacacttacaatttattcctctccccccactccatacctattatgaacagtggttgtcacacagacgtacacacgcacacacactccctcctccacttctctcattcacactc

SEQ ID NO: 20697 - DNA, 598 bp, Bovine  MMBT16474
  misc_feature (1)..(220): n is a, c, g, or t
nnnnnnnnnnnnnnnnnnnnnnnnnnnnnnnnnnnnnnnnnnnnnnnnnnnnnnnnnnnnnnnnnnnnnnnnnnnnnnnnnnnnnnnnnnnnnnnnnnnnnnnnnnnnnnnnnnnnnnnnnnnnnnnnnnnnnnnnnnnnnnnnnnnnnnnnnnnnnnnnnnnnnnnnnnnnnnnnnnnnnnnnnnnnnnnnnnnnnnnnnnnnnnnnnnnnnnnnnnnnaggcatatataagccaaccctgtctaggattgtgttagctgtgctgccaatttaatcaccactgcacacttgagtggytrctattagccccattttgtagatggggctgctgaggcccactgaggttaagcatgtgaactggtttgcatagtttgtgtctracagggccaggacttaatgctgacttaagaccaycttaatgcaaccttaatacaaactaagaaaactgtaagggagtagaggtagatttgaaaaagagagtactattacttgtaccaggatgggatagataacacatagtgttccagagtaagaaagttgcttgtttgttctttgtttagtaggttgccaaatatgccaactgtcacaaaggggtca

SEQ ID NO: 20698 - DNA, 600 bp, Bovine  MMBT01707
tgctgggacttaactttgacaagtaagtgtcaagtgacaatcattagcaaattgattcaaaccagatgcagatctcagattcttgccaaaatataatgatgctaattagatccttgacttttccttcatccaatatttaagtctaggaaagcttttattgagcagaggaggtttttttttttttttaagagatctgataaaatctaatgtggatgggtttacatcagatcctggtagagctatagggagggaaaaaaaccttctgaaataagtgacttcagtcagaagcttcagcccagrcatgtttttggaagaaagctgttagaaggacaatgtgtctcatcactgcttctccctaaagtccatktttaattattgatgtcactctttccttccctctctgcccaaacaaatataacatttaaacattaaagaggctacagagtcaatgactgaatggaataaagaatgaatggtttaaagaagcagatctctaaacccggttaccacctaagctctgacttactccatcactttcctcataggcaggatttgggggactttgtcatggcagaacactattcaccccattcaagccag

SEQ ID NO: 20699 - DNA, 600 bp, Bovine  MMBT06565
ctggtgggctgcagtccacggggtcgataagagtccaacacgactgagcgacttcactttcacttttcactttcatgcattggagaaggaaatggcaacccactccagtgttcttgcctggagaatcccagggacgggggagcctcgcgggctgccgtctatggggttgcacagagttggacacaactgaagcaactaagcagtagcagcagcagagctaggttacctggtcccaaattcccacacttgtaacttgctagctctgtgacctgttgatacgcctctgtctgcctcagtttyctcatctgtaaagtgggaacgaytgtagcaccttatctcaccgacttgttggggattcaataagctcatgtttgtgaagtgcttagggtcccctcragatatcacagtgatcttagtgatgactyaggaaagagaaagatgcaggagagagctggaggcactgagtttctgaagtcacagactgagacaagcgcgagccagcacgtgatggcggtagaggtggaagcagggtggaggctggcccctaccccggcatcatgggcgtcagtcgagcccactttgcagaaggcatttggctct

SEQ ID NO: 20700 - DNA, 600 bp, Bovine  MMBT20675
cagggaaagtaagcaatgaattaaaatgcttgtttgtttctctacaagtttatggtatagagtcatattaactctcaaatcacaactcagtttgaaagttttttccttttgtttatagtttcttctttgaacttaaatttcagttggtagaaaggggttaaaaacctgagcaattcccacttgatatctgggaaagaaacaagtacgagtccttgcagagacagaaaacagagggtttggatgtcaattttggtcacctagcgagaatgtctttgtgggtgtttttgagatggtaagaayactctggatgcatgaaatgacacctctgtgcccctgctgctaggtgtcccgtggcctgaccctacaagatgccaagagaagaggctcacttcttctatggttcccccaggaaagggcacagccactcttatgtcacggctgaagagtaagttcaaatccagacccagcggggttacagttttgctgtttgctgacacagcctctggcttccaccagcacgtctgtccgtaaatctctctagtgtttatttctccagaaataaacctggcaaagagggaaggagaccctgaggtcctacaa

SEQ ID NO: 20701 - DNA, 600 bp, Bovine  MMBT02371
aaattactttttaagttggttactttaagtgaaattaaagtaaattctgcctcatccgagattatcttctgttaaccttgcttttactttcatgtaatagttttcaaagaagcattaaaggatatggggaagacataggatttacaacaaaaagttctgggatccaacaaaatgaaatttacttaacttttctttttctaaggagataaaattttacagcctcttatatgcctatagagagttgaagccaaaggtagtatgatctaggtcagaaaaattacatgtttcttaagtgttatygctataataattctgtgttaaaatatttttcctttggaatatagaatgatatatcaactttcttcctcctctacttgtttttaattgttatttcattaggctattcattcaattgattggcatcatgagggcaaacaattcatgtgcagccattcagatggtagcttgactttatggaacctgaaaagcccaagtcgtcctttccagaccacagttccacatggtaagatatatgctttcaaaagaaagaaactctggagatgcagtgccactacttgaactaggaaagttggtatcagt

SEQ ID NO: 20702 - DNA, 598 bp, Bovine  MMBT02458
  misc_feature (1)..(142): n is a, c, g, or t
nnnnnnnnnnnnnnnnnnnnnnnnnnnnnnnnnnnnnnnnnnnnnnnnnnnnnnnnnnnnnnnnnnnnnnnnnnnnnnnnnnnnnnnnnnnnnnnnnnnnnnnnnnnnnnnnnnnnnnnnnnnnnnnnnnnnnnnnnnnnnnatttcatatttcattttagatcaaagacgtcaattcctttctgccaaagacaacctgcaacatatctataattgaaaaagtttgatttatttcttgttgcatttacatgagaatgcttattatggggaattctattataggatttgtgttttggctgwgttattttggagcaggwctaaggaagcagggctttggatgttgtcatcaaacagacattagtctatgattgggtacttctttcagtctcatctgtaaagaaagcagactggagctagaatgaagtcgtagttgattttttaaaaagagcagcaatcactcrtactagacaggagagaaggaagtttggtattgtgtagattacaygatgaccttaagttgtatcactttatcatacactcaagagtgactttatgttgctgttctgtgaaatggtrtatgttyaataagagaacaaca

SEQ ID NO: 20703 - DNA, 598 bp, Bovine  MMBT20680
  misc_feature (1)..(6): n is a, c, g, or t
nnnnnngatagtggcgtggtccacgttgagtactgtgataagggctatgatactattgaccacagagtcaccaaggaggggaaggtcagctggacttgggaaggtgagggaaggcttccaggaggagggggagatttcactgagtcttagaggaggagtaagaatgcaagagcagaaggaagtgaaagcatgttagcatgcatagcaggagaagcaggtacggggcttggcagcatgacataactattctctgagctctgagatgtggactcagctactggcttagccaccaactttgayaagatatttgatttgctgagtctcctcttccccatgtgtctcttcactggagacatatattcctgtcctctctctcattggaccataatgaaagttgaatgatatcatgagtaaaaatgctatttgaaaaaaaaaaaaaaaaaatgaagagataatgtcatctgtgaacctgtttctctctcccatttacaggcttgcaatccactccattgtaattctcccactgatatatttcataattgtacgaaagaaccctttccagttcgccatgggaatggcccaggctcttctgacagct

SEQ ID NO: 20704 - DNA, 600 bp, Bovine  MMBT15347
atttttcattttacttacgtcatcagccytaatgtacgaaacaggtaaggaccacttttttgaaaaaatgttttccaatatgtttactagtatcaaatcagcaacctgattttcttctgattctcattatgtgtaggttttagagaggagcagacaggtctacacgggttgcatttattccactcacctccaccagcagcaggtaagggcacaggcagtccatgacagctgtgggccacgtttcagtcctcatcttaaaccyccagcagcacatgactctggcaactgtttccttctctkaaataactttccccctttactctgcctggtcagtccttcatttctgcaggcttatccttgcttgtctrttcccactcagtatccacctgcctattgacatctctttccacttaggtgtctcagatattcttcacattcagcgtgtccaaaactggattcatttgttcttgaagagcratagccaggaagtagtttcatcaaagtctccccgtcagtaggacttaaggtcttcacagaagcacttgcctttatctggactgcttgtctccttccccaggaccaggaattgtctattagggg

SEQ ID NO: 20705 - DNA, 600 bp, Bovine  MMBT03952
atcactcaaagtttcaggccatcagaatgtgacctctccagtccttgtgcttcctacattgtgcaacactggttggtacaaggaaaatgccaatagaatcctaactggctctcaatacaagtggagtgatcaccatgcaaatcattaatccagactcatatcgtttattttaaataaaagagcattaacaagcctcttttatttgaaattccctttgtgtacgtgtgcctgtcatttaaaagtatgaccaggtgtgactcttaagcatttttgttagtagtataaactcctgctacattwgcagcttcttcctgacattagcatttcagttgaatggtaatcattaaatcaattttaacagaagcattgagagcattctttgattgcaatttttaagaaggtgctgtagggacttccctggtggtccactggttaagaatcaactttccaatgcaggggacgtgggtttgatccctggtcagggaactaaggttgcatataccatggggaactcagcttgcgagtcacgactattgagcccgtacataaataaaaggcgtggtacacatgaatatttcccttgtaatactgaaaactagt

SEQ ID NO: 20706 - DNA, 600 bp, Bovine  MMBT22564
ctgaagaaggtgttcccggaatctcaccggtgtctctgaagcagcggcttcccctcgaatttggccgacaccacgaggactcggaagctggacgcgcaacggttgggagtcgtgtcctccacttcctatggrgcagaatggcgtggatggtgccaagtccgccccccaggagccctgttcccctcgttggacgagctcaggccgctcaactcaccacgtgctccgcttccaggtcccgctgcagcttctcccggaggtactcggcactgagttccattgtggcagcccagggagggtggmagcccaccggggatgggaccccagttctgaccscagccacactgcttccgcccttactggcgccacttccgctgaggcacctacttccgcccttactaagacgtccgtaaactcagcacttccgccctatcccaagcccagttttccractgccttcggttkccgctcctgtcagagtcagyatgaggctccagcagactctaatcggtacccgccgcctgaacagcaacccgggttctgtgcgctggtttggacaccctagctccaactaggagagggtgcacgrgtttgcaytgctgt

SEQ ID NO: 20707 - DNA, 600 bp, Bovine  MMBT02985
taccccacattctcttaggggggaaagtattatggggtttttaacttctaagtcagctgccagaaatatgtagacaggaccttaacttactatctcttccaggaagatctctctttttaggaaagtcagagttgaaccattctttccttcttctgtgacatcagggagagacatttttgtccagaccctgagtgaagaccactggcaacctctgtaattccagaagatagcaagaatgcgctccaaaacaagggtcacatttctctctcctctctcaattcccaagtgcaaagagttttygttccaggttcttgttgctggccgtgtcacgtgtggaattgttgtcttcctaatgagactgtcacttttgagagtaggtccaaggccgctattcrcttgcctccttagcaggacctaaatctgtgctgggcccagagtaagtgcttaataaagacatcctaacttggatcatagatcacagactgtcagagctggaaaggattttggaaaccaccaagtccaacactctaattttatagatggtaccactccaaaaattcactttggaggctggtgtttatctgctgggaagagagtttc

SEQ ID NO: 20708 - DNA, 600 bp, Bovine  MMBT07387
tactacccccaaattgataccacatatgtgatgttattcaggcaaattatctttatcccagctccaatataaggattatctaaaaagtctctcccttacagaaatatttctggagtatatcttcagccctacagactctgattcttatgccgttactttggcaagcctgatgaaagggggtttattctttctttgcaagtttactttcatttagatgagcttggactaacaagtaaatcagaagcatcagcagtccctaacttgagacagtaactagtacatattttttatgttgtgcaytcagttccaagtgtaatatggctcatcaaagggacaccggacagcaattttagacaccaaggcttacaattagactttttaaaaacaggttgccaaatgagcacgttgaacaaaaattcatttctttctgaaatacaagtcctttaatcagagagtgccatgctatgcatcattcttttcattgaaaccttctggtgccagaatcctgtttgcagtaaacactcgagtgtgatagaagtacattccatcttcctgttaaggtttccatcctcaaatgtgactgtatatatacttttggct

SEQ ID NO: 20709 - DNA, 598 bp, Bovine  MMBT03519
  misc_feature (1)..(156): n is a, c, g, or t
nnnnnnnnnnnnnnnnnnnnnnnnnnnnnnnnnnnnnnnnnnnnnnnnnnnnnnnnnnnnnnnnnnnnnnnnnnnnnnnnnnnnnnnnnnnnnnnnnnnnnnnnnnnnnnnnnnnnnnnnnnnnnnnnnnnnnnnnnnnnnnnnnnnnnnnnnnnntaattagcctccaattaaaataaattttaaaaaaagacaaaaaattttaataaaataaatcttctcaaacttcaaaaaaaaaaaaaaagaaacaactatatgatggaaaagtatacagaatgataagggttttgagatcttaartaaaatgtragatcttaaaaaaattcacagcctttacttttaaattaatctgataaatgttagcagttaaaaaatcaaataggatggggaacacatgtatacctgtggcagattcatgttgatatatggcaaaaccaatacaatattgtaaagttaaaaaataaaataaaataaattttaaaaaatcaaataggaataaaggtttataatgaaatgtagcarttctctgtcccctggtcatctatccgtagtcctgatctacaaaagcawcttgttttaaaacttttagatctatctt

SEQ ID NO: 20710 - DNA, 600 bp, Bovine  MMBT05241
acaaaaggagagttttcatgtcaatataatgtctttttaaataagtaaagggatatttgcatgttttttatgattatcacttaagacttggttcacataatctcagagttgactgaacactcccctctgacctcttcctcctcagggatcaactcaggtttaatagaagcttttgtttctatctatgcctttgacagctgggagattagcagggacttggctaattagaatttaactgtttgctaatgttccagtaggtttgtcgatcacaatctagtttaaaatggattcgaagttttmaaaatcttgaaaaaaaaatgctgtgtcagaactgatttaatttcttgaaaggattcaaacaagaatcagatctatctttatgatcttttcagtcacattccctaacaaaaccatgttttgaattggaaataagccacaatcctctttagacacgaaggctatcgaatgagagtggagtgaattgaagagcctccatggaaacatgagctttcatgagygcccatygacagcagccccacaatgacatgctcccatgcttcccaggtggcctaggagacatatgaggagacaagtctcatt

SEQ ID NO: 20711 - DNA, 600 bp, Bovine  MMBT04295
ttgcctggagaatcccagggacgggggagcctggtgggctgccgtctatggggtcgcacagagtcagacacgactgaagcgacttagcagcagcagcagcaktatacatgagaatatgagatgcatattttgtatgcatttgaaaacaggactagacctatgtatattaaaaagatgaggcagaaacaataaagtggtcatagtccagtgttggagcaataaatgatttgctgcttgtttgtgttcttcagtacattttttataacagtattttttacttgtagaatgaaaaagactctwgactcttcctacattcatctttattccaactttggaattattagtctattttggaataggttcctaagacagttattattttaatagcttcagaatctttcacaatattgagaaggttctctatatacacatacacacgcatatatgtacatacacactcacacttctttccaaatgcttctctcagcatgcaagtttgccgactttagagattagcctgcttacagattctctaagacatatgcattttattgtaactgaggtccttaccggctactggtcggggttttttggtaagac

SEQ ID NO: 20712 - DNA, 600 bp, Bovine  MMBT05291
attccctcatttaaggaaagctaagggaagcaggaacccatttaaaaagaagtcgtcttcatgtctgtctttgctccatagttgctagtcttctgaacaccttctgtggcacccgattcccaaaataagcctagggttgtccactatgggtaactgaataaattactgcctaagtttataactaactggcttttctcaacaaagcataataaaatagaaattaaataacttgaaaaatataaggaagtttagtaaatcagttagagaaaaaggggctcagatggcatataattaaaagayaaatagaaaaataaaggaaacatggagaaaacyatgttatatgtagattataagtcatgcatacgtggatgagaatgccaacaggaacaggctctctgtctgtaacacaggcccgaataatcctcaggagcccgtaccctttgtgacacttacgtgggctgctttatttaatctcccaacactccaggtccttggtcctgagaccatgccatggtagagatgtgggcactgaggcttgagcacaagtctaagccatgtgcccagagacaacaaggctggcgggtggggaacctaggggcc

SEQ ID NO: 20713 - DNA, 600 bp, Bovine  MMBT09959
gtgttacatgtggtagagggggctgagtgttcttcctgctttttacgaattcaaaatacaatgatggaagacaaaagtagtacagtgcaagatttgcctcacagatagtaggcacttaataaaaatttagtaaattgggggagcaaaatctagtaaaaatccaattctctcccctcacggacaaccagtgttacatttcttatatcctggctatatattttagtcctaacagtagggatgatcataccatctaccatagggacattgaggattaaactaaaatgccttagcgtaccattyctggaacatagagctcgtaaatctaatatagtaccaactgtggcctgatagataaattggttgccttcctttttatgctaataattgccctcttttttccctccaggtgtagatgtcagtatgaacacacatcttaaagcagtgaaaatgaccctgaagaacagagaacctgtacagctggaaacactgagtattcgaggaaataacattcggtattttattctgccagacagcttacctctggatacgctactcgtggatgtggaaccaaaggtgaagtctaagaaaagggaagctggt

SEQ ID NO: 20714 - DNA, 600 bp, Bovine  MMBT18353
agaggctatgtgtggtatttctagcatcttcctgattcacatcactttaaaacaggatactttaagtataaaatgtttaaaaataagatcacataagaaggttgattcacctgttcaaaaatccaacattaaaaaattgggggcagggaacctagtatctatgaagatgttaccttggatacagaatttctgagctgggagggatgttaacatataaccatcttgtttaactccttgattttagaaataaaaaactgaggccaaaggcactgagaaagttgatcaagatcactccttccrgcttataatacagaagggctacaacccaggtccactggctattgcacaccacctttactttgtaacgaatctgaactgagtacagaatctgaactaagaaatgcttcactttaaagccaggttctgacaccttatttctgtaaccctggacaggtgctctaacctttcaaaaactagtttttctcacttataaaatgaggtcaataacagcacctatttcatacaagctgttgcaagaatactgaaagcactgaacactgggcacatgaaaagtgatcgacccatctttccatctttcca

SEQ ID NO: 20715 - DNA, 600 bp, Bovine  MMBT05718; identical to SEQ ID NO: 4690

SEQ ID NO: 20716 - DNA, 600 bp, Bovine  MMBT07107
tttaatgatagaaattatcatagttgggacctccccgctcagagatgtcatctatacagaacataggcagtttggaagtgactactagtgcccatcagatttttgccccccaaaacctctttttccatgtgctttctccttcatttcttgactatgccctgtgcccaggtctagcaccattgtatccccaactgtgaatctttgctaaagtcttaaatctctcagggcctcagtttactcatttgtaaaatttactcagtgcccattctatmttaacaaattaaaaataggcttacatcwtatgttgcyctgagtctaacycaattttgtcttttaaaaaagtaacaagttggcagtctctgatgtgaaagaataccatcaaagagtcactctgcttccctagaccacacctcagcctgaaggctgggaaaggggttccgaggactgtcctgcgcaaaggcattttcaatgtatttcatgctatcaatgaagtatgcagtgcacacctgcctcttaggattatttctcaggttacagggaagctcagaaaattgctatttcttgacctaaaaggaggttaaaacgctttcagtggaaatc

SEQ ID NO: 20717 - DNA, 598 bp, Bovine  MMBT09414
  misc_feature (1)..(23): n is a, c, g, or t
nnnnnnnnnnnnnnnnnnnnnnnctctccttttgccttaagcaatctgctgtactgacaggggttggtcctgcctgtctttttttttttttaatcccttgctggcactggaaaaacctgcaaaggccccaagaagaggacagaatttccccctcagctcattttcataagaaacacgataaataatacatggcactttaataagaccttatctgaatggtttaatgaaaaacaaatacattatgtaaggaaccaataactgctctcagctgcactgagccaacactggtttgcccgtccrtttttctccsgaaagttgaaaactctccgtggtgattggattcctacagaccctttttgcaataatggctcccagtttcccccttagacttaggtctcgcagccgggggaactggaagccggcaaagggaaaccgtagaatccagaccatataaacgcgtctcaagatgatccggggccaggctgcattccctggataaccaagtcagaacgttcctgcgcaagtgcatgcaaacaaattcatgcaaacctgactacgcacacagccaagtacacagcccatcaacacagatacaaga

SEQ ID NO: 20718 - DNA, 601 bp, Bovine  MMBT04371
  misc_feature (1)..(1): n is a, c, g, or t
natatgagaagcaaaaattggtgartggaggggtagaaccaaagagccttgtagaagctctatctcagacattagtattgggagaggatagaaaaacaaggcgcaacagtaattaatttgtagagkttaagttccaagtacatygcttacrgttatgacacactggtctggaatgtgcacagaacacattgcacactctaaccaggttctctggagtgaaatgyaggaggaaaaaaatttttttaatgctcagctgatctaaagtgagtgcagctaagatacactattccagggtcttctsagatacagcagggaacaagcaagaggactataaattaaaaacacacagagacatttgaacatacagttatatttgaggaatgcattcatatagccagatgcacaattgcattagcttattctttggtcataatgcaccagaagtcctcaagatttctgaaagagttgattctatgtccctcaacatacccttgtaagtaaatgggagacaagtaggrcaacttgtactaaacacttttaaacacgcatggttagtktatgtttccaaattaacatccaaccatgtagatacataaatcca

SEQ ID NO: 20719 - DNA, 600 bp, Bovine  MMBT14115
tcagggacactggagagtatgaggatgaatctgagggaccaggtcatctcccagacccacccagcttgggtgcaattgagagcctgattaacgagaattgcatttctcttagtttcttctccactaggagcagcattctgagccatcccttggaagcatcagactaatctttttatagaatctactctgatttatttttggccctgagacctaccccctcaactcaggaagcttcacacagatatttgagatcaaagtgtccagaataattttggctctgtagtgaggtggttctgaagygaaatccctgtttgtagtcagagccagcctcatgttcgggcagaacccaccattgcttatgcgatggaacatgaagggcagtgaaaagaactttaaattccactggaatgtatttctctcataagtgcttaaaagttacatcagttgagagtaagagtatagttggatgaggtagcatgacttatcttcagcttttttaagacaaaaatccaaaaggaattttttcataattgctatggattagtgctaggttgttttcctcccagggaaagtctgaggtgaaatggacactgggatcaa

SEQ ID NO: 20720 - DNA, 600 bp, Bovine  MMBT06089
ggagacaatctcagaggagcacgtgcgacctgtggccagatgggccagatggggcggcaaagtgagcggccttcaacatgcattttgcctctagcagcctcccgtaataacagtaataataatgcacatcctctggtatttctagagggccgtgtttgaccacggggatgtctaggctactgagatgtgcctgacaactttacagagacttgctctgccttgatcctgttggcctcgggtctctttattctctgaggtggaatatcctctaaatcttagcactgaagaaactgggctgtstttctgagccccagagaccaggctcctaaaatagtacgttatgtaagtgctgtgttttgccactgcacaagaaattgttctagataaagtttattaaacgtggcaagagaaagaagaataggttttcattctgagtggtggagctgggatcctgccagcaccattgacggtgtctggggaaagccaagggagacacagacaggggctgccttgtctcttttcccaaaaatgcaaagaaaactaaatatagccgagtggaaggcatagcaccctggaagatactgaaaggtttaagttatt

SEQ ID NO: 20721 - DNA, 600 bp, Bovine  MMBT09834
ggcttaggacttaggacttagtaggcttaggactccttcagatattccctgtccggccacctcgttacccctgcctgccaatcagttttgcatcaataaactttatgttccaggctttgtgagatgaatgaaaggcaagcagctgaagtgtgatctctgaccttggcacgtaaacagcctacagattggacttgacagttaataaaggaaaggccttgcgattctctgatgcctttttgccttgattagattaagcattcataagctttggggaaatcgtcaactggaagaggaagaccycatgagacagtaattcacatctctactcstacaaccgttcagactgtcagcccttcagtcaataggcaccgacactggtgctgtcctattacctgagctcagctctgtgctaacctctctccagcacaggggcctcgaaaattcccgaagcccacactgtgccctcctggaagacagcgtccagtttggcagtcaggagcactcactttggttcagacaaatctgaacttgaaccctaattctgcctggtgacctttggcaaattatttaacctgtgtgccctcagtttcctcttggggt

SEQ ID NO: 20722 - DNA, 598 bp, Bovine  MMBT10620
  misc_feature (1)..(28): n is a, c, g, or t
nnnnnnnnnnnnnnnnnnnnnnnnnnnncttttaaaaattgaatattttccctgaatggaggggagagcatattggatttgactgtagtctatttttcttgagggtgaagtcatttttcttgagttgtgtaggagctgctgcagctttaaatcagagatttggtggcagagctgggcacatatgggccataaaatacccagattggagctgattgggatatcaaatggtgggaagacgacccggggtgacaagagaataggtttaccttgtctgaggaaaggagatgttgtttctcttcygtgtaggatgacttattaatgagaacacctgcaaatctgtggcttgtggaagacaatgactggaagaaaccttactttcaaggacaagtmagaagcttctttctttccttttttgtttttttaagagaaagcaggtaaattagaccttttgtagttgttcagtcataagtcacgtctgactgtttgcgacccccatggactgcagcacgccaggctcctctgtcttccaccgtctcctggagtttgttcagactcatgtccatcgagtcggtgatgccatccgaccatctcatcctct

SEQ ID NO: 20723 - DNA, 600 bp, Bovine  MMBT16614
ttaatctccactgtttttatttggttactaggtatttagcacagccccgttttgtggaaggctggccaaaagcacacttcaaattaatggtagtcaaagcttgctctactgaatctatattggagcatgagcaagaggttcattggttctaagttgttttatagggcttttttgtttttgttttaacaatctgcctcagcagtatatacagtataaagttataaatacagcacccgtgctaaggaataaattccacatttggtcaaaaatcaaattgttaggataaaagtcctaactttmgttaacattaagtcaaatatcagacgtgtcctcattcattcaacatgtatttattgagcacctactattaagtaaattaccagtcactgatgcacaatagcaaacatactaaatgaaagtctatcaatttgtgggtccatttttgtgaggagaaagagcacatcaacaaaataagttaaaatgtaatatattagatgacaataacagaggaggagcaaaataaagcagagaaggaaaaaaggcctagagagtaggccataggttaaatacaggtggccagggagagcttaccaaaaaggt

SEQ ID NO: 20724 - DNA, 601 bp, Bovine  MMBT04122
  misc_feature (1)..(1): n is a, c, g, or t
ncatgtaccatcaggcgcatgtatctggaaatcaccagggcagcaaaagtaattgccatccatagagaaaggaaaagcaaatcaaaaacaccagggatggtatggggaaggaggagggaggcagcttcaggatggggaacacgtgtacacctgtggcggattcatgttgatgtayggcaaaccaatacaataatgtaaagtaattaacctccaattaaaataaataaatttatattaaaaaaaaammccaacatttgtccaccgtcaatgctagatctctcaggtaagcatatttagaccstctttgcttattgygatagttaatgagaaatcttcwgttgccgtttttcctttgggtaattgtgtgtggtgtcttgtcctgctttttcttctcattgtcccattgtttaggttcgtgttacaaacataaaagttgttgaaggcatatcacctactacattccttctttatttttcccttcatcgtagccccttccaacatgtgtggcctttacacattacttttttccctaaaactatttttgattgtcatgtagatgtatagcatgaatatcagcacatgttccccaaagatggatttt

SEQ ID NO: 20725 - DNA, 600 bp, Bovine  MMBT14160
tccgcacaagtcatgaagaagtctgagcctcaagtttaccctgtgtaggctagaaggtgattatccagtattggagaggtgttaacctcctcagagcctttctccgaggattacagtctacaaatgagttgcctttttaactttcaattaatttctgcaccccatccccaccccagtcccgggagtgctatggacgctgagattttgccacactgacttttttaacatgacacccaagaagtgatcattaatatcagggtagacagcacataagcctcggctcccgccctgagagcccgygcccaccaacctgcccttccccaggtgtttcctgttgaatgagattgagaaggaggaaaaggagaagctctggtattactcgcagttgcaggggctatctaagcgcttggatgaactcccgcacgtggagacggtgagctccctgggttgccccggggtcgacagggccccgcctatggcgggaggcatagagcggaggtggaggcctctccctctcccgggagccccctcaccggggcccgtccgctcctcccagcagttctcaatgcagatggatctgatccggcagcagctggaatt

SEQ ID NO: 20726 - DNA, 600 bp, Bovine  MMBT09570
ctccagcttttagaatctgtcagataataaagatctgaaaaggtgaggtatgggagaggtcacagtgaccttcaggtctcaaggcaggataaatggacctggatggaaggaccggaagagaaatccagtctcagaaggaagatgggaaattcggttacagacacaggtactgagcccataaatacagaagctagacactgagtcactaagttagaaatgccagagttttgaggaatttcgctgtaatgagtaaaatctccagggcctgacatttctacccactgttttccctactcaacygaacaggtggaaggagaatgtgtgaagctgcctgtttcatagcgccaggaggctcgccctccacctgtggccggcccccgcgtctcacctggtagaggaatctttggctgaagtgctgcatggcgccctggagctggttgcgttgggactgccactgctcgtagttccgcacgtactcggctgtggggcgctgccatgtggtggtccgggtattgtggtccacgtagtagaacctgcctcgggggtctgtgcgtttctcccagctgaaaacatcaagctccgagtgaacacggtgaccac

SEQ ID NO: 20727 - DNA, 600 bp, Bovine  MMBT17098
gtggataagactaaggatgccaggggcaccaaagaggatggggaaaacgctttagctttttcaacagtcaaatatcagcaagcacacagacaaaggtcaggtcataatagccatgagacggtagaagggctttgggccacccactcctttcagtgggcagtattctctttgagccctttgtgcttttggatatcaccagcgggccagaaacatgatcaggaagaaaagtggctggggaaacaagagttaaaaaagaaaagggaaagcacctttagaagatgtgaaacaacaggaagaggrtactggtgagaaatgaacagaaacgtgactgagagagtaagtgatgaggacgttaccaacaaatgtctcaggcagcccagtgagtggatttcctcccccatctaaagcataaccaaccaaccaacctttgttcctgctccctrtgtgcagtcttcaagtcatgaccttgagtggrctcacctgcttattccaacatgaaacagttctgcagttccttattcaaaggggatattgcagaagggaaattctaaaatatccacccctttaactcaattcctatagggtcaaaaatgtcaatag

SEQ ID NO: 20728 - DNA, 600 bp, Bovine  MMBT09553
aaggagaaatggcagcttacttggatctactagactgtctatttttagtggcctaaagacaatcccctccacgaccccgctggattacaatgcaaacagaattagcctcccgaccttctcttccaggtcagctcatcaccaggtcacttctgcagccacatcccctcaaaccccatagcctcctacaaggacgacttctaacacatttgaactgaacgtgagtggatggatttatttcagccattttctgcctttctaattgtttctcctgaagaagtttgaagaccaagttggctttcytaagtactcagctttcactgtttattgctttggttgttttggctgccagttaaaatgctacccattttcagaaatgaggaaaatgcttctggcaattaggaaggatgcttgcttctaatggcattttaacattctaaattattaaaaatagagaaaaggaccaaaaaattctgatattggccagttctcggcttctctgtgaatgtttcaagtgttccttttttcattaaggaaacagagcacttgagcttttaacaagctggctgatatggaataactgacttgaagtacaggaccttc

SEQ ID NO: 20729 - DNA, 598 bp, Bovine  MMBT09995
  misc_feature (1)..(67): n is a, c, g, or t
nnnnnnnnnnnnnnnnnnnnnnnnnnnnnnnnnnnnnnnnnnnnnnnnnnnnnnnnnnnnnnnnnnntgtgctttgcaggattctaatgcacaattaatctcttactctagcatgacaaattacttccaccttctaaaaatagttttaaatccctacagtaaatcccaaatatcaaattagcatatataataatcccagaatcaagttatatggtcttaaactagattcatttttctaccaaaaaatacaagatcatagtagcatgatagaaattaagtctcacaaattatttcagttgmgaaagtgcgttatcccaggaaatgtaatgttgaggtaaaaggcatgttgctcatcataagaattgctctaaattttaattcctgctctgccacaaggcaccagaggcttcaatttaattcaaataaaagatagggacattaaacaatgatatacagagctgtgcaagtgaaatttctaatgatacacaggagtaagcactcctttcaaatcagagtattgattcctgatgcactataaatggtcatcaaaatattctctccatttcacagacagcaatttccctataatacatacgta

SEQ ID NO: 20730 - DNA, 600 bp, Bovine  MMBT19677
gactgttcctacacaggaaataacagcactctgtcaaaatctacaggagaaacacgtgttcaaatttgctgtcagggcctcgcatatctgatcggagagcgagaggggacaaaattacaggagtcgtgtaatctctgcgcaggacagcatccatggctcccggggtcagcaggaagtgagcagtgactcaaggctctggctgaatgcagcgttttttgccaataaacatatatatgtccaataaaatgggcatgtgtacattatgcgtagtcgctcagacgtgtcygacttttgcaaccycatggactgcagcacgccaggctcctctgtccatggaatttcccaggagagaatactggagtgggttgccacttcctactccaggggatcttcccagccccagagaccgaactcccacctcttgtgtctcctgcaatggcaggctgattgtttatcaccagcgccatctgggaggcccgcatgaatacgctacacgtgtgttaaaattccacgttgattctgaataacaagatttctcgtggaccctatgttgtcaacattttttttacccgagaagtaacaaagatgtgcactttatgt

SEQ ID NO: 20731 - DNA, 600 bp, Bovine  MMBT11635
ctttcaaaatgttctgataaagtggcttagcagcaggacttytgccattgactcaaactaaagcaaagaactctgaaaagtgcaattgttctgtgagagtcctccataggaagtagaaatgaacaatgtgttgaaatgtaaatttccttcagattcttccaaatcctsctctacagggatttcatttttcaaagcaatcttctatatttactactccacttgttaaattttaactccctgggccaagatttgtaaatgatcagagaactgtcaccacagggctaattcaggcatcttccygcccttgttacattctacctctttcaacctaatactaagagactgtatttgcaaagtggtgtggaagagactgtaaaatgcagctattaaaatatttccaatgatttgctaatataaaaagttaagaactagagccattttttagaaagatagaagccaaggatgcattctattgtaggtcattatcttcagcctccacagcccagtgtatttataaagataaaataaacttgtgaagcgattttgtatttgagaataatttaaaaagcaaattcataaggattctggcttattctccac

SEQ ID NO: 20732 - DNA, 600 bp, Bovine  MMBT03586
agagactcatctcacctggaatgcctcctctatgttcacctcatcttagctacaccttatccttctttttcaggctgaccagattctctcctcttctacaaagtgttcctttcacagttcaatccagagtgatttttcaacagtgaaatcttagcactaccagtctattttcctcttaaagcaatcaactgtattctgtactgtgatatttaatagagtgggggattttattcacctgaatttgagaaaagctgttttttaatgataagcagctagagcagggaactgaaagaacgtccytagggctctccagtgggaaacgtcatgtgctgtgagtgtgagaagaggagcaaagaactcaagtggagaaggagaaaaggatggaggaaaatacggtagtgaggagactttgtgggtagtgatagaagagctgccatgcagtgaaatcctagagtgaatctgaaatatcggaataagatacttaggaaattttataatgtactgtattatctaatcatctgtgctatttctacaagcaaattcctgaaagaacagcactacttttcaaggctatcaaaatgagatgtgtttctaatgcac

SEQ ID NO: 20733 - DNA, 600 bp, Bovine  MMBT04644
catagggcaaggcatacccagtcctgagttgctttcattttctaggaacggtctggttgccatgacacagaaagaggcaggagtagatagagatctctttgtccttcactctaaggatgatccaagttagaagggcggtattttcttgattcaggtggctgggaggcaagcaggtagggccattcctgccataagcgcctgttgaatcctaggaccagaaacagggcctgtggtgtggagtatcttgttgagacaaggcagagctctcgataaagaaaacaaatacttgggcagaatttytaagccataaaaatagcatttttttccagttctaaaaattatgtctttaatcattgttttaacaaggctaatgaattggtaagtagccaaaaaccagagctaagtttggtgttgtttaatgaaaaagaacatttttgtgtagaaagtgcaagtcaatggattttgtgctgtaaagatttcctttctactctcagcctaacctttgggtctaagccacccaaagatactcccgttttcacagtggcaattaaccccaggtgcaaggatcggtattctaaagaaaatcaacttgctaagctc

SEQ ID NO: 20734 - DNA, 600 bp, Bovine  MMBT06057
catttgtaaaggcaactatcaccaagttctctgatatcaagttgcgcttaattgccacaggcaaccagttacattcatctgccattccacaatttaatatatcctggaagtagtgatctcactacatttgggccarttaggatatccccaggggaactgaatgctgtactttttctttcttacgtctaatacttgcactttcaagtttttaatccaagttatgaacttgccagagttgtgtttccaagatttcagcacttcctgtattattcagatggaaaccatcttaaatctacagarggtaagtttagactaacaatgactctttgaaataaccagaacatgtatccacacaggctccatttctccttttctatttgtggattgcccccacccctcaacccaccctagccaaggacaatttccaaggcctattgactcatgcctatttcctcccatttttatttcctttgcttgtaaattgaaacagtgtttcctaattctttatggtttcaaataatttacccattaatagtttcatttaatcctccccaagtcaaatttatagtgaatggtttattctttttttttttttttttt

SEQ ID NO: 20735 - DNA, 600 bp, Bovine  MMBT05549
gtggcccactcttcatccaagttatccaatttggctttggaatgtgtggggctctcattctgttcttctttgggtggtgttcttgtggcaagaatcacataatccttttgtgaggaacacttgaaaacaaattagaaaagcttactagagggaaatgtcaccgaggaatgcaaagccttcatgatatgcaaaaactgagcaatattcatagcagcttaaattgtcaatacctgtattataatggaatgaatctacagggaaaccaatgttgatggacagccctacaatatttccctcacrtgttatctttcaatmtatttaataccagctccttattcatttggcatcatgaatatgcatcatgcagtgggcctttaaaatggtttactagatgaccgaaagaactgcatcttaaaaacgtatttatatatttctggctgcgttgggtcttctctgctgcgcgtgggctttctctagctacatgcacaggcttctctcactgtgtagcacgagctccagagcagaggctcagcagtcatggcacacaggtttagttgctctgtgacatgtgcgatcttccgggaccagggatcaaacccc

SEQ ID NO: 20736 - DNA, 600 bp, Bovine  MMBT22423
atcttcacagaagttagatttaccttctttccattcacccccctaccccgccaaaaaaaaacaaaaaaaattcatatctgtacttgaggaaatctggcccttggaggttggtgttgctgttgtgaaaagacaaacctcaggatggttttcatatcatttctttataaagaaggatactgttggccaatacacccgtttgtgtgttcagcaaactaagagcctgttaagtgccactcgttgttcttgacaggcaacacacctggatgtgtgttatcacagataaattctgggcagcacacrggggctggaagagctgagaaaagctgctrggtgaaggtaacatttgagttagagcttgtgtgtgtgtgctaagtcacttcgattgtgtccgactcccatggactgtagcccaccgggctcctctgtctatatcgaattccccaggcaagagtactggagtatgttgccatttctcactcgggatcttcckgacccaggragtgaacctgtcttacatctcctgcattggcaggtgggttctttaccactagtgccacctgggagagcttgtgagttttgattaaatgaccgtccaggctg

SEQ ID NO: 20737 - DNA, 600 bp, Bovine  MMBT22427
tccattcacccccctaccccgccaaaaaaaaacaaaaaaaattcatatctgtacttgaggaaatctggcccttggaggttggtgttgctgttgtgaaaagacaaacctcaggatggttttcatatcatttctttataaagaaggatactgttggccaatacacccgtttgtgtgttcagcaaactaagagcctgttaagtgccactcgttgttcttgacaggcaacacacctggatgtgtgttatcacagataaattctgggcagcacacrggggctggaagagctgagaaaagctgctrggtgaaggtaacatttgagttagagcttgtgtgtgtgtgctaagtcacttcgattgtgtccgactcccatggactgtagcccaccgggctcctctgtctatatcgaattccccaggcaagagtactggagtatgttgccatttctcactcgggatcttcckgacccaggragtgaacctgtcttacatctcctgcattggcaggtgggttctttaccactagtgccacctgggagagcttgtgagttttgattaaatgaccgtccaggctgcaccactaaagccagctgtgagtgctttt

SEQ ID NO: 20738 - DNA, 598 bp, Bovine  MMBT11496
  misc_feature (1)..(58): n is a, c, g, or t
nnnnnnnnnnnnnnnnnnnnnnnnnnnnnnnnnnnnnnnnnnnnnnnnnnnnnnnnnntttaaggtgcttgcgggagccatgccatccgtttgtggtgagccgaattagagccagattagagcggggttctgggttcccggctgcggttggctctccatggtgctccttccagccgaccatgtctcatcacctccgggctcgcttgctttgaggcattgaaatctattttcagacacgattacaaagaacactcggagcttcactctctccatagtcaagtttgtaagcaggagctttcytatcaacatttaggttcaagttgaaaaaattaagactcctgaagaccacattggtgctgtacttgaacgagcaaaaccagagtatatcagcaagacgtacaagattaattcttgggagaacgctgaggactttctggagaagctagctttccggacagggaagttattaaaggtgagccaaggtttgtgagaattcagactgggacctgcttcaggcctgtgtgcacaatgtgtggtgtggacctttttttttttttttggtacatgtgtgtgagcagtgtgaagtatgaaccttggc

SEQ ID NO: 20739 - DNA, 600 bp, Bovine  MMBT12085
ccaaatacggttcagcaatgaggaccagtatagaatgaaaaaaaaaaaattgggtgttttccttttttaatttttgtttctgtgaaaaacatcattaaaatagttaatattcacaggcagtatctgaggcaagagtaagtgtgtcaccctttgcagaaacatggagcatgtacaagtataatgttgcttttttttttagaatcgtgtgatatatttgaacatatagcagctataagaaaaaaatgctgccagtatgttggtaatggttgggaggatggttagatggctgcatrttgaatwaagcagaatcaaggtccagaagaacaaggctgaactgccacacacatccttactacctcctgcgtaccttgactccaagtattattgctccagtaacaccccaaaacttacagtgttctgaacttgatagtgtcttggggtatctgtayctttttttgacactgtaattcttgattgaccattagaattttctgcagtgtctcatatggtagctgctaaccatatgtggccaccgagcacctgaaacgtggcttacgcagcctgggaactgaacgtttcattttattgatttattatgta

SEQ ID NO: 20740 - DNA, 600 bp, Bovine  MMBT04247
aaaagatgcaacaaaattaacaaaatgaggaaaactggcaaaagcactaagagaaaatatgggctgtaataagaataacaaaaggagtggggcagggtgggggctggagatgcattgggtctgactgaatcagaaaagatttcctgaagaggggacatttacgctaaaatctaaaaacgatgcaatgcttagattgacaggcatttggggaatatgatcctctgaagcagtaaagagcttgccttgttaaggagttgaaacaagaccaggatggctgaggcctagcagacaggccatgawaaaacrtgagggtttttcctagagcattgagaagcaattgaagatagttagagaaatgatttacatggcctagttacatctggtatatttttcttagttcctaaagcaaagtaattaaatattgctaacttaaattttatttgccctgaagttttccatgatgcatttgaaataaagttttcaccaaccttcattgtttgaacatgttaatgctacagcgaaacttgatttgcttgactgtcttccaaagatcagtccttactgatctctcataaaactcagaaccacttaagcatccta

SEQ ID NO: 20741 - DNA, 600 bp, Bovine  MMBT20613
aaaagccttgaaagacaaaatgtactttagctggacatattattaacacacttccagagaaatatacttcaattaacaacaaaaaaaatttacagcagagaaacattcaaaaattatctgacctattttcatgcttttctaatatattacaaagtatttcctatatgacttttatttcccctctagtacctaggaaaagaatagtaggtgtgaatgtgtacttatgacttaaagggttaatgtggctctgtaaggtgaataaatggcctgaacaaatcgcctatagcattttcctaacakcaccagggcaacattctgcttcagtggtttaaatgtaccctagtggtttaaaacataattgcayttctctgaacacctaattgactacaagggactgacttaggtactttgaatacaattttattactttaattattgttcagtgaggtgttccaaagttttaaaacaaactgaaattttgttcctaagtaaagagaaaaacaatgctatctaagtttgcttttttaaaaataaaattccaactttacattagaacaagtggaaaattttaagtgaatttcagtgaactaatctttattg

SEQ ID NO: 20742 - DNA, 600 bp, Bovine  MMBT05757
aactcatttgatcttacatatcttactttaaaaagcttcccaggaaatgtcttttattttttatttcttattatattttgttattttactataacaattgggtcatcttgaagatcatgaatgatttgaagaaacagttaaacactgagataaataatttttatccaacccttgtrtcccaggagtgggaggaaggacaacaaatcagaaaatagtttatattattattcagtgagaactaaygcaaattgagatccatttaatttaaaatactttcatgtgaaagataaactgagagaygaaagagtaattttacaaacactgatgacaaatggtgttgtaattagaaagaacatgtgtatcaaaaaatgtttcttctctaaatcattttgaatgtactaatgacattggaaccatgtattaaatactggaaaaaattggaaataattacatgaagagcaaaatgaggctgtatgtatacagggattcccccaccccccsccccccgccttttttttagttatttattttggygacttaattttataagaatttaggagaggtaatgaaaagaaggagaactgagaatgttatttatat

SEQ ID NO: 20743 - DNA, 600 bp, Bovine  MMBT06000
atctttcattccataattagagacaaaaggcttaaaatacacaggcctgactatggttaggcatttacagaaactcattcacactcaagtgtcatcagtcaatcaatcagttagcatctataaatggcagacattagatctcttcctttttgatgagcatgtgtagggggaaagatagtagaaagacacttcgaaaaatcgatgcttctgcatatgtgggtggaattaccattgagacaaagaaagaggaacataaatggaaggttgagaacctcgaagacaacactgaagtcttcacakattcactcactttctcattgccagactgaaggcagaattcagtccagttcaattccacctttaggacataggtttcaaagaatataatctatagatgcttaatcagtgatgtgattacgtttgaagaacagagtgtcacactacagattttgtgtagaagagacaacagacatctttagcttactctttgacatctgaatgcacaggtgggaggcagcttttcatgtggtatggagtctgagggtgtcatgcactgaagaatggggttggacctatggttaccaggatctttgaatggct

SEQ ID NO: 20744 - DNA, 600 bp, Bovine  MMBT07770
gcccagtcctatttcatccatggtctgtccttcatggagtcctctgtcctccttactatggcttttgaccgctacattgccatttgcaacccactacgctattcctccatcctaactaatgacaaaatcatgaagattggggtggcaatcttatgtaggagttctatgctcatacctccagtcattattcgcctaaagttcttaaattattgtcacccccacatcctttctcactctttctgcctgcaccaagacttaattcgaatggcctgttcagacattcgcttcaatagcatctayggtctggccctggtgatcagcaacttgttgttggatgcagtgctcatcattatctcctatatcatgatcttgcatgcagtcttagcaattgcatcacgagaagagagaatcaagtctttgcagacctgtgtatctcacatctgtgctgttttggttttctacatcccaatcattggtctgaccatggttcatcgttttggcagacacctctcaccctgggttcatgttctcatgggcaatgtctatatccttttcccgcccttgatgaaccccattatttatagtatcaagactcagcaa

SEQ ID NO: 20745 - DNA, 600 bp, Bovine  MMBT00643
agatgaaatcaaatatctactgggatttgcatttataatctagatgtgtcacactcttttctctaatcaaaattagattctgacatgctttcaaatgtgtcagtgaaagacaaacattggtacgctgtttctaaaagtatatttggtcatacatgtttggtgtcatgtcaacactttctttagaaatggccacgtttgtcaagtgattgaaaatgacatgcaaattcaatattttctacatccccagtgtacatttttcagtattcaatttttaaaaaatatcttatccattaatccttygaatttatgtccttatgagggtccatggagtaaatggttcacttctttggattaattattttaaactttaaatttgttattatactaataatatccagtgtataaaaaatgagtggaaaaagagaaaaagtatatagcatagagaagataaaaatcactggtattcctacatttcttaaaaattgctaaaacttcagtatatgttcctccagattgttcctatatgttcccatagatatgtatgtattaaaaaaatcatattatacatatatattacctggttttaatttttatattcta

SEQ ID NO: 20746 - DNA, 600 bp, Bovine  MMBT15951
tgcctttacttatgtgactacatgtcatctcacttttctgagctgatccctttgtgtggtaacacatatacattttctagtacaggttctgacacagtaaacactcaataaatggtatgagaacaaatagataaattgcaattagagaaaraagttcacctttttatattgaaattttcactttatgctgagtatatttaatttggaactccttcatagattagatttatctagttttctctcttaacctcagaaagcatgatatctaatgctcaatgtaattatatgaaaatgacattygtgtccaaatgagacagaacaatttagacgagcattyggtagcagtgttttccacagttcttaagaaatctgttgttgaaaaaatgtcagggcaaagtrgaagtctaacaggagctgtgtaatcagcaattatttagatggattacttttcaaagaaacttactgtatacctgtggcggattcatttctatatttggmaaaaccaatacaatattgtaaagtttaaaaaaaaaaaaaaaagaaacttactgtaatggaacaaacagctgcctattaaaaataaagaccacagaaacagaa

SEQ ID NO: 20747 - DNA, 600 bp, Bovine  MMBT19043
atacagtaacatgaaataatgttttgttacttcatgctgctgtaatttccatacagcaaatgtatggaaaacttcaaaaataatcactgttaggtttaaacaaccaaatcaaagccaaccatttgataaaattcaatactttgcttctttgctatagagtaaaaagctttagaatctgaacatgattagtcatttcaactcctattgtagtatatgaaaacagcaagaaagtttgtttacatgtgttattctgagggaaggtcatactatgacataatctgataatgttgaaatgcaaakgcttcatttggacattattttaattcataggaaggtgaactaagttgtcaaatatttccttctctcttactcctaaaataacacaaaaaatgtggtaaccaaaaactcattcatatttaatcattccagaagtaactctatttcaagggaaaatagtttcagaattcacactgcaaaatagatccaaatttatacctggtccagcatttttttttccaactcagactctaaagaaataagcaagtaacagtaatatttataactgtgacagcattccttttccaccaagtcaaatttctg

SEQ ID NO: 20748 - DNA, 600 bp, Bovine  MMBT06192
tttcccattgtaacatagcaacttgatttcattgccgttcctctgtcatatgtacaaagggagatgtcaaatatcccaaaagagaatattccagaaggtgcagaggtggtctttagttagcctatgagtttgcagacctagagacaaaaggtaactacttcatgttttatgggagttgtatctaaaacttgattagatttaggttaaacaattttrgcaagaatacttcatgacaccacgtgttttatttgcatcccatcaggagacagtgtatcaccagagatggagagggcccccagygctcactggagttttcattcattgctattctctgcaacagcattggagagctgacaaagtagaaaaatcattttatttgatgggttactagtaacataaactgtattaatttatgtgaactgtttactattctttcctaatcagagaacagattatgaaaatgtgaagtaaaattcgctcagtcgagtccaactctttgccaccccacggactataaccctccaggctcctctgtccatgggattctccaggcaagaatactggagtgggttgccatttcctcctccaggggatcttccc

SEQ ID NO: 20749 - DNA, 598 bp, Bovine  MMBT08430
  misc_feature (1)..(109): n is a, c, g, or t
nnnnnnnnnnnnnnnnnnnnnnnnnnnnnnnnnnnnnnnnnnnnnnnnnnnnnnnnnnnnnnnnnnnnnnnnnnnnnnnnnnnnnnnnnnnnnnnnnnnnnnnnnnnnnccaagctcctctgcccatggagttttccagacaagaatactggagtgggttgccatttcctatgctaagggtatgtttcagcaattagggggtccaagagtgaatgggctggctagtaccagcaccatccagtccaggggaccagcttgagtataagatgctatgagacatcagggcaatgatgtcatccrgctgtgttatggttgctccctgaagcaaagacartgctgtttagtactatttcattctgtgaaaagtattggaaaagaaagttcaggctaaccagaaggattcaacattatctttttctctgaggggtgaatttgaactgcgtatggacaataagaaaattctcataaaatacattacatatttcatgttacccagggaaagctaaaccaaataaatctttcctcacagaaccaatttctccttcataacttgtttatatagttctaggttcatttttcctttgatttctctaagagg

SEQ ID NO: 20750 - DNA, 600 bp, Bovine  MMBT05778
aatgaacataaagtgataatatagagacatagaaactcaatataattctctatattagggtctattttacaaaagatttggcatttgagcagggcataaatagaatgttgtctgtgatatagtaatgaaattattttgtacctgggacagaattattattatttatttttatgtacaaagttttcatttttaatatctggttaaaatatgtattttgtaagcaaacccattacaggccaacaaaaaggaataaaagcaagaagaataaaaagcctacaattaccccttactgagcataarggtcaggcctgcttctttccttaaaggcagtgtctttttgccctaaagtatcagcttaggtctctgctcctaagcaccagaattgcatatgaacagagaaaccagccctgaaatgtgtgtctttgcatagcccattggctcatggactccaagtgcaaagggactcctttgaagcaccgtctgcacaggcccaagcagactcgtggtgaaatgttttctcttcctcctcccaggaaatggtttacattactgacagtgccaatggacccaaggtcctgcttggttgcacaatttgtaata

SEQ ID NO: 20751 - DNA, 600 bp, Bovine  MMBT09495
tattttacatgtggagtctgggaggcctccccggggtgggaccatgaaaactataagaaagctgggacgaaacaggagaaaataatctcagkcagtgggaactgcaaggatagagcatgtggtgggattatgctcagggtgtcccagcagcagatagaaggtgttgggagcacyggtatctcacactgccaggctatgacatgtaaagaagctttcaccagagtgtacagtaatgcgctgcttccttcatcgagagagtcttgttatgaagaaagtgtcagtggagcccagcagtgtgcytaatgatgtagttgaccaacgtcctggcccaagttcctcctcttatcacagacaggttgtattttgaggatggttagctggtcctgggaccacacactgagtagtcctgcagaagcagatgctgatggctttccaactagatccrtcactctatccatgcaggcacggtcctgtgttctcttacttaagagtgttcccagccctggagggacactctgccagagcactgggaattaatgtccctagaatgatgctcagcagtgagggatgggacagggaggattaactccccagcttcct

SEQ ID NO: 20752 - DNA, 598 bp, Bovine  MMBT06848
  misc_feature (1)..(113): n is a, c, g, or t
nnnnnnnnnnnnnnnnnnnnnnnnnnnnnnnnnnnnnnnnnnnnnnnnnnnnnnnnnnnnnnnnnnnnnnnnnnnnnnnnnnnnnnnnnnnnnnnnnnnnnnnnnnnnnnnnntgatttgcctaaaccccacaggaagccccagtatacaggaatagaatcaaaagtttctgattcctttcctttgctgatgccactaaatgtgtcaaaacacttcaaggtccttctttcaaagtagacggaaaacgtttcatcaaagtctgtgtttctgaaattcaccttctaaaggaagaatattttraaaagagttgctagaaaacaaatattgcagttatatgttttccaaagctactctttggaaatactagcttctatctctctttttctatccctttcgtttactgccttccgttggggcagggcttccatggtggcacagtggtaaagaacccgtctgccaatgcaggagatgcaggagacgtgggtacgattcctgagtcaggaagatcccgtggaaataggaatggcaagccactccagtatcacatggagaatcycatggacagaggagcctggcaggctacagtctaagaatygga

SEQ ID NO: 20753 - DNA, 600 bp, Bovine  MMBT05017
acaggaagaaacccttcagcgggcacgtgaggaagaagagaaaaggaaggagatcacaagtcatttccagaacaccctgacggatatccaggcccagattgagcagcagagtgagcgaaacatgaagctctgtcaggagaacacagagctcgcagagaaactaaaaagcatcattgatcagtatgagctcagagaggaggtgagaaccacatcagacaatttacaaatactgcatatagatctgggtctggtttgtgaaggttgggaggtcggttaataacaaagttatgatcagccttmtcaactgattaatatttaggtttggacttcttttactagccaaaataaaaacaaatgatattacaaaatacctggctgaaagtcacagaggatttcttcaaaactagaatcactgcaaagcagaggcaataaacaaggggtacaacatgaatggatttatccttgaaaataaaaaataatatttctcagccttttttaaactctctctacagaaccaagaaatacttcatgcatgccctcttaagaattagcatgtcatcgaaattaaaagtctgcattgtatatactgcacaaataata

SEQ ID NO: 20754 - DNA, 600 bp, Bovine  MMBT06025
acacagttagtaaagaatctgcctgcaacgcaggagacaagggtttgattcctgggctgagacgatcccccggagaaggacatggcaaccaacttcagtattcttgcctggagaatctcatggacagagaaacctggcgggctacggtcccatggggtcgcaagagtcagatgtgacttagcaactaaagagagagagagagcaccctgatagagaatgccaagactagaatggatgtgggggaagacacataggaagctagtgtcttaaccctaacaggtttcccaacttttcaagccmattcaatttaattatacaagggaaaacaaagaacttatttacaaaaaaaaacaaaacaaaaaaaaagaactgaatttcacacaccataaattttcctgatactattaaacagcatgacattatatacatatcttctacttaaaaaaaaaggatgtttatatttccatatgtattgaataccaaaattatacaggggtatatctacaatcatttggatgggtatgctttaggttaaagaaaataagtcccccatcccactgctttctcatcctttctgcttattcccaaaatgaaatctta

SEQ ID NO: 20755 - DNA, 600 bp, Bovine  MMBT21042
ttccacaccttggagggctccagaacagtgcccagagaagaaggctggtccccgctcccaaacagctgtgctttatctccctggccagctcagtgctaatggccttgatggccacgtccctcccwatgtcctcctggcctcctgttggctgtggccaatttgctcgtgatttaccactcyggggcgctgacccgtgagggagacacacgggacagaaggaggcagagcggacgtcatgcctgatgcgtgtgcacrcgtgcrtgtccgggcgcaagggtggggaggcgtctctccaggaaygcgctacccagccaggctctctaggactgggagcagggtctggcacccccaccctttmgctatcccatgctgattatggcactaggcactgtgctagagagaggaaggccaagggagaccttgagggctgccaggagccacaggctggaagtcaggcccaggagcagccctctcacaatggtctggagccttctgggtcctctgagaatccaggcatgcgcacaggacacacctcccagccgtgaacacatccacggccctgcccctgaccacagtcaacagaggcagcacaagcgtggt

SEQ ID NO: 20756 - DNA, 600 bp, Bovine  MMBT14355; identical to SEQ ID NO: 4808

SEQ ID NO: 20757 - DNA, 600 bp, Bovine  MMBT06163
tacacacccttgaagactgaagagagcaagaaagacacaggttaagggaagtttactgtaagccygtaggatgtatgagaacactccctgcctctatgggctaggacttgttaactactgtttatcttgtgagtggctgcatctggcatctttaaaaggggattatcgactctctttttgtttttattttgggaagtatttgaccgggtgccataatttgattttaatctgattttatctctgtagtgcttagatagtttaattgctggtttgatcaggcacctagaatgtgaattgttrgaaaaataacatgctgcattcttatagtcaggactgtttccatggattctttttcctgaatacaagcagttattcatgactctccagggactaaaacttgcaaaatagtattttgttcatctaaatattgtttaatagaaatcctgtaaagcaatatctgaaatcctaatattttcttaggtaagttttggcatgaggtcctatgcaatagaataattgaaattgaaacaaaacttaaatggtagacatcctaatatgtttcattataatatggcycttaaatattaatctcctgtaatt

SEQ ID NO: 20758 - DNA, 598 bp, Bovine  MMBT18393
  misc_feature (1)..(66): n is a, c, g, or t
nnnnnnnnnnnnnnnnnnnnnnnnnnnnnnnnnnnnnnnnnnnnnnnnnnnnnnnnnnnnnnnnnnatgtttggatgttacagcactaaaagatggctcaataggccagactaacctgtgttagcaactagaataatctccagaaaagaaaattactttgggatttaagatgatcaaaactgattacttttcaagaggcttagaaacccaaagctgtaaacacagctggggaaatacttgaatgtgggtccataaaaactccagtgaataatccatccttctgcctcatgacgtggacaytacaccacatacatgagcctatggggaagcagtaaatatttttatacaaccttgtttgtgaagagaggagaaaaatgtatagacatgcccacccacatctttgatgtgtgttaatatctttcttgttttattgaagtaaaggctaaaggattacattcagcccagcaagtaaactgtagcacgggaatattataaccaaacttataaaaactggatttatcttctcaaatttagagtgccaataggattatttttattggatgaaaaatcactgttttactattttttgaccaaaagt

SEQ ID NO: 20759 - DNA, 600 bp, Bovine  MMBT01133
tggaatggcggtcatgctcattacccgccttggagaaaagtcattgcaaatgatttgtaccacacgtcctgtccctggactttgtggattggttcccgactcaagggtcacctggtgactgtcgggagagttcttccactgaacttgctttgtattagacaatgactaagagaccccgaatgggtcttttatggctatttttatgtgagaaacagatgatacacagagtggcagcatatggtaagagagcacagagagggcggtgaatgaacttaagggaggaaaattgagggaacatgwtggagaccagagaaagggggagttaacagaaagaaaagaatgaaagggaaagaagcctgtaggagaggtgagatagatgttggcgttattgttgggacataagcagtactcttctgtcctgaacaattttccacaaagtctgtttttttttttttttttgttcacatgccatttcttacctttagcaaaacaccttgttgtttgaggtaacccaagtgttttcttgaaaatctgaaaaagtctgaagacttaaaatgaggggatgatgtggattggtgggccaccttccagggttttaga

SEQ ID NO: 20760 - DNA, 600 bp, Bovine  MMBT06954
tgggaaagagatggaagggaaagaatggattttacactttctttgcttctgtgccagtttctaccacacagagttttcatcaaacaaaaagtctaagacagagatggagtgaatttggacttaggattaagaagacttggagatctagtcttagtcgaatcacttattctctatgtgacctcggttgagtcgctaatcttctccaaacctcagtttcatacctgttaaatggggtgataataaatcttcctgcccccaccactgctgtgaagattaatttagatagtgtatgttaaggaygctacacattaagtacagtgtataagcgacacaaattcttactgctgtcacattgactaagaactttggaataaactcaattaaatcacttgaatcttcaccctcatcagattaatatactgatgattagtaaattaagttccatttctgcaaaacmcaaaagaaaaaagtatttctgagccaacacaatcttaggcccatctagggatatgatttatacacgttgcaatacccccaggagcacatatatgaaacttagcatttcttcttacttctatttcttttttatctcccacaaag

SEQ ID NO: 20761 - DNA, 600 bp, Bovine  MMBT16794
ccatttacctataacccaaataaagctagatttgccttgtgctcaatttctgtgcacagctgtattaaattctaatgacgaaaagaaacatatctaacaatccaaagcaataagaaaaaacaattcaaacatttgctggattctctttcaaagaaagtcaagggagaaggcatctatgtaataactagcgaaatagaggttaactgaaagcttctcattcattgcaataattatatcacaaaacatgagtcaagggaaaygagatcactccacctattttacagatgagaaaactaaggytcagggaactgagatggtcccagactccaaatcaaaacttccgactcctagtttagtgagcttgcttttctacacttgtgcacacacacaccaccagacttcctttccaccattctgcattataaaatactttttaaaaatttcttgacactaatggcagcaaaaaatgatgattgtcaatatgagttcaagaaatactcagagattcaytgacatttaattcccaaacctcagctaagtgtggcgcccagacwagaagaaacaaacatcaacgaaccatacacacattttcactcttgc

SEQ ID NO: 20762 - DNA, 592 bp, Bovine  MMBT16722
aagcagtactctgtccaaggaatgtaaaacatttttaaaaaacaaacaaacaaacaaaaaaacacctggacgacaaacattctatgccattctatgccatcttcactattggagaaggagatcacagtaatgtttatatgaagactaccagtggatttgaaaaatggttaataataatccccagggggaaagaaagaagataacagattctcttagtcttgaaaaaattgttaataataatccctgggggaaaagaaagaggacaacagagattctcttagtgatgagtgatttatgttraaatagccartgcactctccctcacttcctttttggagcattgaagggtagtggggagagggctgccctggtggctgccctggtggctcagtggtaaagaatcacctgccgtgctggagacacaggttcaatacctcattcaggaagctcctagagaaggaaatggcaacccactccagtattcttacttgggaaatcccatggatagagaagactggcaagctacagtccatagggtcgcaagagtcagacatgacttagtgactaaacaacaacagcagcagcagcgttt

SEQ ID NO: 20763 - DNA, 598 bp, Bovine  MMBT08417
  misc_feature (1)..(15): n is a, c, g, or t
nnnnnnnnnnnnnnnacacacacacacacacaccaggcgctgtggatacatcagcaaacaaaacaaacaaagaaacccaaccacagaagagcttaacttctagttgagggaaatagatcacagacaataaatacatcaaatgtaaataacatagtatattcaagatgatcagtgcagtggaaaaaataaagcaaggtgagagctgaagtgaaggaagggatgataattttaaaagaagtgaacaacaacgtaggactcattaagaaggaaacatttaattatctgaggggtttatatccmagacaagaatgattcaggcagagggaacagtgagcacaatagccctgaggttgaaatgtgcgctgtatgtttgaaaaatatcaaagyggggagaggtatgcgtacacagacggagggtaaaagtagtaggcagtgcacaaattcagagaggatggagcagatcatgtaagggtttagcaaaataatctgaaaaatattaggacgcattgacagattttaagtagagtcatacttgtgatggaactgtagaacatattaggttgctatggcatgagtgttttataagctgaaatttact

SEQ ID NO: 20764 - DNA, 600 bp, Bovine  MMBT02784
tcattctaaatcccttagaacaagaaaacagttaagcctgagggatgagaggctcagaatcaggcagtgagagaagccccaaactaatcatagctaccattacaaaattctattttgtgccaagtgctatgctaaattcttctatgaattgtataaacggactctagggaaagattattgatatcagatctggttattcagtgcattaaaacatatcaagagagagagaacaggcatcagagatgttttggtatcttgcatttacttttatgggatgttgaccttgaaatgcagaaagarggaagtctagtttgaagrcatatgtgaaaataggatcaggtttcagtggtgctaggttatactgataaccagttaaagatctagaaaacaaaaaacagcctccctgtatttgccttataaagccaaaaccacatattggcagaaacattcccacagaagactgaaatagaaatggcatgacatttcagtttaacacattctatttatttaagctgttattgatgtttgtccttgagacttttagtttaatttatcctccatgaaagaaaccttagttactttacattcatattgataact

SEQ ID NO: 20765 - DNA, 605 bp, Bovine  MMBT03688
  misc_feature (1)..(5): n is a, c, g, or t
nnnnnatgggcttcttacacctgtgtctaggtgaaagcagttggttaaatggacaccaacaaaacagcaarcagacgtaacctctcagataagaagccatgctccttcygcatctaggaaggcagtatatctgtcaccacatctatcctgaaaatactttaataaccatggaacttttttgacaagttcagatattgatgccaggccccgtttttagaatgctgaatatgcaccatattggctggcccaggagctggaagaggacatttaaaagtaggctaagactatacacaggagtgaatttkgggttagctactcctagaaaacgaactagtaatgatgtagatgtgccagctggcatttatgcagatttcatgttttactatactggaataattagaaaacttaagaggcatacatctttagtaatagacctttccagagaatttggcacatgctacttctcacatttacactaatttttattagtttttctttttgcgtgatctcgagtgacgtctcttactcagcaaattcttccttgagtaaagagaaaaatgagaattgggacagataaatgctagcccagaattatttctttttat

SEQ ID NO: 20766 - DNA, 598 bp, Bovine  MMBT04109
  misc_feature (1)..(105): n is a, c, g, or t
nnnnnnnnnnnnnnnnnnnnnnnnnnnnnnnnnnnnnnnnnnnnnnnnnnnnnnnnnnnnnnnnnnnnnnnnnnnnnnnnnnnnnnnnnnnnnnnnnnnnnnnnncaaatagaaagccaatgtgtcctattggatgataaataatttgaaatttaatagaattataaaaaaatcaatttgctcttcatttcactggagacacaattttaactttttggtcagaggggatgacaattttctcatcaaaagggcacagctaaatgaaacagtaaggcctgccaaagtgtcttccatctcaargtccaatttaaaaataactttctgtcttctctaaagatatagaagcagtgtgaagagggccttgagcaggctccatgagatacaggttttttttccccaacccattaataaacactgacttgaactgtcttttaaagattgtgtggctccaggacctgttaaggctttctgtggataatctggaccacacagaggtccttggacaaagaatcagcttccaagatcccaagaacccagcggcatcacactaccctccagcttccgggaggggcttcttgatttagtcctacatgtaaat

SEQ ID NO: 20767 - DNA, 600 bp, Bovine  MMBT11185
agtagagaacaatttacctctcaggtgaggacgttacgtgaagcaagttattgtgagagacttgagtatttctagttttctataaattacctgttcttatctccagtctccttagaaaaatggcaacgcagatggtcgctgcacagcttgcatcaattgtgtggaataacccaagtcagcagcaatttctggtaagtgaagaatttaaccttacagtacaccattagggtataaaataaatgtggcctctgtttattacctgtgtaagaaaatgttcagagatatagtaaaagaccacakaggtgccatgataacacgtctatttttagctcttgacttattataaaatccccaaagtgccgttttttctttttctcattttgaacctaattcttcaacagcaatttgcaggaagttctggatcacagctgcctcaaatccagacggatgttgcactaccatcatgcaaaaaaaaagctcctcctgacactcctgtgaaggaaagactttttatcgtttttaatccacatcctttgcctttagatgtactagaggatatattctggtaagatttcagttccatagagttacattttattt

SEQ ID NO: 20768 - DNA, 600 bp, Bovine  MMBT00847
aatggcaacccactccagtgttcttgcctggagaatcccagggatggggtagcctattgggctgccgtctgtggggttgcacagagttgaacacgactgaagcgacttatcagcagcagcctcaaaaggtagctctgatgttcaggtcaatttccccattcataggatagaacctcaacttatctcaaaaagcaactacgatatttggcaaaactaatacaattatgtaaagtttaaaaataaaataaaatttaaaagaaaaaaaaagagaaaaaaaaaaagcaactatgcatataatcyattatcatagtttttacatgaaaaaaaaaagtgaatgctaaaatttattagtatttttttctggttgtccaattttcaagagatgtaacaaacatattttaaacaaccattgatttaactatggccttggtttttacttttgtaacaatatctcttctcacattctatgttgattgttatgctaaatgtttggcagtttactcatcatataaattggtcttcatgtagctagccaaaattatttctgacagccttttatatcaagcagaactacaatagtctgtttttggagtccaaggc

SEQ ID NO: 20769 - DNA, 598 bp, Bovine  MMBT20569
  misc_feature (1)..(131): n is a, c, g, or t
nnnnnnnnnnnnnnnnnnnnnnnnnnnnnnnnnnnnnnnnnnnnnnnnnnnnnnnnnnnnnnnnnnnnnnnnnnnnnnnnnnnnnnnnnnnnnnnnnnnnnnnnnnnnnnnnnnnnnnnnnnnnnnnnnnntctgcctaaagctgatgcactgatattccatttaaagaataactgcctggagatttcagcggccagtctactggatctgaaaagttgaaatccctgcaggggacttgaggatatatatattgaatcttggaatctggggaccactctgcctcagtgaccctcattgccrtacagatgtgtgacaaaagagatgcgggttgtatggatgtatccgcctttttacattgcactgttggccaaagttgcatgcatcactgctgaatgaaaacgtcagataggatcacaatgctagcctcaggtttgtaccaattctcattaccctagtcttgtaaacttggtgtatatcccacaatatacagagtactaaattctgtaacaaagacaagtgcactatttatcagagacactataattttgagataaatgtattatactatgtcttataaaaattgactatatattttact

SEQ ID NO: 20770 - DNA, 600 bp, Bovine  MMBT06286
gcactcttgtgtgtaatggttaacttgtcccttccttcactttttaaaacccttttgtaaagttttcaaatttgccatataaaaaagtggaacccttttataagacagctgctagttcagtatcttctaagtcagtatgtatttatatttaaaaacataacccaacaggtaagttccacgggggtagctaagtgctagttaaaaacactttcttttaacagtttggaaaagtttcatgagaagtgaggttttataatcaggcaagagaaggaaaaggggtttaatttcagaactacacayctctcttaaaaaaactatgtacttgcattctcacagtaaaaagattagttgccttcaatgaagtttcaggaaaaaaaaaaaacacacacacacacacaccttctattttctctgcactgaggagtaacatcttcccacagttacggaaagctgcacattaagtcccttgcttgctgctgctgctaagtcgcttcagtcgtgtccgactctgtgtgaccccatagacggcaagccaccaggctccccgtccctgggattctccaggcaagaacactggagtggttgccatttccttctcca

SEQ ID NO: 20771 - DNA, 600 bp, Bovine  MMBT01302
ggatccagtgagagtctgcaaagtaaaataaacacacaggcaattctaaaataaacacacaagcaattctaaataaacatacaggcaattcaggatatcctgtcttactcaataaagaaaaatatcacaaatacaacctttttgagagaaagaatgtagtagttgataatcctgaacctgaccatcgcaagactttacagagatggaggggccgggtgaaacttagggtcaggttccatggcaggaatgggatattgacgacaggtgacaggtagagctaagggacacgtattaacgccygggctaggcactaaagggtcagtgtcatgtatttgagcttgtgtgtgcatgtgtgcatgctgatgttaggggttgtgtatggcgtccctaccttttctaatgccatctaatagtttctccagaaactatgcgcagctggcaacagcaactctatggaggaaacctctatatttttgagatccataccagcctctagacacccaagaaggttgagctgactagtgccaggctagaagtgcccagataatcctaaatagtttgttctgcggtaacctaggaccactggtgtaacacatacct

SEQ ID NO: 20772 - DNA, 600 bp, Bovine  MMBT06054
gtactcaaaccctaagggctggtgtctgggaatcttacctagaatgtagaggagccactccttcccttcaaatgtagacagcagcctctcccactgggcttgccaaaagtagcaggaagcaccccaaaatctctgaagataccttgaaagaaaactcattcatgtttctgcgtgaagactggtgggtggacagctcctgaatccatgctctgcccgcagacctccaccgcaaggcccccagatcctgaattagagccggccgagcagactcaccctatgacgcagttccagtggaccatyaacaaggggaggctggagcccaggatgaaagccgtcctcctcatggagccccagatgtgtccctcctaggggacgacaagaaaatgtcaggccctaaccagactcctgccttcccaggcggctcactgctgaagcctggcaggagtgacgggccatcaagttctcagtcatgccagcatggcatatctgctgacctttcccagcttccacaggagactcttccttgtcaagagctctcaggcttgtgtggggaggtgagcatgaaagttagagcttaagggttgagggaaggaagagtgc

SEQ ID NO: 20773 - DNA, 600 bp, Bovine  MMBT08352
gtgttgatgtgtatgtattaactatgtatacatgtgtatgttatcatgctttattacctccagcccagggagttaaaaagtattctgagaagctctacaaggtggaaagagaatgtggactgtgcatttggtccatatgtaaatatggtcttcatttgggctgagatcaatgtgccggcatggtcaggttttggtgagggtcctcctccgagttcacagacatctgccttattactgtatcttcacaaggcaagggaagggaggtcatctctctgtatctcttataagaacactaagccyattcatgaggggttcaccttcatgacctaattgcctaccaaaaccctacctccaaatacaataacattgaggactagggctttaacatatgaattttagggggacacaagctttcagtcatagcatgtgtgtgtatgtgtatgtaaaagtcaatttatgtaatctcaccaattaggagctattattatatgaggaaactaaggaagaggttaagttctttcagttcaaaaattattttcagccaaggaaaatgttgtcccaaataagatcatcagtatcaatgttctccctactgatggg

SEQ ID NO: 20774 - DNA, 600 bp, Bovine  MMBT05204
tgcttggccaggtgcctccaggctatgggggtgttctggttgcagagcacacacacctctgccttcaggatgctagaagcttgtctgggagctatatcactaaaaaaaatcacctgctatgggagaagactctggaaaagactctgaagtttccttgaacccttgtacccttggcctggcattcccccagcactgtgctctggaatcccaaacaaggtagatccctcccttgattgggtttcctacctgttggtatggtcagtctctcctgctttgtgagtccctgtaaggtgggagccsatacatatacctctccaggtccttaaagcccacttcatgatgtgtagtgggcacctgatgaacactgtttgaatggacagatggttragatgctccccagagtgggactcctagaggcagcaagaggagaataggtgcctaggagggaagaagaagggctcctagcagtggacagtgactgctaaaggctctggaggagctggaggaaataaagagttccaggctcttgtcgtcttaattaggtggtctaaacaggaatgggtttccctgtcaacctctctccaggaactgggtccctcc

SEQ ID NO: 20775 - DNA, 600 bp, Bovine  MMBT12017
tttactgcatccttggtctatagcttctcttcactgtactaaatgaaacaggaggactttatctgctaaaccaagctaccggttctgttctttttctccaagctgtatctccaccctgtctctaataccatctagtcattttcacttatttattccactacctcaaaatcatcacagcccaagataaactgacctccgtgactctggcaccccctcccccaactgccagccccctttttgcaccttgctcctcagccctcttccaacagacccaacctggcgatctgtctgytcctctcmacagcactatcattaaacagtacaaaggcagtcatttttggatactcgatgatgggagggaggtgagtgcagaaaactccatgggtcaatctcactaaacgtggttgattctgtcttgaatctctctctcaacccattctctctgtgcccctttcaatgaaaataaagggatctataatctctagtgggatcagttttgcattcctccttcataaaggggccatatctggggagagagaccacagatgttaagggagatgaaaaagtttaataacaatgaaacattttctttctttaaac

SEQ ID NO: 20776 - DNA, 600 bp, Bovine  MMBT08374
aaatctttatttattcattcattcaatgaatatttattggataaataagtgtgtccacttattgagacagagagaggaattaagatgaggcccctgacctcaagaagcttaaagatgaggggtgggaaacatacaattaaatatggcacgtgccatgacaggcaaggtcacggagtacaccaaacgggtaaatgacagacctacaaaaaggcatgtctggaggcaagatgtcagggcagaagatggctatgaaaaggtcagttaagcttgagaaaaatgcagattgtgagcagtactacrgaacgtgtaaggtatgcaatcagggagagaagccaggagctggatcttaaagagctccatgacgactttctayggtgcccaggaggagccctgaaaggtttcagcagaggggtgacaggagactgtatgcagaggtgcttaggagagattagatgagggcaaaggaaggttgtaggtaagcagattcgttaggagccttatcttgataacccaaagggaaagggcattgagccggaatgaaaataagctcagtgggaacagagagtaagtaaaggaactagaagagggacttccctggtg

SEQ ID NO: 20777 - DNA, 600 bp, Bovine  MMBT10596; identical to SEQ ID NO: 4563

SEQ ID NO: 20778 - DNA, 598 bp, Bovine  MMBT21157
  misc_feature (1)..(44): n is a, c, g, or t
nnnnnnnnnnnnnnnnnnnnnnnnnnnnnnnnnnnnnnnnnnnngaggcggctagtctgatggggcctgcagatatggggatagaggacagaaggtctgggggaccctgtatagttttgggggtcttctgggcagaagcagcttggcccatgtccaagctgggtggacaagacatgtgcctctcccgatgtgggcctgtattgggcacacggctggcaatggaagggagaactaaagggggctcagctgctgtgcctttagctgcccccatccccagaggacccagggaagggtaggggyctggtgtgtcctcaatctctgctcctacaagtttagagagtccatcccatcacagctgcctcaccctgtcattgatctgaacaatctaattcagrgttccttcttttgccttactctgtctctctgttggaactgggagtatcaggccataggttctgtcctgccaaggccttgcagtcagggtggagtgaagcagggagctctataaggaggctgcgcgacagctaccagcctcattgccctcggggagggcaggtggatggtgtctgagtcctatgtccttttctgctttccaaag

SEQ ID NO: 20779 - DNA, 600 bp, Bovine  MMBT11132
tggaggctggggtgtgagagagaagggttaggccatagctgttttttcttctctctttctcatttcccctgagaaagcgaaaatactttaaaagactattatttataagaggtttctaaaaatcactgaatgacagatttaggaactggagggtccttagagttttgtgaccttatataaggccccatcatctctatactgtcctcaggacctaggcaggaataaggctggtctgtctccaagtccccttccacttctatgaagagtctgtgtccttgtggccccatggcatgtgagaayctgcatgaatgaaagtgactccatcataccttacttagtctggtggtctggcgatctaggctgagttatctgcttgggccatgccttctccaacctcgtgtgtctcagaatcacttggagagctagttagaaatggatagtcctgagttgtactccaagactatccctgaatgtgtgatatgagtcagggatttgtatttgtaatgaagccccagtgaattctgacatggagtggggatggggggctatgtgaaccctacttttaggttctgtggcttagccccttgcgagcatctgtgg

SEQ ID NO: 20780 - DNA, 600 bp, Bovine  MMBT17438
agtagaatgggagtattatgaaaacaaagagtaccttggtccatcagaattttcaaagaaaataaccctttggccagaccataattccccatagaaacaacctacatagagtcacatacagtgactaaattatgtttatgcttttattaagcaacagagctcattctgacaatttatctactaagactcatgccagaaaactgcttattcattttctatattctgtttggaaaacaaaacatgacacataacaatataaaagaaaactataatcccgagacgcatgtgcagtcactgtasaaaagtgttctaaattgtcttaggcctgtggcaytggctttccaaacagcatttaaacactgccacatgctgttcatctgtgtgtcttgcagcctgtggcaccggcctgacctcgacagaatgaatcgygcaccaaattaatgaagctattaactcttcaaaggaaacttccctggtggctcagatrgtaaagaatctgcctgcaatgcaggtaacccaggttggatccctgggttgggaagatgccctggagaagggaatggctacccactccagtattcttgcctgaagaattccatg

SEQ ID NO: 20781 - DNA, 600 bp, Bovine  MMBT09990
ttgaaatccgattactttgtggcttaatttgtgtactgcttgactgctctgcagtttcaggcaatttaacaatgtagacagtatatgaagatggaatgttaaatagtgagtgagacattcaaggcaaaaatgtcttgagttgtgttcattttttaaagcatctcgctgagtgagatgcaggctcgatgtaaagactccaagtaggcagattatataaaagtcagggaaggcacaggttctttccccccacatctctggataattagttttaccctcttgttgaattttggtgcctattakgctcataaagattaataacatggcgcacaaaatcaccttccctcctgtaaactgcatttctctctatgactgcaaataagaagaatcagtgagtttttgtgatgatctaatgctatcagaagacacatagagtacaggcccttctgagagatcccttgtcatcctaaaacccaactaaatgggattctgatatttcatagagctctattcccataaacaatgaattttaagagattgataagttgggtcaataaagaaaacaaatttagatattgtgtgccaaacactggagtttctctt

SEQ ID NO: 20782 - DNA, 600 bp, Bovine  MMBT03017
cacgtgtctcctcctcggtaattatctggcatttagcacctctcttcccagcacttgtaattagcagggaaattaagatgctgtcattctacctcccagcttctctctgttatgcccagaggcccagagaggggagggtatcagtacaccaagaattgagactaaaactcaggggggactgagaggggacatttgacaggagagcagtggtgggtcctggagggagcacttcctgccgcctgcagccacagccatgccttttgtctgaatttctggagtgtatgcaagggtactacgctstctcccatgggatgctgttatggcgctgatgaaaagactaggctccagtggagtctcattgccttcaccaagattttcacagaggctctttggtgcccacctcggtgctagaccctgagatcagggatgaatcagatacacccggagttgtagatggtccccagggaaaggatatggcatttggttggggagggggtacaaccataacacaaggctgaatgtgacaagagttgaaggaggcaggatcagttatagaatttggagggacttactgaagatgtgaattactggaattctaaa

SEQ ID NO: 20783 - DNA, 582 bp, Bovine  MMBT09549
ttacttatgtcataattcttacataaatgtaaggtcacaataaacagtcagcagatgatgaagaatgctcaatgataagtattcatttatcttaacccagctaataaatgtcaattcttagatctcagcctaggggttagttctggtaattctacccttataccatctgttttgtggtattctttttctctgggtcagtactctgcctaagatcacttccttcctactacttatatgctcttctctccaagagaatgcttaccaaactttccacttggatgtgcaatctaagagagaagycgctcactgtatttttatatatatatatttttagagggtttgtaccactgatcattgtctgagttgctcatggtartatacaccagcagataacgctcaggttaatttattttaaccacctgaataagtttcaaatataagtcattctctcatacacgacctttcccaatgcactattaatctttcaataattgagctttattagtacacatgtgtcaagccaactttttaagaaatgtcagacatctccaaataaacaggcaccctcccaatggtgtggca

SEQ ID NO: 20784 - DNA, 600 bp, Bovine  MMBT05564
ttctgttagctcccccttccaaaggcagaggcagctgacagaattaatctggtgactcaggcggtaaagaattatccacctgcagtgcaggagacacgggtttgtcccctgggtcgggaagatcccctgacgaaggaaatggcaacccactccagtattcttgcctggaaaatcccatggacggaggagcctggagggctgcagtccatggggtcgcagagagtcagatgtsactgagagactaacgcacacacgcccccaggttacagaaacgacaccgtgtcagggcaggcaagtctmcccctctgcctgcttgtccrccatccctcacgacatctcaggggtggcctgagaagctgccatctccatcacccatctgacaggctcaagccgtccatgttgccagggcgatcagccagggtctgatgagtgagagagaaaggccaacgaagcaaagaatggagggaaggagggagaagagaagagaagaggttgagaaggtaagagaacctggtccaggccgtgaatgccaaatcccaggtgtaagaggaagggacaccgggtgactcacggctcgggcaccacctggacccagtgagt

SEQ ID NO: 20785 - DNA, 600 bp, Bovine  MMBT04263
tctaggmccatgttcatgagcttcaatgaycatattaacattagagtaactctccagccatgtcagatactatccatgttgagtagtcaccttacctgaaagttcagattataaagtttaagtgaaactccatattttatatcccaactgatcgctgagcaatccctgcactttttctgtaaaaagcaccatgctatcttgaggaaaatataaaaataaaaatctgtgatcaccactgactacctggctggcaagagcagttacatgcatgtgcattgrggtgtctggattgattcaacsagagactggacagattacagttcttccagatacccgtggcccactctaggacttaatctgcaagaatatttgtatagaattgtaagggaaagaacgtgccaggttgggttcagaattccaggttacccaccatttctcagctacatgtgtctcttggcaaatcacagtatcttaaactctaatgctatttttaacatgatgaaaataattatacttactttataggttttaagagtcaaattagatagtaaatgtgaagtgccttgcagagtgcctaagagttaacaagtgaacaatcta

SEQ ID NO: 20786 - DNA, 600 bp, Bovine  MMBT11243
gggacagcctcttcctgttcccaccatcgcttaagatttttcattctgcttcgtttgaaagttaaaagtagtcttgaccatataacctcatactctcccatcccccactgtctgtttaggaaaagaacttaagtctaagggctatttcagcctgatacagctatgtttattactggagtagtacatctatgagacattcctggggaatcttagactgttaaaactggaaaagaaccttgaagtaatctaatccaggattctcaaagtggcctccaaaccagcggcctcagcaccacttargaacttgttataaatgcatgtttagggctccactctggatctgctgagcgagatactctggaggcagggcccagcaatctgtattttaaacttttaattttatattggggtatagtggataacaatgttgtgatagtttggggtgaacggcgaagggactcgaccatacatatacatgtatccgttctcctctaaacttccctccaggctgccacgtaacattgagcagagttccttgtgctatacagtaggatcttgttggttatccattttaaatgtagcagtgtgtacatgtccatc

SEQ ID NO: 20787 - DNA, 600 bp, Bovine  MMBT17515
taacttttgtgctccccacagaactctgaccatccagctgctcaccccactctccttgcttaaaacaaagagaaatgtaagccattacacaggaatcctctgtcatctctctatcagccctggaagactactttcttccttccctgagttcctcacctctctcgttataactgaagaagtacatattatcctgtatctagctcacttatactttagtcttcttatctgatctcagaggaaatcaatgtgttgttctcctccattatctgtctcactccaatgctgaacttttctcaatarcatgtgattccacttaagtttgctcatctgaaaatacagtgaaaacattaaaaattctcatttatacccagatattccatctccatctgtggatgaytgctaattccctcctgagcttcagtacacatcatcttcaaccactctcctaacacacgatgatcagcttgaactgaacacatccaaagctctraacactggctattcaacactctaagctctttttatatccaccctccccccccccaatgaatgataccactgttaatccttttcagaatgtcaagtgcctgggagtcatct

SEQ ID NO: 20788 - DNA, 598 bp, Bovine  MMBT21484
  misc_feature (1)..(106): n is a, c, g, or t
nnnnnnnnnnnnnnnnnnnnnnnnnnnnnnnnnnnnnnnnnnnnnnnnnnnnnnnnnnnnnnnnnnnnnnnnnnnnnnnnnnnnnnnnnnnnnnnnnnnnnnnnnncatcactgagggatcctatctcttgatagagatgaccagggtgtttttacagcccacccttccttatccatcagcagctcctcccactcaatgggttgacatgaaccatcattccacgtttgggaaactctgtgggtccaaaagttccaggggagtcagggygtgtccactgaaacctcagccggaaccaagcrtcrttcagaaagtgaactgatgagctgtttatgtarccaggttcaagagcaagagcccaggcccaggcctgccgcctccaggccgcaccagttgsggggagaccctgggcgctgctcaccttgatgcggtccttctccttctgccacttctcagcttcatcttctatctcaatgatcttgagctgcaactgctccttttgcagtgacagctctgtctgtagggaaggagccggggttggaggagaagtcagggggaggaagtggaaaagacccagagagtcagggaggagggcccaca

SEQ ID NO: 20789 - DNA, 526 bp, Bovine  MMBT04630
acagagccaatcaatgttcgttccctattgtaaatgagccttgatgaccttttgttcacattaatgctgacaaactctgcatgatacatgactgtcccactctctagctcctcccaatagagttttcggcttttattccagtcagtgcacttactccacgtctatggatgtggcgcagggcacacattagtcgggggtgggggtgagggcgtggaaatggcagacaccggtctatactgtcaataaccttggagaccttggggaagatacaagggcaaataatctactgtggtagagaaragacagctaggaagcaatccctcagtattatctttatgatttgagatagcgtcaaaagacgtaatacatgagagtatttcctccatcaaggaaaaagcactgggaagttacctgcacaggtaggtgttgcttctttggttacaatttaagctggatgtagaaacccaaagaggtacactgggaccattaccttcttggtgaatgaacacaagggccatgacaattt

SEQ ID NO: 20790 - DNA, 598 bp, Bovine  MMBT19460
  misc_feature (1)..(80): n is a, c, g, or t
nnnnnnnnnnnnnnnnnnnnnnnnnnnnnnnnnnnnnnnnnnnnnnnnnnnnnnnnnnnnnnnnnnnnnnnnnnnnnnnnctcccgcattgcaggcagacactttacccattctgagccaccagggaatcccaagattacatatgaagaagtataaaacaaaacaaggaaatacagtgtttctgagaaactacgagtagacaaattaactatagtctacattcttgtgacttttctttggaaattcacactcccataaatatgttgcatctcctgggtgtagatgtagttaaacattaayggaataacaacttaaggcatttctattaggcttcaaatcataattacatatgatttcttcaaaccttaaaaaagataacttttaaatgattgaaagtgttatacaatagacaatttttaagacttgttaacacaactactgtggaagatagaattctaagatagtccccacaattcctgctgcctgttttataagtcctttgtaatccttgggactatgaaggcaacaatcccatcattaagtwttgttatatggcattttgctttaataaagggaagctatctgtgagggcctgaca

SEQ ID NO: 20791 - DNA, 600 bp, Bovine  MMBT02781
tcacactcccataaatatgttgcatctcctgggtgtagatgtagttaaacattaayggaataacaacttaaggcatttctattaggcttcaaatcataattacatatgatttcttcaaaccttaaaaaagataacttttaaatgattgaaagtgttatacaatagacaatttttaagacttgttaacacaactactgtggaagatagaattctaagatagtccccacaattcctgctgcctgttttataagtcctttgtaatccttgggactatgaaggcaacaatcccatcattaagtwttgttatatggcattttgctttaataaagggaagctatctgtgagggcctgacataatcaagcaattcagttgctcagtcatttctgactctgcaaacccatggactacagcacatcaggcttccctatctttcactatctcctggagcttgttcaaattcatgtccagtgagtcagtgatgctatttaacaatctcatccttgaatgtaatcatgtgagccctttaatctggttccagaggtcagagatggtcagagacggakaagttggaataatttaaartacaaatggaatttaat

SEQ ID NO: 20792 - DNA, 598 bp, Bovine  MMBT09240
  misc_feature (1)..(18): n is a, c, g, or t
nnnnnnnnnnnnnnnnnncctgggtctcccacactgtgggcagactctttaccatctgagccccagggaagccccttaaacatagtaggtacttcataataaaaatggaaaagatgaataaattggataaagtggaaaatttatagtaaatgtgcctgtatttaaatatctttttttgtcgttgtttttctcatttttttctcttcccctttctattttcagaatatgagtgatgctatggcagtgttgcacaaactacagacaggcttggatgtaaatgtaaaattcactggtgttcgwgtgtttgaatatacaccagaatgcatagtatttgatcttcttgatattcctttgtatcatggatggttagtggaccctcaggtaagtacaaaatcttaaattatatgaacacaaatatagtaaaaatttattaatttggcaaaggaatctaggtttacattttctgatatttatatttttgtgtttttacatggaattagccacattgtgaggttaagagcacagtcccctagactgctaaatctgctcaagacttctgactataatttcatggagttagaggccagctacagagctg

SEQ ID NO: 20793 - DNA, 600 bp, Bovine  MMBT10367
tatgacaggaaaatgaagcacacacctctcgtccatgagaaactagcaaacttctcagccactattcaaggaattccccctcctatatatctttgtgcgggttatgccctgtacagctctagggggcctcattcacttcacagcctggttgaatgacgccccttagggttgagcagggcaggagttgtacaaaggttcttggcagccctatgtcccagatgacagggatttgactccttcaaccacagcccagcccagcccacagggtccctacctcccagctgttcgtggaggtccctytcttgcttccctgcaaagagactggccagactggtcttcccgacaccaggatctccgagcaggaccacgcgatagagggcctcccaagagctttcagagtcgctggattcagaggaccagccgttgggggcaggtgaaggttgccgggtaggggcgttgagggagactgactggcccagtcggggatgctgggtctgtgtagaaggtgctgtgcccagaaggccaggctggtggccccgggcggacaggggcagtggagtgctggctcggcgacgcaggggggtctttgcttcttgctga

SEQ ID NO: 20794 - DNA, 598 bp, Bovine  MMBT19814
  misc_feature (1)..(21): n is a, c, g, or t
nnnnnnnnnnnnnnnnnnnnnctgcatgtgaaatcacaaggacttcttgcaggtgctgctgctaaggccctatccctgggatctgacgaacttgctctgaagcacagctgggcctctatccatgtggcctgaacgctgagttcatttcctcaggactgcaattcccaagcttgctctgttctagcgtataccacttgcccagtctccttatgaccatcatgcactggcatgaaatgtttagctgggtttcgagggatcatgggtaactctctcggggtacaggttgtctagaggagagcrcaactaaacggrtgcactaaccgcctgaactaactacggataactacgttagcttgtgttacaaaaggacagtagcagcatctacccagkaaagcaagaacatgttcagtactcaatacaagagccaaaatgrtcatacagtgttctaggaataagtgtttacaccaaaatgcttagaatcaagtggaagagaccaggataatatctgtaagacaaagaagaacatgtaatgcatatgctcaattggcatgcagagagattctaataatactggccacagttctttttaaaaaatgag

SEQ ID NO: 20795 - DNA, 600 bp, Bovine  MMBT03747
ggagaactcaggccaccgtctgtggagatgctctgtgaaatcagagcagcttgtgaatgagcagctctttgacctgcgttactttcatacttgtgtttaagaagagccataggcatggggcacctttgattttaattacttaatccttttcacatgagaatagcatgtgaccattatatttattttcttagtgaaatccattcgcagtatacctgcctaccttgcagaaaccctctactatgctatgaaggtaagtgcatgccttgaatcttctatctaaattatctctstaatatgttytagagaacagaccttgaggtttgttttcccctccttaaaacaggtggttgaattctactacttgytttactttattgactcacccaactcaggagagtttgatgctataattgatatttttaaacaatgtgtgtctctctttttctttttcaaagggagctggaacagatgatcataccctcatcagagttgtggtttccagaagtgagattgatctgtataacatcaggaaggagtttaggaagaattttggcacctctctttattccatgattaaggtagtaaaacctttctttaaat

SEQ ID NO: 20796 - DNA, 600 bp, Bovine  MMBT10428
gaagaggagagggttcgctgtagggggtggaggctgcgaggatgtgcgggaagaggcagcagtgtggtggtcaggactgaggggagcagaacaggtgcaagtcacccaccttgcagggaaggagcgtctcagtagttatttccctcaggttattctggtcttcttggaactagaaataacccagatggcacctaggcgttgtgtccagactcaagctcaatgtggtactcgtggcgggcagaacaagggcactccaggaggtaaatctgacccccagaacccgtgatgatgtcacctgaygtggcaaaggggaccctgcaggtgggagtaaattcaggagatgatcctgaattatctgaaagtgcatgtgttactcactcaggtgtgtctgactctttgagaccccatggactgtagtctaccaggctcctccgtccatgggatcctccaggcaagaatactggagtgggttgccatttccctttccaggggatcttcccaatccagggatccaaaccgcgttccctgcattggcaggcaggttctctaccactgagccacctgggaagcccaagtaaatactttcaaagtcacaaacaa

SEQ ID NO: 20797 - DNA, 600 bp, Bovine  MMBT11114
acttttgagtgaaacagaacaagcactaagttatgcctgtacacatttgcataagaatataccatacacaaattcaggtttgcatgcctaatttcagacataccatcctagaaatgcacattataaaaaacataaactttccacgggccagaacgttttcctctccaggtgttgaattttgttttccctaaaagggaaagataacgatagccttaatttatatagtaccttttcccattctcctttccctataagatataggagtagctatttcatgggcacttgaaaaggcacaaatcytttcttccttaacgtatagatcctagtcagggtatcccagaagactggctctttaggcaaattctagaataaagtgaaatttgtcagtatagwttctctttgatgattgtctttcsctctcttaaagttaacccagttctttgccagccccatagcttagagatctctacacagacatctgtcaggctattccctctattccttgttccrtagtataaaatgtttcaactcacaaaaacgggcttgcactatcctgtctagtcttcatagtggtctcacagtttagtaagctaatagggc

SEQ ID NO: 20798 - DNA, 600 bp, Bovine  MMBT16758
cgttgtctacttgcttagccaagtctaagttgagagatmagagccctaaaagaggcacaaaaaagtgcttgtctggccttggatatgaatatataagtaaagctatatccctcataatatgaaatattccrtgaaatgatcatagagaaatggagtagatgccctggacttttaacatggccagttattcttttcctctcaaacccccaactctggctgtggagccgattatcccagcattttatagccttagttatgaaaataactacactgaaagctataaaagattaagtggctacrtatgattgttttatgaggtagaaatttgaagttaatctagttgactgttaacttgatctaaagtactgatatttgaaatatgcaagttattatctcaatttatggtaaatattattaygcacttgatttaaagaatcatatcactcttttaaaagaaaatcacaaaacagggttatgagaggaggtaattttcaatcatgagtggggaacaattttcttatgctagttttatctgttacgtatcttctcttggaaagttatttgtcgtcttataaatggaatctctttcctgatttaatt

SEQ ID NO: 20799 - DNA, 600 bp, Bovine  MMBT19469
aaagttcttcctgacccaggaatcaaaccggggtctcctgcattgcaggcagattctttaccagctgagctaccagggaagcccgtagctaccagggaagcttgtaaatgtgtttcccacacatttacaactaattcaaacatccaagtgcttcataaaatcaaatctgatgaccaatatttttactcaagcacagtcatacmactcaaaatggggaaagtgtggcagctagctcaagcttgatagaacattagagctggcacaaactttgaaagaaatctagtctaacttcctcacttytcaacggggaaacgaagttccaaagaggtgaataagggaaccagtctggctggaggacttgcctcrctttgcytctcatagctgataaacttgcctctctgcattctgttaagttcatgaaaatttttgcttaacccagaaaataaygcaagaacatttttctaagcatttactattttcacagtcactatatgatactyggatatttccatctttaagaactgcaaaagagtattgggcatttatcctaaagaaacgaaaacttatcttcamaacaaagtctgtacacaaatgcttata

SEQ ID NO: 20800 - DNA, 601 bp, Bovine  MMBT19471
  misc_feature (1)..(1): n is a, c, g, or t
ngtgcttcataaaatcaaatctgatgaccaatatttttactcaagcacagtcatacmactcaaaatggggaaagtgtggcagctagctcaagcttgatagaacattagagctggcacaaactttgaaagaaatctagtctaacttcctcacttytcaacggggaaacgaagttccaaagaggtgaataagggaaccagtctggctggaggacttgcctcrctttgcytctcatagctgataaacttgcctctctgcattctgttaagttcatgaaaatttttgcttaacccagaaaataaygcaagaacatttttctaagcatttactattttcacagtcactatatgatactyggatatttccatctttaagaactgcaaaagagtattgggcatttatcctaaagaaacgaaaacttatcttcamaacaaagtctgtacacaaatgcttataacggctttatacgtaataactaaaaaccagaaacaaactgaatgtccttcaacaggggaatggaaaaacgatggataaacatctgtgccatgaaatatgactcagcagtaaaaatgaaccattgatgtacgcaacatctgggatggg

SEQ ID NO: 20801 - DNA, 600 bp, Bovine  MMBT10174
tgatgacctcactgattaccagttctgttgcagaggctagtacaactattccaactctgactgattccacacacaaaccagagacaacagcctcagggatcatccactctgggactgaaacaagtccagctgttccaactatgactgtttcacctgggaagccaaatacaacagtctcagtggccacccatcctgaagagacaagtccaactttacccaggacaacccccagcgtttcccatactgaaacagacaccacattctcaacagccaccagtccttggacagaatctagttcascagtcccagctacaactgtctcacctagtgtatccaagttggggacctctctggttactagttctcggaaagaaattagtaccactcttccaacactgacttcttctccaggtcaagtggaaaccacagcctcatgggtgactcattctgagccaaaagccagtccagctagtccaactccacctgtttccactagtgtaccacatatagtgaacccacaagccaccagttctgagacaaaaactagtatggttattccagctctgacactttctccctttgagccaaagaccacagcct

SEQ ID NO: 20802 - DNA, 600 bp, Bovine  MMBT06622
tttgtgttgttgtaagacgagagacctatgaaactatttagtaaaaattaaggctgaaaactaaagggtgaacaaacatctgtgatttcatcgtggccttctaccagcgtagactgccgagtgtttgtggtttgagtcttgtgtctgtgagtactgtaggactcctgtgggtttccctggatcaggagctggttgtgaactgctacagttcatgaggatgaactgtcgtaatgttacaccaaggatggcgtttttggagtaggagaaaaagcagatgacagaaactagaggaaaagagaygcatttttttctgaaagtatgtagactgcctgcagattgtgtgttccttgcctcctcatttgcatctcacccttgtggacgagttaacgtaacctgtgtgggaatgacataactttcctatctctcacttaattctgactgcatcgtgtgaggggactgcacggtggcccacatttttctccagggctttctgcggaagtgagtcaatacgttgtttctggctttacttgctggccctccctcccatgccagcgctgggtgcattggaattttccaggtatatcattagaggaggcagca

SEQ ID NO: 20803 - DNA, 518 bp, Bovine  MMBT06854
gaaaaattactgaaaatgaaactactaagtcaaaaaaaaaaaaaaacttaagaaccttcttccaaatgactatgattgtgcaccgaaaaaacagcagttttaacaaagcttgctgctttaaagactttgtttttaaacaatcggttctaagaatatttcaactctagaaaacggcttgtaaattaaaagaaattctcataaagccagaaatctgtattgtgggaaaagcagaatcaagccatgttttagccagaaagcatcatctaaagaatggagacttgaaccacggtacacagtaargcaasagaactaataatttatcataggaagctgaggaagaactattattaaaaacaccagtggctttttagaatagtgaaaattcattccacatcttttagaaatgtaggtgtcacttataatcttccagatcaggtttatgttcagtatactggggtttaagggagaaaaaagatgccatatggctggctgaacaatacctgatcaaaaatgattta

SEQ ID NO: 20804 - DNA, 598 bp, Bovine  MMBT00936
  misc_feature (1)..(73): n is a, c, g, or t
nnnnnnnnnnnnnnnnnnnnnnnnnnnnnnnnnnnnnnnnnnnnnnnnnnnnnnnnnnnnnnnnnnnnnnnnntctttgaggggttgtgttttattcccctttgtgtcactctatacctgacacagttattatatacctggcattcagtatacacttgtttactgaataaattcatatatgcagaaacaaatggctcaagtaaccattaataatgttaagagatttgaggggaaaaactatatatttttatttaatattgtggctagaaagtgacacaaacaactagctctttaataaaygagtctaaattattatgataaaacatgcaggaaatgtgtccatgagagcttgataactctgaaaaagccacagctgaagccattatccttatgttgttcatctcttgaacgattttaatttctgtgaggctgaactcttttttttttttcccttcatttcctaagaacaattgactctgcttgcctggcctgaggaaggctcctgggtatcattgctctggcaggtggttttcatttgcctgtccagagatgctggcacaactgcaaacacagctcccatctcactcccagccatatc

SEQ ID NO: 20805 - DNA, 600 bp, Bovine  MMBT08447
ttcatttgtcacatttactaagcactgaagaggttgtaatacagcatggaagataaataagcacggcctctgcaataaaggggcttgcagatctagagtcttacgcatctctttagatggaattccttttagaaagatgtgtgttgatgggacacagatagacctttatgagaaggtgaaggcctttgttttcaagcaaaaatagctttgtcttgggttatactacccttggtccaaaaactactacaaytggtaaatagtttytaaagggccattaaatgtcatcctaagaacagttayagttttatgttatgagtgaaagtttcattgtattcaacaagcccaaaagtttctattttgggaaatgtaaatcaataataggaacaagataatcaaccttccccaacatcttyctgaaaagtataaccaactctttaaccagtattttattagtttatttcaatcactactcacttcaccccttgtttttttacattcctcttctccaaaatgacacctakgggtattcattcattcagtcgtacctcccatctatttattgcttgtcatcactaatacacagtttggggcacagattaa

SEQ ID NO: 20806 - DNA, 598 bp, Bovine  MMBT10830
  misc_feature (1)..(3): n is a, c, g, or t
nnncccaacatagagaagttggaggagtctgaattgggcatctcccaggccctcttggaactggagatgaactcggacctcaaggcccagctgcgggagccgaacataacagacgccgaggaaactgaagttggtggtggctggaaagctatcatcatctttgttcccattcggcagttgaaatctttcctaaaaatccatgggcagctgctgcacaagttggagaagttcagagggaaacacatcatcttcatcgctcagaggagaattctgcctaatccaactcaaaaaagttgtacraaaaataagcaaaagcatcccaggagcctcactctgactgccatgcatgacaccatcctggagaacttggttttcccaaatgagattgtgggtaagagaatccccatgaagctggacggcagctgactcataatggtccatttggataaagcacagcagaacaacgtggaacacaaggctgaaacattttctcgtctctacaagaagctcatgggcaaggatgttaattttgaattcccagagtttcagttgcaaacaaaaatgattaaataaaatattattcacaataaaaagccca

SEQ ID NO: 20807 - DNA, 600 bp, Bovine  MMBT04743
gaagataaaggaaaatatacttataagatgtaatctgaatgtatataaacttgaatgacaacatcagaatgacaaacttcagagataactttggacacaaattgtgaggacagctattactattttaatactagcgcaataatagatgtttttgcacttgatataaataataataatcaattgtatttcaaaaaatctgggcagccattaacatttagaaagctttgcaattccagttaattttacaacagaagacttttctacttcctacaagttacaagtcaaaaaaaaaaattctgytaggttatgtacattagctttcaaatggcatggagcaaaattatagatytcttttcagaaacaatatatgtaaacacagaaaatactgtcaatttaagtctactctgttacattaygtacatagtaaatgaagtgcaaaggcrtgaaaaatacttacctccccaaattcaagggggtctcttttctagagaactattgcaattaaagagggagtgaattactctgtccactttgccacatatttctataatctcaaaatttctttgtaagttttggagttataatgctttttaagttttt

SEQ ID NO: 20808 - DNA, 598 bp, Bovine  MMBT11926
  misc_feature (1)..(50): n is a, c, g, or t
nnnnnnnnnnnnnnnnnnnnnnnnnnnnnnnnnnnnnnnnnnnnnnnnnntgtatattttttataaggtatttcataaatgcagtcatacttttttaatactttgaaaaataaatattggcaaaggactgtcatccaaacatttataaaatccagtggaacatagaggaagtcatattatcttttgagcctctttttggtagtttcgggtgctttcgatgaacttcctgcttttgtgccctttccttgatccctgctctctagagatgatatgtggcttsttctggaggctttagcacaygctgtcagctctggctaccttccctccatcggctcataatccttaggcctcattctgtaaaaaaagaaatctaccaaagtgaatggaacctaaaggtcaaagctgaagtgtgccaaaaatagctctgagttagtaaattggtgcacccacaaggaaacaatagtcaaacaacagacagagctcgcctgcgttcttcctggaggcaaagttcaattgctctctaaagtctctgcgtattttgtgttaagcctttcacactgttttgccagttcagacccttaggaagttctggatcacc

SEQ ID NO: 20809 - DNA, 504 bp, Bovine  MMBT01514
ctatatgtattatttcaaacttccaatttaacgataatgctgtgaatctcaaataatatacagggaaaagttaacaattttttacaattaatttgtgttccttttcctaaaaaaattaaaaactagcaatgttcccatcaaagaccaaacatggtacaagggtaattcatagaacattaacttcatcttaatgcatcactattccaataaaatcacactttctgcactaacactttttggataagttcaaactgtggctgagtgtctgccacatacagacattctcttgggcaccaagayggtgaccataaaaagtattcaaatgatgacacctcctgagaagtaaaagggagtgttaaaatatattacattagaaaaatttttgaccacaaatgttttcttttaaaaataaaaattccatttaaaaactatttttaataaaatactaaaacttggtttcaaagatgaaaaacccaggacatatgctaaaaaaagacaggatac

SEQ ID NO: 20810 - DNA, 600 bp, Bovine  MMBT01366
aaaaaaaacccagcctggacactgtttaaatttcaatcactagatttgtgtgactctgcgtgaggcagagttctaggtggaagcagcaggggaggcttgtgaaggtacaaacttcaaccgcctgtttaggaggagaggatgaaaggcaccttcgaaaaacaacacacccagaggtgtagaagatggccaaaattcagcaagttgaggttattccataacctttaaaaaaaaattctattgaagtatagttaatttataatgtattaatttctgccgtacagcaaagtgattcagttataygtacatatattcttgacattttcttttccttgtggtttattacaggatactctgctatatagtaggaccttgatatttatccatcctgtgtatgacagtttgcatagcctttctttttttgtagaaccctttgtctctgatacacggtctctgctgggtctcatttgatacagtggcgtcagacttgaaaactctaggataagaggatggagggtctgacctgaggggtgctgcagagatggctgaatctagaagcctgaggtggaaccctgcatgctcaccttgcagagggggtgctca

SEQ ID NO: 20811 - DNA, 600 bp, Bovine  MMBT07238
ccaaggaggtcagcagagagagcaatcgcttcctcatcatttcccttgtgaatgaagccttcggagaccagatgcatccacttcattataattacgttaagtgccgcctgattgggcgctgttcatcacccctccggaaagcrgcttcgcccagtggacakacaagcagcctgcttgggctcagcgcacctccctctcatccgtctgtgtccttggcaatggctgttcgtggtgcccaaggctgtcctctggaggagaggaagcagtgggggtaacatgtgtggcctgggttgactcccyctcctcctccctggggctcagagtaactgtgcacaatcagctgcaccatgagacctctgcaccctcatccagctcttaacttgtcaggatgtcgggaggaaggtgaccttggtatccttacaggtgaacctcctgggaggttccttttgtcctgaggcatctgattgtccttgctgcgggattctgtgtcctcaccttgtaagaaaatgaggtctgccccatccttcaaaagggccagagcatggtggagactgttctgatgtcaagggcggccttttgtaacctcagttgtctatgcgt

SEQ ID NO: 20812 - DNA, 600 bp, Bovine  MMBT09554
ggaggtgataattgcttaattcatttctgccctttccccctcggtgctggctaaagcaccttccacatagtaggtatcctgtaattactggtttcaatgcctgtctgaatgaatgaatatatatcatgggtaagtgggaaacagacttctgcattcatttttcaaacataagcaaagggacaatcacatagatttttaagctcatatgtattccaaggattgagtctagaaaaaattactaatcagggttcttttctcttttcctttgtagaccatactctaattttttttttcaaaccrgaagagagaatgaagataagacagtgattctggttgagtttggataattatatttttcacactgcttagcagttaagattgacaactactgattatctaagacactatgtatttttcaaaataattcacaaaacaagagtaataattggatataattgcaaaaccaatggacagtttcagcacactcctgaatttacagacctcagtttccccaaccataaaataaaaggtatggaattgatcggtgtttctcagtgtttgtttcctcaagacatacaacataattcatacagggttcat

SEQ ID NO: 20813 - DNA, 600 bp, Bovine  MMBT02158
ttttcacactgttggtgggaatgtaaagtgatgcaatcactgtggaaaaccttaaggaagaaagaatattaacaaaaagttatttatcactgcatttatctactgtctttctcccaacctgacaggaaagcagaggttattctctggagaaataaaggcaaaaaggcctcacagttatggccaccamacagaatggaggagagaagtgtggcaaaggataaaaccagaggatgacaaggtacactagtgaaygaaggaatatgcaaccccctttctctgacccactcccaaaatgccacyatatagcacaaagtcaaagaaatgaagaattcctctctggagtaaaatgaacaatttcagaaaaatgcatctacgagtaataacatttatgagtgttccaatgaaaagaccaggtcttccttctaagacctgtagcagcacatctcaaattctggtgcctgtacctccttatagtcacaaaaattactgatggcttcaaactatgcaaattacaggtatcaaattgtaacattttagaaattaaaatgggaatttaaaaatacttattgattcatttcaaaataacaataacaaatctac

SEQ ID NO: 20814 - DNA, 600 bp, Bovine  MMBT02021
gcaggagacttgggtttgatccctgtgttgggaagatccccttgaggagggcatagcaaccccactcccgtattcttgcctggagaatcccatggacagaggagcctggcaacctacagtccacggagttgcaaagagttagacacgactgagcgactttcactcactcagtcaactttatgaaaagctttggtctcacggacgtgaaaggtgagccccgggaccagaggcccagcctgggctccccactagtccccgtgtcctctccccggccagctcctgcgtctgggaaacagttckctgatgacccctcaagtgtcaggaacaagggatcacgttgcatcctaccctggccctatggttaggctgtgggaagaagggagggagaacttgggatggagtgggacgccagagcgcaggctggtgagcggggccagcctgagtctttcctgacagcctgagatctataaataagccccccatcccgcccgaacgggagcagtcagacacgttcattctccccaaggtctgccgagtgctgcggtgattcatttcctcgtcgtttcacgaggtactacgtgctgaaattctttttctttg

SEQ ID NO: 20815 - DNA, 600 bp, Bovine  MMBT17118
tgaataaaaaatattggatttattctactttaattaatgagtaactgaatatttgacagggcaatacacttaaccctttcatataaagtcaactgccaatgatttcacagatcatgttggcaatggcaaagttattctccggaccaatgtcattctctcagagtatgttttgcagcagaggtgaaatcttagctggattgcaatttattaactgcactgatgatacagtaagtcttgattgacctaactatgcagagtaccctggagaagaatacaagttttgtttaaaatgttcagcayaccttgaataaaggaagaaagataaaccagatgtcatgatgaggggaataagggacttawtattccctgtcagagggtaacaagaaagctgaggatgttagaggataataatggggagtaaataaaatgatacatttctgtttgtccctgtttctctgttggttgctgtcgttgttcagtcgctcagtcgtgtccgactcttggcaatcccatggcctgcagtgcagcaggcttccctgtccttcaccatttcccggagcttgttcaaactcacacccattgatctggcgatgctatcca

SEQ ID NO: 20816 - DNA, 600 bp, Bovine  MMBT09558
catgccacaattaagaccctgtgyagccaaataaataaatacttcaaaataaataaaygcgcccactarcaacatctcagagctgatgtaaaggtagtgagttccctgtcactggaggtatacaagcagatattgatctaccgtatgcacgtcagcagccgggtaccagcagctctcaactaaagccctggacttctcaatcactgaagtccctccaattccaggtgcgctggactctgcgaatttcaaatttgactcccaccactgaggtcaaaaacatccacattctgcccacacagstctccgacactcagactggttttgcacaaagtggtaaaataacartttaagtatttcctaggtgtcagaactgtgaggagcaagaacaaattaatcaaccaagaattccttttcaatggttttcaagccagccagtgtctgtcaccaaaccacaggtgaaatgctaataaaattcagcttgtgacaacagcataatgatttaactatggcctgtttttaccaagaaatatatatatataatatttttccaaacatggccttttcaatgtgtgaatttttttttataagaacaggattaga

SEQ ID NO: 20817 - DNA, 596 bp, Bovine  MMBT17606
tggggtggtggtcatgggtaaccatcatgacataatccaatagtggatttcagctgcataaccaccagctcttaggagctgataatgtccaagcagggatgaagtgactgaggattacagaagcaattcctacttggtggggattagattgcagacctctgagaccttgcaacattgatatcagcgctattaaacacacacttgaatccccttcagctggtctgacactggacacggtggagaggtgggtgttgggggtgtgtggctctgttgtcatagacttttggtgaatggggtggygaggaccttaggaaatatttctagcagagcctcatcagtccaagcagtctgatttaaaatatattgcatgggacttgcctgatgtccagtggttaagattccacacttccacttcagggggccctggttcgatccctggttggggaactaggatcccccatgctatgtgtccagaaaatacatgcagtgaagtgaagtgaaagttgcttagtcgtgtctgactctttgtgacccatggactatacagtccacgatctccaggccagaatattgagtgggtagcctttcccttctct

SEQ ID NO: 20818 - DNA, 600 bp, Bovine  MMBT21900
cgatcccggggatccgggtgggctgaggagccaagcggtgtcactctgtaggactgcacgtggaggaggasccgggaggaagtgccagccagtccccaagacaagggccgtgtgacgcgacccccacgtccatcgctgccccgggaggtgggcagcagacggatcgtccggaggagccacctgcagagccrggctcccggagatcrgcgtcccctcgctgccccgtcctgacacctggaccckgtctccgcacctgcgtgattctccagggttcctcttcactgtgatttacctttgatytagccatttggtacttgtctcttgatgcctcrtaatgattcttgacaaatgttaatttatataaaatcaggaatcgctgtttttgtattgtttgcagcattgtgagccactttattattaaaaattatttaagaagaacctgggtttggaccttatttgtgcccccgtggactttaatgtctgtcacacggacttgcagtttctcacgtggactgtgggtgaagcatgacctcacacttctgcagcatcccggaccaaattcttaccccaggtcttcactgggcttttcagtaaagaatc

SEQ ID NO: 20819 - DNA, 600 bp, Bovine  MMBT09931
tatccattaattatctcttgcatcaatgatgcaataaatggatgaatgaagtagatcagagctagcactgaaacgactgcagaaataggaagacgtgactcacagccttgcaagtaaaactgtggcccrggaactgccaagggtgaggtggaatttcaaccagccatggctcagaaaacatgtgaggctcccctgatgttttttgaatcattctctggctcacttgattaatgctgtatctcactttttaccattttaatttctttgaacataaagggtaccctaaccactctcccattyccacccccagttaaagcaaaccacccagacatgctcatgagacttgggcccacttcttcaggagtgtgttgcctgtccacagagcttccagtcagcactcagatttaagtaaaggctccctggaacccatccacaaagatgtgctccattaccaaagaacttatcctccagcttcaaaagggaataaattttgtgtgcagggaacctgctgcatggggaataagaaatagtcacttaagtttataaaatcttgcatggtgctatctgcttcagttttctcttttaaagctagaggatgac

SEQ ID NO: 20820 - DNA, 600 bp, Bovine  MMBT20971
acccaatgctgagatccagttggagtgctctgaagtgaccagaggccacagacccctccatcccttcttgtccattgtcttgaccactctaagagcctggagggcacctccttctctaagaagtccctaggttctgaaagcatagtgaatccatgccttgtgttaatttcactgattagaaccagtgctctcttacccctctcccttgttaatctcagaggttccacccttagatcccagcccagcaaatgtttgctaaaatgttgttgtatgaataaatgtgactacccatctatctcyatcctttcacattgactgtctcaagtattataagggcaacctttttagcaaagaaaaaacaattacagatattagatggccagagaagacaaaaaaaaaaaaaaggtggggggtggggggggtggtttctactaggagaagctcaaagaattatgaactgatatattagtgataaactctctcgtccagaatctcatcaacattctactaactatttattattaactttgtactattgttcttcactcagtgtttgctctcctctgagaatatttgagcccgagtaaatctaaattcttc

SEQ ID NO: 20821 - DNA, 600 bp, Bovine  MMBT18906
caacgcaggggctatgggttcgatccctggtccgggtagattccacatgctgtggagcacctaagcctgtcccccacgacttccgagcctgtgctctagggccctccagtcacaactactaagccctactgaagcctgtattcctagagcccatgctccgcaagagaagccaccccagtgagaagcctgagcaccgccatgaagagtagccctcagtctctgcaactagagaaagcccatgcacagcaacaaagacccagtgcaaccaaaacaagactcggaactcctaatgctgggggygcaggctggatccctggttggggagctaaaatttacatgtcacacagcgtggcctcagtaaataaatcccactttctatcctcaaaaaatgttagagcagataatcagagcgtaattcacctaactggaaacatgacatctacagccatttgcgattgtactaggacttaacctgcttaccaaggaaaacaggtwraaacagaaagccctgagrcccagtgcagctcgaaggacaggggtgcagtgctgctctcaccttgcagccactggtccagagtgttgtcagtagtgcatttgaca

SEQ ID NO: 20822 - DNA, 598 bp, Bovine  MMBT03532
  misc_feature (1)..(42): n is a, c, g, or t
nnnnnnnnnnnnnnnnnnnnnnnnnnnnnnnnnnnnnnnnnnttacacagacagcattatggagagagggcaggcaggaaggagcactctcactcacacatatagtgatttgtcacggcagcaacagttattggccgaacacataatcaacacggggctacagggctactcatatgcctgcactgttttttcctttcaccttctttttttcaaagatgaaagctattttgctgacatatctaaaaacattgttttgattttgataataaagctctttataataagaaattggaggtacayttcactaataagttgtaaatacattttctaataagaaaattcagtactgctctaaaaacttccgggttactttaactgctacttcgcaatcatgaaagacattgtgacttacagattgtatctgtttatctgatatgacacagtcctgtgaagtgggtacaagtaagcccatttcacagctgaggaagaggagcctcgcagagatttacataatctccccaaagtcacggaggggcaaaagaggggcacagcctaaaggcttgggctttaatctctaagcataagytctttcttccac

SEQ ID NO: 20823 - DNA, 600 bp, Bovine  MMBT03622
tccactgccgaatgccatgtccccatttgctcttcagataactattaatctctttacacttatccccctgctgacaagagcagctgttagtctcgcctctgctctccccggacttcccacagctcccagtcctcctcgcctccttcttcacctttcccccttgacaggtgaggcagactgcaggtgagacagctgtgagagaaaaaaactaaaacgtgaggccctgatgaaggtgtccacaaccctggctgaattaaagctcttaggtgtctaagcctgggggaatggtctaggaagggracygaaaagaaattattatttgtgttcaagttaagggtcagtatacaaagcactcctgagcrtcctgtaggaatcagataatgctcccagaggcacgtgcttccctgaagcagtacaattagggaggcagtcggccctgacaaaagggacaaagaaattcgctgagcactttctcacaggcagtaaaaaagcctgttaggtcaatcctgtccttctcctcctagctacacagaatggaacttcagctaattgtgggcctggagaagaacaaagaaacatggccctttgaatttttttttc

SEQ ID NO: 20824 - DNA, 604 bp, Bovine  MMBT06879
  misc_feature (1)..(4): n is a, c, g, or t
nnnnttgatggtggtacactctgcccgctttatccccctggaaaaagtgcaggcgaagcttccacttgggaaagaactgcttgacaactgtcctctgtgtccccaacaggctgacctctcaccccatattttgtttttatctctattrtttatggtttgtttgcttatgttttgctcctgctggaccatgcatttctactggagacatggagaatcctactgagatgacatgaataatatggggcaataatggcacggttacacttggcctggatcagtggttttcaaagttctggttgcatcmcaagtgcttgttagagaggtgtactttaatccccagtccacatagtctcattcattttgaggctgggagatctgcattttaacaaccctggtgtccctgatgcaataggtcaggtgactccattttacaaaatacagtctgggttcctccagtctcctctgtcctcttactactttgggctgattccctccagcaaaggaagagcctaggatggtatttggtgaaattcaaatcagggggacrcatttgggtaaaatgtcctgtcctaaaagtcaaaggcacaggctaaaattataaata

SEQ ID NO: 20825 - DNA, 600 bp, Bovine  MMBT17077
atttataaggtccttgaaattaagaatggtgtctttttcatctatatcattcccatgtgtgtctaatactataccctggcacataatagatatttagtaaatatttcctatgtgaataaatttaatgtgtaatcatttctgtgatttgtttgacactgtcttctcctgacttctctcttcttcacacttaycatmcataaaattggggtgatagaataaagaaatgttaagtgtgaaccgaacatgactctcaccaggctgtcactgttccccccacatgatattctcacagtgtccagygttttaaattctccatgatctgtattttttcagaatgcttagaagtatcttgcataccaagcaggaagaaaacaaagaaactgcaggattttgtactgtgcagagcactacattmcacttatattatcacatcttatttctctgcacagtgcaagagagaaagtctgtcatcaaataaacatttagcagtttctgcaacatyrtacccaaaatatatagccataaagaataacaatgatatgtgaaactgtagatataattctctgctccagaagtagtatttgcctgacctggaaagta

SEQ ID NO: 20826 - DNA, 516 bp, Bovine  MMBT16896
gataataatagaaagccacatgtaaagcacagccaggaaatgacttgatgtattcgagtgttcaaacactcattttcttattaagaaacatggtctttactagccacaggaaaagctccwtgctacttttgcctgctggaatgtaggatacacatttcattggtctctgttcctgaaatctgtggcttgaaacttggagagcagaaaggtcattagatttagctggcctaaaataatacttcatgaaccaattccgattgtcaagtaaaagcattggcttgggatctaaaaacctgtaaktctttggaatgaattaattgacatctttttaaaatgttaaatttatttgcaacatttaggaaaatgtgtagtctccatgaacacaggactgccttttaagtgaaagattttattttaagcctgatattgaacgttaaaagacattttgccttttgcgtaattgataaattgacagattatcagaagttatcccccatccgtatttcgtcaaggcat

SEQ ID NO: 20827 - DNA, 600 bp, Bovine  MMBT21760; identical to SEQ ID NO: 4672

SEQ ID NO: 20828 - DNA, 600 bp, Bovine  MMBT10876
ctcatgtttgaattgcattgactttatatttcctaacagaaatttagtaatttatagattaagtattatcatgaaaatagaatcttcctcctgtccccattttttcctgataaagaatttctccatagaactataaagatggtcctcttaaattcaaacctgaaaaatgacccctgttcttggccattaacccatgttttctagctcttacattttgaaatgtagagggagtcttttgaactcactagagaaaaggtattcttcaacagagaaacaaaacttttcttaaattggcactcrtctttctttaccttcaactcattaaaatagtgtgaaattagtttgtaggccatcatattgagtttttaatgtacctattattaaagcgtgttttttctctaaatgagattgtaaggtccaagagaatatttcaaatctaataattggattttggattaccttattccaggagtatattttctaaattttttctgaatgctattaaatgaaccttctgaaacattttcaatctaagttttactttgttgaaactgacagctccaaatccacttgcttagttctaattcaaacctctatttt

SEQ ID NO: 20829 - DNA, 600 bp, Bovine  MMBT09094
accacactcagaaatattgtgtgctgagtaggagggagagatggaccacttcgtaagatttgtctccaagcagagctgagtgcgtgacctggtatagagatggaagatataaagatgatcttagatgggtcaacacaacgttaattcatggtcccttgaagccagtctgcctgtcagtgtatcacttgaaaaaggccatgcaaacctcaggaccttctgggtcctgcccacagtaggtgcttttccttgaatcttgtggaaggaagcctggtcactcttagcatccatcttgcacatccytgcagtggacacatagaccaggccatcactaagagcccatcagggaggatggtgtggggatggagacaggcaggatgctctttgtcctcaggggactcagagacagttggggaaacgtgtgactacctgtagctaattagattggttgatgtgccctgcgaaggcggaggtgggtttagatgggggagggtggggggcgttttgccatgagtcttgagagacaagtagggatttgtcaagcaaagatgaagcccagaggcataccaggcaggagggaagaggagagcaaaggtgcagagg

SEQ ID NO: 20830 - DNA, 600 bp, Bovine  MMBT16479
cgcaggttggccggcctctgaggcaggactctgacactggggttataaatgtttctgtctgggtgcattatctaaattgttatgtatcaccctgggtaatggcaaaagtaaaaaccgctgttagctcagtgaataaatcctcgatgttgatcaatcatcgcgtggcgtcgactcttttaataggcacaatttacatggagacttggcagcctgctccgtcttctaattgcagatggaaaacggatgccgatctctgctgtgccataaaaatgtaaactataaatgacttaaacacttgcrtgctcccttccccacccagcactcatttccacctcgtatttagatacaaatcggagaaaaaaactactctcrtgtgagataataacttttatgatgcggggctcccagcttctcccatctgatgccctcagtccttcttggagccatggtttcaccaggtctctctccatggggaaagcatcctttgtagctacacagacagtcccctgcctcttaagtactttgatggtgttgcatactgttaagtactctgagttattgcccctgtgctcattaatgttcctgagggctgaagggatt

SEQ ID NO: 20831 - DNA, 600 bp, Bovine  MMBT23122
tgttgtgtgtacagttcatttcttttaattactgagcagtgttccattgccatccatgacatcccacactacagttgatgttcccattttcctggtggacatcacttatatattttaagattaaaaatgagatatagcctccagaaaggaacaatggcccataatcacacagttctgaaaagatggtggagagatggtcacacatctgaaggagagttaagtgctagtacagaaaatctcatatacttctctcagctcctcattttgctttccctgggaattccctattagagaggctgrtgagattgaaagattttgacttttcaattaagatggtgctgagacctcatgattttgtttgctactttaattcttttttttcaaaaagcctttcttctctctcttttactgcaggctttgcacttctgggaggacacccttgttttcttactacggacgatattcatttgggtgtgaatgaaagtctcacagatacagcccggtttgtaaatcttctcttggaagcttatttcacaatttatggatacatcttaaaaagaaaatatgcttcrctttamctagcggttttccctctcagca

SEQ ID NO: 20832 - DNA, 600 bp, Bovine  MMBT12884
ttaaaatttaaatgtaagttttatttattattaaacaactctctttaaagtgctaattgccagtctgcttgaaatataatcatgtatagatgtttagaactctgtgttccaaaggttatttatttatttattttttttttttggtaaatatacatatcacagatgttataacaagagtgtgtcaatgctaatcacacttatcacagatggcaatttttaaagtcattttttgctgcccatgtctttcttgctacatgaaacctactttctgaaaactgctgattgccattatctactaaratattctaacatccacatgtgttcatttmctgctttcctgccgaactccatgatttttggytttgattactcatcaatgtagattcttctttaatattttcttcatgactttttctaaatattgaaatgaaaattgatccccaaagcaaatattcttgacattcatatattacttaaaaaaaaaraaaagaaaagaaactaggaaaatgtaagcttagatcctggtgtttagatgtgtctaaactccttatttgaatcactaatgttatagtatgagggcaaagcatttgagctgaaaat

SEQ ID NO: 20833 - DNA, 600 bp, Bovine  MMBT07578
ttagagtgaaacacagattatggaggggtaactggtaattgtaatgataagatctaacaggtatgaccaaggggatgagtgactgaggtacattggagaagagaatgttaaggaagtagcaggtaaagacattgaaagcattatttccatttaggttggaattccaaacaattaaggcagaagtgatgttagcaaaaactggcagtaagcaagatactaaggtcattgagacatgaggggaaaatgggtattaacaaaagaggagaataataattccaaaggacctcagactcctgcagraccattctgagaggaatgttctatcatagaaaaatgacttttttggccagggaagaatggatacatgtatatgtatgattgagtccctttgttattcacctgaaactatcacaacattgtttgttaatcagctataccccaatataaaataaaaacttaaaattattcacaacctaaaaaaaamcccaatgatttatgagttatattaaagaacaattacttaatgactttatatctgagtctcagggcctgtgtggattcttgatttaagatgaatttaagaaatttggggaaatttgg

SEQ ID NO: 20834 - DNA, 600 bp, Bovine  MMBT08594
gtaccatctcttggtagagtcctttcttgggatgtagttggttgtttctgcactttcagcttcactggcaaccaatgagaatcatcaaactggaaagatttaggttcattagtgatagcaatgatcacatttttctttccttttagacgactaaatacattgaacaagtgtgcctcaatgaaacttgatgtgaacttccaaaggaaaaaggtaggtgcaatttactataccttactaagaccatggctgtaccagcaggacgagctgcgttcacaaattaaaaacaacacamacctaagsgaaattctgaaatgactgaccgtaatatgtgtttattctccaaaaatctcgtcttatcataagcatcatgattcagcccgacaggaacctaggctaacatctgtttcactttgctttagttttgatcagagggtttgcatacaaacgtaaaatgccttgtttatgataatctttcagaagtttgtttagctgtaaatatccactctatattagactcaagttctccggtgatttgtagattaagagaatgcaaaacagaatctatggggtgggctatgcccggtgtcttctgcttcattc

SEQ ID NO: 20835 - DNA, 600 bp, Bovine  MMBT05356
ctggaacatgatatcaaatttcattcatgtttagtttccttatctgttaagtggagagaataatacttcaaaggggagtattaatattaagcaaaatatgtaaagtactggcttattggtatgtggatgaataaagtcctgaatgaagaataagaaacaaataaattgaagagttgagatgggttggaggtttaccagggtgactggtaactttatctctggagccttacagggtgactgataacttttattagtggggaggaagggcatcaacacagatagaacacacagaaccagagkcagggtctcagaacgggaatatggattgttatgggaatggcaagtaattgtggctctgtatacaaagtatttgcaaaggccaaatgtaaatgataattgtgtagaaatgtggctgggcaattttagtagttagaaattatatagtttataagaatatctcaagagtgtgaattgttacttttttatttaatatttactttttaatacttactaaaactgatttccaaatgtgttcaggcaagcaactatttcattatttcattatgatatttcatcctaaccagtaaaagaagactaagg

SEQ ID NO: 20836 - DNA, 598 bp, Bovine  MMBT17072
  misc_feature (1)..(114): n is a, c, g, or t
nnnnnnnnnnnnnnnnnnnnnnnnnnnnnnnnnnnnnnnnnnnnnnnnnnnnnnnnnnnnnnnnnnnnnnnnnnnnnnnnnnnnnnnnnnnnnnnnnnnnnnnnnnnnnnnnnntattttgtttgacgttactggagccaagttccaatagttcaaaggagacactgaaggaatacctgccacacactgcttgagcaatccagatgggcacactctgtcctttctcaagatcaagttcaaaacaagtccagagcaactcttaccgctccaaaaggctgggaggtgcagtttgtacaaggrgtttgaaaatgtagtccattgcctttattcaattgttgagagasatccagtttygtgctctttcctctctctgccttctgaccatcgcatcagtttcttccagcttgcttaccaaggaaacmttttattcctggtaatgaaacaaaatgaaaacaaaaatgaaaaccttccctccttccagtacctaggaatatttaagaattattctaggaataagaatttatatgcatttcattgttgacttaaaaataactaacttctaatagaaagtgaaaagtgaaagtgaagtcgctcagtt

SEQ ID NO: 20837 - DNA, 598 bp, Bovine  MMBT09564
  misc_feature (1)..(1): n is a, c, g, or t
ncccagtgtgctgtccccagtccctgccagctgactatctgctgtcttctcgtggttcaaaaatagaagtcatattaaaaaataaattgaatagttttctctccttctaagcagggagagttcttactcttcatccttttgaacctttaagatttttaatatgttgcctattcaaaaaagcaaattaagaagttaaatagaaaggaaagaaggaagggagggaaggagagaggaaggaaagaaatgccagttagaaaagccattgctggagatggagcagagagaccagagtttagattmtgcgattccataaggaagggctggattgcgcgtgaggtgagggacagcggagccaggtgagtggccagrgcttcctcaaggcctctaaggttgtgtctgaggtagtccagggctagaagccctgctcttcctgttctcctctgaaatgcagactcagtctgtactggttcagtgttctctctggttctaatgtgtatttctgaaacatgacattaaactgtaataagtaaatttaaacctcctgagcacattccgtgagcattcattagtttgtagtttatatactgacaacatatat

SEQ ID NO: 20838 - DNA, 600 bp, Bovine  MMBT04666
gttatcatgtttgcagttattactgctactatcatattactgtgcgccttgtctgttactgtagccttctgattggtcttccagcatctggtcttgcctcttctccctgcttctctgacgatctaactgctgtttgtacccagaccctcaccatgatgacttgtacctcaatgccagcagcttcctggccctgatcaatggggaaagagaccatcccaatgccactggtaatgaccccaggctcctaccttggtcccattttctgcttctctgaccttgtatattcccctttccaacctrgcctgacccctgtgactaactcaggctctcttattcccaccctgtagcttggcggaagaactttctgcgtttgggccgcctggtgctgattgggggccctgatgatggtgtcattactccctggcagtccaggtaataagggactgtgtggcctgaaggttggctaaggacaccccaatcccagccaatcttkatctcatttctaaaactggcctgcttcttccactgttcagttaatcccccccaccctccattcatcgtcacccaagacgaaaacctgggagtcatgtcccaacctct

SEQ ID NO: 20839 - DNA, 600 bp, Bovine  MMBT08364
gagtttgagtgacttacaaagtacacatagccaataaacatgggctgagacttaaacttagagatgaaactcactgatggatccaactaatatgcaattatatttgtgttatctacagacaagtttataatttgcatgtaagctgttactttcttggtggaaaaataggaaactttcaaatgtggaaaaataggaaactttcaaactctgtcccaatagttaaatacctagagggttcttgcagctctagtgactatcttaaaaaggactgtcaatttctttgggaattctgcatactgyattcctcacttaaagatgcataattcacatttatatactgaaggctctgagaaatctcattgggaagaagtcttttaaacttcaactgggacttgactaactcatttactaagtgtatatattaagtgtatatattaaggtaaaatccactttatgaagtcttcgtttactactagccagttcagtttctgctggagatgtaaaatgatggtctaaaacttgaatgcatttttgaaacaataatttaatgagtttcttaaaccacaagatcatatacccacaaagatgcttggggatttg

SEQ ID NO: 20840 - DNA, 600 bp, Bovine  MMBT11343
ccatgcattgatttaataggatttagtggtacaccatttatcttttgctcttaaataatccccaaataccttctggaactgaaaaagataattacaggcactgactagcataccaatgtcttattaatttctttaaaccaacatcactaatacagtcttctgaattagtgaatttgcagacatgtgcaagagatgtattagaatactaagacaatttatttttaagaaagtactgatttatttattaacagtttaataaagttattatattttcaatcaccaagggccaagtacatcatwtttacattctggcacataaaagggagcacaactttgcagagaaatttacaatactattttagctcttgggctttggtgtgggctgcagaaagtaatttaattgaaagttagcatttttttctttatgtgaaatatttgttgaactgtcaaaataagattgtaaaacatgttttaatacaagatgacttccagtagcgctaaatgattttagaaaactttgattcaaatatctacttaaacaaagctatgaaattttcactttgcctaagttcacaactttaaattttctttcgagaaaac

SEQ ID NO: 20841 - DNA, 600 bp, Bovine  MMBT01870
gggccagggctcaggggtgagtgccatgtggggggtggggtgcatttctgtggacctgggtggaatgggggaacttctttttccttggggccccatgggtatgggttagagaagcccatggcaagcccagtacctgcccttgccatgctgatgaatggggccctagagggaacccttgggagctgaaactctggagcgccctcccaggtgggcatcctgtgttcacagagcaagaggtcacctgtacagtctcctaggaacaaaaccaagaggcctctgtccccaaacagctcttgacaycaagaatgctttacagtctgctctaatatgagttagagaagggaaaagaagttctatccatcactcctgacagcagggaaagagctgagctccagtatgacttgcacagaagtgatctgggcttttgaaagggagaatgagagaggagggaaagcaggggctctgctgggccagagaatgaaaaagtacaaaaggctggtgagtgtcagtacaattaagctatcagtgtctgcagccagctttctcctcccacagagagtgggggacagaggctctgtcctttctgaggattacatttta

SEQ ID NO: 20842 - DNA, 600 bp, Bovine  MMBT11168
cgaacagctcagctggccaaaggcccaggcaaaacaccactgtccgccaaggacatgcctgggcctcccaaggccctggtcggccccttctggcggctgagtgctgaggtttgtgtgtaccttttatggttcctctctgtttcccaacactttcttgcaaaaacctccactcttgatctgccattaactttagcttcttcctctagcccccagacactttatcttttttatttagtgaaagtgtgttagttgctcagttgtgtccgactctgagatcccatgaactgtagcccaccaggytcatctgtctatggtatttcccaggcaagaatactagagtgggctgccatttccttctccatttttaaagtgagtgttaatatactaaaagagttaaaaacaaatgagctcagaaaaggaatgtacaggggaaggaagttcctgtcctgctcccatcggaggaggatgacctccaacttaacccaagggtataaggagccccgtcctgggccccagaccccctgccaggctgcctagctgtcaccctgctggggccccaggtgggagccaggaagccccccagctcctaagccccctccc

SEQ ID NO: 20843 - DNA, 600 bp, Bovine  MMBT10473
gccacctgatgcaaagagacaactcactggaaaagaccctgatgctgggaaagatagaaggcaggagaagaagggatgacaatggacgagatggttggatggcatcactgactcgatggacatgagtttgagcaaactccgggagagggtgaaggacagggaagcctggcatgctgcagtccacagggctgcaaagagtcggacatgactgagcaactgaacaagtctttggctgcagtgagggagccagtatccatatctggacccagtacatttcagactatccatatcccttagtayctttaaagtttctaatactaaaatagcatgaaaatactcctaaggttgaagatccttacaaagatgctcattttccattaagatataatgctgtccttcaatgataaggataataaaatctcagagcagtggtgtaaggagagaatgggacaaattgttgagagtaccactaaaacatatacactgccatatgtgaaacagataatcagtgggaattttctgtatgatgcagggcacacaaacccggggctctgtgataactgagaygggcaggatggggtgggaggtgggaaagaaagt

SEQ ID NO: 20844 - DNA, 512 bp, Bovine  MMBT22642
tgtgatattcccaggtcctaacacagagtaggaacttgaccaaatgtacaactcacaatactgtccctgcttgagcagctcagtcaaacgcacaccacgactcaagagttgttgagtggcagcatcaaggtcagaaccgaactgggcaaaagcagcaacctcacgatactgagccaactccagtttcatagtacctgccacctgaaacagaaatggttaactcaaacaatacaaaaatacttcaatgacacagaccaccayacaaatacatttttatttttaacctaakgacaaagtgayacaaattacctgtttcatggccctggtttgggcagcagatccgacacgggacacagacaaaccaacattaatggcagggcggatacctttgtagaacaattctgtttccaagaagatctacaatgtaaggaaaatacagaggcatattagcaagcttaaagaaatcaattattttcacaattaagtcactatagcaaaaactgaagccccaa

SEQ ID NO: 20845 - DNA, 600 bp, Bovine  MMBT01774
aattggggatatttggcttagagaaaagtgagctaagagtgactttttattgttgtaaggaatatggaaggttttcagtcagttatgtcttgtactcatagaaacagaaatgaccttcagtcaaagcttttgtaatgaacacaagggaagagtctgttggccagttacagaagaaggccaaggactgtctagtcctagagatgttcaataagaaatttagaaaatacctggaagtcatggatggttgacaaatagagctcagtagcatctttgaatctgagctgccaacagaaacacacratgcctatccatgagtaccatgggaagccatgagtcagataagaaggaagaaatataaagactatagaagaaaaacagaggaagaagaagaaataaatatgaatgtacatctgaggaagtggtcaagttagcattcacctatcagatacttctgaaggtcactcgtgacctctgttattttgtacaatatagagtgtaatagagttgtcatcatcaaatgccatgcttgtttagaagtgacccaagttgagcatgacaaacagaatagccaagagtttcaggcactcactctgaatgcag

SEQ ID NO: 20846 - DNA, 443 bp, Bovine  MMBT07050
tcaactagggtgaggactgtcagataacctctggtataagtcatggccttggtgagggcatttcttatggaacgatgacagcgggaaccaaatgcaatrggttgaggaacgcataccagctaaaaagaaatcactgagcatatatcactttttaacaagttctctagcttagaggacagaaaacaaattcacttctggatgaggaggctcgatttaaaccgctctaaacccctagcccctaccttctacctcccacccacacccacaccttgctcttttgtagggaactaacatttgcakcactcctattaagagacaggccctgagttcctcatattcattatctcactttattttcacactagccttgttaggattatttcaaggttcaaagagattgagtcacacaaccaagaaagtggaagaaaccaaatctgaactca

SEQ ID NO: 20847 - DNA, 598 bp, Bovine  MMBT11596
  misc_feature (1)..(15): n is a, c, g, or t
nnnnnnnnnnnnnnngtcacgcgtgggcagtgggggcaccctctgactcttagattgtgcccctagaatgacgtgggtggcgaaaagttgctgcagaagaagtggaccaccttcctaaaggcccagctgctttgcacccagccggaacaacttcccttcaacgttatccgtcacgctgtcctgctggcagacaattcctccaccgatccccaggtctacgcagtctttacctctcagtggtgagcaactaggcgagagcgtgggggttggaagtgggatttggggtcagctccctggccsgccagggagggtaggaactgatgtgagcgaagyacaaactccacacttcacatatgaagacatttgatcatcaccatctcccaggartttgactcacgcccttaatgtagggctcaatgtagatagggaaaataaagctcagaaaggttcttattagtttatgtcctgcctggttccaaaaaggataggaggcagcttacaaaaggcaaacgttaaaataaaataaacctatgaggaaatggaaataaaaggagaatgagagaacccagggatggagtcygcacattacagatgatta

SEQ ID NO: 20848 - DNA, 600 bp, Bovine  MMBT18648
ttgctgcagaagaagtggaccaccttcctaaaggcccagctgctttgcacccagccggaacaacttcccttcaacgttatccgtcacgctgtcctgctggcagacaattcctccaccgatccccaggtctacgcagtctttacctctcagtggtgagcaactaggcgagagcgtgggggttggaagtgggatttggggtcagctccctggccsgccagggagggtaggaactgatgtgagcgaagyacaaactccacacttcacatatgaagacatttgatcatcaccatctcccaggartttgactcacgcccttaatgtagggctcaatgtagatagggaaaataaagctcagaaaggttcttattagtttatgtcctgcctggttccaaaaaggataggaggcagcttacaaaaggcaaacgttaaaataaaataaacctatgaggaaatggaaataaaaggagaatgagagaacccagggatggagtcygcacattacagatgattatcacttatacagttggggatgctgggacacctgtagctgtgaacttcctagtggtcatagcatagagcgaaacaccatcaacaacataa

SEQ ID NO: 20849 - DNA, 521 bp, Bovine  MMBT11494
actgcccayccaccctctctctatgggccctccttactccattcttacacttagtcaacagtgaataaaaatttattgagtacctgctttgtgctgaaaatgatgctagacacttggggatacagcaatgaacaatagaggcatggacttgattttgcaaaattaccatctgcagacactcatatatccacacacagcaattctgcaagataattcccccaaatatcatgttcatcataactgccaattagggaacactcagcctaggccaggaaatacacatacttcattttgttttaycctcaaaacagtcagcaaggtaggcattattatccccattttccagacaaaaaaactaaggacccagagttccaattcttcgtccagagtcacataaccaataagtggcagagcttggggttcacccttggctccacgttttcaacctgtcctccccatcaccatacatgccttcagctgcttccccatggataaaagctcccagcatcgtgtctccagcc

SEQ ID NO: 20850 - DNA, 600 bp, Bovine  MMBT12186
gctgtcataaagactgagtgagtaaacagtgcctgcagcgcagtgcatgccgtgggtcctcagtcgtgtccaactctttgagatgccatggactgccctccaggctcctctgtccatagaattttccaggcaagaatattggagtgggctgccatttcctactccagaggatcttctcaacccagggatcaaacctgagtctcttgcgtctcctggatcgacaagcagatgctttaccctgtaccacctgggaagccacatatagttggcacagtataaatgttcacgctcatcttcatygtcattcttctggatggactccttggtgcagatggatggctggatgaacaaatgggttaatgtgaaggatcaaaatagttcatattgtgtcagttattagtagatacatagtgatgagggtattctagagatataaaagtagcaattcagaagggacaaatcacacagcctgctcccctctctgctgttcctccctgctcttgagccccccacaaaacccttcttttcagagcttttgctgttgacttccggaaccagaatgtctagttaatgatgattttgcagctcttaatgcaaatt

SEQ ID NO: 20851 - DNA, 600 bp, Bovine  MMBT08701
ctgaatgtagcgggataatcagggtagagaatttattgtgggggtgattaaaaagttgcatcagaaacataatgatccaccctttaattactttgctttgtagtaagcttagatcaatatcaactgtttgttttattcaagctgctttattttgcctccttaaagaaagcattacgtgactatgcaagtacaagaattaagagaaacttaaacatttggcaggaatggtagaaagtgtgatgaaagtgacatacatttggtctttgcaaagaaaagcttgtgccattgcaaaaatttaayaggtcatccagagtaagagtcataatgagatcatcatccttagctcagttttcattgaagtcctgtaaaatcatgatgaacatatgaaaatggaaacacttgagatcatgtatgaattggtgtttttaattgaattttggagtgtcagttgaatgcagttatccagtagagtagcttaattagttgccacttctcatctttctctggcttctcattgtgaaattgatactagctttttaaaaacaaaggatgctccagaagcaaacctgagttctcatcccatgccaaattggaaagaac

SEQ ID NO: 20852 - DNA, 598 bp, Bovine  MMBT05550
  misc_feature (1)..(66): n is a, c, g, or t
nnnnnnnnnnnnnnnnnnnnnnnnnnnnnnnnnnnnnnnnnnnnnnnnnnnnnnnnnnnnnnnnnnatacaactgagcttgcaatccaacctgacatgctttatttgggaatggacatctttaatctgctcctggcatcagtgcaaggcaaactatagagagaaacaagctcccagccggcttctcagatgaacagggaaattcgatcttgacaagaaaagaaaagttggaagaataaacaggcccaacaggattcctgactgttcaggagacagcctctgtactgagcacagtggaggraattacattttttggtgaacttgcccatttttttacatcacattcctcatccacagggagtatttaaaccctgccacattaagcttttataatctgggccatttgtgacttgcagatacatagtataaattaaatccccttgtttattttcttcaataaatcacagaaaggaagcctttgtatattttccattttaaattactttatccaagtctatctgaagattttattcaattatcatttgactgaatactattctgaaatacatataactgggatgatgtctcagaaagaatga

SEQ ID NO: 20853 - DNA, 600 bp, Bovine  MMBT09889
aaagccactttgaggagcaccatgcagtcaggcccatgacaccccccagattccagggcagtgatgacacaacctgctagtcagatatccacgtgagaatttgttttctccgcccacagacgctacaagtgcaacagctgcctggagggacttgagcgtctttggtgttcagaggagccacggcttctaagatccccgccagcccgctgctcaaagatgccacgactaatcatcgccatgcccttagtattcactggcccctcgtgggggctgcatgaggacctgctggtccatgcgccrtatgtaaaacacttggaaggaacaaataatccccacgcaaacagcaaaaggagaggcaattttcatcagccgagacaccataaatcttcatatgttttatgaatctcacttacatttcttgtccgacttgtgcataaaacttctccagatttatacagccaactgcataagtcattcccttccccaacgggctctatatcttgatgaccttttagaaaccaatgactgcttttctgttgttatccataattggaaaagcactggagataagaaaatttatggcaatgaatgatctacctg

SEQ ID NO: 20854 - DNA, 600 bp, Bovine  MMBT09896
acccatgtctcctgcatcccctgcgttggcagatggattctttgctactgagtcacctgggagcccagccccctccacagccccaccctaactgtggctgtacagttgaggaaatgcaactacctgtcgcccaaaggtccttcagctatggaagccagcatcaccctcagcctcttccttggttcatgctttgctctgcacctgccatctgcctgctttgcattcctgatgaaccaggagttatttaaggataggacttgtgccatggtgctcccagagctgtatggttaccaagcttckgatttccctagactttgtggttgcccctggcatcctgaaaaccccccagtaggtgagggagataagaaggaagcatacaagtggcccttttggttgaaaaagtttcggccagcccccttacccctccaactgtccacctcctgcccattggccagccagctcttcgtcctggaaggcagaacatgctggggccaggtggaggggcagcaggatcctgagctgagcggatgcttatttttaggagcttgcgggcactgctgcccatgctgggcctccgcrgcattctctgcagatccatcc

SEQ ID NO: 20855 - DNA, 600 bp, Bovine  MMBT13129
ttaaagaataaatgaagggacccttgaataaaatgagcttcgattctgacatccattagcaagctgttaccagttttcatctgtctagtttaaatgtaggccatccatttggagagagggaatggaaaaacatggtacaaaggcctgatctgttcaatgctttkgaatcaataattaaattgtaatcacttataaaacatttgcacaacatgatggagaatactggattctgactttggctttgtccccatattgttatgtgagattaacttttttacctaacaagattgagcttggttycacctacattaatatattcaaactttatgggacaaagatcatattttctttaaatctgatacagtctagtatgattctgatatgattatatatgtgattgggccatgacaatatgtgtacatcccagggagccttttaatttggtatctttggtagacagtttaaagaaataaaatattgtctctttgattaatttctagggaaagttgttggaaaaaattcaccctctgtgcctcaggcaacatacctctggctccatatttctattgcactctatattcaaaaggtctgtcattaagt

SEQ ID NO: 20856 - DNA, 600 bp, Bovine  MMBT08804
tagttacttcagagactacttacttaccttcatgatatccacccttggagaaaagagatcaataaggcactcctgtctgtgatcctcagagttgaatttctgccattttccccaaaggacacacatatctggaactcatttcctcttcgttacaacaaagctaaggtccttggccttcggggaactactcaatattaatttgtttagttaagcttttacctaactgatgaggtggaaagagtaattgaattggtagcaaattctaatacatattcatattgctgtacttctgaacatagycatacatttccaccacagcttcattttattatttagattttacaatgatgactactcagtatttccttaaaatctaccgtgaatgtatttctcatttctgaaattctatttttcaaacatcctgggcagattttacaaggcacagctaggttattaaggtttctgctgtgttatgcatttaaatccatcatggggtattttatacatttacattagtaaagaaagaatctgatgggacataattttgctataaaataatagccatgctgtcctgaaaacctagtgttactatggttcttc

SEQ ID NO: 20857 - DNA, 600 bp, Bovine  MMBT20938
atatttcatgtaatttattgaatgctctactggaagtaaaaaacagaacagctgtaactatatcgattgtgcatcatggtgatcatgtggctgcctgggagccgcatctctgcctcttcccagcatcagaagagagcatcacaggtgtatcattatcccagaaatggtcaaaattctaaatgtgatgtatagtttctattgaatgtgatctctttcacaccatcattaaactgacgaatcattaggtcaaaccattgttagctggggaaagtggggtaggttcgaagaacctctacaggygtcttaccttgagatgtgttgtgagtgtgatcccaaggtggagcctgatcctcaaattcagcagagaggttacttctagagctccaggtccactcaaaatcatcaccacgggctgcttcaaaccaaccacagctatctgtttcaaagtcacattcggtaactgaaaaagaaaaatgcagcttttcggtagactcttgaaggtgatcacgtgtttaaaagggtagacagagctcaatgggaatcaccttgccacatttgcctaagtaaagttttatttgaggaagaaaaggatgatatctg

SEQ ID NO: 20858 - DNA, 600 bp, Bovine  MMBT03276
tgtaaatgacaaatattagaactttttgttacttctgttatgatccttccgttggacaccaatagaactgttttcccttgtataagccccagctctgatattgtataacactgaccgagactaggatactggattcatttgcaggtcaaaaggagggtagttatatttcaaaataaaaaaacttgtatttagcattatattctactaatactaagaattaagtgctatagtattataagtattaagactaagtgttatagtctactgcagaaaaagaatgcctattgagaatacaatgakataatatagtaagcactaatgtaaatatgcaccaggttctatagtagtgcaaagagaaacagcatccactgtgcttaacctgaaacatcaggaaaatttgctagaggacttgagtagcaaataaatatgaatctgtaaaatagaatgggaatagtaattcaagcagaagcactagcatgaagacaggatgagctgcgtgaaacagcatggtatattcaatgaaccggaagcatttcagtatcagtaaaggaaggtgggaaccacaggaaaaacagcagactggacatggaaaacctacta

SEQ ID NO: 20859 - DNA, 598 bp, Bovine  MMBT19500
  misc_feature (1)..(120): n is a, c, g, or t
nnnnnnnnnnnnnnnnnnnnnnnnnnnnnnnnnnnnnnnnnnnnnnnnnnnnnnnnnnnnnnnnnnnnnnnnnnnnnnnnnnnnnnnnnnnnnnnnnnnnnnnnnnnnnnnnnnnnnnnnttatcctgtgcggaacattggttcccttgggtgcacaggaatatagaaaagagaagaaacacatcgtgatgttagtattgggagctttcagaccatccaaggctgatcaatagagacactatattggatacaaagttgttccctccctgccaagcttttgcttgtggtgtttttagtccrtgtatcgtgttcacctattattaattctcaaagattcttttttaattatggaggatcaagcctttcaaaaaataattaattacaaaacctacttaatattcagaggtgtcaygcaagcctataactggcattctctgttggtggtttaattagacaaggaaatgcaaaaagctgtcacttgagggtgggtggctgcaggggaggggagccccagcactaccagttggccatctgtaccagacacaaaagcacgactcttcagctggcctccctcacaggaagctccccatttttacca

SEQ ID NO: 20860 - DNA, 598 bp, Bovine  MMBT19501
  misc_feature (1)..(8): n is a, c, g, or t
nnnnnnnnttatcctgtgcggaacattggttcccttgggtgcacaggaatatagaaaagagaagaaacacatcgtgatgttagtattgggagctttcagaccatccaaggctgatcaatagagacactatattggatacaaagttgttccctccctgccaagcttttgcttgtggtgtttttagtccrtgtatcgtgttcacctattattaattctcaaagattcttttttaattatggaggatcaagcctttcaaaaaataattaattacaaaacctacttaatattcagaggtgtcaygcaagcctataactggcattctctgttggtggtttaattagacaaggaaatgcaaaaagctgtcacttgagggtgggtggctgcaggggaggggagccccagcactaccagttggccatctgtaccagacacaaaagcacgactcttcagctggcctccctcacaggaagctccccatttttaccagctcatccactgacaattcctttctgcagcgygtagctggaaggcagaagatactcgggtgctatcatttcaaatgcaataattcatggatgtggaaaaacaattaaaaaca

SEQ ID NO: 20861 - DNA, 598 bp, Bovine  MMBT17384
  misc_feature (1)..(70): n is a, c, g, or t
nnnnnnnnnnnnnnnnnnnnnnnnnnnnnnnnnnnnnnnnnnnnnnnnnnnnnnnnnnnnnnnnnnnnnnactttaatgcctctgactcattcctcaaagacatgcgttttttattgttttggttttttttttcattattgaaaaattgcaggccacgcaaagctagagacttcttggtccagggaatgtgtcagcttgctttcatttagcacaaaaggaaggcttttaagagagatttagagaagccagaggccttcttgggaatggtcccaaagatgatgaagaggctggaaagatgragctcagataaaaaaaaaaacaggagagtttttggtgacttcactggggacaatgggaaaagttactttccctccagaaaactgagaattaaaacacaaattgtgttcctctgcccagagatttcattaaggctgcctggwttgtttggggatacagggacctggggcatgcaggcaggatgtaaagctgaatcttgcaggtctttatttttaaacttttatttgtttatttattttttggccatgccatgccacatgcaggaacttagttgcctggccagggattgaacccgtgtct

SEQ ID NO: 20862 - DNA, 600 bp, Bovine  MMBT03075
tctacttaattttgtaaaaatagacaaaccaaaatctacacacaactcgtcagcattgactgagattaatggcacttttttgccaaaacagggaaaactctaagtaaaatacaaatgtatgtgaagtgtcatcaccaacagattacaaacaatatttctgtagcagatgagcccataggccacctgcaagctcattaacgtctcagtttgagaaccactaatggaaaacactttcttttagacactcatttctttatttaaagactctctttccctatccaggtgtaataatcttcctcrttgtcatggtttctaacagtaagtgttaaagaaacagccatgattcaactccagcatgagccaagttagcttcaagagtttaaaaacaaaacaaaacaaaccccctcaagctgtcccgtaactgcagatacttctcctgaccttctgctaaataaccattataacaggtgagaggacaggaatggagtcgcatcagtctgtcttaattcctagaaagatgactaaagtagagccctcaccatcagctaaatacacttacttattatttttgcagtttaaactttttattttatattgggg

SEQ ID NO: 20863 - DNA, 598 bp, Bovine  MMBT02585
  misc_feature (1)..(63): n is a, c, g, or t
nnnnnnnnnnnnnnnnnnnnnnnnnnnnnnnnnnnnnnnnnnnnnnnnnnnnnnnnnnnnnnncgccttatgaaagagggctctctttctccttcctccatctgaggacagtgggttgtcagcagaaggccaccatgctgactgcacccagaccttcctaaactgtgagaaatgagtttctgttcttcagaagccactcagcctgtggtgttaagttatagtagcctgaatagactcaaacacgtgaatccctctagatttgcaaaaggctttttttctttcatgcattagtctaccggycactctccacgtcaggcaatgcacccatgaacatgtgagagaagtcaggctcatcaagtccaggtgacatcatgcccaaggtcacactgctggaaagagcaggggcagagctgagaggagagctgaggttttctagctccgtggtgagcactagctcttctgcccagtgctgcccattgaaaacctgattccccctcctctgctcttaccatggttgcagccgaggccaagagtgaccctctgatgatgtgaggctggcagctgccttgcccaggccaggatgctctgggaacagctg

SEQ ID NO: 20864 - DNA, 600 bp, Bovine  MMBT02796
tcatacctaaactttaaagagcattatgcggactctacatgtgtgtgggtaggtggggaaggagggaggaggagggagagaaagtggtgagagagaaactatattttcttctttattttcagttcaacaaagtattcatgttacagctcaaattacaggtttcagcatttggaaaggctcaggaatgttttccttagccattcttgaaacatcctctgagaaactgcctgctttctaaggctcagttattgaccattctcagaaatgggtttctatatttaataacctaacacattcctmtaatattaaatttttcacatggaaattggtagccctacttgaattcgtctaggctcaatgagcccattgtttgcaatgattatcactctcagcagattcggaaatgcttgcacaattcatgtccaaagaattcttcaaaatatttttttatgatctttacttttggctttgtaaaagaacttgggtttgacaaatgtgttccaaattcccccaatttgtcatctgtaggaaagattatttgaagctaagtaggaacaagactgattaacaaactgggatctgataacaacttttagagtg

SEQ ID NO: 20865 - DNA, 600 bp, Bovine  MMBT12538
acctccacaagtcctattctttcactttcctcatatttattctataatcatattttattatcatcactaagattatttctagttgaaacagcagatttatccaattcacattttagaaagtatcaattctatatgtagcaatatatttaggcagtttttgagtcaaataataacatattgagaaaatataacaagattaatgttaaaaacaaaatagaaacaagtgcctttctaatgcaccagcataacatttcttcttctctggttgttttgtgatttgtactaaaattttgagtaaamttgtatgttgttatccttaaaataatggaatattttattatttaataataataatgcttaaagaaaaatatttcaaggaaacatgaaaaggtcaaaataaagattcaattaactacaaaattaatcagtatctgtcctgtaattatagtattataaagatatttacccaacaataccaagaataactttttatgagtaaaaagttttttttaagtaactgctatatttcaaggaaaaaatgcccttttaaaccaataatataggatgaataaataaatacttagaagacaaaggctggtc

SEQ ID NO: 20866 - DNA, 600 bp, Bovine  MMBT12302
gaaaatttaaatttcagatttaattttctcaagcaagaaaggacacactagaagaagaggggaaaagagacactaggaaaagaaaagggatattatattgtgtgcaagttctaccccataaatcttaagatacctgagagacttgaaatattctcactctttaataaacacatatagaaacatattttgctgttctcaaactgtactttctcactattactgcctttgggaataaggggctcaaagtagaaagaatttcaggtttagttttcagggttaagtttccataagtacttacakacataaaacaggtcaaagaagaagggcatggcatggtagcacattctgaaaataaacgacccccataatgaataaatattttcaataataaatttggtcatatatttaattggtgaacactttcctttaaagtagtggaggctactctaaccataggtaatttctaagaggtctaataaacaacaataaacatgagtatttatattcaatgcttgagaattttcaaagcaatctcacagatgctaatagtaaccttattattacaggttctcacattgtttccacatagctgatagaaac

SEQ ID NO: 20867 - DNA, 600 bp, Bovine  MMBT10124
agatgttatgcaaaatacactttcaaagagtttctgaagaacatgtgaaaaacaaagtattactcaaatccaaagaatcctatttaataaaggcwctgctactagcrgctatgatagccaaaagacagaagagaaatgatagaatgattaagattagaaacacaatgcaccaaatatttgtttaaataaaccccaaaagttggttgcaattactttatcaacaagctatgaatgcatctggagcaaagtatctaaatcattttgataatcagattcctgaacagtcacagtcccacagtygtaagtgcaaggacagtatgttatatattttcagtgatagtaaagggrgaatgtcacaaactagacttaataaggaggtaaagagaagcagttccaatggaatgaatgaggtgatcagtgcacataaacatcagattattgatcatggaaatagtattttaagtattgaacacctgattctgtattcatttataactatttacttgcaataatttagcattattgatttttaaagaaatgtaagccaatgtattctcaaatgataagaatagggtccatcttcacttatttttataatag

SEQ ID NO: 20868 - DNA, 600 bp, Bovine  MMBT04447
acaatgcaatggacgaaaagaggtctttgggaaccaaagtttgagttgtcagaagattccactttttttagtatcacttacaaaaaaagacttatgtataaatataaaagttagttttgcatcataagacctggtaattgctagtgttaactgttttactggttatagaaactctccatatctttatctataaacttaagatagatacttacatttcctacatcaataaacaagttgctaactagaatgtcagtgagtattcagaaggtatttgctctgtgcctgagacatctgaagcartaagyacatcgtttttattttcaaggaaacaagtcaacttgtcttaaatatacaaaacttttgtcctaatcaaatttttgcttaatttttttgaggtttcagaaggcaggctgtgagtgaacagcagtgagatgtccttgaggaaaaaagatggaaataagaagggctaggtggtgaaagaggccagcagagaagacatagacttaagtggaagcagaaatttctgaatgagaatacatctgtcctctcccattcaagactcaacttcacatgtctgatttatgttttccaggtaacagt

SEQ ID NO: 20869 - DNA, 598 bp, Bovine  MMBT07863
  misc_feature (1)..(67): n is a, c, g, or t
nnnnnnnnnnnnnnnnnnnnnnnnnnnnnnnnnnnnnnnnnnnnnnnnnnnnnnnnnnnnnnnnnnntaatcactagctagattcagtaattattaacattttactatttgcctcacaaatgttaagtcctaagttaaacttcagcataaaattcaaagtgtatttaagaggactcaccttttctaccttgtcataatttttagctttaatctgcagagaaacagaagaaaaaaaaatagaattaacactattctttttagagtattaaaacactatctctgagtgttttgattaagctkgtaaattcacttctatactttcctattaattctgcctttcaaaaataacaaataatagaagtctgaatccaacatggataacatgcattgtaaatatgccttacataaattaattttacatgtaaaaatgttatacattcaatatgttgaaattttgtgaactaaaaattttgtaaaacagtcacaagatgaataaagaaatacaaacaaggcatatttgaatagagctttgaatagatctactaaagacaaaacttgtactttccctgaaggactacgactaaaacaaccctgagta

SEQ ID NO: 20870 - DNA, 600 bp, Bovine  MMBT20376
taatttacttctttgtcttggttagtgctgagatctctagactgggatctctaatcccctggactgggattagattccctaatcattcaaaggaaaattcagagattatctctacttcactgtggatacgagcatctgaaggacgtgtgtgcatgctgagttgtttcagtcgtgtctgactttttgagaccccagggactgcagcccaccaggtttctctgtccttgggattctccagggattgaacccacgtctcttacatctccagcaccggcaggcaggttctttactgctcgcacygcctgagaagtcccatgctctcccctaattcttgaatacgaagcaacagctcttacaaatccttcattaaataaccatttagctatcaaggtcatgaaacagaatgaaatgaaggacttagtcatttaaagctaggctttatttgtttatttttaaaagcaacattcattgtcactgttataactgcttctgctgacggaaagggaaatatcactacctagtttctttctgcccgagtgttagagtgaagcgacaaggtaggtgattaaatagttaatcccactgggggactgtaagtag

SEQ ID NO: 20871 - DNA, 600 bp, Bovine  MMBT12041
aaaaagcttaaaagaagtagaatttctcaaaatcccatgctggggatgaccatccatctagctacaacaaatatatccttttcttcagtctaccaaacacctaatgattagccgcaacactaaatacaaacaaaattcatttggctaacacctagctatctatttaaaatctttagagaacagaaaggtgattaattaatgtaaattagttatgtaatagctagagtaaacataatgtgcatgttcataaaacacactgcacttgctttacacatctgcaaataattttcttaacttacraaaaggaaaatataagacaratacagtaaatttcagattttgcctcattctccagcatatagcctctgattctgaatgatatataaacaaattctagtcttaaaaaccaaataagcaagcatacatcgaatcactttactgaacaaatatgtagagaagtatgttgaaaattcagcaaacaaaaagcactttcccccacagttttcctacttaatcacaagtgaagtctgatgtctaagtagtgaataacggtttgtaacttttgaccttctgttggtcaagttcttaccagtgctatgg

SEQ ID NO: 20872 - DNA, 600 bp, Bovine  MMBT18846
tttactgaaactttccaggcttttctcagcatgaacactttacacttctgcagtaaactagactgctagagtaaggcaaaggagttgtcagtgccacgctgctgcatgctgccaaggagttcagggtgggaggtggtgggagaggatggggtttctcatcycttccaacccaagcagaaattaggtctctcacctgagcatgccaccgttcccccccaggccagcagtattcctgctcactggtctaccttcgggtgccctaaaagatcatcctggatttctgctttgtcattttagttsatgtctctgcttctgtcccagtcattcactatgaggaccccacctctgagaccacccccctgccatgtccaacccccacaatttacaaaaggggaaataggaccaaggagaaaaggatcacagctcaaggtcacagcctgcaggtctggtgggaacacacgttaggaatcctgactcgtaacagggggctttgtcccatccactgatctcagccagaaagaaatggtcttgccactgctgagggcttatgccgagggccctttcctgggtcctggatgatgtgactggctaacacataaa

SEQ ID NO: 20873 - DNA, 600 bp, Bovine  MMBT06811
ttctaagaggaatggtggggggctaagtttaatatacagtgagttgggatagaggtttttcttgaaataattctgrcatcttttgaccatagcctttatttgcagagttgctgcagccattgagaaatttggtttaaaactcaggaacagttttcaaaatgtattttttaatttgtaagaaatttatagaaattttaatctttatgcatattcatttttgtatgcatgctgtatttaataatggcactagtgtgtatttctcttaagtgtttttgttttaattttgtgcaatctcttttrtccaaagaatgaattagtctcatgcatctcaagatagctcaacacatgataaattgctgttgtcctaagatttgaaatacagtttgctgttaggagcattaatatagaatcgtgtggatttcttctttagtaatctgtggctattctagttttttttttaaactaatgatgcaacaaaaatagataatgtagagaatcaaaattgttattacctataaccagctatttctgtttctgtgatatatacccaagagatgcttgtatatattatgtgacacagttggaagtcttgtggtatga

SEQ ID NO: 20874 - DNA, 600 bp, Bovine  MMBT20056
ttgtcgatctgactgtccaagcagtatttgaaaccatgcaaaaccagtggaatttaatacatgtttcttttctgataacaaccagacttgtacaaattagggcagcawgaactaatgctccctgaatcagttgaccattgatgatcaaaatattattaactgtcagggacttatctctaacaatggtcttttagtctccaaggcagttatcatactgaaaatcacccagacaggtgagaaatggctgaccacacctataagcaaggccaaatttaccccttgggtactttaaataattgrcttactcactgcccaaaatggattctctgactggccatggaatttcaaggttaaagattttaggggatcagggaatgagtcagaatatgcaactcattgcccataggaaatgatcagatgatgtaattataacctacttggggatgttccatggtagagactgcagccaatggtgagtgttatctaaggactaagtcctctatttcttgggcacagaagcttgaccaggagcaggatataaagacacagtgtattggctaatcaatgtaatttcggtaactatgatttgaaggagcgtat

SEQ ID NO: 20875 - DNA, 600 bp, Bovine  MMBT10839
tcctttattaccattaaagcaaggaagggagggagagaataacaaaagtggaaatgagattttgaagtatcaagggtgaaacatttttaagcaaactgcaatagatcctgaggctttcaaaggttgattcctcagacaatttattgcagaagatttggcttctgagataattggtcttcttagtcctatgactctcctgagattgccagcttcccccatctggattcacaacatggacaggtgttttctgtctggaccaaattactttaagtgttacattcatggcctaatgtctatttmaatgcaacagatttttgctctgtgacctttaacatgtctaattccaattctgatagagatgggaataacacaattgagaaggtgcttgccctttgctgaatgatgtgtattgagatttgcaaacaaacaaacaaacaaaatccctatgctatgagcgagagagagagagagagcaagagagaaagagacmaatgcaggacctattctaataaattagatacttttatataagttgttaacctaagcttatttgtgtaaccctattcttttggctttcttacatttttcatatgccgagag

SEQ ID NO: 20876 - DNA, 600 bp, Bovine  MMBT13341
aggacaatgttagggttcttgatgggcaataattgatgataccatgggtaattgtgggtgtaaaattactcttctggctctgtaaatgggaagtgtgctgttgtgggaaataatgcaataataaaaattaaaaagtggtggtgatgatggtagtgacaccggcagtggatgactaataacacagtcaaacctttaactcttgggtgtaaacactgctaccatgacaatcagacacattctttggtatttgagtaagaaaaatctcaacttctccatcaaatactaagccaaacagattgyttatgtgaatatgtgtgttcttatccctagaacagacagctgaagagaggttatctaactaaaaattactatttttttttcaaaaactatcctacagatgttaaaatgaatttcagagaatatctaatgcaaagaaaaatcacttaatactcttttaagactcttcattgaawgtataaatacatatattctaattatataaaayatattgcatatatatatgacagtgttgcagtgttatctgtgactttctttataattgatttgtttctaaatttttaatatatagatttatcatca

SEQ ID NO: 20877 - DNA, 600 bp, Bovine  MMBT22245
agaaggagtgtagacgaagctacaaattaaaaataagaagttaattctctctgttgaaaatagagcccccatccattttcttagagaacttgtaaattctttcactgtctctttgaaatgtatgyaaatcttttcaaaatctaaataagtctcccgccagctttacaacctaggaatgtctttctcaagggcctgagagccatttctttgaaatgtaatcattaaaaatgatagcacccctatctcccaggttctgcagaagagcacaagcctaacttctgccggttccttgctccaagytgtaaaacagcctyttgccataaagatatgagaaggttttacatctgctttggataaagccaattagctaacacaaaaggtcactccttatacaaaacgaatttagaatgaactgtgtgygacaaattaygctggcaggtgctcttacttgagaattagttatttatcttgaaaacatgtatgtaattggttgtatctgcttcattgtataaaagggagagatttcttctgtctttgcaacctcctagtggattgcctgtgatgtacactcaagctctggtttaatgcttattcagtaat

SEQ ID NO: 20878 - DNA, 600 bp, Bovine  MMBT11776
ttttcaaaatctaaataagtctcccgccagctttacaacctaggaatgtctttctcaagggcctgagagccatttctttgaaatgtaatcattaaaaatgatagcacccctatctcccaggttctgcagaagagcacaagcctaacttctgccggttccttgctccaagytgtaaaacagcctyttgccataaagatatgagaaggttttacatctgctttggataaagccaattagctaacacaaaaggtcactccttatacaaaacgaatttagaatgaactgtgtgygacaaattaygctggcaggtgctcttacttgagaattagttatttatcttgaaaacatgtatgtaattggttgtatctgcttcattgtataaaagggagagatttcttctgtctttgcaacctcctagtggattgcctgtgatgtacactcaagctctggtttaatgcttattcagtaataaaattgtttcttttctacctttgtgaagagatttctaggcaggaagaatattttgtttttaatatatcctcccaaaagggcaagggcagaaacaaagaaaatagttaagatatcgatgtgatactccag

SEQ ID NO: 20879 - DNA, 600 bp, Bovine  MMBT09205
ggatggtctttgtgtgcwcaaccagcagtgtcaaccatagtgatattgcgggagctgtttctcagtgtaagcaatctgatttcagtctacatttttcacaagtcaatgctttagacttmttgagaatagtaagagtcttatttatcattagattcctccccaaaatacacggaatgattttgtagttaaataaggtgaatctattgtatatatatattttccatagttatatcttgtgttcattactgagatcttatcaagttaacaaaacaagattccaggagacttccttggtgatasagtggaaagaatctgcctaccaatgcagggaacatgggttctatccctggtctgggaagattcaacacgctgtggaacaattaagtccacgtgccacaactaatgagcctgtacactccagctactgaagcctgtgtgcctagatagagcctgtgctctgcaacaagagaagcatccacgatgagaagcccgtgaccacaacgaagagcagccccctcttgccgcagcccacgtgcagcaacgaagacccggtacaaccaaacataatttataaaaaaaagactccagtgattactggtc

SEQ ID NO: 20880 - DNA, 600 bp, Bovine  MMBT09479
ggttgtgatggtaccttaaatgggcaggtgaaggagcccaggagaaacataagcagttggtatttttcttgcctgctaatgaacttgtattccattcattactctgataataaacaaaaaatataaacaaagcagatacaaacaaaaatacccagctctaccattatcagtcaaaaacccacccatgtcagctacttttctttaaaaaatgaggtgccagatgttgggctaaatatttataagcattatatcagtaatcttcccagatcccttagaactcatcattgagaacttagaaawcattgaattaggcaaaatttcacattagccgtggacaggatttctccctgaagttrtagaaaattacaagttgtgcatgcacagtcctgtccaactctttgtgaccccctgaactgtagcctgccaggctcttccatccatggaattctccaggcaagaatactggagtgggttgccatttccttctccaggggatcttcctgacccagggattcaacctgcatctcttgcagctcttgcattggcaacaagattctttaccactgagccacctgggaagcccaaatatttataagcatt

SEQ ID NO: 20881 - DNA, 600 bp, Bovine  MMBT11973
aattgcttttcctagatattcctcgctcttcctctttatcttacataactgtctgctttctgagaaccagaacaaatgtggtctcaattaagttttccacaaacatcagccaaaacctcttctctggttctaatatcattccttgtcctcctccgcccagctgagacttgggcttttctttgaagcccagcacaaaacccaactctcccaggaggttttcctggcctgctgcaccctcgtaataatcctttctttggaatctctgccattctagagcctgggctacacacactgaccccrtgttgacagcctgggccagtccctccaacctcacgttacactggaatcgttcagtaaaatgtttgcagaaaraaaaagaaacgacctcaagttgttcctgcatcatcctaggtatgccctcctggtcgcttcaattaaargatacatttttgagagtycaagctcttctttatccttgcttccctttgctgctcatcaaggcacttagatgaactaccccatctcccttcagcttgattcagcaataattcacttatacctctatcattaaaaagggaataaccaatcatctttttcatg

SEQ ID NO: 20882 - DNA, 494 bp, Bovine  MMBT19126
ccttgtcctcctccgcccagctgagacttgggcttttctttgaagcccagcacaaaacccaactctcccaggaggttttcctggcctgctgcaccctcgtaataatcctttctttggaatctctgccattctagagcctgggctacacacactgaccccrtgttgacagcctgggccagtccctccaacctcacgttacactggaatcgttcagtaaaatgtttgcagaaaraaaaagaaacgacctcaagttgttcctgcatcatcctaggtatgccctcctggtcgcttcaattaaargatacatttttgagagtycaagctcttctttatccttgcttccctttgctgctcatcaaggcacttagatgaactaccccatctcccttcagcttgattcagcaataattcacttatacctctatcattaaaaagggaataaccaatcatctttttcatgtttcctcaccataactccccaaacttaaaacatc

SEQ ID NO: 20883 - DNA, 600 bp, Bovine  MMBT02848
tcatctctctcaggattttattttaaaataggaataaaattatgagtaaaaaatgtatggttatatgtttcttatagtttttatggtgcattactaatccccaagagagatgtatcagatttattggatcatggcagctgtttaccaaattttatctaaagggccgactattgattagagcaacttgtgagaaacattgttctaaatggtcaattagcagcacttttacccaaatcctcagttgagatttatgctaaatcacatgaaattgccaacactggaccatttctgaccaactgraaaggaatgatttcatatggttcaaataaaaacaatttagaacaattactcccaaacaggagggaattttgaaatcttaaattacagtaaagaataggatgattatctaatgaaaatatttcaaatattctcaaacgacgctttacctaacttactctagaaacaatataaagctgcttaaaggcatacatagtactcaacaaccaaaacaaagaaagtaaaaataagaaagcaaaattttaaactcatgatcttggattttttgtgcaaaggaaggccagattcaagagacagactctt

SEQ ID NO: 20884 - DNA, 535 bp, Bovine  MMBT08951
gtacataatattataatccatagcaacactaaagaacaaagacagatgttacccacaaagattctttcagtccttaaaccaactacttaagccaacagtttcatgcgttaaaaaaataagttccatgtagattctagtaagatttccaaaaagcctctggatattttttcttcattgtaacggagttatatgttattctaaagtcttgtaccttgtactttttaagccgcagtaaatttaggaaaagaatatctgagtttatgataacagggttactaaaatattataaatgcaacataytatatacattattactttctgcatttagataacagtaacgtaatgaaaagtcactgtataactaaggaaaatggttacgttgatgtacttgatatcccaaaattcccatcacattggtaataaaaagtattttaaaatacttttaaaaagttctattttaagcaagtaggaattttttaaggtttagaagttaataatgtgggaagtatcttagccatttttatttataaaactg

SEQ ID NO: 20885 - DNA, 600 bp, Bovine  MMBT01874
atcttgggattttaggaaactataggaagaggatgaagttataaggaaaaggagaataaatcagaaaaagttagaaagaatggtggtctaatcgctcttcgtcagtagattgagataggcatttacgaggaaaaaagttaggttttgtttggtttctgtacaagtgtgggcactgaatgctaattcttgttgaaacacatttatgaaaataatttgaattactagacagtcttggaagcaacacagcacagtaagtgggtaatgactggagccatttttatattctttgcataaactgtyataattgttgaccattacattatgaaatcaaaagaaaccgaagctattgcacagaatgtgctacgtttacagcctcactggaatgcaaattcttaccaaattgagtaggatccttgattttgatggttgattttctagttagatgttaagaccagtaattctaacaaaggttaagctttcatattaaaaaaaaaaaaatcactgactgttgcttttctatgctaattagttcttttgaattttcatttttactttaaacttgaaagagaaaaaaatatattctgaaaatgactttaattc

SEQ ID NO: 20886 - DNA, 600 bp, Bovine  MMBT08312
atttttgcagtggcagctccccaagctcatctcattctctcccaataccttaggcaatatctgaagcaagaaagcattgacaagaaaagaaaagagtttgacgccaatggctggcagctcttcagcaagaaaagccaggtacatttcatcttggtgagatggaaatcctgagattagagtattggttagaaaaggagtatactgcttgggccctggcatccttctaagtgtctggcctgacctcagccagggaagatagagtagagtaagctatctgtgggaaaatcaataatacatttyttatgaagaactaggttttctaaatgcccagctattttgctaaactttcatctatgggagaaaatgtttgcagactggttggcccttgtgggagggaccagcttttacacccttgggtatcatagaaatctcagatagtctcctgtgtgataaacatgaagtacacaggctggactgagatgctgaatttttttgctctctgagcctatgttgttctgagtgggggaccaggaccatctctttagaattcagggaaacctggaaaatttatatcctttggttcttatttataattgaata

SEQ ID NO: 20887 - DNA, 600 bp, Bovine  MMBT01148
ttgtctctaattaaaactttcttcaactgtcattgacatcctatttttcaagaaatttttatttaatatgccatatcttactactgaatcctaataatcatgttattctatacatgttctcaattcaagtaaacattaatttttaatctatatacttagaaacargtattcagaaacaacctaagtggtaagattccaaaacagataaatcttaatatgtatgaacataacttttcttttttgacttatctagtaaaaattcaaacagcaaaacctacttcacctacctcgcctaccctktgcactatgagtggagaaaaaagcagcatcctataaaggttcattttagtgagaatcctatgcctatgactctactgatattaaccccatcatctttttaaaaaatatttatttggctgtatcaagtcttagttgtcacacatggaaccttcatcattgtggcatgagggatctagttccctgaccagggatggaatccaggcccctgtcctgggaacatggagtcttagccactgaaccaccaggggaagttccctaaccccataatcttaagctttctaatcaaataatcatgattgt

SEQ ID NO: 20888 - DNA, 600 bp, Bovine  MMBT02067
gcctttctcctttacaaaggcagacttgtaaaatggatctcaatagatgagaaggtgctggttgggtgagtgaaggggtggagtggacacgcatggctcctactccagagcggatgagcatacacagagaacagcatggacacagctcgaaggcctggcagcttagagcgtgctttgcttagggcaggtgtgtgggggtgaaggaggagggggagtgccttgggagaggggscctggtgggtacgaaggggtctcattctgcaggatcttatatggcacaccagagggcaagtgttcccygagacaytggaataataaaatcagagtcagaggaagcctttgcagctgttgaagctcatcccttttttcaagtcattagaaaaggaagtaaaatrtgacgtttgccttcaagctgacttcagggctctcacccagaatgatcgtcagaccctcagagaatttgtggtggtgtctgtgggctggcagacagagctgccactgagaacacacaggtgtggggatgactgcctctcagggagcacagaggcccgaccttgtgccagaacaggacaagtccaccgtctactggacgtgcagcct

SEQ ID NO: 20889 - DNA, 600 bp, Bovine  MMBT18153
aaatacaaaagcaaaattgcaatcattgtatgcctccccccaacacatacacacgcatagactccacccacaccaagtttagcaccgggtggctaaatgtttaaaagcccagacttgaagccagacccatgggttcaaaaccctgatttttcactactggctgaatgaatttggacaaaacccaggtgccttaatgtccttagcaataaatcaagaataataatatcacctgcctcatatattaaagtgaacaaatgtatatatatatatatacatataaagtgcttagaatgatgcccrgcaattggtgttatgtaagcaccagctgttattattagatattctttcasggtttaactgagtcccccaaagcccctgtggatcctggttaagaattacaagggggtgtgagatcacagactccctgagctggaaggaagcctcacagagatggagagcagggccacttcagccaggctctccctggggccaccccaccccccaagttcccaccctgacccacaccctttcctatttacacccagacggaggcagcctatgcgctgactcacgcttggctcagaccaagccattgttctg

SEQ ID NO: 20890 - DNA, 598 bp, Bovine  MMBT03742
  misc_feature (1)..(111): n is a, c, g, or t
nnnnnnnnnnnnnnnnnnnnnnnnnnnnnnnnnnnnnnnnnnnnnnnnnnnnnnnnnnnnnnnnnnnnnnnnnnnnnnnnnnnnnnnnnnnnnnnnnnnnnnnnnnnnnnnatttcttgagttacaggggtgaaaaagagtgtcttttgttatgtacagtaagttcctttaaactttgcccaagtttatgctaatgaagtgactcgtatgggtccctagatagyttcagacgggggctggttgctagaggagaagctctggtgctcaggacccttctggaccttgtcctgtgtacctctscatttataataataggaagtaaagtatttctggggcatgtgagtcaytacatcaaattataaaacctggggaggaattcttgggaaccctgatttgtagccaagttggacagatgtgtgaataacctggcagttttgtgggactgagcccttaatctgaggggactgtacttaaccctgggtagttggtgtcagaattggattaaattataggacacctacctggtgtctgcagaaaattacagaattgcttggtatggaaaaacccacatatctgatgtcagaggtgtttgagaaaa

SEQ ID NO: 20891 - DNA, 600 bp, Bovine  MMBT07699
ctctgaagagtgcttagtatatgcttctacttataaatgaactcctacaacaggcaacactagcccatgattaaaaacaagaacagtgattgcctctagggaatggggcagggtgacaggagcctggattacacaggtttatgtagtttatgcacattatactctgtgatttttttaaaccgtaaacaaatattaaaatctagttaatgataagcacactgaagtgtttagggctgaaatattattgaagcctgtgagttaatctaaaacacattttttttttttggctgtgctgtgcartgtgtgggatcttagttacccgaccagggatgaaacctgtgtgccctgagttggaagygtacagtcttaacaactagaccatgactttttaggaaagtccctaaaatatatgtgtttttttaaaagctagattgatgaatgactrtagtgcaaggagacccaagcagtccattctgaaggagatcaaccctgggatttctttggaaggaatgatgctaaagctgaaactccagtactttggccacctcatgcgaagagttgactcagtggaaaaagactctgatgttgggagggattggg

SEQ ID NO: 20892 - DNA, 600 bp, Bovine  MMBT13973
tttatcattccttaattcacattacattggcccattgctgmttttcatcagtttcaataccactaaatgctgagttcatatttcctactctaaagtaggtatccctagactatttgtttaggaagattgctcttcccatctctgatttgagtttccaagggtggggcacagcaggagtggcaacacgttgaaatccctgataggaaggaccagaggagcggagtccatctctgagaagaggggatggtgaccgccggctggctgagcaggtgtagaggggctgctttgtggctgctaatyaaggcctcttccttgtcagacttctgaaatagacaagcggatcttggacatgggttctggctatgtaagctattttttgtgaattattactgaaaacctagtctaaattgataaaggcaactttatttctccttagtaagtacatgaaataggtatccagctttttcttgggcacaaactgtccaggcaagacttttgagtggcccttgagcttgttctacactgctggcctcagtgctcctttctgaaggagaggggaatcctacttaaatgtgtggcttgatatgggactgttttcgt

SEQ ID NO: 20893 - DNA, 598 bp, Bovine  MMBT03098
  misc_feature (1)..(90): n is a, c, g, or t
nnnnnnnnnnnnnnnnnnnnnnnnnnnnnnnnnnnnnnnnnnnnnnnnnnnnnnnnnnnnnnnnnnnnnnnnnnnnnnnnnnnnnnnnnngatttttttttgcctgagatacagctttgaggagaatgtcagggggacactcttgttcccccctttcctatgacatgataaacatcaccccatgccatctggtgtcaccatgcattcggtgccttaattagacttatagcactaaatgaactatctctttgaaataacagaagtacctcatggtctgttatcacaactttatgggctccyggagattttggaatctcagactgtgaaccacccatccagtccatccctgatttacagatgaggaaagcaaagcctccaaactccttagtcaaatgatgtatcagtatgttgaccctctgtttttgaaatctgagaagggaacagtgaagcagtgggaagggtggggtgggggaaaagtgtggctatgttgaaaatgtcagtgatagcagagaaaatatttgcctgtgagaccctgcctgtctctttggacttctttgtaatggttaagacaacccaacagggctggagtcgttagtga

SEQ ID NO: 20894 - DNA, 479 bp, Bovine  MMBT13285
acaccctaagcttacagcagtgcacagctatgaaatgttgttttaccgcaacaagaaaatyacagcttgcttcagggactgtgagggcctgttctctttcacttgtggttttgctgcagatgctacttctttttgtgttcttttttgtacccattcatttctcctctccagctccctgcaactccctttctaaagtaacctgtgcttgctgttttgcattcagccatcatgtgttcagtgaagcctgatggggttccccagctgtgcaggacagacgaagtcggggagctctgcgtgtgygcggtggccacgggcatgtcctactatggcctctcgggtatgaccaagaacaccttcgaggtaggtggcaggtgagccccatcagacagcttttgccaggtgtgtggaatagatgtaaaaggagatggtgatttctcaatagaacatgttcatggtaattaaaatggttgtactttctc

SEQ ID NO: 20895 - DNA, 600 bp, Bovine  MMBT11825
cccgccaggctcctctgtacatgaaattttccaggcaagaatactggagtgggttaccatttcctccgccaagggatctaccmgatccagggaccgaacccatgtctcctgcattgcaggtaggttctttaccactgcaccacctcggaagccccttaacctccttaccctgcctctgacgcttttatttgggattttgctccagttaaagccaagagtggagagagacccttccaagcttctcccctggctctttgcagatagaggtacaaacacgagcttcttgggtcttcagtgccygcagggaaaatccccaaacccaccacctaaaatgtgttgcagattccgagtgtgcccatataaagtcgccaacatagctgaagactcagacgttggtcatcaatcgatgtgctactagcatgagctcttctagctggcatggaagcttctcaagggtcagcagcagtggcctccgttccctgtgggtcacaattcacgtgggtcttacctccctgcaggttaagctccctgctctgtaggcacggggccggggcgggggcgtctggggctgtgtgactggcaggcccaggcttccgggcc

SEQ ID NO: 20896 - DNA, 600 bp, Bovine  MMBT21627
actacagaaataactctttcttgaggggaaaagaccacttctatcactagtcaccttgggccctgatgcttcaccaacatttgaagttcttcccagaggcttcttttcttccaggacaactcttatcaaatcttgaatgttgactcaaccccatgttgatggaaagtggaaatggcacgtggctaaatttgacccccagcccctttgcagtgaggtaaagtcatagaactggttatcaccaatggaatataagcagaagtgatgtgttacttctggactgaagaggttaatagtggttaycgtttctccgcatggtttctcttccccatctgctggcaggatgacacctcggcaacctgaggccacatagttaagatgacagagacacagcatgaacagatccagattcctgagttacttgaccacagacatccacactggattatgtgatactgaagtctttatcatgttaagatgctgagatcggggggttgtctgctacagctgttttatctaaagttacaaattaaggtaacaaggctgaaatagcaagaaaccaggcctaaggcaccatagaatttgcactgtaatggatgtaga

SEQ ID NO: 20897 - DNA, 600 bp, Bovine  MMBT18362
atttttagagggtatgccagagacaaagaaaatctgcttggagaagcattcacagaatgaaataaaatatacgtctgtaacctgtagcaggagttccctctgatgccattattacaatatgtatgcttgctttagtgagtactgaaataaaagagttcacgtactgtaaaaatctattaggtagagacaatgtggattatagaattcacaaagatttctttaaagaaattaaaaggagcggcatttcagattttccactaaactcagatttttgtttcatctcctttctagctttggtgycccttatgttgagtaattttcccttttgccaggacaatcaccaatcaacagctcctcctctcctttcctcatcatttccattgttttatcattctgccatgtaagaaaaacaagaaacaaagggtggaggagggaacaacgtgaatagtgtatgtgactgataaatgattatgcttctgaaaaggccacacggcgtagtaacagagatcacatttttatagtgtctgtactaggcactatccttagcacattacatatgtgttttacatataagtgtataccatatccatatatactcat

SEQ ID NO: 20898 - DNA, 600 bp, Bovine  MMBT01840
ggatagccattctcttccccaggggatcttgccaacctgtctgtcctgcactgcaggcagattctttaccatctgagccatcagacactatagaaagagggtgatgaaagacagaagctccccagctatagcagaaagagagagaaaggcaaggctgtgctaggaatccatctcttgctttttcttcatataaagactgtcatggtgatggacgattggtggcgtgaccactgtgcttccttatgaagatgctggaaggagcacagaggaaacactggtgggaaatcttcactttaggawgcaacacacctctgttcctcacagaagagttgagaaacatcagaaacactccctgacccagggtctctcaaaccttagtcacttaccactgtcatcatttttgttctatgcaagtaacagctgtatttgttcttctttgatatttttctataaatacatctacatgttttgacctaatactagagcttaacaccaagtgttcagtatataagcaattayttttctggatacaacaaaatagcctcagttttgtgctgtattttgtggcctgaaagtgcattttttcactatgatatttct

SEQ ID NO: 20899 - DNA, 598 bp, Bovine  MMBT21009
  misc_feature (1)..(147): n is a, c, g, or t
nnnnnnnnnnnnnnnnnnnnnnnnnnnnnnnnnnnnnnnnnnnnnnnnnnnnnnnnnnnnnnnnnnnnnnnnnnnnnnnnnnnnnnnnnnnnnnnnnnnnnnnnnnnnnnnnnnnnnnnnnnnnnnnnnnnnnnnnnnnnnnnnnnncacttataataatgaaagtgaatgctctgaattttactaagacattccatgcaagaattaattcattttcatctagaatctaaaatgtgctttcatgtttctattgcatagttgtttttttgctgtataacaacggtgatcacataacctttyatccaaactgggacacttttgaagatgaaagaagtgttatgaataattatacaagaacaatagtcataaatatgaactgtcctgggcaaacccaggactggctatgattcttgttcaaaatgtgtatttcattttaaagtatacttaaattattggagttatgtaaaatttgaaatgggatgttcgttttgaaaagaaacatctttgtctctttgaattagatgggttttaatcttttaatattctatacttggtgaactatccatcttttctttctagtttcacctttccttgttat

SEQ ID NO: 20900 - DNA, 582 bp, Bovine  MMBT02559
gcaaccactgttcttatttctatccacatcgaactttcttaaactatgtaattggaattacacagtatgtaattttctataatctttgactcaatataagatatatccctatttttgtgtacaatcagaagttcattacttattaatgagtgctataccactgaataatatcttcaagtgattatgccattttacactcccaccagtaaggtcaattattccatttgttatggaacatgacatctttgtcatgatactatcagtttttaattttaactatttaggtggttgtgtagtgayagctcattgtggttttaatttgcatttccctgatgatgattatgttaagcaccttttatatgcttcttgtcctttcagtatgttcttttgtcaagttttttttttaagttcttgagcacttttatcgggttatcatcattattgacttttatctgggcttatgctttgttatacatatgtgtcgcaaatattttctcacaatctgtgccttcatcttcttactaatatctttggatgggggagaatttttaaattttcatgaaaactaagtcaaagattttt

SEQ ID NO: 20901 - DNA, 600 bp, Bovine  MMBT02782
agttaaggagctctacaagacagagccgtgccctgacatttatcacagaataagcagaaatgagccctcatcatgcccagctgataaacagcctttggtgagctgaactcatgttgctgatccgctaattgtccagctatattcatttgacgttgctgagcctctaaacaaattaaggttaattggaatcaggaatggatcagcaaccttggtactcaatctgtttagcagttctcctcaactcattacttttcttcttttagctcttgcatgaccaaagtgccactcattctacctgcmtctattttgactgratcttattacaaaatgtttcaaaagggaattatctgggggacacgtggcaaatcacaactcagtagcatccagagactcaacgcctccaagagacaccttgtgaatgttgttttcatgtgtctttttcaagtaagtctctatctaatccttcagacgtttcattttctcatttgggtcctctttcggtagaacagaacctagtcctagaaaggacttcaacatatccatctgatctagctcctagtcagagattgtattaaatgcatttcatagattaagtaaaga

SEQ ID NO: 20902 - DNA, 600 bp, Bovine  MMBT08106
ctgcgttgtgactcaagtcctgagctgaggcctaatgctgcactgagagctgagttccaaagcgctttcggcagttgggagcataccacttggggtgttaatatttgaatacagaaaaaggaagctgttatttcaaatgcctcacaatacattgcagttgagggattttatttcccaataattttagcttaaataaatgaatttttctctttttagatatggcgagagcttttttctccacttcatgcactgaattttggaattgggggagatacaacaagacatgttttatggagactwaagaatggagaactggagaatattaaacctaaggtgaaatgaagcttttttttwaaaaaaaaaaccttaatcttaagtcttttgcagagagttaaattgtcagaaactggtagtttttaagaaaaatttcttctgggacttccctggtggtccagtggctaagatttcatgctcccaatgcagggggcatgagtttgatagtcaaggaactagatcccacatgccacaactaagacctggctcagccaaataagtaaaaaaaagtgtttaaaatttttttttcagttgcttctttaaacc

SEQ ID NO: 20903 - DNA, 600 bp, Bovine  MMBT16723
tacaaattatgtaatgattttgccattgctaattatatttgtatgatggattctgtatcagtcttcattataatgtaactattgtttgaacagaatatagcaagttaactggacagtttatgccttaagatcctagcattcttttaccaatgctcatttgcattctcatcagtatgcatgaggttttcactgaactttaatactcttattggaatataacacactataatgagtgtagaagtgaacatgcaagttgaatatcccattaaccactaaaaaagactagaagatgcaggtagraaaacacttgatgaggcataccttcttcaaacttcagtaagaactgaaaatggctaatacacttttagaagtagcatcaacaggggtttgaggtaaatgagacctttatcactagattcagtaggtgaccattcagaacgaaattataggtttacacaccataaagatcatatataaaaaagaaatctgtataaactgtattaaaaaaaagaaaaaaaaagatatttttaactatgaaaactcttcaaataatatattataaaatgagttattttctaattattgactctgaaaagtttc

SEQ ID NO: 20904 - DNA, 600 bp, Bovine  MMBT13207
caggaaattaaatccgtctgtcgcctccacttaggtcaaccgagcgctcacccacaacctcagagagccaaggaattctccacgaagagggcatttctctccccatcccgtgaaataacaggcacgtcactgtccttcagtgtgccctctgtagacagcctgacactgggctaaggttttagcagatgtgttctatagtacataaagaataggtattttgttgctatgtccctctggcctccgtaattcttggctcgtttccaaaaagactacagaagtcatcctggccccttaagtttygaaatcccagtccaccaggccctgtacaacagggaggctgagctgtcccctgggaccatctggcagccagcagacaccccctccagctttgcagtcatctctgcttccactgaggagggtgagcaggggagggtccgcagcagggtttatttatttattttttttagtatttatttctttttttttctttttttttttaaattttatgcagcagggtttagatttgattctgagggaaaatcaggaaggtaaataaatcatgggaaagaatgtgaacagcatctgagtgggagctgccac

SEQ ID NO: 20905 - DNA, 598 bp, Bovine  MMBT04546
  misc_feature (1)..(123): n is a, c, g, or t
nnnnnnnnnnnnnnnnnnnnnnnnnnnnnnnnnnnnnnnnnnnnnnnnnnnnnnnnnnnnnnnnnnnnnnnnnnnnnnnnnnnnnnnnnnnnnnnnnnnnnnnnnnnnnnnnnnnnnnnnnnncttctgcttctgtctccacctctgaccactcctctgtccctcctgtgtcctcctgtcctcatcccagagaaggaagtagttgccagttccccatcccctctctgggagccaacagctccagctcaacctgagactcccacctccatgggcttagcccacacttccccagagcgagcygtgtgggtagggagtggccagaccagatttcccttctactgactcactgtgaccttgagtaagtcacttcccctcaagggcatcactcacccatgcccattataaggggttgaattgaactagaggtaagataggggatccaagccccaaagccagcttgagggtcagagaatctttccattcagagggctgacctctgagccccagctctcaacaattccctggtggctcagatggtaaagaatccgcctgcaatgcaggagacctgggttcgatccctgggttgggaagacctcct

SEQ ID NO: 20906 - DNA, 600 bp, Bovine  MMBT01683
aagaaaaataattacaagctgaaagatactggcaagtattacactcaatataaagataaatacattagccataaataaatctttatataaaagctcacactcagggcgggctagcaaccagcaaccatacattgtgtcagctacagccggccactaaacaaagggaatgaaagtktgctagtaatgttaaartcttgtaaaatatttcatagttgyctcatgctttttttcctctttactgtacttaaagggggcatgtgagaggtagcgatagttccaaaggtccaggccagaagtgasaaaaattaaactctaagatctgttcttaaaatattggatgtactttactaatttgatttacctaaatttcatcttttacttacactagagttcagagatataaaaaaatgaaagcagacatttattctttcagcccgactataagcttttaccagcagtttcagacatactgtatttatctattctcttagcctaagaaacaaacaaaatatgaaacataattatatcatttatttactgggctgaacaagtacaatttttctataatactcatgacaaggaaagtagatgctatttatt

SEQ ID NO: 20907 - DNA, 600 bp, Bovine  MMBT16931
cacaattcttgagtgaaaattgtttaactgataaccttcaaaggctaaatgaatctttaacaaaattcaaaaaagtaataacatcaatcattagattttcctattccttaaaaaacaagttgtaagtagtactagttagtagtattactaatagtactagtatttaatcactatacaattaaaaaaaatccctccctataaaatctttaccacatttgattaaaaatataaagtgaaataaaatgcattgtgtttatactggatcagtgaaaacccttgaggatctctcttttggtcctyaatgattctttaaactagtatgtctgtctgttataaaagaagataaaaatataaatgttttgcactgttggctcataattctgggcacatttgttgtgttgctaaatatggtggcctagtttacagaaaaacagaagctgtttgtaagttgtcaaattaacacatttaaattaagcattccaaagacactaataacagctgtgtttttaaatatttctttgagccattgcactctctgcatagaaacatgtggcacagtagctactgctactgcaatgagttctgtatggagtgacttta

SEQ ID NO: 20908 - DNA, 600 bp, Bovine  MMBT09536
ggtgtcttatgagagctcattctctacttcaagcttgaaaaacagcatgttcttttgtyttctctttgtcttctttctgaaacattctgtactgtgcaccttcagagaaaaaataaaaagcctcgattttatttaagccactgttattcttggcaccaaatcctaatgtatgcagaaaaagatgatgttctattcccaactgatttgagttgaatgtcagtttgaaactataatatgtggtgtcaggatccaggccatttctcctcctataactgatgggattttcttttttttcaccaytaatcattgctaaattttattgaatgcttactatgtgtcatgcactattctaagtccttgcacaataatttcataaaaaccttagatrcaaccctatgkaacagctattacaattgctcccaattcattatacaaagccttcatcacagagaaattaaatatttttcccaaggtcaaaagggccactaaatgttgagactggtatgaaccatgtggactcatgaggcaatatccactttgttaatcattaatggttaagatatgaccagcatagttttacatggggtggcggattcagct

SEQ ID NO: 20909 - DNA, 600 bp, Bovine  MMBT16493
gcattcttggtttgaacaattcatgaatgacttggaaagtctatggcatggtaatttgcaactttgctgaaacaaattccagtcatacacctgctggaagtcttaaatgtggaaaagagacattcatctgggaactgagcctggtttaccacacagtatcaagaattcaatgcagtttccctcttttccacttgtgtctgctctcaaataaacaatagggggctgaaggttgttacttcaacttttcattgtcaatttgtatgtataaattttgaagatttgaattctgagggagatggscttagagatttttatttcgtackaaaaattagaattaagtaaatgtctctctgaaaacaacacacatacatacacatacaacctgttgtgctggagctttatgctcatccaagggcaggttaaagcgtctgcctccaataagggagacccgggttcgatccctgggtcgggaagatcccttggagaagcaaacagtaacccactccagtatttttgcctggagaatcccatggacagagaagcctcataggctatagtccacagggttgcaagagtcggacactactgagcgacttaacc

SEQ ID NO: 20910 - DNA, 600 bp, Bovine  MMBT19882
ttttctatggcatttgaatgagttccttttaggggcaatactgggaactatatgaccaaacaagcaactgtagtatcaagtggggcttaatgcagtgtggtcttgagctaagctcttggtatgatcaasattcttcaacagacaagaaattgtagggaatacagagaagcacggatatgtgatccagattgtttttaaaattgtgctttctgaaaattccactggtcattagcagctgtgtaggtccctgaatcatttttggcctggataactaggactaacagagatgtgataaatgarggaggtattaaataaacagactagaaagtcttttccattacaggtttgtaggcatgaaaaccgaacttggggccatcattattgagaataagtgagtgaggtttattgaagaaagccacttatggcttgtttttaacaatggatcacactcaaaatttatatgtatattgtttatttgcctgtatattcttattttaatcactgtctctgatttgtggcttaaaaagatttagaaaacaaaatattcctcttagaaacttttttgatgaggcacctttttctaaccactcttccatttag

SEQ ID NO: 20911 - DNA, 605 bp, Bovine  MMBT08371
  misc_feature (1)..(5): n is a, c, g, or t
nnnnnctttcaaccctacaaggcagagagagagagagagagagagagagaatgcagagcttgcgttcagacagactgctttgtttgtgcctgctgattctaaattaatctgtaggaagatttgcttctagagttctgatttcatgttcttgggaaggtatatttttattgttgcagggattacagatccttttttaagtttatctgctttctaaaaggaggaacgggattaattataagcccattttgagagtgctactcatttaaatccattctcaagaattatttcctttttaaaatcaaggsccagtttacattatgcaggtagaatggaaatagtatagaactcattccactgtgggctatttattggtgacaagatgaggggtggtgcccaggtggctgaggtaatcacactgttgcgttgatctggggatggggagggcaatgatgtcgtgctgtgtttgtgacatgcctctcgttctcaccagtctacgcctgcaagctctcggaccgggaacatccactctacctgcgtttggtagcaggtcccagaacagacacactcagttttgttctgcgcgaacatgaaattggagaggtaag

SEQ ID NO: 20912 - DNA, 600 bp, Bovine  MMBT20334
gggaacaagctggggctctagcctctctgactcagtgacccacatgctaaaaaacagtcggagcagctctgccttagccagtccaggaacagggcaggaagtccagcttttggcccactcgtatcctagcttgcggttacagtgttgaaagcatgcatgtctggaaagctttttccccgcctcccccttcatcatctgtggcttcagtggcaatgtcaggaaaccacaattggcctactccacccccacccrgctgcctccctgggtgccaagaaagaaagaaggttaacagtccgtttygatatgctggaagccctcgctgctaacagtaacagtccctttyyctcacctcataggtcctggtggtcgacctcgtcaacaatcggttcctcaggcaggtgagtaagaagcaacccagcttcaaccactgcttgctctgtttgcacctctttgatgtttagagctcgcctttccagctctgtggtgggcctggaatcccaaagcaggccagcaggcggggggcagtccccggccagggcttgactgaggacaggacagaaggcaggggccaaagaagaggggtttggacaaaggattgat

SEQ ID NO: 20913 - DNA, 600 bp, Bovine  MMBT03097
atgttgctaatacctaatttttattaatggattaatagtgtgcatatttttctgaggatttccattttgcttgacatatttttgatattcattctttctatctcatgtagcagtagtcatttatttccaatactattaatatataatattctgttgattgtgtacattgtcattaattattttaacccttatgaagatttgggttgtttttgctattgcttctgtgatgaatctgctcctataggtcccctgatgcatttgaaataattcctttagggtcatttcataggtagaagttgratttctgaaaactggtgatacacatgaatcctaaattgtctccagtatggttaccaatctgcacattcaccagcagcacatgaaatccaatttataaartcaagtytttctgaaactccaatagcatctatgatgaaactcctcttcctgtgtatgatagggacttctgtgtattccatgaatggcttcaagatcagtccattattcacatctatctttgatacatttatactttcttctcttgagtttaagttgctgagtaaatctatccattgagtttctattgttaataccatgatg

SEQ ID NO: 20914 - DNA, 600 bp, Bovine  MMBT06239; identical to SEQ ID NO: 4858

SEQ ID NO: 20915 - DNA, 600 bp, Bovine  MMBT20082
tatggaaaatgagatatctgggcaacagggaccagtggtaaggtaagatgcggagcccagggctggtagggataagaatggaagagtcagcatctaaaagtctgcagctgcaccactgggatcctcaacaaacaagcagatgtgatcacaggagtgggtctaggatgagtagagcacatctagcccttcatcctgcttatatatagcagaagctaccaagtatccctcttaacacccttaactgctgacataagccagagcatgtttctgttgcttgcaacccagatccctgattggtgyattgcttttgaggtgtctatgggaacaggtgagaaggcttaatattgccattagaaatacagcttgaaatttaggaaggatgtctgagcctgacgcacaatattcagtcaaaagtgtgactacatatgacttcacaccagggagggtgtgaagcataaatcccaaagaagactcactacaacacctagcaggcatccaacttcacatctgccagtgtcttgtgctgagatgacattggcacagtcttgatacccatgagtcccacttctctacaaaccagggtcacagtcactgctttag

SEQ ID NO: 20916 - DNA, 600 bp, Bovine  MMBT20360
tctggatgtctgtgtgcattatgctagagaagcagcatttagaagttgattggatttagaattttcttctgtattttctacacaccttattaaggatataaattgttattaactgaaagtgtaactgtttgaatggcccatcagcttatgtgcatgcatgtttttgtttttttaaatttttggccactcctcatgcaggatctgagcagaggttgcacccatgcagtagaagacctgagtcttaaccacaggaccagcaggaaagtccccatgcagatgttttgaatgaagaactgtttratttgaaggattcagacatttacaacttagttaagaaatttataagttttaggtctagaactgtatgctgttttttgaaattatataaggagattgctgtgggttttacctaaacgatttgaaatttccctttgtatatgtggattaaagtttaacaggtccttatgccagtgttaaaagtaagctagttcatagtagtgcaaacaggatatgaaaaaatttttaaaaaatatttccccatgcaatttacctacttttattactggttttcaattttttctttctgattgtccatcaagc

SEQ ID NO: 20917 - DNA, 461 bp, Bovine  MMBT14951
tctggatgtctgtgtgcattatgctagagaagcagcatttagaagttgattggatttagaattttcttctgtattttctacacaccttattaaggatataaattgttattaactgaaagtgtaactgtttgaatggcccatcagcttatgtgcatgcatgtttttgtttttttaaatttttggccactcctcatgcaggatctgagcagaggttgcacccatgcagtagaagacctgagtcttaaccacaggaccagcaggaaagtccccatgcagatgttttgaatgaagaactgtttrgaccagggaatttaaactgaaggaaaaatcaataaaattaagtagattttcctcagtagcctggagtgtatctttatgccagtgctaaactgcatttaagatctttttttttttctttatgctttcacaaaaagcttttaaccttattatagaaattaaaa

SEQ ID NO: 20918 - DNA, 598 bp, Bovine  MMBT18818
  misc_feature (1)..(150): n is a, c, g, or t
nnnnnnnnnnnnnnnnnnnnnnnnnnnnnnnnnnnnnnnnnnnnnnnnnnnnnnnnnnnnnnnnnnnnnnnnnnnnnnnnnnnnnnnnnnnnnnnnnnnnnnnnnnnnnnnnnnnnnnnnnnnnnnnnnnnnnnnnnnnnnnnnnnnnnnttaaagggtgaactttatttcttttgaggtaaagcgatgaacccaggcaaagcactcactctatcagatatgatttgaaacagctgaaaaataaacctctgacaataagattttaggacagaaacgctgccagagctctaagtgccttcragaataataaaaagaaagtaaacaatgccagaggccagacgaacaaaaggaaaattcttacttcgtttgttctcatcaaataccggagaaaaataatctgtgcttaggcagttctcctggagtccaaattcctgccctgtgatcatcattctgtttaagctctgtgctttcaggctgtcataaaatgccttacgctgctggaaggggccaagatggttttcgatctaaagccactgagagcctcaaggcagattctaaaggccttcaccacctgagccgggccatctgggctcttcct

SEQ ID NO: 20919 - DNA, 600 bp, Bovine  MMBT03374
tcatttaatgaacagtcaagtcgacagccatagtgaaacagcaaccaggaaagaaaaacgaattttgtgacctgaaatacattaggaaaagaatctgaaacattttgaaaaaccgacagcagtcctgtgacagcttgactgggacttggatatttatttccactgaaaacatttctgtatgtctgatacatacaagctattgtttttgacaaaataaacaaaacaggtacaaaaattattagatagcagagaaaatgcaattcatctaaacatcaactgaggtcagttgggctgaggctmagggtgccccatgaggtccattccagatcttgtactgaaaattcttggtctttcactgagaataaatcatcattgtacttttgagaaaaaatcttcaactctttggctgtggtgcatctcactagaagagagggagctatttctctgaaggaggtggagaaggggcagagatgatagaaggagcttggggggcccttagggtcactgaaatcaaggcaggacaccccaacacacccaggacatctctacctggcattcagcaaccccaccctccacagagcaagcctgccagggcccata

SEQ ID NO: 20920 - DNA, 600 bp, Bovine  MMBT09175
attattcaagaggaattaaaagagatgctaaaaatactcctctatttgaactttgttatgttaacaaataaactggattagagtccttaccctgtattccaaaggcctgcctgtgttccaagggccggcttgcagctcattctctttgcccctggacacaggaggtgctatccatggctggactgtaggcttagatggctctgctctagaagcctcatcagtattttcatcaaaaacaataattctagtattactttgcatctgttgaggaactggattttggagacctctgttctggcytggagctaagagaaaaatattaaactttcaaaatctaaatttaaaaatcttcaccaatttagatgcccaataaggtacacctgaacctttcccaaatcaagattacttctactaccatagaatcagagatttttttaaataataatttttaaaaaccttaatgcatcaaataattaatttttaagtctattctgcatttgttacttataccctccccttttccctcacctgtaatcttttacrtatagatatccaaaaaacaaattctgtatcttccttcagtcatcattctaacattgt

SEQ ID NO: 20921 - DNA, 600 bp, Bovine  MMBT08879
tagaagaagtaagtagtatttgcattttaattgtttaaaactttgaaatacaaatgccaggaccattgttctaactggactgtgcaggctttaggtcacttgtggcccacttgatgcttgggagctgctttttgtgttatgttgtactggggtcgtagagatggacaatgtgacaactgattctaggaattcttgcatggtgcttaaatctcactggatggaggagcctgtaggtgcttggtgctggtatcagacaccattcccaaagagaatgatgaaaatgctttctgaagatcaacstaggatggtatagatagtcttttcaaaaatgactaacaactcttagtgccaaagaagtatggcagtatcccactcaggatatcaacttttcagaagaggaaggtgtaatttttctgcagctggactgggttgctagtttgctgaaacaggaaatagagtttgaaaaacagtaattgctgctactaaatattgatttttttttttcttcagaaagttaccctccaaataacctaaaatcctttctcctctgccctgcccgcaatgttcacagcagtatcttctcactattgaatttcatca

SEQ ID NO: 20922 - DNA, 600 bp, Bovine  MMBT02046
ccttttaatttttcacagggctgcaaatacagcccagagaactgtacattgaggccatgcgcatatggttttatttactattgcatgcaggattttgttgggctataaaagaaatagatttcagctgaagcaattagaacagtaccttctaagaccactgtgcacatgagcacgtacccctggctgctcccctggaagagcgtgcgatgcactgaaaggagatgaggggaagcgtgggaagctcttcctctgtttctctaaccctcggaacatgctgtttgtgagcctaaacatgggcgrtgtgatcggcaaggacaggctgacacgcttgggtccacacttacgggtaagggaaattgaactgaatttgtttgtggatgcggattggagagagaaacagaagactgtatagaaaattaatttgctgcattttgagtccctttctctctcttttaacctgtcaaggcaaattttccaatgtgtttccayccacagtttagcataagtaaaaatgtctagaaggcactctggcaatgtttttgaagtctcctcagctcccacaagcatcaccatgtaaagcccaaatagccctgaaaaagt

SEQ ID NO: 20923 - DNA, 601 bp, Bovine  MMBT16971
  misc_feature (1)..(1): n is a, c, g, or t
ntcgccttcagttgaaccccaacaaggtctgatgaggagacaccacattcatgaggctcagttcacagcttctgaatattaatgataaaactccaccaagttaacttgcagatagcaacgagcaacacagaaatctggagaggtgaaaactgctgatggtgctagaagataaataccaggttctccatctcattttttgagctgtgggagaattaagacaagagaggcggggaagggagggagttgttgttaaaacaggatttgtcgaaacctgaaagctgaaaatgctcttgtgtcacartatacagaggaggaattatttgggtgctgacagaaagactttcttttcttttaatattatgttttagtccatagttataatttatttttgaatttttatctatgttgggagatacagtttattacttaatgtccccaattaaacaatgtggtctgaaatatttttaactagattgtgctttgcaaatgatagttcagtgagactttctttttatcctggtgcttctgacttgtgtgaaatcaagatttacaaaattggtagctttcagactaaaaattcaaaagacaggtttaaacatat

SEQ ID NO: 20924 - DNA, 537 bp, Bovine  MMBT18608
acatttcctaatgactagtttagccactgtacttagtttcacagaacagactagtccattattaagcattataattctagtttcattacgaatattctacggggagcagagacatttgtaaaaaatatttctatatccataaataccaatagcatgtgtaaaccttggggttaaaaggggactccttaagggaaagttattttgcttttatttcaaaggttacaaaatgcttcaatayttttaacctcctgatattctaagtatgcatgtaatttttttcctaacattttttgaaaacaytaaaaagtaggagacaatgagttatgatctgatacctaattgcttactaatagaaataccagatgccgctcaatttcatggccctgggaggtatattgtacaatattcaatattattgtaattcatttcatcttttcatcacaaaattcaatgagttttttatactcaaatataaagggatatgtggctcaatctattttttaaatgaccctcaattagaagtaggataaccttcta

SEQ ID NO: 20925 - DNA, 601 bp, Bovine  MMBT01596
  misc_feature (1)..(1): n is a, c, g, or t
nagcagaacctggagaaaacagctgaagagtgagcaagagaggatgaaggaaaacaagccaaaaacccaaggaaaggtgaagggtgaaggatctaggttagacaccaagaatttacttycaaytgagtcctgagtacttgaacccaagcttggatgtctaaaacatagagcttttccttgcaattcaaaaagtccttcctttcagtcctattttttccaagttcttcatgttccaagatttcacatttcactaccccactcatttagtacgtttaattaatttctcaatatttttgtgtaygcattactgctttctgcacacatagacatactaggatgaaggaggaggttctgctgattggtatttgtaatgtgctgagactgatgaatgaactcatacacacaccgtcaccatcaccaataataataacaacctctgttactaagtgagagtctcacctcctgtttattgagcatctattatggaygaggtcttcaattatgaattttataaacatggccaataaacagagtagaaataacatttctcttttatagagggaacaagtaagacttcgagaagttaagtgattggctgaag

SEQ ID NO: 20926 - DNA, 600 bp, Bovine  MMBT02077
tggaccagaggtcagaattattcccgtttggaagtcagagtcgcagatccactggagtaggagtccaagccttccctgaagagccctttttgcagtgacacagagaggaaaaccagatgtggattcatcctctccctgcactgctagatctcaagctcctctgtagattaaagatttacacaggctccctctctgttagtttactgatcttgaataaaggaattctagacaagttctttattcggtacaacttgtccaagaggtatgcagtatgtcataaaagggtgtctgccagattgyttcactgatttttaaaccaagctgacttcttattctgacaaccacagaataagagtttccaaagcttgaaacctaacctactgaatatgaaatgcaagagtcaggtaaattacaaagayagatgatagatctcagtgactgggaaaactgaggcttggggattggcctcagtccagaacttaccctgaatgagctaaggttctcctgagatcatgtgacttgggtcagaccccaattataacttaggatctgctattaaatgtcatggtaccctggaggtcacactgcatttctaagtct

SEQ ID NO: 20927 - DNA, 600 bp, Bovine  MMBT11424
cattttcctcgggaaaaaatagaagattactattttccttttaattggcattgtgtttggagaagtataacaagaagggaatagctgcctgccatatatgcttgtgacagggagcttatctaatcactaacctttgcactgctattggctattattcagctttagaaaaatcaggtaccatttattcgcttggcttatgggggaactgtagcagcctgttttttatttattgactaggaagaaaagcaggcagtgggttaaaggatattgttatttatcattatatatatttcagtgttmttctctgaaagtaaactctttattaaagggtactgattctcctcctcctcctcctaagtcacttcagtcgtgtcmgactctgtgcgaccccatagacggcagcccaccaggctcccccgtccctgggattatccaggcaagaacacttaatgcaatatttaaataagcccatgaaaagtagaatgggtagaacataaagtagaaattgttttaactacaaaggaaaaaacttataattccattgtctacagttaacatcaacattatggtcaatatcttatgcaaatttttttcttcatt

SEQ ID NO: 20928 - DNA, 600 bp, Bovine  MMBT01233
tgatgtggactaaaagtagtcgtagctcagctggtaatgaatctgcctgcagtgcaggagacccatgttcaatccttgggtcaggaagatcccctggagaaggaaagggcaacccactgcagtattcttgcctggagaaccccacagacagaggagcctggcgggcttcagtccgtggggtcgcaagagttagacacgacttagcgactaaaccgccaccaaagtaatcttccacggaggtcgttttaagagtttctcagcgtccacagagtgtccttagcccaggcgtcgaaacctagygtgtgagtcactcattttggaaccacttgtctgaggaagagaagtgtgttttgtttgatcacgtgcggccggcctgtgrgatcaggacccttgctcctgctatcctggccttgttaactgcacagagagcttttgtttctctcgcttgggtttatttgcagagacggccctttcctcgtgtttctctctcagtgataatgagggrgtgcagtgtacatacattaggtggtgctgtctggctcctgacttgttaatacagctttatgtcgctcacacctatggagagagagtgaaaaagca

SEQ ID NO: 20929 - DNA, 600 bp, Bovine  MMBT19048
tctcaaagtcctacagtctccagggtgcttcataccaggtgggcacagatattggtggctctggaacagttcttgggaatccaagattwccctacttagctaatgtgctttttttatccaaagcaatcggcactccccatgatcagattccagtacactctttgaagtgtcatccagttgattatcttctatactcacctttaaaatacttggactattatatgtagtctgtgtaatgttttacctttagagaaaatttagcatcctttgaagtaaggtttcagaaggacctaatcctcyttttttaattccttgaatattcttaggcatgggtttttgtcattgagtttgtacaattttaagttttaaaagaatttagagctgcagttaggtaatacagtttcacaattttggttagtacgtgtggaagtggtatgtaaaggagtcaaaatggtataataaagtgggacgtcattgagtgtaaatctttttttccttcataccttcttagtccaggtccatcgtgttggctaatacaaagatctcttttttgtaagttataatttatattttgtcaaatgtgatgagagtaatctgctg

SEQ ID NO: 20930 - DNA, 568 bp, Bovine  MMBT04492
aacatccaggctactacatactagctgtgtattgtttttaaataaactaagtacctttatctttctgtgacctaatttctgatctttggttgtttggttatttttttctttttcctccctcacgcaccctcctgcccatatataaaacaaggggctgagctgaatgaccttaaagtcaatatggagtaatgaaaagacatgggcttagggatctggcaaatggggttccaattgtacaatggatataatacaattactatggggattaattagtaaatgtacataaagtgactattattrtggataatccttaatgggaagtgggtgaatgatctttccagtttgcttgctttttattgctatttttgttgcttttaatctgttttctttcccatctctcttactttataattcttttttcaaatgatatcgaacctctagcatggtctccttgaagctttcaataagtagagatccatatgtacaatactctttatattgtaaagtaaaaattcatataatttaagggagatcactgatggtgattgcagccagaaattaaaagaca

SEQ ID NO: 20931 - DNA, 600 bp, Bovine  MMBT20684
aatattcctcagtactaatcacctgaaacttacaagttggaactattgagaatagaactctgagcttgagrtaaagtttaaagaaattgatgaatgaatttccaatagtcagaatttgggcaaaatttaacacttcatatatagcagttgtaaaattagttccttgacagaaaaaaattacaaggctctattatgggttcaacaacactccttagtgggttagcaattcattaattacagcagcatcactgaatatgtttcagtaataagrtactttattctgtctgtaaccatctttayataggtatatggaattacatattctataatatctaagaatgtcttaggctcttctactgataaattgggaacaatggatgtgaattaattaaattagtgaaagaattctggacacattaaaatacaaatgtctatttctcatacatgcatcaaatattttaatcaaaggatctcttgttggataatgtgaaagaggacaacatagtaataagactatttgagtacattttctcttttgaactgttcttgttcttagcttcctctgtgcatcatacaatactccaaaattttaatgaactt

SEQ ID NO: 20932 - DNA, 600 bp, Bovine  MMBT13642
atggaagataaaattgagaaaggcagtggaggttagaccatgtgggtttctgaatgctgtgttaagcaacacagagaatttcctcgtggtccagtggttaggactctgagcttccactgcagggagttcagggttagatccctggtcagggaattaagatcccacaagccatatggtacagccaaaaaaaaaaaaaatacagactcaattcagatcttatcccctctatttccctcagtggatgctgagttttttcaatcaggaaatgttaaaatatactcaacataaaacacaaagccraactctgaccttgaaacaataattataagattttcaaatcaataactgtgattcataaaaacttgcttaagttattccattgattaaatgccacagagaatgctgtgaactatttaggtgttagatatctacagtgcttgtcttctaaaaatactcaatttgattaatgtagttaatctagttttttaaaaacactttctgtatgcaagatactttgttagcctctgggaaatacagtatttaaagctttctgttctcaaacagttttgcaggttacaagagccaaggcagtcacaaaac

SEQ ID NO: 20933 - DNA, 598 bp, Bovine  MMBT03871
  misc_feature (1)..(117): n is a, c, g, or t
nnnnnnnnnnnnnnnnnnnnnnnnnnnnnnnnnnnnnnnnnnnnnnnnnnnnnnnnnnnnnnnnnnnnnnnnnnnnnnnnnnnnnnnnnnnnnnnnnnnnnnnnnnnnnnnnnnnnntagttggtaaaagttccaaggatagaagtttatgtttagaaggaagataggtagatggttttaaaataaatggtgcattgtggttgaagacatttttctcatggtagcagtctttattcatggaaggaggctttacagactctaacatatcctggaaatctcaaatttatgatgaggttactktgtggaatgttgttaaaaaattctgtgcattttcatagtttaamttattggctatttaaaataaaggcatgagcaaaatcttgacttatagaatactgggttatgttatcacttcattgtttcattcattatattsatatccamaaggaaaaccaataggaaacagctttaacctcagtaacattattctayttttgtgtcagagccctctctaaataaaagtygcagtggtagcaaaatagatagaaaatttatttcacttttcctagcaacattttgcttattcattacctaatta

SEQ ID NO: 20934 - DNA, 600 bp, Bovine  MMBT01058
cagtgtgagtgcccaccagtgcccaccactgtgtacctaatagatggcacatgcgtggtttcaccctccaatcacacgacacttcagtaaacctccctctgggtcacacgttctctggrttcacctcggcctccccaggcctggcacagcagcaacatgtgacatctgttgaaccsattgaaccaacgtgaagagaactagattgtttgtattttaactttccaaccagctcacaggctctaagccatcacaatcctgatcttaaagctcctcacaagattccctctaagattttgctcyrtacagttggtatacartgagcatttgagaagttacatctgcatatttactggcatrtctctttgcaaatcttcagtttagmgagctgaaatgatacctgtaactcctttgttacttgaagttttcttttttcagcttgttcaagtttttctttccacattcttttcaaagaaaaacaaaagtttaaaagggttaaaaaaatatctagatatataaatgattaagaatcaagagataatcaacaaaacttagaaaaccactcaggagtattcaaacatcatggtctggggatgagctgct

SEQ ID NO: 20935 - DNA, 598 bp, Bovine  MMBT18919
  misc_feature (1)..(136): n is a, c, g, or t
nnnnnnnnnnnnnnnnnnnnnnnnnnnnnnnnnnnnnnnnnnnnnnnnnnnnnnnnnnnnnnnnnnnnnnnnnnnnnnnnnnnnnnnnnnnnnnnnnnnnnnnnnnnnnnnnnnnnnnnnnnnnnnnnnnnnnnnnatcatttggctcactaaggtagtgagttttccacatttgattattttggactgcctttaatataaaattgttagtttggcttattctgtgsaatcagtatctaaatgggatttgacttttaaacattttgaggggaaagtaaaaggagtttatactaccttcayttacttgctttttagttcatagtttatggcttattgtacaatgtaagtcaattgaaagtattgtcrttatagaggctgacaggatagttctggctgggacccacagaatggttgtaccttgtgaagaactgagatctggggttctcactctyaactttgcacatttagraactgaaaaatgattaggctttttggggagatgatttatattaatcagactcacaaaagacttactcattcactgtcagtccatttgacatactttcactgaactgtgtgctggcagctcttatgggat

SEQ ID NO: 20936 - DNA, 600 bp, Bovine  MMBT20533
tgctaactgtataaaatcttcactgtgtcatgtggatgtgttacagaatctagctttttctgcaaaatggtttctaaacatggaagcatcttatggggactattattagcttagaaactgactggctctaatttgaataatgtgaaatatacataagaaaagtgaacaaaatcccaaaggttacttttggttcaaaacagtactgtggcttcttttgtttatctcctttcgttccccagaccttgttaaaggagaagacaatagtaaaaagctagaaagagcacgagagacaaagcggayagacgagtagtaactaacctaatgggcctgggaagttaaatgctaagtgctaagtcacttcagtcgtgtctgactctgtgcgaccccatagacagcagcccaccaggcttccccgtccctgggattctccaggcaaaaacactggagtgggttgccatttccttctccaatgcatgaaagtgaaaagtgaaagtgaagtccctcagtcgagtccgactcttagtgaccccatggactgcagcctaccaggctcctccgtctatgggattttccaggcaagagttctggagtggggtgcca

SEQ ID NO: 20937 - DNA, 600 bp, Bovine  MMBT05800
agcctttatataatggagctaggaatcttggccccagacctcatgctctaccattacatcatattgctttgtctagtatattgaaaatctcttcctatattttttaccaaattggctaattgaattctcattaattgtattaatcatagtgcaacctcttttatctgttcaccaaatatttatcctatttgtatgtgttgtatcagctgtatcagagcctatttgtatcagttgctcttaaagttgttagaagtagtgaggtctgagattttttttttagtgggtaaatgggttaaatcytaagggaaagatttactatgaagtcagtgaaacttaagcttcatctgcacaagagctttccaaaaccctgggagtggtcccaagtcaatgttagcattgtcaaatgcttttgtaaattaaaaaaaaattagatatcattaacagcaataggtcaagattgctatctcttactacatccactcactctctgtcacactttcagtattaggcagcattggagtggccagaattattctggggatccagttaaagggaagtggagtcaagaacacattcagcttgagttttgcataatatata

SEQ ID NO: 20938 - DNA, 601 bp, Bovine  MMBT11307
  misc_feature (1)..(1): n is a, c, g, or t
naaaacccagatgatgttctttcctgttttatccaccagaagcccaaatattggggacatgggagctgatattacatatacgacactgcccagaaaatacaaaagatacttaataaaagatatcrcagcaaaaaaaaaaaaaaaaatccaaaagtccttaattctaaaattcctagctcatttaacattcttctaaaatggtcatcagtaaatagaaatataaagatataaaagtgatccaagacttcgctggttttccatgaaygtaaagatggccattttcaggatcaagacccaagayagacttggtttcacactatagacrttagctcacataaatcttytctggctctaacacgggrttataactaaagacccacactaagcacacagtaagcattcacagaattaatggaatacctgttaatagcactggctgcctgggaggaaaatccaaatttctctgtaaagaaaactctaaaatagagaggggggaaaaaaataaaccctttagagagaattattctgtttttgtaaaaataaaagcaaaataatactgaataaaatagtcaacttccccttctttctgaactgttttccc

SEQ ID NO: 20939 - DNA, 600 bp, Bovine  MMBT20008
gtaaaataaatggatttgttgcacagatcatgttaattcgaaggcgcacagcaatatttccgtttttaagttttcagttcatttagtgcagtgaaatctatgactactatcttcttcaaaagaaacttttaacacacacacacaactctttcagggagtacacatggcaaaaacctggatagtataaaagtatccaaactagttagaaattacaaaaacatattttattgaatccatatgctaccttctacattttcacagagcttttattaatgatccaaattcagtcttcaacaacayaaagcaacagttgtcttataaaggttgtagttaaacacctttactctttatcttacaggtgcactgagaaaaacacttaaacagccagtgtattaaactgttctcatgcctagttaggaataatggactttcttttctctggaagtggtctttaatggcattattgttatgaaaacatttttggtaaataacagtactaaaatttgtgttataaggttaaattagcaaaaattagattacctggaagggtcctagacataaatcagtagatgaaagttttttgtttttttcttgaagagg

SEQ ID NO: 20940 - DNA, 598 bp, Bovine  MMBT01009
  misc_feature (1)..(108): n is a, c, g, or t
nnnnnnnnnnnnnnnnnnnnnnnnnnnnnnnnnnnnnnnnnnnnnnnnnnnnnnnnnnnnnnnnnnnnnnnnnnnnnnnnnnnnnnnnnnnnnnnnnnnnnnnnnnnnatcttctcataataaatctaagaaaactgtcggttcaatcagatgttattattttacttaccttcctgtgactccacttgtgtagtgggcatcactgtggctgttggggtagtagtaggatttgtaacagttgcaggtgtaaccattgggcggatactagctctgggtgttgacttattcccagccatagcygcagctgtcactttacttggcgtagatacaacaggggttggcttgatattggctgttggtgggtctgacatgctggcacttatrgaaagaaaaatgtgaaaataataattcacaaaaagtactacaaacattccttataaagtacaaatactccaaagaaagtaaagcacatacgcttactgaagtgaatgtccagtaattattaccttaatacacattcaaactgttttcctaacactgctttgagtagatttttggcagattaggaaaaaattaaagrcagtaaatactattgttc

SEQ ID NO: 20941 - DNA, 600 bp, Bovine  MMBT15602
cacccatgtttaattaatcatcagttcctattgattgctcatcagtaactgattctcccctggaacattgcaatagcctcctaactagtttctctgtacccactattggtaaatattactaataacgatgccaaatgatgccttacytatgtgagtatactgctgaagactctgccatttcttctcattgcttttatgtgaaatttctaagtcctaacaaatggaaagtttgtcaccactttgttactccagcttagttaagtattcagacatcatcttcagggaatttttttaagccartgagtgggtttttgttatcatattgctttacacacattttttgtacttcactttcatatattacaacaattagtatatcattttctcattccatctagaacacaatatttatatattgaatattttaattaaaaatttaatagctaatatatgaaagagtatcatgttgagatatgaagttcacaacagctatttgttttctgtttcgtttaacaaggagccagtatttgtctgatttcttagttatgagataggtctgggtgggtgtctgtttctcagattgtcagaaagtagtggggg

SEQ ID NO: 20942 - DNA, 600 bp, Bovine  MMBT11561
cagctttagctctccactgatctcttcactgtggycttgcctagaggatgaagcaaagtcttcagcaactgtgctaaaggcttgttctgcctcattcttctcagtgtgcaccatccttaccatctgagacttatgattagttactcattaggtaggctattataattcataaactaatatggaatcatgaagaaaatggtttagcctttactgaccatttctaacttctcatgttaaaataatttctgacctcgtcaacacagaagggagctaaacagaagcattacctcaagatcgttycattgttcaaacagagaaaccataaccaattacaattcctacagcttgccttacacttcccattctcaggtaacatgtattaaaccacaattgttttagttatgatggaaagggtcagtaacacaatcttcttaaattctactcttaatcaggccaaaataaagggcacaggcttctgtctgacgccaatttaattacatgaatctgaacatgccaacttttaatagttagcaaagtaaatcttccatgtcctttaagactgtaaatgatactgtgaagttatattgaagggtataacac

SEQ ID NO: 20943 - DNA, 600 bp, Bovine  MMBT19295
agagacctagcattgggtgtgagagtgaggcagttgtaaacaggtactttaatagactctgtccccctggattcctacacacaactctaggggaatgtggcttctccttaccttcagctgttgagaatcactgcttgtgatgagaactattactgatgtggagccagaaagaagtccaatagccactgtctcaggaagaagaggagagctggtcacctgcttctttgtctcagttatcttcttggcctctggctatacacttaaggtcatgttcagcccacctcgcacctcaaaaatacycaaaacagctgttcaggaagtaggggtacatttaactttcttccaacttgattttcccatctgaaaatacaaagcaagtatgagacacggtgaggcatacccatatctctcaggttttatcattttcagtgggctccacacatcttccaactgccattatctacaagctggtgcttgaagactttatctgaagctctggaagctcactaggtccaagataacatggcagctcagcagttctagaaatttaaccaccctgtcccacagccccgagcttccttcaaccaatgaatgatggga

SEQ ID NO: 20944 - DNA, 600 bp, Bovine  MMBT02889
gcctccacttgagattgctataagtataaaatacacagtgaaaaataaaaataaaaaaataaaaaaaataaaataaaatacacagtggactttctaagacttagtaaaaagaaatactaaaatatattttaaaaaatattgtttgtgtgttgaaatgatacatttttggatatattgggttaaaatacattattagaattaattttacctgttcccctttacttttttaatgtagatagtagaaaattttatatgtggcttccattatatttctgtgagaccaacctgatgcagatattyatgacaatccccatagtccatagtattgggtactgagaactccagtgttccatggcatttatattaagcccatactgtaacagggactaaatctatattattgggttatgacaataaatgcttttatgactttaggaagtaatctgaccactttgtgactcagaaaacagatttgttgaccaaatggagttgctgctaagctgctaagtcacttcagtcgtgtccgactctgtkcgaccccatagacggcagcccaccaggctcccccatccctgggattctccaggcaagaacactgga

SEQ ID NO: 20945 - DNA, 600 bp, Bovine  MMBT03889
tgaactggtacaacacagagaaatgcaatgctgtctttccccattttttatctgttattaagtatgccaatatacatcacagtaaagagcaagaaatgtttacagcagtctgtgaattgaaaagacatgcatgcacttcagcatatggatctatttaataatataaaagtataaacattgttaaaatatcaaaattattgctgaagagactaatggtcatttttaagggaatgctgtttttaatcacacttttaatttgcagaaatagtgcaaagagagtccagagaattctcataaacycagagcagggtttctgctgtcattaacatcttacatcatcaggattcatgtatcaccattattgaagaatgttgatatatcattgttaactgaagcccacactgttaatacttctgtaacttttgcctgatttttttttttttttgatcccagcctgtactctcaaggaccacatcacatttcattaggctcttctgggctatgagtttcatgcactatccatgttattgatgaccttgaccattttgagtactgcttaggtataaagcccttcatttggactttgccatttttctcatg

SEQ ID NO: 20946 - DNA, 567 bp, Bovine  MMBT12328
agctcgtcttagctggagcacaggggtgcctattctgtgaagcaataagcagtctgccatgtctggcaccactggagctccaagttagtcatctgtaggaaaccagccttgatttccattttgcagagagtgagtgagcargaagcacaagcacacaggattgtgtctgttctctacttctcggttgtcatggcaagtattgcaggtaacagacaaattagacactggggaactacacagtaaagccccaatgattggtagaacttgctgtttatggtgattagaaatacaaaatacatyaaacttcactgaaactttgaagaaaatgctattttaaaagsggagaaaaagaagatggaacgtcaacccctattctgtggacatgaggggctgtcctgacaccttgccgttaacttctctttccacctgcatgcatgctgccatggtataaatgattaatgctggaagggtactcttcatactgagaccagtggattaagaagtattagtaagttgacttatactcagaaaccaacacagtaagagaactttcttatagcaaatcca

SEQ ID NO: 20947 - DNA, 598 bp, Bovine  MMBT11173
  misc_feature (1)..(29): n is a, c, g, or t
nnnnnnnnnnnnnnnnnnnnnnnnnnnnnagaatttctggggccctggagagctattttctagggatacctttaatttccttcgctaactcccagttcctccatcactgtctccagcttctcccacatgatgtcttgcccagatctgcatctcctacactacaccctctaggtgtttccaaataatccaacctggagtagcccaaggggcttagtctgtgagcacacacccccctctactggacaaaacactaagacacacgcacagttgggaaaggatcacagaattctccagtacaartatcctattcactaccctyactttgcacaagagaragacrtgacaaaaaccaacagaatcacagaaggaactgaaggcaaaagctctaactctgtaccattgttatcccgtgctgttcaacagttcaactcacaagaacagacgactacatgactgagctcatggaggtctctgagttgaaacattctccaaggtgcagccatcagtraagaagyaaggtattggttgaaagagtcagaggagctggtctctagttccagttctagcatctacaatctctgtgatgctaagcaagaca

SEQ ID NO: 20948 - DNA, 600 bp, Bovine  MMBT01479
aggagcccactttgtcctgctttgcctggcaaaacaataatgctatccttttctacttcaccsaaaactctgtctccaagatttgatttggcaatggtttatacaaagactgaactttgggcatcaaatgctcagtaattggtggctactgtggtgtatgtaaatcaaatacaayacacatgtgtatcatttattaactactccaccttatataaggatttgagagctatatttaatgtacacattcatatgttcatttcatgtttatcagttatcttatctgactgattcagatatcarttggcattctgtgatatcctgttttctacatcttcatctttaaaactagcaataatattaaattaaaagaaacatgtaaaccgtggtaaatatccagtttmagtaaactgaaaaacatgttaaacaactctaaatagatagactttttcttatctttttcttcttttaaacaggatacatgcctatacatgtaaggctttgtcttttttaaagttaattgaattttttggtttgtgtaaagttaacagagaagatataaacctttataaaaaaatcatactacacattttcaatattctc

SEQ ID NO: 20949 - DNA, 600 bp, Bovine  MMBT08145
ggcttcagtagttgtggcccatgggcttcgttgctctgaggcatgtgggatctcgtcctggatcagggatcaaacccacgtgtcttgcactgattgctggattctttaccactgagccaccagggaagccccttgctgtcaagtctttttaccttaccattttccagtttattaacagatcaaaacctactgtggagataagggtacaaatcaagaacttttgcagctgacattgtagggagaaagttaatgacggaaagatatttgtgtcccaacaacatcgagatgaaataaaagacwcctttctaagggaaactgaagaataagaaggaagtgttacagggagaggctggaaggagtttaaaccatagagtggatcctctactgaatcaggattagcaatggtgacttcacaatattttcctaagcttttctttactggagcaatggcagaaaaaaattaggggtaatgctctaactggcagaatctgtcatctcacagaaaaaaatgtacttatgtgagatgatggaaattaactgaacttactgtgatcattttacaatatatacatgtaacaagtcattgtgttgtacatcttg

SEQ ID NO: 20950 - DNA, 600 bp, Bovine  MMBT18098
gaaagaattaaaaataaaacatcactttgacaaagaaacctaaacagaaagaaacacgagaataaataaacacaactgatcacacctaagagaagcagaaggtggagagtaaaaacatactaagaatcagaaagaaaaggcttctcctttctgggaggtaagctgttggtcagcacgcctgagaggagacttggggtgggcaggaaattgtctacatgaagggggagctgagcaaatcaatacactgaaagttctgggtgaggcttctcacaggtgagaggagagttgtaacaggccaasgcggggggcctggaacaagcactgtggtatctgcttagaactggaggtcatggggttagcccaaggtatttcatatatttaggaagacagaaatactgaaaagatacctttgtttgcatcactgtatatgccttgtaaacatactgtccagctctgttttctgagagggactggatgcaatgtcatcgcaggagccatgagcgtacaaagcatccaggttcggtttctaattattattctccactaaggggaagcaccggtcacgcaggcactgaataaatcttctcctacagtgagaca

SEQ ID NO: 20951 - DNA, 600 bp, Bovine  MMBT08078
aagaaaagaccctgatgttgggaaagattgagggcaggaggagaaaggcacaacagaagatgaaatggttggatggcatcactgactcaatggacatgaatttgagcaaagtccaggagatagtgaaagacagggaagcctggtatgctgcagtacatgagatcacaaaaagttagacatgacttagtgactgaagaacgacaagtccatgaatattttgacttctgtcatgaatgcttggagaacccacagacccaggtttagaacccctggaaagaactgacttcttatttctttctrkctagtctcagaactctaggcttttgattttggcactttcttcccaattacccctggattctgccttacaggtcatgactgacctaaatgtagtttaaacctcatttttctttcccccctctataaagattctcttactttcatagagataaacaatatgtttcaaattttactctttttacttctgtaggagccatttgtattatattagaagaactctttttattataaagatgtggtatcattggccacacagtgaagagtagaattataggtttctcctcttttataagatcttag

SEQ ID NO: 20952 - DNA, 600 bp, Bovine  MMBT19949
atccaagtcctcccccgttgcatattccgccgccacctcgctctgcccgactcagccaaaatctgaccacagcggaaaagtaacgtgtaaattrcctgcgctccctccatacgtaggatctgcggccgctaccacagtccccaaaccgccgctcacccccctccgcgagcctcgacagccaacagttgcgccacgaaacagcaacgcgcccgagtcggttccgcactccctccgaactcggcacctcacccgcgcgcgccgcggccccccaacgcccccttcccacacgcggctcgcagrgacgtacttgttgtggggagtcacgttttgcagcatcttgaccacggggaaccggcgctgccctcagccgcggaaagtccgggtggcctcggttccccttacctcccggtccagcataacccgggaagtggggggagggcgggggccgctgccctcggccctccaggcgacaaccctaccccgccgggctggcacgaaagcaatctcctccgctgtccctcggagaactcccagcagcttggcgcgctccgcaggaggcggacagcgagaaaatggcggcggcctcagctgaggcgggcg

SEQ ID NO: 20953 - DNA, 600 bp, Bovine  MMBT19014
ttcatcagccaccatacacctggaaaaaaataaaaataaaaccaaattaatgtcttaattaccaaagtcaaccatttaaaaagttttgattaagcgttgttaagtagcttgccacaaaacagtttacacattatagcactaagccagagagaggtgtttataagtgtgcataagaataagggcctttcctracttacaagactctccagctgccaacggcatatggttatgtgggactgttagtttcagatacgctgtttcccaatgcccacccatgatgatagctacaatgacccttcraaaacgtgagcaaaacagcaagtgattgtaccaatgacttccctccttaccagtaagtaaggtttactggtctcccctagagattagacagatgctgtattaaagtgcattaacatgttttacaaaaaattatattaatatatgctatattatacatgctaggccactttcaagctgaattttgtattctactattatttcactaaattttctcctccctattctttcttattaacctacagaagtaaattctatccactggaaattgaggacaggggcataaactaaggtcataattag

SEQ ID NO: 20954 - DNA, 600 bp, Bovine  MMBT23243; identical to SEQ ID NO: 4561

SEQ ID NO: 20955 - DNA, 598 bp, Bovine  MMBT18204
  misc_feature (1)..(74): n is a, c, g, or t
nnnnnnnnnnnnnnnnnnnnnnnnnnnnnnnnnnnnnnnnnnnnnnnnnnnnnnnnnnnnnnnnnnnnnnnnnnattaaaagtgtattcttaaatagtttcttgattaagaacaaatgcctcattaatctggaacatattgacttgagaacacaaggtaagtcaaagaagtaatgactgacatgacatggaacacaatatgctgtgttcccattgcaaaagctttagaagaacagactccccaaaaggtcactagatacagcgaattgaataggaacccagcgtcacccaaagatgcaamggtaagctttcaaaaatctatataacagaggacattgtgtgcctgtatcactgaaacttttccatctatagattctgagtgcctcacatttatttcagaatgaaaaaacccaagatctaaaaaaactaacataaaacatatttgcatataaaaaataatgacatcaaatttttaagaaacttggtgtctgtttaccctactccatctctcaagttttacttaaatttgtgaatagaaatttaaagccaacacaaatagctttgaagataattctaacaacataattggatgtggattc

SEQ ID NO: 20956 - DNA, 600 bp, Bovine  MMBT07963
gtgcaggtaagttacctatgtgtgtcacactagatggcccacaagactcccctcaaatcctattcattcatcaatcctcatatcggccctacatctctgcagatggaaaaccatgggcagacagaggctggacactatgtggacttccaggccacatagtggtggaaacctgatttgtctctcccagcccagtaccctactcaytgcacayaggatcacacttccccatggggggaagtagtgccacgtgggcactacagtcctggccactacccagatagctccattactyaccgagayagggaaatagtcttttacgtacttccataagatccaggacctgaaggcctggatgtcctgcctccatgccatggcrtgtctctgtccaggtaccaccaggtggcatacaggatagtgaagatccagaatcttgtgaacaggaggcctatgaagaccacatagcagataaaggctgggaagggaagcaggagcattagtgggcactaatggccagggtgaaggatgcactctccccatatgcccagcactggcagcastgtcctgtccagccctcaccccrgggggaacaggtcagcctcc

SEQ ID NO: 20957 - DNA, 600 bp, Bovine  MMBT21917
tttatcccacttagaatgtattttgctgtgtattatctaaggtaaaaagataagtttgtttttccaaagagttaaagtcaactgtcttagccctgtctttaaatttttttctctatcttaaacactattaagtgaatttattatctaagaaatcctgattaggcaagctccgaagatgaatagtatccctgaataggtttctaaaacagaagagtatttacatatcacctttcgtcttttgacagtttccttatttttcttgcctgctatatcctgttttcttctttgtgacaagggagraaagttagacaaacttgtttaaaattggttatatttcctaacaccacatactatttcagatagtgatttataaatacattaagtcagtttaacatctttcccaaatgaccctgactgttcatgatagaactactgcagatccgttggtcagatcttaagtctgaaccttgactactcaataaaggcacaaccagatgaagtgggcagtgaatttggtgcacatccttgtcacaccaaagccttaataatgttttgaagttttaagtcctcagagacaaaaacttacaatgactcaccagt

SEQ ID NO: 20958 - DNA, 598 bp, Bovine  MMBT05834
  misc_feature (1)..(145): n is a, c, g, or t
nnnnnnnnnnnnnnnnnnnnnnnnnnnnnnnnnnnnnnnnnnnnnnnnnnnnnnnnnnnnnnnnnnnnnnnnnnnnnnnnnnnnnnnnnnnnnnnnnnnnnnnnnnnnnnnnnnnnnnnnnnnnnnnnnnnnnnnnnnnnnnnnncattgtgctgaataggctaatcaccaaaactgttattaaataaaccaacaatttaaaaaaattcttgagtcttatggtgattggatgtttctgctgccacagtgattaaaagactctgtgaattaactgttgtatgctcatatcctgagtggtaktggtggaggtcaatgagggctgatagaataaaaataaagtaaaaaatatgatttcagaatgtgagtttatatctagatgargagactgaataaccgtgtagtgctgacagtraagtgcagcagttcagggaaaggcaagataaataactgtgtgggccagagctgtccatcagagaggaatgagagattttagaagcatcttttcattttagagaacataaataacagaagataagagtttcagccaaataaaacattcttcattggggaaggagttaggtagaaaatgtaagaaata

SEQ ID NO: 20959 - DNA, 600 bp, Bovine  MMBT05521
cacctgcaaatcatataacttggtcaatcacttcacaacctctctctggctatcacaggctgggcttcacaatgcctgatacagcatattatgcaatgatgttccatgttgccagtaaaccatggctttatgccaccgttccatacagcagctctatttagctttatttattggatttttaaatcctcttgtacagtaggcattgatctctcctgaggttgtgattatagctttaactattgacacttctatcagagccaacctcaattctttgccttctgctgacaagaaatggtaatyattccaacaccgcaatctctgaatcttgaacccccgtcccacatactttgccctgcataaagagtacacagatgttggttagctggtttcctcagcaaaatgtagtcttcaaagagtaaaggtaaatctgtaagggtaagtctgactggaagcactgaaaatgctctgagacacayatgcatttaaaaagctgccttcttcccactcaaaaatttcatgtttgtcattatccacctggagcactgtctgtcaagttattgaagtaattgacagtgagaactttcttagaagagattctac

SEQ ID NO: 20960 - DNA, 600 bp, Bovine  MMBT19282
gattccagcaccattggacaaggcatcctgaatgatacaaaacagcaagacactcattttcgatttgggggataaataaaatcctcactaaccttacagcaaacagtcattaaagttataataactcctckagaaaggttaaaaaagacagaggacattccaaaggaagtgtccagcttccccgagagctgcttggggagattcataagggagccctgtaaacaccaggagcatcttgctggctgcacaggtggctttgcatggtcaaacacattcaaagacccgacagggaagcgaggygaatgggaaaagcctttcacattttttaatcttctgtgttgatttatcttcccctgtgctgagagtggaagtaaggcattctcctcgcctcctcccaatttcacctccttcccaacttgtacatgtgcgcatgcacgcatgcatacacacacacacacacaatcaatttaaatttataattcattggtgttcctcttcattcaggtttcagtgactcaattttagggaatgcaaatccatgttcttatgccacctgccctggctcagtgatcacttgtcagtaaactgactttaaatgaa

SEQ ID NO: 20961 - DNA, 600 bp, Bovine  MMBT12706
tgctgaactgaacctgattctgatttcactacaatttttataagaagaacaaacagatgtcttaataaaatgaccaggtggcttataaacaaagaagcatcatcaagttttgtgtacagattaaaaactatacaaaacagctatagaccagcaatgggttttactattttttccattttgtgtacattcttgtttaatacacataattaaatgatcgttttgttactaaaatcttctgactcactcattaaaatcactttattttcaaaaytgttgaactcacatttcttaatatgtaaytcacatttagtaatctgttgtttatctcagctttcaaaatataattaatctgtactgatctacttgacacacaaaatgacttttggggaactgtcatcattaggctggcattgccttcttcccactaaaactctactttggatttaatttttttaaaaaagcttacaracaaaaagagcatatctcttgaaaaataaagaaatattaattctaataataaagaatrtacaaggctccccaaatcttggctcattttgacattggaaaaaatagatcattagagcacaaaggctacattct

SEQ ID NO: 20962 - DNA, 600 bp, Bovine  MMBT01615
gaagagcagatccaagaggaggcaacaaaacaggaacttatttaaaataagtataagacttatttcaaatgtttccttttaactctaatattatctattaagaaatcatgcatagccaaaaataataaactttataatcccacatattgaataaattattttattaaacataaatatgccactaaagcttccagaggaaaaattagagttttttttaatgacttgaagctgtaaaatttagaaaaataatttagggtagataaatatgcatactgtatgatgattccacttatatgtggratctaaaaaaagaatgcagatgaatgtatatgcaaaatgaaacagattcacagatataaaaaaatctactgattggaaaagaaagggaggagttgtaaattagggctataagggatacaaatactactacatataaaacagtaagtgacaagaatgcatgtatagcacttatagtcattgtcttgtaataacttttaatggagtatgatctgaaaaaattctgaattacagtgctgtacacctgaaactagtaaacagatataatattgttagtttataattcagatttaaaaagaagaa

SEQ ID NO: 20963 - DNA, 600 bp, Bovine  MMBT05605
atttcctacattgctactttaaggtattatgttattatgaaatgagtacgtaaggatccaatttcacaagagtgactgaggcgatatgtgtgcattttaaaagcgtaatcaaggtaaaattgagttcattttccatgaaaatttcatgtacagctactgaaagaaatcatttctggcagaggcattttaagggcaaaaagttgtaggtgcaaataatctaaatggtaaatgtatttgctctctcatcttgaaggtaaatttcatgtttttagcactaaaaattcattagcactctctttyccctcctccttagctcaactggacatcagcaaacctttgcataaaattttgaaccatcaccattgcaaaggcttctttgattcactcccagttctgcttggttcaggattcatatagaggatttgcagattcctcccgcaaacaactttgagggctggaactcattcatctaaagatgctaactgtaaggcctytgtgccctrtttttaacccacaagttcttaccatgaatccatacctcatttaaaggctttgtgtactgcatyttggcaatttgccaatgcacagtaaaactatctg

SEQ ID NO: 20964 - DNA, 519 bp, Bovine  MMBT07087
ggctcgacactactctcactttaatttatgttgacaccatccttgccatttgtcaatgaagtaagtaaagagcatccaggaagacatggactgaatacatggcatgaggtaagagtatattcaatcaaattaaaacctcagtgttttgttttaaattacatttttaaggtgctgctgctgctaagtcgcttcaatcatgtccggctctgtgcgacccgatagatggcagcccaccaggctcccccatcatttttaaggtggtcctcactaaattccactttatgtaagtggaaaatatgraagatttccctgagatctgatgaaaggagtactagattacctataaataagaggcatatgattcacagaccatcagaggatattcctagttatattacactgtattatatttttctgtagtgcttactatgtgttagaacatctacaaaatacctatgttattctgtataatcatgccagcaaccctatgaagtagatattttcctcctttacagtaag

SEQ ID NO: 20965 - DNA, 600 bp, Bovine  MMBT02504
caccaactttgatttatactcagctttaaaacatattaagtcttattctcctctcactagcagaagggagctgctgccataaatccttgatagtgccacttactttgtgtaaggactgttctggattgcatgacagatgtaatcccagctcaggggcaggaaaaatgtgatgggagaattctctagtgtcctctaggcaaagaaatgtatggaataggcctttcattaccaaggagaaattaagctaattcatttgtagtgctaaaattgtacaatggagaaacatttttttcaaagatytagccataaacaaaacaaatagaacattttttaaaccaataggatccaagtammatcaattacagctgctcagaaataattatatttgcaatcatattctacatattatgatgcatatcagtttttctcatttatatcaaagacataaggagtctgcattttccaaaacattaaataaattaaaaaaaaaaaaaactaaaggtctgatgaacatgacttagatcatgtttaaaatttcaatatgatttatttagtaaatacagaatacatagtttatcacaaagtactacacagttttta

SEQ ID NO: 20966 - DNA, 600 bp, Bovine  MMBT19167
agcacacagcccagggatgcttattacacctctgaataaagaaaaaatacatgacaaatgatggggtagatagatgatcaacgatactttcttaagacaattaatgtctcttcactaaaaacaaacttccttctctactcacagatacatccccatacttcactcaaccaaagagaattggaacttagcacttctccatttttctatcaaccaccactcccagatgcagtgcattctggggacctcccatggcatgctaagccacagggaaccttgccctccctcccacacctgcagccytttcttctgattctttytaggaccatcttctacaagaaaycccaastgtcagacctagaaggtccatgaatgaaggaaccagccctggtttccacctgcccacrctgacccagctgaagaaggctgaagctcacaacaaatgaagcatctcccgtctgattgcttcctcactgcctgtctgacccaggctcaggaagcagatgaaagtgaggacaggatcattaggaatcaaatctgtacaaatgaggttgcttacagcagattaaaaaaagcaactcagggtcctttttctgggtattg

SEQ ID NO: 20967 - DNA, 600 bp, Bovine  MMBT11182
tccctgcccccgtctgtggaaaaactgtcttccatgaactggtccctgatgctaaaaaggttgaggactgctgtcttaagagtatacagattcttctcttccttcctactaacagaacttgacataaatgcttgctaccagacttttatccaattgataatcattactattaaaacaacctgcaaccctcatctgcttccttactcgttatatactttatttatctttctccttagcatgaaccactggataatataccataaaatccatctgttattagctgctttccccaactagaaygtaaactccacaagagcaggaattactttctattktgttctatgccatttckcctacacctacaatagtacccaataaaataataaacacttaaatttattgaatgaatgaagcgtataaagtgtagtgcgtaagtcattgttaagagtgggggaataggaaaaagaaagaaacttggactgacagcctaaagactgtggagaaaattgagacccatccatgatgaacaaactatgatggacaacaggcaaagggaagaccactgataacacttgcgacgggggcagagataagggaaag

SEQ ID NO: 20968 - DNA, 600 bp, Bovine  MMBT04388
tagtctggtgagggtaaatatactaaagttcccattctccactagctattttgaatgtagcttaacacctggtttgctctatttccccctaaacaaatgtattagttactatgttagcatagtcagagactttccaagaaatttagcttcataataccaactaaaatagttctcttgagagaatgagccataaaatcacttttgtaaaagcatacaagttattttttgtacaattaaatttatctagaacctacagggcaaggggtaactcaaatttgtttttttttwwattttttttgkcatcaaaaccaacacaagaggtgacaagtcaaggccttaaaataatcatgttgatatttcaatgacagccttatccataggagaatacattttattttccaaatccactaatgtaaattcagcctttaccaaattaagaacattttaatctcctcacagtacactctgactgaagatttaggcaccttccaaatagtagtgattagtattcaaacattcttgcctttcagaaaatgcttttgaacaaattgatgtgtaaattgaacaaactatcagctccatctcattattaaagaacag

SEQ ID NO: 20969 - DNA, 600 bp, Bovine  MMBT02893
aaaatgcagaagtacaacactgctatatttaaaatgggtaaccaacaaggatgtactgtgtagcacaaggaattctgctcaatggtatgtggtagcctggatgggaagacagactgggggagaatggatacatataaatgtatggctgagtccctttgctgtctgcctgaaactatcacaatactgttaatcaccattgttaattggctatacaccaatacaagttttgttttgttttktttttaaatgtagaaatacaaaatactcaagatgggacatttagttccaccagaatgagaycagtaagcactgggagtgggtggggggtctgtgcagggttgtgcggtgtatgctctgtacgaggagggaagcactccactgaaatctaaattctaccttctcaatgtctctgcctcagcccctcatcttcacacttctgtgatcactagcatagatgataattccatgataagtctcatgcctggactacttttaactgtcctagattcccctttctgcagtcttgcttgtctcatattataacgcacattacagagagtgaactttccacgaacgaaaatctgagcacattgctgtatt

SEQ ID NO: 20970 - DNA, 600 bp, Bovine  MMBT10786
tagccaacctctggttgcaattgacaagggacgacagttctgacatcaatattgattaatattttcctttacacgaatgagtaaaacagaagtgaaaccacagagaagaatgccagaacctcactggtttgtcagcgacgtgaacaacctcattgctgaatctgaaaataccttctggaaaataagttcttggtttttgtgctagtcacagtggctcaactcgagacatgactcacgtttaaattaaacctgctttactaacatttcttccatcattaaatcaaactctgatctgcagcrtgtgccgatgcctgcgggtaagtgctcctagtgtggaaaaagtcagtgccgatgtgaagtcatgaaatgcactagggcacgtttccatcaagcatcggcatatgcacatacatacatcatacaagtatgacagacaaaactagcaccaagaccacaggtaacagtacactatggtagaataagtaggaagtgatgcatggcacagtggtaaagaatctgcctgccagtgcaggagatgcaggtttgatccctgggtcaggaagatcccctggaagagagcatggcaacccactccagtat

SEQ ID NO: 20971 - DNA, 600 bp, Bovine  MMBT14016
aacaaaactcatattggccttcattgtgtgcagtgtgctaagtcacttcagttgtgtccagctctttgtgaccccttggaccacagcccaccaggtttctctgtccatgggattttcctggtaaggatgctcgagtgggttatcatgccttcctccaagggatcttcccgactcagggattgaacctgcgtctcctgcactgcagtcagattctttactgctgagccactggggaagcccttggccttcattactggctggaaataccccttcaaaatccaaatggtaaaatatatcccrcacaatatctaaaaagtcagcatctctgcaaaaagaagamctgaatacctaggactgtagcactgtgaagtgattaaacatgcatatctggccttccaattatacacagaacaaaacaattttgtgctatatttcttgaaatgcaactatctgttatacaaataagaggtctcccttcacactagtttagattcttgaacargctagttattaacaagtcaaaatccagaaattaaacacaaccctcatttttagcaactgagtcaactctgggtggaatggagcactttccagaacagc

SEQ ID NO: 20972 - DNA, 600 bp, Bovine  MMBT01311
agcctcatacagttaacgggtggatctaggcccaaacccacctgcttgaacttattttcagaaaaggtagcaggatatatggaaaggtcagacttcagacttttgaatgtcacaggttggatgagttatagatttctcacctataaaatggggataatgatgccaacactgatgaactcacaaaagtaataaataagacataaaagacctggtagatggcagggagtcaataaaagttcttttctgtctcttctccctttctcctctgctgttgtaatgccaaagaagatgaagcttaayagttctatgaagacctacaagaccttttagaactaacaccaaaaaaaaaaaaagatgtcttttttagcacaggggactggaatacaaaaggaggargtcaggagatatctggagtaacaggcaagtttggccttggaatacaaaacgaagcaggacaaaaggctaagagttttgccaagaaaatgcactggtcatagcaaacaccctcttccaacaacacargagacaactctacacgtagatatcactatatgattaatactgaaatcagaytgattatattcgttgtagccaaagatg

SEQ ID NO: 20973 - DNA, 600 bp, Bovine  MMBT14259
cataataagcatatttgtgtgagaaaattcagaactcatcagctccatcaaagataaagtcatatttagtttctccacacgtcaacaaaataaagatatagcttcctaatgattccaatctattatttgttatcactagattcatgctttaaaaatgagaaatgttgacttcaggattccaatttcccaaaaaagctgcagtaaggaggctgcttctttagtttattgttacttgaggccactggagcttgctataacccgcttatgagcactgaggttggtacacaggcatgcatgctyagctgtggccgactgtgaccccatgggcagtagcccaccaggctcctctgtccgtgaagttttccagggaagaatcctggagtgggtttctatttccttctccaggggatctatctgacccagggattgtacctgtgtctcttgcatttcctgcattgatggtgagttccttatcactgtgccacctgggaagctatacagagctagagctatggattctttaataggcatacaaattttgtcatctgcctaaatgcttcttgcatagagagaagacaggatgtgttttccataaaatat

SEQ ID NO: 20974 - DNA, 600 bp, Bovine  MMBT08996
ggctactctgtccctgggatttcccgtgtttttcactttctaaaactgtgaaatctttctagtgctttgaaatttacataaactctatctggctagtatcactgtggaactgagcagggaccccatgggaaacttcccagaacacacacctccccttccacccacaccatgccccccacttgcctcttgtttgtagaaaaactactctcccaggactcccctgtgtcacaaatgattagaagaatgtgaacatgtagtagcaaaagttagcatctgggccaagagaactggtaacatttkaacaatagatcagtcatatagtagaggcacagactcttttgttcctctctgtaagacataaaaaactgtgtcaggagcatgttgttgagttgttttgcaaatattgaaacctccaccagatggagaagtaactgaataatgaccacatactcatagcccctagaccaactggatcctgattgttggtgatgttaacccctaagacatcaccatcaaccagtcagagattcctgcccaaggtgagcacacaacctgcagctttccccctcacattgcctttaaaaacrtttctgaaatcca

SEQ ID NO: 20975 - DNA, 600 bp, Bovine  MMBT20839
tatmgagtaaactgtcaaggtgacacaaaacttgtgagaaccaggmgatcaaacaccagagtccgcccttctagaccctacgatctacagcccccttctctgccatcgcatgaggacactcttaagaaagacttttctatgaatgaatgaatgaagtgatgatgtgagaaggacctcacatggctgctgatgctgtgtccatcaacagtaaatcctcccgcctccccgctccccrctccgcccgctgaggatggaggaagcatttagggcttgctgtccaatcctggaactcagtccaakgctctgcatattttaaaatgttgtgctgtaaaaacaggagaggaacaaggctctgtgaataattcaccacctcgcctcagagaaattaaaaatatatttcactgcaaaagaaaagtcgttgttatttgggacttccggggacttggacagaacacagttcctaatggaagaactgcattgatcctagtaactatttttttttttttttcccaagtgaaatgggaggtgggggaagtttaaagaaaagagtacatgttaatgccacactcaatgtagaagtgatttcattttcattttatg

SEQ ID NO: 20976 - DNA, 600 bp, Bovine  MMBT15918
gcaaaagaaattaagatgtatttctcatttttgataagggcactctttcctatgctctattaatagattacgtttttaatctgaaaaactaaccactggggttagggaagcccaaaggtaggggaaactgcccactttcagaatgcagattagaactttgaaattgcacccagatttttttttccttttggttagtaggcctctgttgttagagtagtagttgcaaacacatataggtttgccagtaaccaactcacaatttgtgcaaagttgagtcttcgaaactgagcaaatttgctytcaatttcccgccagcgcttgctgagctggatctgagttgactccactgccattgctgccccatcctcagacaagccctcagcttgcctatgcactgcattcagctcctctttcttcttctgcaactcacgatcaatttcctattgagcaaaaccaatacagggcccagggcagttagctaaccacatgaatcaacctatcccagcacatacctgtcccagaaatttcacaggctgtcttcattttattttcactgttcataagttacaagtatggaagccaacactgtcatcttcaagg

SEQ ID NO: 20977 - DNA, 600 bp, Bovine  MMBT02722
taatttctttgaattgactatcaccttcacaacatgtgatatgagatgcctttgcccggtaggaaaatgtcaagaattcataatcattttcatgttcttgtcacctttgttatccatcaattgaggcattgtcatctcctcagcaatgtcaatccctctttttctagcaacactacaactgtaactttcccaacagacatcttagaaaattcacatacttgctgagttttagacagagtaacttgaaatcctgagtgtcaggaataagaaacattctaaaacataggggtggacaaaaarcacctgatatgctttaataacattgttttgaatagctgcacatcttaagaaaactgtggagactggcagaagcaggagtctaaaatgctgaatggagaccagctcctttggatcaggagctggattaggatccagctcctttggatcaatatctcctgctgatattgattcagctaaatagccagacacatatttcaaatcttcaaagacttgggaggtagatgaccctaaattattttaactaatgttcatttgacattcagtacatcttaacccttcttgcacttacaacaataaatc

SEQ ID NO: 20978 - DNA, 600 bp, Bovine  MMBT00937
tttaaaaaatgatgctcacagtgtgaggataacgcgttagcagcagaggcagccagtcctggcatatctgggtaagacaccaagtggcctttatcattggaaccaggataaatacatacttatacatttttatgggttttctagtttatttctaaagcaaataggtaaatttagagtgaatcagttaatttcaaaatataattcattataaaaatttcccacctttttcccacttagaaagatcacagatgaggtgcatcttagaactgggctgggatggagctgagaggaagcctgtcrcttcatttgagggttagctgcacgggactcaccacaatttgaatattttcttctttcttgtgcacagtctgatgtccttgaggttgtctgtgttctttatggcctggagctatcgggcccattttaatttgactgttcacwttgtcctctgaaattatgaatarggaaagcatttagagccataggtctagttctgggggggaaaaaaaagctggctctattttctgaggttccttggctggttatttttcaaaccagaagacttcctttccatgatgtgaaactctaaattgccagaat

SEQ ID NO: 20979 - DNA, 598 bp, Bovine  MMBT08278
  misc_feature (1)..(4): n is a, c, g, or t
nnnntgataagctaagtttcctgaatcaagctgttgaatttgaacttcactcttacacattatgggtttatcttgtaggtgcctaagcctatgcatcagcctgtaggttcttcctctacccttccaaaggatccagtattgaggaaagaaaaactgcaggatctgatgacccagattcaaggaacttgtaactttatgcaagtatgagtcattattaagtgaatcttaaatgctagttatggggctactagcttctggtctgaagcattaaatgaagtcgttaagagcatatattctggwgttcagaatgagtacaaatctcagctctgccacttgctcactctgasagtttaggcaagttacttaactttctgcctcagtttcttttttgaaaaaaaaaatgaggataatagttcctgttcctgtttgttgtgagtaatgaaatgaattaaacatgtaagaagcttaaagtgctcaaatgatattgctgctatagctcattagtagtttctactcagactgggagaacctgtactatgcttggtatttgatagatgccattgtgtgtaaataatcatgacatttattgtcctcaaag

SEQ ID NO: 20980 - DNA, 600 bp, Bovine  MMBT22831; identical to SEQ ID NO: 4846

SEQ ID NO: 20981 - DNA, 598 bp, Bovine  MMBT01659
  misc_feature (1)..(26): n is a, c, g, or t
nnnnnnnnnnnnnnnnnnnnnnnnnnttttcccctaagattaaggctcggcttgcttaggattcaagggaaatgtatcctggtggttaatttcacagtctgaatctgtgcgtgctcagttgttcagtcatgtctgactctttgtgaccccatgaactgtagcctgccaggctgcctctgtccatgggattttccaagtaagaatactggggtgggttgccatttccagggaatctttctgacccagggatcgaacctgcagctcctgccctggtaggtggattctttaccactgagccayctgggaggtccctgatttcacagagcactctgtaaattcccattcttgttactttcaaccagctgctgttcttatgttcaacgtgcactgtccctagaagactccatcaggctaatctttgctgtcaggttttaggaaatccaagcgttgtacattttcagcagctggcgcctgtgtctgcaggctggcagctgtcacatacttgcctgccggtaaggtttggaatgggggtcaggcagtataagctctgccaaagacacctgtctgatgatttctgtcacttttgctttttgtctgc

SEQ ID NO: 20982 - DNA, 600 bp, Bovine  MMBT07723
tgtttcataaggttcaagctttgctccaggtcaaagtgatgcctgtccctggctctgtgtgcaaaagcccattgccagcctgggttttgtaaatcggtgagagcagtgtggtagggtttgggggttccgggggtctccctcatcttgtcctggggggcctttgctacatctgattcttctcagaggccacctaagtaagtcaacagtcccggtggactcccggatattttctgagcctcaccttgataaagaataaaaatgttttagtgcttgatttgatttgtttgctggaagattagyacaaaagcaggaaggaaaaagaatgtgtggtggaggtgattgctggagactggcagagggttatttacggatttttgctgacagtccttgtttaaaggaattccctgcgagatttatgaagcctttccaatttattgtctttccaagtaaggtaagcaaataaataggttattctcttttattatgaacctcgccaaagtaagattaaaaataagaggaaacagggctccatttttttttttttttccagcccagtgtgtttctggaatttggaaagcatcttgggaaggctttttgttt

SEQ ID NO: 20983 - DNA, 600 bp, Bovine  MMBT15621
aggtttttgtgtggataaatataagctttttatgaatgatttcttctttccatcttttaccagaatgtcaaattcagttacaatcactgttacatgaaggtcaatgtataattatcttctgtattaaccttatttgcctctcaggacaaagtctaattcaggtgacatagaacctgaatctgttgttttggcttttctgtcagtcttgtaatgtgatgcagtagttctacactgctgttttcatggcagaataaaaagggttgatatctttatttgggaggggagagaagtggaaggaayggtttgtgagtrwccttactttagatgagctatgtgagctcttgttaccctttctataccatgcctaattggatcagtaaatcataccaagctgaaagctatatatctwtgatcaagtgtgttttaaatatcttattcataaacagagatttattcattgaggctgcattatttggtatttctatgtgttatataaagtagaacatcaagaaaattaagtcagaatcagacaactgttcaaatactagaatatgcaaatgttagaattattcctaataaagagctccgaatatgagataa

SEQ ID NO: 20984 - DNA, 600 bp, Bovine  MMBT18190
cccaagtgattctctgatcaatgaggacacagctcattaagactatgagcaatcttatggataggggacagttgccaaatttcatcatctttccccacggttggaattttcacccacagttcttcctgggcagcatgtgctgtgaggtccgatgtcagagtcctaggttcagagtggcattcccatgcgcacccagtacgctatctgagtgatatgtgatggctaactgactttgggtaattcgcttctcttctctgagtctcagtctccccatctataaaacggaggtgaccactgtayrtagctataagacttgtgaagattcagtgagagaggtgaagcaccaggaacacagatggggcttagtcaatgttgagtgcctcacttgcttttccagtggaatcagctctcttctgttctgccatttccagctgggctaaggaggtggcctctatccttacccaggactgtagggtaaagggaaatatattwaaaatatctagatgagaccctaattctttgctagcagttacataaattctaaagtcatctccatctttctctgccctggctagcctccagagcaattaaacattgatg

SEQ ID NO: 20985 - DNA, 600 bp, Bovine  MMBT03972
agaatttcttgatcttaactcatgtataattctctaaatgtgtctggctaccaaaagttaaagatattattccatctctcggtgagataaaactgaggaagcgagcgttgagtctaccgcaagggcatacgtcgccttcacacatttcttaaccaaagcaatgtaggctrcatgagctaaatggtgttgtacgtggcccacatttgcatatgcatattgtccagtgacactcataattgcatcaacaaagcgaggcagcatccgtcagccagggttcaagccatcacgaggcactcacaytgcagcccccgtcaatctccaggtctgctttccctcagtgcgctgtatctgtattccatatgcaaattctccagtgaatgattttcctgttttgtaagctagactgcacctgtaacatgtgggattgagttaaaaatgacaagcagacaagcacaggcacattatcttgacaaactcagcctccgaaaattaccctgggcctgaattattaaaataacaaggaatatttcactcagctgtgcagaaatgatcctaattgtccactttagctaaatcctttcagtctctgagatcggtcaa

SEQ ID NO: 20986 - DNA, 602 bp, Bovine  MMBT09640
  misc_feature (1)..(2): n is a, c, g, or t
nntacttgtctgcagcttcctatctaaagcagggttgccacgcagaggagtagagagaagataaataatgtgggagaaagcctctgaggagcctcaaactaattgcctgaaatgtcgggattcactaagggcaggagttggagccagctttgttaaaattgaaagtgtactgcgtgttagtaatctttgtatgagatcagcagtgcccatctatatgggttgctggcagtcattctccctgcatccctggttgatgcgtgggtgtctcatctgaccctgcctacctttactcgatatcgggyaggaatccacaggccctcaggggtgacaagtttggggctccttgggagatgagctaaactcacctgactcccttctcattgacaaacaggctgaagagcttaaactggccactcagctgaccggacctgttatgcccatacggaacgtaagtgggcatgttgggagaaccatggatctggggttggattggagggattctgtgtggcagccggggcccatgttgagatttactggtttgtgaaagacctacctgccctgaggagagtcagctgcatccagacagatgggctccttgagga

SEQ ID NO: 20987 - DNA, 590 bp, Bovine  MMBT08246
accaaatcacttaaaatatgtttgctttggatttttttttwaatcactttccttggaaaacttttatttttgttttcttttctctttacatttacttatgtaaatccttggctyttctgtattttgttaatatgaataatttaaatacacctagggttgcattcttctttggtttgaggctaaaggtataaccattagaatcacagactrctttgagaagaggatactgaggtagaaatcaattgatatgaaatgttttcttctttgataactttatgatagaaatgagtgagcaaaaaktgatggataaaatgccaaagaccagaggtggggcttctgtgaaacttatgaactgaataattaggccttgaatagccaagacttgagtatgcaagaaaatttgctaatgctcaatgtgttactagcatacaaatagttgttttaagaaactatggtagtttttaaatttwtgaattcattaattttttaggtgtgtcaagcctgaagagaagtctcttggtgtgggattacatgcattttgtacacgagtattaggtaaaaataattacgtttcccaatatcacatcaga

SEQ ID NO: 20988 - DNA, 600 bp, Bovine  MMBT10347
tgggaggccgctttgccataatcaatccagcgtggggtggcaaaattgatggtgtctgtatccaatgctaatttaaaattggctcttgaacagaaatgtgttgatttcagtgtggctgtgaccagccgtccccactgacagcaatgactttcctggctggctctcttccagccccgtgattgacttggtcagttgaaaacaaaattcaaatggcagccactaaatggtatgaaatatcttaattttaacctaaacagagggcaacaacagcctccaaagctacagaagccagggctcagmggatgatccaaaagacaagaagaaaagtcagtttaaagaaaacaatcagtggctgaaagctattaagttcactcttctagttcaaagagattcgaaatggcaatttgtcaggcaactgttgtcactttagacgcccctggttgtttgctttgaagcccttgattgactgcaggagcctgggccagattcttctaaggacaggatttccacagttgaacacatttatgtcacagtaattatgactcttcccaaatttaatcaacaaaggcataagagtgcaagtttgagaaattatgcatg

SEQ ID NO: 20989 - DNA, 600 bp, Bovine  MMBT12134
cctgaataattacatatgcagtacaatttcaccttcctcagacaatagattataaattgacagtatcatatacttgagattgatcttgagttgatctcgaaatgtcccataaagtataatatcagaacaacccaaattagttttatatggatacttttcyttcttgtttctttgagtgagcaccagatgaagcatctggcttatttttaggggccatatgatacaaaacaaacacacacagaaacatatagcaactttaaacactagaattagaattaacacaggtcatgtgtacaagaygtgacacaagggacccagactacactgggaagggcagcttcttgtcaaatcatgatcatgctggctgatcarttttgagtaaaagagtgacagggggtcacttgtattatttaaatagttatttctttttcccttttttgtttcaaaatgaacagaattgaaccagcctaattaaatgtgtaaacgttaccagtctactatatgttttcaaaaagaaaatcaccccgtattactctttatgtcaacaagtactaagtgtaaaatgaaatactgactaggtataatattttgatggtaacc

SEQ ID NO: 20990 - DNA, 598 bp, Bovine  MMBT19490
  misc_feature (1)..(3): n is a, c, g, or t
nnntatgtgaggctcattatgattttgtccccttgtacctttccagttttattgtttattactcctctctcttcaaacatgttctcgagcctagccaaaatgagtgacttttacgtagtctggtttgtgctttatatgtgcttacaataccttatactttatgatctcacggacttctttaataattcacgttaggtgctccaactccaggaaaccttgcctcccccttctagtctttgctttatgctctttctctgtgctcccctagcatctgtgcatccctcttttgtgacatttacyataccgtcttgtatttacatggtttatgtctctgctttctcattagacagatttttaaagaatatttatttgactgcaccaggtcttagctgtggcatgtaagatctttaattgcggcatttgggatccagttccctgaccaggggttgaaccccaggctccagcattatgaacatggagtcttagccagtggaccaccaaggaagtctgtgtgctaagtcacttcagtcatatccgactctttgcaaccctatggactgtagcccaccaggctcttttgtccataggatcctccaga

SEQ ID NO: 20991 - DNA, 600 bp, Bovine  MMBT18363
cctgggtccagctttgccttaaattcaaccccaagtaatggtttctccattttactcagagcctgaaacttactcatttataaagaggcttctgacacaactggagttttccagtgagcaagggttaaaaggtcggtcagtaataatgttacctctaccctctgaatatgaaactgctagagttcaaaggtattttatctatcctgataaaaacatctcattgtttttcacaagacactcaaaagtaaggttcagaggggatgtacggctggcgcattatgacactaacctcttctagcrggagatatcaaccacttcattggaagccaatgactgaaaaatacaaggaaaaacatgagacgattgtgaggtccaaagaaaagggaatcttgttatcccaaataagcatctttaaaaattactaagttctattgttccagtgatgaaattagtatgtctttgttgacctaaacttaaatttgacacaatgggtaaacttgagcctgaggcttttatgccattatcagagcctctgtcagtgagtgctttaacctaattacatttgatgcagcaaatcaacaaaaccactgctggttatga

SEQ ID NO: 20992 - DNA, 600 bp, Bovine  MMBT08100
ctacaagcaccccagcatgtgtcttccgacgtgtctctctgyacagactctgactgtccacagctggggctcttaatcagagggaggaggacagtctaagaggccctagggcaatgattctcaatcctgactgcattagaatctcctaacgtgttgtagaaaaaacagatgcccagatcccaccctggaccatgtaaatcagagtctctatgtgtaaggcccaggcctcagaattttataaaagctgccagaggattcaaatgtgcagccagggtggggtgtatacatcaattcagaggrtgtaacccctagaaatggcagctaaacttgtgtatgcgtgagaataggtgtgtgtttctggggtaagacatcatagtaaaagtcacttagtcatgtccgactctgcgacctcatggactatacggtccatggaattctctagaccagaatactggagtgggtagctgttcccttctccaggggaatctccccaacccagggatcaaaccctggtgtcctgtactgtaggtggattcttaaccagctgagccaccagagaagcccgaggggtcagtttcagacaattctttaaaatatctg

SEQ ID NO: 20993 - DNA, 600 bp, Bovine  MMBT10337
gctggcttgcttcctcacttgggaagcagacctagtttaaccctctgccccttccattgcatgagtgcagaataggaactcacaaactcttccacccctaagacaccaggtccagttccccttagtaagtccctgctttgtgttcccagaattccgtgtcctactgccctccctgtccttttatctctctgccatccatgttcctccctccccctctcccttccccgctccctctctttgataaccaggaggccagagcacggtccaggggacagccaggatccccggcccattggacartggctgtgctatctttgtgggtgtggcgagcttgatatggctcacttttcataggacagctgccactttaaagacgtgtaaaggacttccctggtggcatagtgggtaagattccacctgctgatgcgggggacccaggtttgatccttggtcagggaagatcccacatgccatggagcaacctgtgagctgctactactgagcccacccgcctagagcctgtgttctgcaacagaagaagcccccacaatgagtagcccgagcgtggcagcaaagagtagcccctgctcgctgcaacta

SEQ ID NO: 20994 - DNA, 600 bp, Bovine  MMBT22462
accatggtacaggccagacccaggggcttgaggctcagacaaagaggaacaagcgttctaaggtgggtggggagtcacggaggtgatgaccctggcttggacctcaaaggctaggaaggtctgacaaggtagaaacagagcaaatgacattcacaaagaaggacaaaagttctggaatgggaaggcatgggatatgcatggccagcagtgaggagtcactttcggctggcatctagagaatgaacagtggggttggaaaagtgatttaaaaccagattcaacagccacatgctggactayaagattcagagtttatctgcagtgagcaaggggcaggtgaggtagtagacacaaaatgtcgaaatcaaaacaaaagtcacccagggtcctatggtgagttaatctgtggcccagccaggacttgaatgcagatttatattgacacaggcaaagctcctagacctgacgctaacccgacagaaatgggtctgtgggaaagtgcttcaggccagggatggccagatgcttctctgggaaacccaggagcctgagtctccaaggagccgggcgtcctaccttcgacaaatgggtcttgtcgag

SEQ ID NO: 20995 - DNA, 600 bp, Bovine  MMBT03697
ggcaaaagcaatgaaataatagtattctaaactatcatcaccacagaataaagcacaataaatttaccatttgttgtttttgctcagttatgtttgattctttgcaaccccatggactgtatgtagcatgcagggctttcccatccttcactatctcctggagtttgctcagactcatgtctattgagtcaatgatgccattcaaccatctcatcctttctcaccccctactcctcacacctatcaaagcctagtgaaaaatttcaaagccatccagatsataaaatagttttagatccytaaacctgggctgctactgctatgagagtgagagatacagacagtgaaaaagacagaggaccctaaaatatgcttgtggagtcaatgttaccccttagttgcatttttactctctgtgcttaggtaatacactatcaagtctttgctaattttcatagggatttacctataattgtacaaattcctgtaatgattaccaacctaacagttgctaccaatatataattagcttttaaatatttaataccttaagagaccacrcagataattaaattattttgagaaaaaactaattcaagt

SEQ ID NO: 20996 - DNA, 464 bp, Bovine  MMBT14104
tgctgacctttgtttaattcatcctacgcttcctagaagctacggacacttggaagccacgtggtggcaggcctgtggagcgatttaatgaagcatgttgtggaggaggtttttaaccctctcctttgcaaatcgtctaagacagcacttctgaggtgtcataacaagaccccagagcaaacagagacgttgaacaggcttccttccttgactagtctagtaaaaatagctgtgacttgcattaaacggactggtccataatgtaccacgtaaaacaaagtgatgccatttcacgcacckcaagtgaaacccagcctcattatcttaaacttcccctcacagacacagagaatttcagagccgtctgagatcttaaaagtcgttcttccaaacttctaattttaccggtgaaggacccaaagcacagagagattgtcatttgtccagggcaatcagcagggcca

SEQ ID NO: 20997 - DNA, 600 bp, Bovine  MMBT20047
attcattaatagggaagatggtgtttgggatcccaaggagactagtgaagttagaattcacagagtggaatattggagaagacagctacacagagaatgcctggagttctacagaactcctttgagtcttcatatgtatactgagcagtggatgcatataagggaactacatgaggccagggaaagaattatccaaaaggattagagggaacaatccctagagatcacaaaggacagggaatgcagccctttcccaccaaccagggttgaaaatcttataattagtggggcactgagtamagtacttagaagggtattgcctcagttgtggggccttagactaaacctgttctggtccttttaagcttaaaagaaagacttgaaaggatcaaactatttccaagtaacttatgatgtgccagaacaacactcaagaatattttaaaatactggatttcccaggtggcatagtggataagaatccacctgtcaatgcaggaaacatgggttcaatatctggtctgggaagattccacttgcccaccacaactactgagcctgtgtgctgaactactgaagcacgtgtgcctagaacctatg

SEQ ID NO: 20998 - DNA, 600 bp, Bovine  MMBT00946
aatgaaatcagattaaaatgccccagtcccagctccagccttgaagtgggaagaatgcaatgaatggtcaccctaagtgtggtatgtgtgcaatgagtrrtggtttagggcagtagctgcaacccaggcagcccatcagtatcccctggggagtaaaagtacacatgtccaggcycccccagaccctctgaatcagactcttgagaggcagaatctggccatctctctgattatgaaaatttacccaagtgattctgatgtgaaaacctcagttcagagttgcctactggaccttgaggraaaataggtttaatgaatagttgtctccgtgactggggctgatactctgcrtgtgatttgcagctcaattttgcagcatctggctgcttccctgagttartgtccagcctccaaattgatgtcttaactcacactttcatatgcatagaagtygtcttgagatcttgtcaaaacacagactgattcagtaggtctagggaagggcatggaaatctgaatttctaacaaactcccaagtgatgttgctgctcctccagggactacagtttgaaaaacaaggcctccagggaagaactggtt

SEQ ID NO: 20999 - DNA, 598 bp, Bovine  MMBT08729
  misc_feature (1)..(62): n is a, c, g, or t
nnnnnnnnnnnnnnnnnnnnnnnnnnnnnnnnnnnnnnnnnnnnnnnnnnnnnnnnnnnnnnatgtaagagcttatttaaaatttaatctggaggataatatttaaactgatacttaaaggattactaacttgcatgaatattgatttttgtattttcactatgtaagtgggcactttagtgaatcttatttgttggtgtaatagcttttcaattgatttctctaaggtttaaaggtagactattatgtcaactactgataatggaaattttcatctcttttgatacaaattattgaaayttccaggaaataattaaatcatatcagtaayagtgggcatcaaccttttactyttgcctataactagagaaagtcaagtcatatctcatttgtgtgatgtatcttccaatactacttttaatgaaaagaatatattctgactccacattatttataagttcattaaaggtagcatcttatccaagatacatatgaaagagaatttggattcaggattcttaaaatgcaggcaataaccatgtacttattatgtgaagaaaagctgttacttttcttgttttaatattcctaccaataa

SEQ ID NO: 21000 - DNA, 600 bp, Bovine  MMBT04619
aaagaactcttcttaccatttaagatcttctcaagtttgcctccttaaagcaagatggcttcagtggtggtgctgacatctacgcaggtgtctgtgtggtttctgcactcacgtgtgtctgttgtttctctctcgtctcccacaactagaactcaggggagaaggtgagcaaggtgagcttggtggacctggcgggcagcgagagagtgtctaaaactggagctgcgggagagcgcctgaaagaaggcagcaacattaacaagtaaggggcctgtgcgattcccacggtaaaccccagcrtcccaccagcttcctgtgtgtctgggcaactggtccccttatcaggggtcagatggctctgatcacaggtgattcagagtgtgtagctttactgaactgggttaaagaaaaacatcagcctgcctctgttgagatgcatgaggtttatttaagtgaaacagcacgaggcagccgggctccaacattgtccatacaaacgctcagaatatcattgtataatgtaatttctcttaggtcaatgcaagtcacagttttatatcaaatcatatcttagatctaactctaggagcttattctaaa

SEQ ID NO: 21001 - DNA, 600 bp, Bovine  MMBT05899
ttatctctctgaaaaactcctaatcttgaagaatacatagttggatgagcaaagaaaaaaagaaccagtcaaggtgacttccaggtattttggaggaatgtgtgcttgttctgaaatccctgtatctacaccacactgatcctgtctttgattctaaccttctttaccaaatactatggagcatattggtgactgtccaaaaactcagtatatttagataaccagacaaccaagcaggataaatagaactattcatctgtgtgttcatctttgtcctttccagggaattgtttaattccyagtgtgtgagtttatcagatcaccctgaatgatgttactttgagataacttcataacaaaggaaattttaggcattttcagcttggaaaagagtaggtgccttaggaaaagaaagcagaggtgtgagaactggccttttgtcccggctttaccctgaagagagggcttggaagaaggggtagacctaagagagcctggcaagtgtccaggggaggtgagccactcctcatgttagctcacaaggaaaaagtcagtgaaagaaaaatcagatcaaattcacagtccagcccacagccgaat

SEQ ID NO: 21002 - DNA, 600 bp, Bovine  MMBT19648
acctcgtgtgaagagttgactcactggaaaagactctgatgctgggaggggttgggggcaagaggagaaggggacaacagtaggatgagatggctggatggcatcactgacttgatggacgtgagtctgagtgaactccaggagttggtgatggacagggaggcctggtgtgcttcgattcatggggtcgcaaagagtcggacacgactgagcgactgatctgatctgatctgactgagattttggtgttttcagtttttagtttattaatcaatttgtggataactgacttcctaagamtactgtcttccaattcatgacaatagaatgtttccactaatttaggacttaaattttttkttcctggtaatgtttagcaktttttactgtagggttcttgcatataatttyttatgattttatttgtaagtaggttttgtttttggatactgtcataaatggaatttattttttgaacttaattttccaattgcttgtggccagtatatagatgtataactgattttgttataccaaccttgtagcttatgatcttactaaacttacttattagttctagtaattttgttttaggttcat

SEQ ID NO: 21003 - DNA, 600 bp, Bovine  MMBT22671
catttctttcgaaatataagattgtgcttttaaaaagagagagcatttttagtttaataagcttaatccttataatttttaacttcagaaaaatgattcacagccattctgtctttttagctggaaacagtacatctaagcaaagaacttaaacatcggtcttcatagttttactaacagaatgtcttttttccattttttagaaacttttgttttggaggcagcttttccagtgtctttggtttggcatgctacgtcgattctgcccttctgcacctcatctctcatcaggacactggyctgtatgaacctcaacaccagggattctcatttcctgttggccagtggaaaccctagaagaaggtcagagaaagggagtggcaagagatgaggactttcacttccactcaacgcttcaaagtcaccttcggctggaagcatctctaggaccatgtcccaagatgcatccttctgggttctggtgacttctctccaggagcacccagcactgctagctggaggtcactgccttgtcctgtgattccgccacactctgctcataatttgtaaatatcatctttattaaactttccctaaaga

SEQ ID NO: 21004 - DNA, 600 bp, Bovine  MMBT11186
gatgctacaaagtaagtattctatatcttttaaaaatgaatcttacctcatcagggctaggaataatatttacactaacaacctgatcacaaataatagattctgaatgtattctgttcaaccggctccttagttcagcattctggttgagtgccttaaaataacaaaaaccgcacatgtaattgcaagttattgagcaaacataaagcagaaccagcacacaggcacactttagacaacaaagtctaggatgcttttagctgtaacttttggagccaccacaggccagatcccaccagkaagaaggaaagaaatggctcagagttaaggcattcattttttgcaatataagactactacttagtagattagtgggttgaaaagagtttaaggatttcataaaattgattcgtggaattttctctcctttatagtcaggcccactatatccaagcccagtctaccaccacatacatataacattttataccctaggataaaaactattgattcttttttttccctttttggttccagtttctaaagtttgggcgttgtttcaaagccagatgtcttataaattatttgtaaatggaatga

SEQ ID NO: 21005 - DNA, 598 bp, Bovine  MMBT08986
  misc_feature (1)..(49): n is a, c, g, or t
nnnnnnnnnnnnnnnnnnnnnnnnnnnnnnnnnnnnnnnnnnnnnnnnntgttggtttgctctccctgattagacggtaagtttgtatttattccctcagtcatcttaatacgctgaataaatagtttgcaagaattacctgattgacttcttggatagggttcttttgattgattgccaagaaaaattctacttgccaagaaaacacatgagctgtttggataaatcagaactttgaagtttataatctatacaatggtgtccaggtcttacatgtagtaaggtaggtaatgtgatagraataatctatacctgtagttgagttttatttggaagaaaaaattggaaataacttaaactcctgggctttttacccagatttcatttcctagtgatgaacttgtattcaaagcttggactcaggatcctggcatgtgactttggtattgcatgctaaatcagaacttcaaagagtttttctgttttgttttgcttttaaaaacagggsaatgcccttcttagtaaagtagaatctttttgtttgcttgtttgagttgtattggggttctcccaatattttctccttgcattctgcttt

SEQ ID NO: 21006 - DNA, 600 bp, Bovine  MMBT05364
ttttttattgagacatcaaaagctacacctcattaactaaatagttcttttgtattcaaaatgatgcagggccacagccaaggatgtatttcaagttgactgctgcacaaaatatacacaaagctggaccatagtttatcagaaacatatttaagccaagaaatgtgcaacatttcaaaataaagagatgggcaaataggtttcaggcaacaatatatacaataagaaaccactaacaagatagtataaaatgtaaaatttaaggtgacaaaagagaaagaatggtaaaaagaacaattwatgataaaggtgtaaaaatcttactgcaccagaaaaaaacagtcaaatatgcagtgtaattattgtacatgaatgaaaaatagcacaaaaagcaattattatgggtggttttaaatacacctctatcaacattagacagatctactagatcaaaacaagtacagaatagatagggcttttgtttctagtaacatggcagcctaacattacctaaaattgcagtaaaagtatttaaatgctggacaaattgtaaaacattcttgtaagtgatatgaacttgaaataaaggtaaatctgtag

SEQ ID NO: 21007 - DNA, 598 bp, Bovine  MMBT10472
  misc_feature (1)..(134): n is a, c, g, or t
nnnnnnnnnnnnnnnnnnnnnnnnnnnnnnnnnnnnnnnnnnnnnnnnnnnnnnnnnnnnnnnnnnnnnnnnnnnnnnnnnnnnnnnnnnnnnnnnnnnnnnnnnnnnnnnnnnnnnnnnnnnnnnnnnnnnnntaatggtgaaaccatcccttactatggtgtcatggttcttactacattatcaaatgtcaccaagtatgaaagaatcctgttaatgtctacttactgagtaatgttgtaaaatttcaactctcatgagcaagcaaattaggaaatccttacaatttctggacctacrtaattcttcctagtttcatctgtgcctgttttctctcatgatgcgatataaccaactcctgctagcctgtaaaagctgattattaaaatattgaggaattttgtgagccacagccattggtggcttgcaataccaatggtgggagtatttacaccccagaaattgacaaacwctataaaacagagtgtttaatttttctgtttttctggacacacaatcagatttcccagcatacctgactctcagtcaaagaagaaaaataatttcctcttatttcctgcaaaggacatgggctctt

SEQ ID NO: 21008 - DNA, 598 bp, Bovine  MMBT14796
  misc_feature (1)..(187): n is a, c, g, or t
nnnnnnnnnnnnnnnnnnnnnnnnnnnnnnnnnnnnnnnnnnnnnnnnnnnnnnnnnnnnnnnnnnnnnnnnnnnnnnnnnnnnnnnnnnnnnnnnnnnnnnnnnnnnnnnnnnnnnnnnnnnnnnnnnnnnnnnnnnnnnnnnnnnnnnnnnnnnnnnnnnnnnnnnnnnnnnnnnnnnnnnnnnnctatctaataaacatctgttttttctatgtgcatttgtgatgccatctttatcatgcattaaattttcatatattcatgaacatgactctgagaaacattaggaggatgcagktggcaaaatttgccatcaggaagakgaagtagaaaataaatgtctatgaatgactggtcaggccacataaaatyacatcaatttcactcttgcataagacattgatcctgcccttatattacccagattgctaacataaaaagttgataaataaaagtacagtggaatttaaaatgtttctttgaaaatattatctctttgcttctcctagtcaaggtctgaaacaaccaatctcccacatactgtgacttttcagagacttcaatctccctacagatttcccgagctggttgcattt

SEQ ID NO: 21009 - DNA, 598 bp, Bovine  MMBT19226
  misc_feature (1)..(162): n is a, c, g, or t
nnnnnnnnnnnnnnnnnnnnnnnnnnnnnnnnnnnnnnnnnnnnnnnnnnnnnnnnnnnnnnnnnnnnnnnnnnnnnnnnnnnnnnnnnnnnnnnnnnnnnnnnnnnnnnnnnnnnnnnnnnnnnnnnnnnnnnnnnnnnnnnnnnnnnnnnnnnnnnnnnnctatctaataaacatctgttttttctatgtgcatttgtgatgccatctttatcatgcattaaattttcatatattcatgaacatgactctgagaaacattaggaggatgcagktggcaaaatttgccatcaggaagakgaagtagaaaataaatgtctatgaatgactggtcaggccacataaaatyacatcaatttcactcttgcataagacattgatcctgcccttatattacccagattgctaacataaaaagttgataaataaaagtacagtggaatttaaaatgtttctttgaaaatattatctctttgcttctcctagtcaaggtctgaaacaaccaatctcccacatactgtgacttttcagagacttcaatctccctacagatttcccgagctggttgcatttgttactgttgcttatcagaatacac

SEQ ID NO: 21010 - DNA, 499 bp, Bovine  MMBT19227
ctggtcaggccacataaaatyacatcaatttcactcttgcataagacattgatcctgcccttatattacccagattgctaacataaaaagttgataaataaaagtacagtggaatttaaaatgtttctttgaaaatattatctctttgcttctcctagtcaaggtctgaaacaaccaatctcccacatactgtgacttttcagagacttcaatctccctacagatttcccgagctggttgcatttgttactgttgcttatcagaatacacacgtccctttagctattgtagccactctargtttatttctcttagcagactgagtttgccattatttgtcataagccagaatctgctcaatgccctcttcatgtgtctcatttttcctaaaacttcccaaactatgttattataatcctttcttctgtgctgcagccaaggagtttttcttcatttatagaaaattattttgtcatttttcttttcgggtgggcttaag

SEQ ID NO: 21011 - DNA, 598 bp, Bovine  MMBT10885
  misc_feature (1)..(48): n is a, c, g, or t
nnnnnnnnnnnnnnnnnnnnnnnnnnnnnnnnnnnnnnnnnnnnnnnnatttaagaatgatgagagaggcatttccctggtggtccagtgaagactctgcactttcaaagcagggggatgcaggtttgatttctggtcagggaagtaagatcccacatgccatgtggtccaaaaaaaaaaaaaagaatgatcagggagaaaaaggtaagtaaaaattaagccagtcatagtgtgagagaaaagtgaaatatacagccaagagtctaattttttctcactgtaaatgcttctaaataactktatatgaaagtttaatttgcttattgactgcaacagtttgtctccagtaccaccactttgtgaaatgaattgactaatatgtcacgtatctgacctctttctccatattctcccaatattccctaagaattaacctacctttttcttgcaagttttggttaatcctgtggtagttacaatgaaagaataatagcactaaccatcgtttgtgtgagcaggcactgtgtaatcttgacaacgtcccttcagactactctgggagatccatgttatccctgttgcacagacaagactgtag

SEQ ID NO: 21012 - DNA, 598 bp, Bovine  MMBT16148; identical to SEQ ID NO: 4616
  misc_feature (1)..(25): n is a, c, g, or t

SEQ ID NO: 21013 - DNA, 553 bp, Bovine  MMBT11665
agaaccctctgcctttgcctctgaccacttggaaatgagttctgggctttatcacatcccctgaaaacagatccaacccacgaagcattagtgagtaatgtagaactgactacaattttatggggagatgaaggagaaagctacatgatacaactcccagcaataaataaagacaaagatctttgctttctcttgtcagagttcctctttagtcatggggagggtgagatggtttgaaggcatcacccgacttaaaggacgtgagtttgagcaaactccaggagatagtgaagaacgggraagtctggtgtgctgtagttcacggggtcgcagagagtcggacaccacttagtgactgaacaacaacatgggcctctgggtctcctccctccctctgaatctttccctaaagtagccactgaacatctcctcctttcctggtcagagaaattcagctcacttctgaatttcttcatcaaagccctcagctgattgtaatgtccaagaatgccagcattttccccataaaaatgaacctctctctgtaggagaa

SEQ ID NO: 21014 - DNA, 600 bp, Bovine  MMBT02726
cggagcagaaaaaaataaataatcccaatattatgcacaatagcttgaaactctgttggttattaaaatagggaaggagatcagaattaatatattctcctggggatttagagtcctcagggactcaccaggtttttttttttttttttaagttcttcagactataatatgaataaaaaacactgaaatcatgttttcaagttctttattaaaataagtatttaatgcaggaaaaaaatccaagtcataaatgtgactacagggaaacaatcatcaaaaagtgttgggagactctgaatygtatttgtgtagatcataaaagtcttagaactggagttaaacaggaagttagaggtcatttactctaatcttatgtctgaggaaatgattctttcttcaaatacaatatacacaattacagtacattttcatttatctgagttctgagttactcgaaagctcagctcactattttcccacttgacttttatgaaaaagaaagaaattataaataggaaagaaaattaatacacttaaagataactctgggatacttcaacaccttgaagtgtcttttcagccatcagaaaaagatacaat

SEQ ID NO: 21015 - DNA, 598 bp, Bovine  MMBT07365
  misc_feature (1)..(18): n is a, c, g, or t
nnnnnnnnnnnnnnnnnncctggggttgcaaagagttggacgctactaagtaactaacacatactatcaaatctactgaatatcttagcttagctttgcctcagaacacctacatcagcctacagttgggcactatcatctaacacaaagcctgtttcataatgtagtgttgaatatctcacataattgaatactgtactgaaagtgaaaaacaaaaaggcygtatgggtacagaatggttataagtgtacrcattgtttacccttgggattgtgaccatgaagctgactggaagctgcrgctcactgctgtggcccagcatcattagcccaggaaaagatcaaaatccaaactgcaaagcatggtttcccactaaatgcatatttctttcacaccatcatagagtccaaaaccattggaagttggagactttctgcactacaaaaatggcaacatcctttgcatccctctaacttgactaaacctttcatgaggaccctcctttccttgggaactgggctgatggaggaaggtagaaagggagagatcattgaaggaggaattttaaactaataaagatttctctaagcatttttta

SEQ ID NO: 21016 - DNA, 598 bp, Bovine  MMBT10729
  misc_feature (1)..(44): n is a, c, g, or t
nnnnnnnnnnnnnnnnnnnnnnnnnnnnnnnnnnnnnnnnnnnnaattaatgttcttattctaaaaggcaataatcacatggttctgccaagattataccctagaatatcatggaagtctacactagaagttaggaggactagtctaaggaggactggtctaagattactcctgatgagaaaaatttaaggacagaaacttaaatcggttctatccagttcagtttaatctggatagcctatcagaacaatctgcttccccaatctctgctactaaaagcagttgagtgaattacttaaycttctctgtgcttcagtttactcatctataaaataacttctcctgtgaagttaactttggtcaagaacatgtaactatggtaaaaaaaaattttttttttaatcatgctcaatttctttacaaagtatcttggagttcttccaatctcaccttaaatgtcaaggatatgcaccagttattgtaacagatattgccagctacattcatttctaatgatggggtcttacttaccactctaatgttatgctttttggaaaagaatttttttcagaactgtgagcctccttagatatgggca

SEQ ID NO: 21017 - DNA, 600 bp, Bovine  MMBT09241
gaggaaaaaactgggagaattccccaatttctcatgaatgaggctgacactgcagtttcaatacctttgtttgaaatggaatcctaaacattaaatccacttatatttaactaaaaacactgaaaaacattccagaataaaaaatagtatccaattatccacatccctggtcccctcaattggttgcaatcatttacaacatgagaaaatcctaaatacttaattwaaaaaaaaatcacagaccattaaattacgccactcttgcaggggcaaaaagaattacttatttggtacataaaytttatcattagattttttttctccggaaggaactgcaattttaaaaaattaagaagaactcatcaaattccacatacctggtcatggtagctggtactagaagtactattcgctccacaaggtggttgtacttgtggaggtctttccacaggacaagtaggatcactaaaggaaggagaaactgggacagctgggtggggagtatgatgatggggggggatgatgctgaaaatggtggccatgctgctgaaagcaacttgtgtgtggatgtcctaatgcatggtgattctgcgatgaccc

SEQ ID NO: 21018 - DNA, 600 bp, Bovine  MMBT16405
tgtgttttctagcctgatactggctataaaacctacacagtgtctttccctgaactgtgtcttgtagggaaggagaatccacaggctttgagaacagatgcctgacactgtgaaacatgatgtgactatttatttgcatcttttcattggtaatcaagcatgcaaggtcacttcaccgtatacgcttataataagaaattacagatatttttctctgctaggtttacaagattcatcagttaggctatgacagaggaagaccattgtacactaggcaactttagttctacttgccattarttgggggaaaaaaagcagctgtgccatttctgaggaagcattatgattctgcatattytttagacatccttccgatggagaaggtgttaaactgagaccattttgatggtccaaaggaatcaagtctgtcctttctatataacttgtattaagaacaagaaaaattaagaataattgtatacaaaacaagtataaatttatgttcctgaaaacatgatccctaaatgaacacactaatatttggagacatctaaataagagaaaaatgacgtgatattaaaattcaacctgtcacgatgg

SEQ ID NO: 21019 - DNA, 585 bp, Bovine  MMBT10701; identical to SEQ ID NO: 4640

SEQ ID NO: 21020 - DNA, 598 bp, Bovine  MMBT04938
  misc_feature (1)..(4): n is a, c, g, or t
nnnnatatctgtatccccaaatgatctttaccctcttggtgcagtcatcaaagctctgatagggaggagttagaattagtatctgagccatcagagattctgagatgtctcaaagaagaaaaaggaggggaaacgtgttaactttttgtgttatgttaatgagatccttcatccctgtcaccttaaaagaagcctaagacacatttctctctctgattcctttttcttctccctctcctcctccttcaccaacctcccccatatctaaaaatgaaggttaatattaagcatcacattaayagttgtcaaatcaatcatgatttcctctgagttatgttacacagagcaacatgctttatcagaaatcaaagaaaggacagtgccaaaagtggatgagctaatgtaaaatcacttacagggcactctggagacagaaactcgtttaatatttaatatagtcattaacctaagaaagagaaggagatggtaatggatggtctactccttttgcctacaggacagggtactgaagtgagctgtcccttctgggatcacagtcacacaagtctaaaatctataaagtgggtcacaggtgaag

SEQ ID NO: 21021 - DNA, 547 bp, Bovine  MMBT17159
ggcagaacctttcgttttggttgtttgggaagattttcagaagctaaaagatttcaccatgtgtgtttcttcgctttgcgctgttctggtttaagctctttttttttttttccctacagaggagcccaaacctgtaattctattgccacagatgcgttaaaaagaacccccctcctcatttctgccccgtcattgaacacagctttcagtaaccctgagcacaagaacaggaaggacattggcaactcaactgttaaactggtctgtgattatgtttccttgagatcactctgatgtcaycagtgtaatctgagcctggagcttttgttcacactttaaatagcagtcccggaatgattttgctacagactctctggagagcctgggagctgaattcccgaagaatcccccatccatgaaagctaagccaagccacccggccttcagcatgtccacctcgctgcgagtcagcccgtccatccacggctaccacttcgacacagccctcacgtaagaaaagctgtgggcaacatcttcgaaaacatag

SEQ ID NO: 21022 - DNA, 600 bp, Bovine  MMBT09607
gcagtctttgtggctggctcctttcacttagcatgttttcaaagttcgtcagcaccgtggcacgtatcmgtgcctctttttttatgactgaatatgtacacactgttttttgtactgcttttccgtcctcctcatatatctaaacatctttccawgacattaaacattcttctgtgacatcattttaaatatttgcctgacaatctgmggtgggrattcatctccagttgcttacccatttccctgatgttgaacagtcctgttcttgcattcaaaatgaccaccaggccagacattacygtcaattagggtgctgctgcctaggctctgggcttggttttaaaggctacagaggcttctggctccagaacttccttacttcatgacttaattcgtttaaatgaaacccagttgagttcaattcaattttgatggctcatctgtactgaacacactctatgtaccaggtacgttgctaagcattttattttctttacctcacttagtgatcaaaacctatgcaagagatccacacgttagcctcattttacagatgaagaaactgaggctcagagaggttaaggaatgtgcccaaggtca

SEQ ID NO: 21023 - DNA, 600 bp, Bovine  MMBT15551
tttatttttcttgcagccatcagaatttacctccagatcatcatgacaataaattgtcttccttcaagtgtctaaccaagaaaatcaaggaagcctacaaaacacataatttactgacatgtgggcataaaactaacctaaaaagcttatgtgtttttttataaaaataaaatcagacaaatataatacctcatggggttatataatattagagcagtaattttctttcagagaaatttggtcagattattggttagttggcttaaccaagtgcaccagctattcaatggcagcactatrtttaaaactcatgtctctaagcctgcagccctctacagttttactaacatgatggcacttttgcaacaatttacttcattgtatccaaatctcttgacatatttggacaatatttatctcctatactttactgcaaaatgggtaattttgagataggttggcaattccttgccrctgctaagtcacttcagtcgtttcygactctgtrtgaccccgtagatggcagcccaccaggctcccccgtccctgggattctccaggcaagaacactggagtgggttgccatttccttctccaatg

SEQ ID NO: 21024 - DNA, 600 bp, Bovine  MMBT07525
ttaaatagctaataataaaatgtcaaaatacaaattctattagtatcttcttttaaatttttttaaaaagcatccttgctaacatttactacatatgaggcattatgcttacatatgagtcatacactttaccagtttacagctataaacatgtttgtaattttagaattctgatagcaaataatcattttataatcataaaataatatcaaacaacagctatctaaatagttttttgaatcttcatggatgcttacacagctgggctttttaagaccactgtgtgcatgataattgcakagcaataattctaagcatgttgttttaaaaacaagcagactcttggggagttaaagatggagtttgtgcttttttaactaaaaaaataatctagaggataaagtgtataaaggctcccagagtgcaatgctgaaaatacaaatttcagtttaaactagagaaggcaaaagctaatgttctcattgccacgtaaattttctcacattatacctgggtagtgttcttgctctaattatgttcctacatgaatgccttattacatataatgtcagaatattacagggagataaagtgtgtctc

SEQ ID NO: 21025 - DNA, 600 bp, Bovine  MMBT03801
gcggtaaaagaagtggtcacactggtttaaaggcaacattccccaggcaaccagttgctaagccaaaaccacgccaaataaacaatttgctttggcattttactgttgaaatttgataggcagaaaaaaactagaattctaattttgcttgagaccagggggtattgaaatagaatgctttcaaggaaattctggtcatatgtaatactgtacttaattttcaacccgaggttattctcagattcgttgattgtataactcctaagtaatcgcctcactagagtaaaaggaaatgacaamgtactcaagggaagagggacggaagaaagttatttcctcwctactctgtaccaagaactggagycagcatctaatttaattaacaaccatcctggtagtcgaataatattgttattgctttgcagaaacaaggaaagaatcccaaagcagctaggcagcttgccagggctccaatgactgaggccacaattggttccatgtctctccaggtggtgtctattcagtaatggtgatggcattctggaaaagcttagaggcaaaagcccactgatgtcaaacacttgtttctcaaaggacgac

SEQ ID NO: 21026 - DNA, 600 bp, Bovine  MMBT08895
atttataaaatcatgaaaacatcattttaaaattcctgtttaggaaaagaagcaaagtatctgcgagaatcttcacagtacacatcaggaacacattgttttctacaacaaatggtagcataagctatttattgtcaagttttctgttaaaataaaatctctatattttaaaaaacttcaaatcgggacatgtgtccagctcaagattcaacttatccatcatcagaagacaagtgagactaatgaacacatttgtttggattctgcttctatttctagagtctattaccttcgtaggastcattagtgtctgcttgtaagagataatatgcttgaatcatacaaatcttgtatttcataagcagaaactcagattcatacattattggtgaagaattaaaattattatagatatgtaatattcttcttaaaaatacattatgtagtcgacaaatagaattgcagataggactgtctttccatctggacacaatagcaacacatgtatcagatataaaatgctcacatgtgaggatacagtaagtcccctacatacaaacaagttccagtccaagagtgcattcataagtccaatttgtt

SEQ ID NO: 21027 - DNA, 598 bp, Bovine  MMBT22630
  misc_feature (1)..(129): n is a, c, g, or t
nnnnnnnnnnnnnnnnnnnnnnnnnnnnnnnnnnnnnnnnnnnnnnnnnnnnnnnnnnnnnnnnnnnnnnnnnnnnnnnnnnnnnnnnnnnnnnnnnnnnnnnnnnnnnnnnnnnnnnnnnnnnnnnnntggctgctgtctaaaagacagaatgccagattttttaatatctcttgaaagcagctctcccagtatgccgcttatctcttcagatatgtaatttaataataggttccttcttttttatccctctcactgaaatgatacctatagaacatcattaatacctcacatttatayggtactytgagttcttcaaagagctcgttcatctattatcatgctgtgctttatttcatacaacatcccagtgagtgggtagaacaggctattgttattctcattcagagatacagaagtacaggtaaagaaaggtgaaatgatttcctgaaagctatgcaaatgattagtaaatctggaacaaaaattccacttctctgactcccaatgtcactctcttttctttatctgcctcttcaaacctgtaatgtagtttgctcatcttcagcatttarattccawtctgaggctgagtggt

SEQ ID NO: 21028 - DNA, 600 bp, Bovine  MMBT19940
tggaagayggattcttaaccaccggagcctcaggaaagtcacatccatgacattattaaccaaagacattattagcaataggaagaagcccctagtcactgagcatttattatgtgtaaggcactgagctatgtgtatcacaggttattttcctatttagctctcagaacaacctcgtatggtataggttctttttatttgattgaggtatgacacagtgaactgtctagctctcaagtgtagagctggatgagtcgtgacaaatgcaygcatctgtgccccttgtctggccatgaccayggcaggcttgctcaggcccctkcccactcaattcccacaccattcgcactagctgtataacctcagattcgttttatctgctcaagaacttcatataaatggaatcatgcagtagtgtgctcctctagctctggcttctctgattcagtacaatgtttgtgaaattcgtccaaatgggtaagagtgggacacagtccttttccttttttttgttgagtaatattctattgtgcaactactaacacagttcatcattctcacactgaaggacatctgggttgtttacagtttgggggacat

SEQ ID NO: 21029 - DNA, 600 bp, Bovine  MMBT04887
cggagttcactcaaactcaaactggatttaataagcacaaaatatttttttttacttaatatatatttattggccatgtgtgtgtaaaatactrttgagagacatatgaaaatggataaggcatggtcccttctatacaatttaaggagggagataaaactggaaataatttagggaactgatccaaaagacagatgaagtgtggataacagcaatggtaaacatggagctagttggtttcctttattcatccttgccaggatgtatacacatacctactgagtgccaaacagtggccaragcaccagggaaactatgaaaagtctgtccaagcaccaaattggagctgcactgttatggcaagacagaatcactaggaactgacccttcctgggtgtagaagctgggtgcagtctgcatggaaaaagctatggtagtctatagagtatttagccyttgtggtttcagtgtgttagcttgaagaagtagattctctttcaaagtttcttacactgaggcccaggggccacttcctcagaattactgctggggcttgttaaaatagatttctcagtccttccctaaaaccgactgagtaaa

SEQ ID NO: 21030 - DNA, 600 bp, Bovine  MMBT20719
tgcgtccgtattttgcctgctgtcagttccgttcatgaaaagcaccccagaagctttattcattatcattctgagtcatttctctaccatgggggcagctctaatgcaatttatatttagttcttcctatgcttctagttctttacatcaagccctcctgttagtggtaaggataagtgagccattggaaaaggttttgaacccttagtgaatttcatcctaaaatataccaaaatgctataatctgtatgcaattttcattaagaacttccaccacctgcttgctgaagccacagcacmgctccactcataatcaccacgcagggggcagcattagttaacgtcattagacaaatgttgaggttttcttttgcgtgttcattagcaccaggtggcaagaaactgctagacataggtgaggaatttggggagggggtgattgaggattatgcatcatttagtcactcaactttctgagcatccttgaaaaaccaaagagactaatagaggagtaattttctgtttttttttttttttttcagatacttcaggatcagttctggtttccaaatagagggtgatctttactagctgggtcat

SEQ ID NO: 21031 - DNA, 600 bp, Bovine  MMBT08186
ccgggggggggagctgggcacttttaggacccaagcaatgggacctcactaggatctttaaataaaaactttgatgattttctgattctgtccagtatctgacaactgtcaggaagggactaaaagtcacctacccagattgcatttctcagaaattattataatttagttttgtacattttaaacattcttttagtgtatttgcaaggctgagaccatattcacaattctgtattctttttttaggcaacattttaagtaacatmattactgatctttgaaagcattaaaaatcagtcraatatttatccgacagttaccagttagcccacaattatttatcagacacttgctrygtgcagatttctacacaacgttctctggagcggacctgcctcaaagtgtacttttattattgcacattgttgtccgactctttgtgaccccatggactgcaccctgccaggctcytctgtcyatgggattctccaggcaagaatactggagtgggctgccatttccttctccaggggatcttcctgacccagggatcgaacccaggtctctagcatttcaggcagagtgtgtaccacagagccg

SEQ ID NO: 21032 - DNA, 523 bp, Bovine  MMBT12712
ttgagtaggttaggtgtattcagtgcattttcagtttatattttcaatttaagatggttttttctggacataatcccattgtaagtcaaagaagatctgtatagtaaatgtaacttgctttcatttgaattagaaattctgttttttattcctcaaaagcatataacttcttttctttataagtcaattttatagwgatatagattatttacaataaaatacaaatacactcatttcaagtcttgacaaatgtatacacctgtctaatcagcactctaatcatgattctaggtttccatycctctaaactcttctctcttgcctgtgtgcaatcatttctccctttctgccctgtattaaatagttccattgattctacgcccttcaatgttagccaccaacctactaaaaatacttctggaagtaggtggattataaaaaaacaatcttcataaatgaaataaccttttcaagctctaggctttcttcctgtgactgtcattcaatttacttttcttttagt

SEQ ID NO: 21033 - DNA, 600 bp, Bovine  MMBT21959
ggttaaaacacaccagcacaggttgtatcctagagtaaagactaactctgtcagcgtggtatgagtactcagtggaacaaacagagtgatccttttactgagaagtgacactaacattatgcccttccgaacttaaaggcctctttctggcaccaaaccaaaagggcacctaagttcctcaggccttatctctatatgcaaaagagcttgatgaaagatactgagtgttgaaaaaaacacaaacaatggaaataatgaaggaaggagattctgtactttcaacaatgagcaaggaaaackccacacaaacatgcttctttccgtcttatgcccacaagtatgcagcagaggaggtcttccactgtaaggctgcagagactggcartgattttaaaaagcatcwtttcttcctccatgttgtaaaaatttattttttatatcacccacaaagaactaacttgaaattaaaaatagcatcaaattttcttttgtgaaatctttcttcagactgagggaaagactcctcttgacttcactacctagcatacaactccttcaggacaagtactgatatatgatgacactgtgattaatggttac

SEQ ID NO: 21034 - DNA, 600 bp, Bovine  MMBT02873
aataacctcagacacttagagatgaatgttgacacacatctcttccaaattactacaagtgttaaaacttctctggaaatacatctagctaataagcatttcatattttgagagagataggttttgttaaatttttgactgcttagagcattttacaaataaattatgaaactcttcagtgtgcggtgtgtggaaaaatccatgagtcctaacaagcttgtttctctggaagatgcagaatttaaatcagtctattgctgatatttatgtacaaactctgctcacaaaatatttagcccrtcagcatctgccactgccacagacagattcagatcagaaggcctggttccttcccatgaattttaatagaatgtcctcgcagctgaggattggccagcgtttccaaatggtgatgaatgggaagacagatgggcccttggagtaacagaaggccgagtcttcaaaggtggcaattgctggcattctctaacatcagtatactcactctcgatctataaccaggcatgcgacatcattttcctcggcgataatgttagctgatctgacatcttcactgcagacaaaaacaggaaaagtcaa

SEQ ID NO: 21035 - DNA, 600 bp, Bovine  MMBT02803
ttattctcacttggcctataatatatacgttacactcattttcagcctgccatttatattttcaaaactaattatcttactaccatttaaagtaaaatgaattttactttaccatttaaagtaaaataaattctgagaatttagttgcattttaatgttttcataaacaagcaacagtattaaacaaaaaaaagcwatacacaagcaaaacacagatgcaggtagagaataaggtgtcgtctataacactaatgtttcaatttttcccatttgtaatccatctaaagtgtacaaacacaygcacaaacacatgtttagatattctcataatgtcataacttttttaatcatgaaaaatactgccctcagaaaatatatcctccacattaaacatgaaatattaatattttaatttagcatttattaggagtgaaatatccaaggtgacagtaaagtaattataactgcagagtttgaaggcaaagtgtttggagttcgttcttgtgtgtattctataacatggttcatccttaattttctgacctgtaaaatgaggataatagcaacaccatagagaggagaaaatgtaaacgatctggc

SEQ ID NO: 21036 - DNA, 600 bp, Bovine  MMBT04852
aaaacccaaattcaaagaccggatctgctatgtctagacaggtggtactgatttaacagttaaattattaatcaaatatctacaaaggataaacgtcatcctagattctaatccaaaatctgaattcatgacatctaagtgaatgaggacttagttcattctttcttctggtttctctttctactggactttgtgatattggtggcttttgaactgggcattaaagagttgccctcagtgtacaaaactggatatattgggtagaggaagcttaaaggcagagacaatattgtgctgacrtacagacatacagatcagcaaatgatacatcagttcatgctgaaaatgactcaaatatttgtgttaatttattttgccatattataaactataaccactgaaagttaaaaggctattgttcaaatgactatctttctaaagtatcactgtcaggttttttgaccaaaaggaaatctatagtaccactgctggattttaaatcattagagaacatcagtgtttttaagtaacaaaacaataaaacaacaagagaaagttttcttgacatgggatttcatgatgaaaatcttaaatattatg

SEQ ID NO: 21037 - DNA, 598 bp, Bovine  MMBT19666
  misc_feature (1)..(6): n is a, c, g, or t
nnnnnntaagagggattgatgctgaggactacagatcactaattctcgtcttaattaccagtgaagaagcagcagcatgcattagggccggaagatactactgaaaattcttcaccggctgaagagactgcttcggcaacttttaaacagtctatctgtccatttcttcctttaataaacacactgaaattaaaagtctctccctccattacctaagagactactgatattttcagttgtttaacctcctggtttccttcctatgttgccattatacactgtaaaaaatgaaacctgaarttaagtgaaccaacacaaagcaaggcatgccagtgaaacagagcagactgcatcccagaagtcagcatctaaaactctgtcagaagaacctaagtcatatacttttaaacgggaaaaaggtacaaacaagtacaaaacccgtgtgcgtgtgcttacttagcgagctgtactggctgagagtggacctcactcgtctggagatcggggatgagctgagataacccatgttgcggtgataatccatcagctgttctgagcgtttcatgccaactgttggcttcacagcttcaagcctttt

SEQ ID NO: 21038 - DNA, 600 bp, Bovine  MMBT17478
gggcccatgagactcaatcatggattcgatgatctggccactgcacctcccagcgaggtgagcctgttctgtggcctggtagccagttcccacgcgctggaggagggccccctctgtgcttgaactgcgatcacctggggacctcggtctttaggggccccagcatgcagacctttccttccttaacttcccactcgagggggccgacttcttacagatcacaaagcttagcaaagtcacgcgcatccagcgtgccacagcctgcacgggactaagccgagagtgcttccgaaccttgcstccagtgctcgtcccccagcctgttactgactccgcgaacagacacggatcaggtttctgctgtcggaggctctctgttgaggccagaggaggccagaggcaggtccacacccggacgacacgcctggaggggagagctcgccagagcrccctggaaataggcttggagagaagggcagggtgggctgtggcagcccagagagatgggggccaaaggactcagaatctgatatagcggggagccggcaccactgccccaggcctggggacaccctggcttccctggaaggcccttcacct

SEQ ID NO: 21039 - DNA, 600 bp, Bovine  MMBT07432
gtgacattccaacctttggaattaaaaggatatttatacttctataacaaaataatcttactttgaaaaaaaaatggatgcagaaagcacagcaaaacttaataaattcacattgagtaggagaaagacctaaccaaattagtggcctgaattatagaatctttaaaaaatttaataktaatttaattactttcagattcatggagttccttggagaaatygctttggtaagtagctaagaaaaatttacaaatagcacatcagtgggtaaataaagcaatatttctaaagaatccaccrtggactaggatttttaagtggttttgctccctgaagtatatgcasgttatgaatttgccttgcaaaaaaatgattctctatgagacataggagagatattcctgatttttaaattatttgtggtatttggaagtccttcatttactcattcgttcttgcattcactcactaagcaaacgggaggtcattgtactggggacccagtggcgagttcaacgtagcccccgctgtctacatcctgtgggctggagttaaggaagtacattttaatgaataaatatgtagttaccaattatgcta

SEQ ID NO: 21040 - DNA, 600 bp, Bovine  MMBT10582
ttctaaaagatgggaggaagggggaattaaaaatagatttgttgtcgccgtaacactgcaagccacacacacgacaytgatcagagagaatccacgtggctgagtattggacatggaggtaccagtggactcatttctcacccacaaatattgactgtgcagtaagaaagcctgcgagtccaagactggatcatggaccttcataggccatgagtgggcgagtcagcaagcaaaatccatgcctctcagstcacatccaccyatcgcccatacacactcagacacaaaaactgaccaagycccccagtcacctctcctaagcttcccagtgtgtcctggcccactcytaacaagcatgggcaaaggccacgactcctcttaacagtgaacctggcccaactctctgggccagcctcttgatggttcttatatggacacaatgggaggcctttaaggaaccagggagagagagggtctaggagggaccyacactgttcatcttcaggtagcaccaagaatctgagggagcaggcttcttccttcctctgcacccacatcccttcttctgtgtcttagtttctgtcacacacctttaaaggc

SEQ ID NO: 21041 - DNA, 600 bp, Bovine  MMBT08699
tgctacataatgtggaaaggatattttaatagagcaatatgattttaaatactcattaatattattaaataaatatgaatcacatttaaaaaattctgttagtactatgcctaaatctaggatctttcacactgaattaaatgactagcaatcattaatgccagccagctatgctaacactgaaaatcatgcaaacttactaaagattttgactaataagaaaggaaattttattacagaatattaaaagcagctgcaaatgtctacttttaaattggaatatatcctgttaaattaacyatcaataacataaaaagtaccctggaatccagaaataaaaccttgtatttacggtttaataaagttttttttttttttaaggaacttatttttctgaaaagtaaagatttacaaaaatatttcaaaagaaagttttgtcatcaaaggagacagcaattaaacttcagtatacttattagggaattatcatttcagtaataaatcacataaactgcatcatgccaatagataaataatgaagatgccactgtcaatgaaaagatgaaatattaaataaggtccaaaatatacctgggggtg

SEQ ID NO: 21042 - DNA, 600 bp, Bovine  MMBT00613; identical to SEQ ID NO: 4552

SEQ ID NO: 21043 - DNA, 600 bp, Bovine  MMBT01016
cacctgggaacccattccaggtgcaaaattactcaaatgtgtgtatgtatctctctctacatattatgttgttgtaatatatatgcatgtacctttctctttccattataatacatatattcaaatcaaactaaacagtgacatacataataatgaaaaatttactttactaatactattttaatgaaaatatgtgaatgattatcatagctgatgaaagtcaggctcgacccaagaaagtcctggaaggatggtaagtgtgaagaattggttatacacctggctggatggtgaggtgtytawgtatctagaatgaggtgttagttgaaactttgtgctcttctcttgtgttcagtcactcattcatgtccaactctttgtggctccatgaattgtagcctgctaggytcctctctccatgggatttcccaggcaagaatacaggagagggttgccatttcctcctccaggggatcttcctgactctgggatcaaaccagtgtctcctgcattggcaggtggattcctcaccactagcaccagctgrgaagcmcagatgagtctgtatctgatgcttactgctcastcatgctatcactt

SEQ ID NO: 21044 - DNA, 598 bp, Bovine  MMBT09049
  misc_feature (1)..(77): n is a, c, g, or t
nnnnnnnnnnnnnnnnnnnnnnnnnnnnnnnnnnnnnnnnnnnnnnnnnnnnnnnnnnnnnnnnnnnnnnnnnnnnntatcttattaattaaaaaactgaatatgtctttcagggattttttacctctgcatgtatgattaattcataccaaagtcatcaaaatacagccaagtgagggccatttgatgtcctggtgccctttaatgagagatttcaatctttttccctttaattgagaaattaaaaaaaaatctagtcataaatagaactcagcctctaaaaggaccttggctttgcaytgaaacataaatgcttatgaaatcagggagatttcgagtacgttcttttctatcagtaattctgattagtctcatagatataattcagtgttgttaagattataaaattggttcattcatcttgagggtaagagaattaatgagatgatacctggtgaagcaatttcaattcagaggtagactctaaaagtgtgattcatatttgtcattattgctggttgctgtatttacttttataggtgtgatgaatatggttttaatttattatggttgcattgactgtatagccatactgaat

SEQ ID NO: 21045 - DNA, 600 bp, Bovine  MMBT16630
gggcccgagacggtgaccattgccgggtcagttctgctcgtgtgagacactgcgctccagcggtccattcatccaggcaaaggtctttctgagagtggggagaaatcccatacctcttccttaccgctgacaagagtgcattttccagccaaaattgagtctcacttcggacatgaaagatgctagtcggagctattttacaaatatgattttctagctgtctgcctgataaagcagcttattccagatcctgtgattccttgcttacaaaataacccagacatttctccttctcagttrtggggggaagagcactagcatccagactgctgaattcgaacagcttttgtttctagtcagtgggtytcacataccacacaactggatggaccggatggcttttattttcttagagcgtgatttccatatctgatcaacagtgactgcctgtgagtttattagatatgctttttcctaattactttctttgtagaaaaatatatcggtagccagaggggaggatgtcaagagaaacagtaacagagaaaataccacagttacttggatcaattttctgtgaattaacctatttaacatctg

SEQ ID NO: 21046 - DNA, 598 bp, Bovine  MMBT05387
  misc_feature (1)..(86): n is a, c, g, or t
nnnnnnnnnnnnnnnnnnnnnnnnnnnnnnnnnnnnnnnnnnnnnnnnnnnnnnnnnnnnnnnnnnnnnnnnnnnnnnnnnnnnnncttatagcatgttctaagtacaatctggaaaaaattaagtcactttattcactaggctgaaagccatgcttttctctcgtcctagtctactgctgcacggagtctacaaaaccacagcgatatgctcagacctcctggggtaaatgccgccatatagcctatagcaagaaaaaaactccaattgggaaattcaacatgggggactaaagcaaaytgtgaatttgtaacatagtactttacatatagaactgcgaaaaaacaataaaccaaaaaaagactctcctgtaaatgtcttagactactatctctgaatcaagcatccaagagtcatagttttcataatgcttggatagagtattwytaaaaactttcagcttcatctaatataaaattaacaattacagttccccaatcgctgattctacaaatattcttaaatctatattatcctactcagcttgctatttgctaagtacatcacagtataataataatatattttataaaagcag

SEQ ID NO: 21047 - DNA, 556 bp, Bovine  MMBT18066
tgaaaccagatcaactctgctcggaattgctattaaatcttcttttgagaatcttgtttttctttttcctgttaggggtggccccttggtagaaggacgtttacacagaataaaggagaaaaaaaaattgtttgctgaaggcatcagctctgagaaatatttaacagtttgcaaataggcaggcagctcccagaccaaaagagtagggaggaaggctgttctgctcttatgaaaaggagatgtattaaaatgcagtcattaactggtggaatgttctagaattgctgacgacctactggraatttgggctaagtttctcgaggctataacacaactgtacatcctcctgggaagccggaaaggaggaggacttggagcagcagggcgtggatcttagcagagtggagcggagatgggagaggaaatgtcttcccatcattgttctgatggaagatggggaaggttgcccgtggctcagcaggtagacgtcattaacagggagagaagtccccaccagagctcgccaacggccaagtgttactcattcacccggcaa

SEQ ID NO: 21048 - DNA, 600 bp, Bovine  MMBT10315
attcatttcctctggcagccagttcagaacaagcaagggaacactatattccaaactgcatttttaaaatgtgaatattctgcctgttactttatgttttatgcattgtttgcaaataggaaacacgggtcacttcatattttatgaattttctttgaaaaatgatttgaaagaaagttcaatatcaggagcatagaccttggctctgactttgccraatgtctgatttttcccatgctatctattttcttaaaaaaaggataatttaaagcaataccttgccctttggcctcattactrtaatctgatgagaaccagccttaaaatgtatatatttaataaatatgtacttacccaataagctgtaaaaagcactgcatgggccttgaagtcaagagtacaacatgtttttcaaaatatatcaaggtcaaatttgcttacctgataacatgtaaaaggaattcttggtataagttatatactgtcatatacttgcagatttaggaccaagttgaccaaaaattctaccagaaatgtcattaaggtaaaagggaatcttttggctatgggatatattttatktccaaatgcagttttcct

SEQ ID NO: 21049 - DNA, 598 bp, Bovine  MMBT02241
  misc_feature (1)..(133): n is a, c, g, or t
nnnnnnnnnnnnnnnnnnnnnnnnnnnnnnnnnnnnnnnnnnnnnnnnnnnnnnnnnnnnnnnnnnnnnnnnnnnnnnnnnnnnnnnnnnnnnnnnnnnnnnnnnnnnnnnnnnnnnnnnnnnnnnnnnnnnnatcctgcctatcaatctctttgtaatatacactattccccagccgacgtcttcagtgacagccattcatgtgtcctgagctgatcaaacgcaggcaatagtgatggttcagcacgacttgcctttaactgaatgaacagaaactgttccccaaccatgcgtctggtrcacaaactctactgttcttttaggcttttaatgggctgtcctccaaatggcacatcagagaaaacatttcatctgaagaacaggtatagaatgcaactacttgttcagccacaaccctggccttttgggttatgtgmagtcttagttctgaataaccgaggataagggggggtagggaagcttttccctcaattctaaacaccctttagtctcctttgagtcaacgccgctaattatgccaggcaggctgtatgatgagtagcggttttgtgatcccaactattgttcagaagggctg

SEQ ID NO: 21050 - DNA, 600 bp, Bovine  MMBT22842
attataaaatccttragaataatttagcacaatctattaaaatcataaatagccttatctaccttatgcgacatagtaacccaagtttatttttatatttaagaaaaagagaaggtgaaaatgataaaaatctaagggtctgttggttgcttacaattttattttttttatgaaaataggaatttataaatttagtaaatatttattttgataaagatgaggattgaytataattcaaataaacatttcattctatgatttgaaaaaatggattttagcttcctttaaaataatgcacayaaaattttaatcagcaaatttcagcctgtgtttatattgaaaaccatgggttattgctccctaaactcaaaatacatttaaaaccataatcttattaagctataagcatccctgctccactgctcaaagatacttgtctttcagccaaatgacatatccagatgacaagcactgacaaagtcagggagaaagctgatatttttaaactcatgaaagaagttgatttcagtgcttcttacctgtaatctctctgcctcactcccacgtgactgttccctgaaagcaatgctgactttggct

SEQ ID NO: 21051 - DNA, 600 bp, Bovine  MMBT20628
catcatttaattattccaaactagattccagagaaagctacaggcttgaagtacagctgcaggacagaggacagagttcagaatccagaattcaagttctagaatcttcatgtcctggtttgagacccagttctatacatccagctgcataatacacggcaatttactgaatctctctcagccctagttttctgctctataaaacagacttaacaatgatcaggatcatgatgtaataagagcaaatgactcctagggttgtggtgacgattgtacaaaaagaggtacatgaacagtcaytatagcaatcagacattggagagttttgtggcaacatccccgccagttctagcacctaataaatggtcatcacaagcttactgatggatggcctggtaaacaaacatgacaaaagttgctcttctcacttccttaaacccagcagaagattagggacaagagacaaatataattcatgaacggaaggraacaaaagggtttggagggacatggagtgacaaatttctaacttccctccaacatgtttaaacgatgtgtccctaacggagtgacattgcccctgattctgctstttctatt

SEQ ID NO: 21052 - DNA, 600 bp, Bovine  MMBT09054
gtaggatatatgaaatcattccatgttctttttgaattatgtaaatcatgctgaaagtggatagtaatttcaaagagcatttttatgccctacaaattagtttattactcagaagcacacgaatgatgacttttaaaaatagagttatgtattcaagaagcagaaaatgctggtgtgtggagaatgcgtggaccaacagtgagtggctagtcataaagccgattgctagaattatcctcaggtggatccaattagctgcatctgacaggacgtcagacactgctgggatgcccatgttcrtgtgtcttatgtcccctttggaagccagaagatgtctcagtgaggctccacccacagcagccatgacagtgtgccctacccctctcccaattcacaccagcatgaactaactgaactgtgattgaactttcctgctcaggcaagtacatttttaacacaatctaccctgtttaagcctaatttgcatttcattttacaatcttgccattcaacacaagcccttaaagatagattttagggcagcagctaatctgaaacgtacatgactctcattctgctaaccaaagatatgctttctgt

SEQ ID NO: 21053 - DNA, 598 bp, Bovine  MMBT18786
  misc_feature (1)..(229): n is a, c, g, or t
nnnnnnnnnnnnnnnnnnnnnnnnnnnnnnnnnnnnnnnnnnnnnnnnnnnnnnnnnnnnnnnnnnnnnnnnnnnnnnnnnnnnnnnnnnnnnnnnnnnnnnnnnnnnnnnnnnnnnnnnnnnnnnnnnnnnnnnnnnnnnnnnnnnnnnnnnnnnnnnnnnnnnnnnnnnnnnnnnnnnnnnnnnnnnnnnnnnnnnnnnnnnnnnnnnnnnnnnnnnnnnnnnnnnnaaatgcttctgtttgagaaaaggacctgaggatcagcaacaatgacctccggagtttctctacttattttygctcttaatttcaagttccaagtctcttattagcaactgtctcttaattataagtttctgtgggattccacagctgggtatggaaatcaagtgggtaytcaggtgtcagatttaattaatctgggtaagaaaactgtaattcagggttttcttgataatcaaaagatgtattacccaacctttcactacttctctttgctcttttcagtagagaagtacaaattgtcatttttgaactagaatctcacctaataatagctactgaaccctgacagtggctggggggtagacagtatgt

SEQ ID NO: 21054 - DNA, 600 bp, Bovine  MMBT21269
cagaataaagcaaagccagccaatcactgacacatctgggaaggagaccttgtcttttactgaccattctccctctatccattaaaaagctatccctaacattttcagtgggtatcctgccttcctgcaaaaactctgcccttgtttatacacatccttaaatcacgggcaatactgactcagcatatcaacagctcataaccacgtgcccttgaatagtcttcactgggtaccttaactcagagcctgaccatgcttcaaccaattgaacacgtctcagcagctgaaccgtcctcagaytttaagaggctctcatgctcacaaatttccacttggaaaaaggcaaagatatgaatctttctgaaagctggmtatgagcagagtccaaaccctaagaagtaatacctgaacatttacagggacttgaaaacatcaagccctgctagcgtgactgctttcccggttttgaaactgacaagtgcgcawgcgagaaagcgcgagcctctgactcaccggttccgggggtcttgagcgtgcctgtcggggcagccggcttcgtccttggcatggtgatgccgacctgagccgtcatgcctcgcc

SEQ ID NO: 21055 - DNA, 600 bp, Bovine  MMBT01053
actggaaaagcggtctgcatatttgaaattgtagtcgagatttcttctttttttcctcatttatggtttggctccagagccaaagttacgtcttgaaaccttccttgctgtcactgctgactgcctgactctgctgtgctctataaacctgcctcttctctgcgcctgccgggtaactccctactgcacaccccagacactgtcttacatctctgctgggtcctggggtgacgtggaagcaatgtctacatggcgcagtggagggaaagagggcagtgcgcttactgactgccagacagyggacagcagcccagagcagtgcttcttactctccgtgaaaaagtaaactatgaggagctgatgaagaggcaggaaaactgctgcattttaagtctgtataccctayggtcagggacagattaatacatgctgatgccgttactatcttcatggctgcattcatttagataatattttagtgcaggagtttatagtgcattttgatattggatgggcttcgctggtggctcagagggtaaagcatctgcctgcaatgcgggagacccgggttcgatccctgggtcaggaagagcccctgga

SEQ ID NO: 21056 - DNA, 600 bp, Bovine  MMBT04443
tgatagagcaacttttcatgagctggtagaattagcgaagacatcctctgcatttaagcgaggcacaaatttcaggatgtaaaatggatgctttacaggagactccattggtttactcttttcttcctcagtattagtaacttaacaaccattttcttttaaaagaacatcttaaaataattttttaatcaccagactgtgacaagtggagactctgaaaagatgtgccccaaacaggtggtctagacaactttctcaaggtgactctctgctggacttgtacgttacaacataagaaayggtgtgtgtcagggtgacttawttaggtgacttaattaaagtccttctgatgtctatttgggagaactaatgagtttcttttatcaaatttattccaagcacttcctgagatgcaaaatctgaattaactaacttctctataaatctgatgaggaaaccaagttctaaaaataacatgtgcagtgctggaaggatctggatgaaagcatagaagccagctgagtggatgtcaagaaagaatgtctgatcttgatgttttcaagcttggctcaattgaaacacttctgcaacttagagtag

SEQ ID NO: 21057 - DNA, 600 bp, Bovine  MMBT04431
cattatttagaattttgactttggaggaaatgaacctaggcctccatttttattttttgtttatcatactgcaatttttgccagtatacctaaatccacacctgtgaccttagtgtagagctccacaatgagaaaattctgcccttgagttgtcttcaccttggacattactttagggtttattagcttggagattgagccaatcttccttgttttaatcaaggtatttcctgcccttcccagcacttcaggctgctgctgagatgcttccagtgtaaattctcttctgtagtctccatycacactgggagtcttcctccttcctgggggtcttcatacgacttgttttagtcagtacagaggggactgctgggcataattggttccttccatgctcagacatccatgaatacctggagccacaaagctgtgggtcatgttctctctctctctttttctctgtctctatctctccatctctcaaatatgtgttgactgcatctctttggtatagctcctgcagtacagcctttagagtttgtcctgctgggtcatgttccattcagtttcccaaggactagatacagtgttcaccaggat

SEQ ID NO: 21058 - DNA, 600 bp, Bovine  MMBT16939
ttaagaagtcaagagtttagcatcaagtctataacaaaaaagaaaagtgaaaatatttgaggatgtagggaaggtacattaaaaaattagccttacgtaagtaatcaataaatttctgaaaacagtaaattatgactacaaaagagtgtgacatctttactaaaaatgtggagtagcacatgctaaatgagacacttggtagttgtttttccccctgtgatgtaattccagattagagttacatttttttcccccatagagcagtaaaaagcttcaaaggaaggaaagagtgggatgtgrtagaatgagaattagacagcacagtcagctggtacataaaatgatgaaagagactagaataatatcaacatcttgtataatcaatcactgcaaatgtgtcaccaagtatgaggccatctccaactgtcaatacgaccgtgtagacaatccgggtaagggaggaagtacagcatagtcaaacacgcctatcaacacttctttttttgtctccgaagaacaaaattctgagacgagacaagttcttggagcaaatggaaatttatccaaatgaaaatcaaacgataaatgccaagagaatat

SEQ ID NO: 21059 - DNA, 600 bp, Bovine  MMBT06697
tgtatttttatataatctattccaccttcgagtctagaataaaccacgtgagccaagacatgaggaagtggactgactgactacccgggagagtcataggcccactccaggaaccacataagactcagtagtcaccagaacttgccagttggagacctgatcagagattcttaagtctagaataggacagaaaaagcacaaagacagcccaagagcatacttgctttgggctaccttcctgcgctccttagcaattaaacttgattatagccgacagctcccattacaattatctgaagmcgatagcaagagcctcctgtcaggaagctattaataacccgaaagccttgtcttctttctccctgtagtcactctttactttctgggggagattacagaccctgcagatccaatgaagcacagagtccgggcatgcctatggagagttgggacagagggtgggtgactcaggagaggtgctgcccagacaagaaaccctgatataaaggaaccatgtatgtgcctctgcccacccactcagggccagcctaacacatgctgacccaagcaggggcagtcagttcagcaacctgtccagaa

SEQ ID NO: 21060 - DNA, 600 bp, Bovine  MMBT11210
ataatatattgcccaaactgcagaacgtctgaaagtcagagcaattaataagtaagccaggaaagcaagcataagccagaactctccgcatcaaactgggaatatgtggtcacccaggctacaagcaaagaagtcataatggcagagatgggaattatggacgtatttgtcatcatgggctgtcccttacccaacactgcagagcatccaagctgccaacatcagaaacaaacaaaatgcttctgacacaggatcacacctgaagggaccaggcagccatttagaaggaattaaatacastgcacctgtttcaraatagaagggatcagtgatttgtctgcaccagaggactttcctttcttttccaagtttctgccaacactgtcattcattgacttactgaatgacttattgtctcagtttccatacgatactgcttctgctatggaattcacattacagaggaaatgaggcagttgactgatactctttaagatttacagatcctaatgtgaacattgaccttataaaaagtggaatgtctcatgttgaagactcagttgctatatgagcaggaagaaaagagcttgtgagtttggc

SEQ ID NO: 21061 - DNA, 600 bp, Bovine  MMBT11050
gatcgccgtcttgagtccatagaaaacaattaatgcagctgtagcataaaaaatcaagctcttgagaaacctcttttggactttgacataaagggctctggcacccactgtaatgaggaggcaaaagcccatactaggaatatacaatactcgctctgcaattacaaagccgacatagaaaaacaggttcgtggcaggaacaaagggtattattaataaagataaagacagaacaactatgttctccgtagaaggaagctgtgttctctgcgatgcattgtttctaatgccattttctastttggatgcaaagctgggtttaatctctgagttcccgtactccacctctgaatggcagctatgtccatttgcattctgcttgccatttgttacaaatttcccgttgcattctctttctatgcttgggctcttcaaaccaaagtaggcaaggaggaggagtccagtatagaaggccacagtgtgtaagtttctccaatcagaaattgttttgagcagaggcacggcgtccattgaccaatcaaaactgagggtatctgggcatagcaacagccaaaggttcttggttggcaagtagaagaa

SEQ ID NO: 21062 - DNA, 600 bp, Bovine  MMBT17397
aaaaggaaaagaatcactgagaggttgtgaatttaccaatttaccaaatatcttttacatgtgaaatatctgagattctttttatacctaggctcttttaatactgaacagatgtcatctggtaattcagttctgggccaggtctcatgcacagaacaatgcatatattaacagaagctgtttgttcttcaacaccttttaactgattgtctgtacatataaaaggagcaaaagtgaatgccttccatgtaatgtcaatttcacaagtatgttacttaaaaataaatgtttacactgtakgttatttgaaaccagtggctaaatatatttgtatgacatcatattctaattccattgatttactggaatgtactgagagtatatgtctataaacccctataatataaatctacaaatttattattttaggaaataaatctatattattttcagcaaactatatatcaaaaaatttcatacatgttttaatagtaacaggtattttattttaactcctcatttaacttactttctccaattaagagtagttctatatttctgaaaaataagcaaaagaaagaatcattttccacaagttct

SEQ ID NO: 21063 - DNA, 600 bp, Bovine  MMBT07405
caatacttcgagcagtggtcgtaggttatattcctgctaaaaacataaattatgattaaagctaagcaagaaactggcagccacatcctgacagttggggtgtaataacggcccagaacgaagaaccaggcgacatgcagactaagggccacccctccaggaagacatctcacccagcacaatgcyccttcactccttttttttttttaccccccacacccattcaaacttctacaaaacaaagagatttctcataactagagacatctctcataactattcagcttcagtttttcattytggaaaaccagtaaaattctcttaatcaggataattttattcttcacttcccatcaccattaccccaggaacacaaaagaatatattttaatgcattataagccaactgagttccttaaaaaaaaaaatctagaatgatagttaataaaaaataaatttaaaaatacaagtagaaagatagttacgaaacgaaaggtgctttgacaaacgtataactctcggcacctaagtgtaatctatttcagctcttacatgggtgcctttatattttatgcttgaaaatatacgttagcctctttg

SEQ ID NO: 21064 - DNA, 598 bp, Bovine  MMBT10872
  misc_feature (1)..(82): n is a, c, g, or t
nnnnnnnnnnnnnnnnnnnnnnnnnnnnnnnnnnnnnnnnnnnnnnnnnnnnnnnnnnnnnnnnnnnnnnnnnnnnnnnnnnaaattcaaggccaaggtgaatagaatcagccagcagatcagaagcataaaactctgagtactaacccctcttttttgctcctttaagcataaagtgattgtaatgaaattgagagagataagtcaagccatccatgtttatatttactggggcagtgatgttgaccctacttgcctgcagtagagattcaaaatcagatttttctggagttcaaaatrgagctcatcaacctggcttctctacagccactcatttgctctggcagtggcagaggaaaaggaggggtgaaaacaggtgggtgggtgggattcaaaggatgactcatggcttgcagcctttgtcccaagtgcagcctgtggaaatcacaaatgctgccaggtggatcactagttctggagctgactgtaaccatagagacagcacttctatatttcaatcaaagacccagaggcttccagtccctagaatatatggtggtaatgatggacacactgcagtggaggaccccaggaaagt

SEQ ID NO: 21065 - DNA, 600 bp, Bovine  MMBT05804
aaatcagctgagatttcaggcattgctacctgaaatcatacaagagcaagtgttctattatgaagtttgagcattgctgaggcattctagaagaatctttcttttttttttttacatcttgtttagtttttggcaaccagttaaaactccttgggacaacatatgcaggaaactggtatttacgatgaaagcacaggaggaaaagcatagcatcgtgaaggaggatctgaggtccctgaatctacattgtttacatgataaaagaagcataagacttccgcagctactgtcattaaggakaggatctgtacgcataggacctggaagaaagttcaagagcattagaggactgacccccgaagttactgaaataaacaaatagttcccaaattttgcttgagacccaatcagaattacctgacaagttttattttgttttaatgtagactcttgggacccatgccctgagattctgattctgtaggactgatgtgagcctcaaagacagtgttcttcgttgtttttttttgttttttttttttaatgttccccaagtcagtctgacgactggcctgctttaaaaaaccattataacaatga

SEQ ID NO: 21066 - DNA, 544 bp, Bovine  MMBT21517
cccagagcctgtaagtccgggcttgcctctggtctctcaatttcaattccattcttactccctccacttccttcctggagaactgggagggcatccttgccaccagcagtgtctggggtgtcatttaatactgccagtaatcaccacctcctgtttactggctgtctttccctcatggctagtcttgttatctctgggtctctctctccatctttcacacgcacacacacatgaatgggaaaaaggcttctctccatcccagttcctgccccatcctactgctctccctaaaactgatcygaatcaactggaaagcaggaaacaagaagtaaggatgtatagagctggagataccaacatctcttctgaactacaagagcggggggggacagcaagctcagaacaagagaatacttggagggcaataggagggaggtggactaaattagaaagtatcaaaggataaagatccctcttccacatcaaaaagagccgtcacagtcagcgaggactggaacacctgaaattactggtgggttcaata

SEQ ID NO: 21067 - DNA, 600 bp, Bovine  MMBT19675
tagtggattttgccagcttctccatcaacgtcctttttctgacccgggatccagtccaggagcatttagtcggaggtctccaagggctcctacaacctgggacagcttctcagacttttttcatgacttggacagtttgaagggtttcacgcagatattctgtagaatgtgcctctatctgagttgtttgaggttgtgtcctgattagtctggggttgtaggttctagagaggaagagtctaccgtagcatcacatatcaggggcctgcgacatccacgcgataccagaggggatgcctrcctggacctgtgggctcgggtgcctcctctgtagaggtgctgggcttccccctcaagaytcctggtctggaaaggaggcacaaattcctgctcaatctccagggggagccatggcaggggaagggttaggtccacttcctggagggggatatttatgtacatgatttggaattcctctgtaaagacatgcccctcctttttctttcattgtaaaatatattcttagatctagtctccttatttaatagatcagtaaaataaacatcttctacacatgctcttaagaaaaattgtttcctt

SEQ ID NO: 21068 - DNA, 600 bp, Bovine  MMBT07413
aaatttctaatcttttaggatatggtgccaagatatttctaaaagagtattggaaagatgggacttgaaacagtaattgttacaccgtgaagaatacatagtgtaaaatacttaatttggaataggccaactctaaattaatgaaaaatataagttataaattatcttttctgggtgtgttttgaagtatgacacattgaaaacttgctgtaatggatgatgtgaaataaaatggagcaaattaatgaaagattacaaattaagtcagtgttacattctgtgtcaccagaactcattaaygtgtcaggtacagtggaagtcatccattttgaaacgtcctattgcacagttcagttacttggcttaggttaatgtagcttaatgattaggattttaattaatcttcacttaacttacacawggacttggaragtatatgagataacattaatatcatctctttttatctcaaaaactgagtaaaagatggattatgaagctggctgatgccttacaatgaatttctaaatttaaaaactgatttttttattcattccatgaaaaatgtgtaaagaatccacctgcaatgcggaagacctg

SEQ ID NO: 21069 - DNA, 600 bp, Bovine  MMBT10938
tttgtcatcagccaactcactctaaaaaaaaaaaaaaaagaggctgaagaaaatttcctaaatagaaaggaaacaataaaagaaagawctttaaaatatcaagaaaagtgaaagaacacaagcaaaaatatgattaaaaacagcagactgtcctcgtcattatgtttgatgattcaagcaaaaataacaacatcatttaatatgattctaaatatacatggagttctgtgtttggttctacatatgaggagctgggaagtcaccactctatcctaaaagtcagtaattcttcttggatckatkagacagtggatgacacaagacaaaacactgctccaaagacggaagagactaacggattaatacagggagatatggctttctggagcagagacttacaagcagaaactgckatgggaaccagtactggctttgttaagctggaattataattgacaaattgctggacactcagtgcagacaactctgagtattacaaackctaaggggacccagtctaggagttatgcartattatgcaatttacctccaggagttaatgctaagtatcagagaaaaatccccttggscctctggaag

SEQ ID NO: 21070 - DNA, 600 bp, Bovine  MMBT22367
agtcacaacattcgaactcgtagctgtggcatgtgggatctagtttcctgaccagggaacgaacccaggtcccctgaactgggagcgtgtactcttagccactggaccaccagggaagtccctgagcacgttattccttcaggctctttcctgttctctctggacctggactgccactggccatgtgtggccgcagagcgtggaaagcctggcttgtcacactgctgtgtgctgagtgcactggctttttgagattaagtatggagaacaaaatcacttgtttcggtgtggcttctagcraatttacgaytccctatgtgttagcgttgctctgggccgcgctgttttcctttccgcaaggacttgcgccckgccgcttgcagcctccgtgtggcctgcctcttctccgggaggtgttggtggtacctggagggtgccagggactgcggttgagagtccagggtgtgcgcatggcagggccggggcgggggggcctgctttctgtagacgtgttctttgtggttttcagtgtgggcgagtccttgcaggcccctcaggtcgtgggctttgctcctacattgaggtctggctgtccacaga

SEQ ID NO: 21071 - DNA, 600 bp, Bovine  MMBT13785
ccagtttgtcattaggtgatttggaattccaacaataaacaactggttttgttgattgctttggctgaattgattaaatgcctctgagatatagtagaaacacttcagtttgtatgacagcattgcatttctgctttccagtaattatagtctccgttgagccaatatttccaaaggaaatgctgtgaaatgttctgaattggtgtttcatttacaatgtattattatctttattatatttacctgaaatagggaattagcaaaaacaaagccacaggtaaagcagaatagatgagctgyttgtacccaaccaaagttcatctagagaagttgaatataaacacagtatttctatatctgtgaggcacttagaaagtgatagtcattaaaagcccacaaatgcctcttggcacatctgtttatagtgatgaacttaaagaaaacatcaaggtcactcattctgtgtttaaagacttagggaactattccttcttaatgactgtgcatcttctaagtgcatcttaatgactggtggtggccagtggccaccraacttgtgctgctcagatatctgctgtgatgagcatagttgactattgc

SEQ ID NO: 21072 - DNA, 600 bp, Bovine  MMBT07750
ctgctgggtctgacgtcctctgagtttctaggacttgttcattttcctttcgtcttgacgaattaacgggaggaaaatcttactgagaaaaacgcatgtgcttctaccgttctgtcgatagtctgggatttctcagttgtgagaaaccccagggccacgtgtctagtggasgcccccgcccttggggtcctgtgggggtggcyggcccccggcaggcgctcctgctgtgcaggcaggcccgcccctccgcttcgttcacacacactttgggggagggaattagtgtaagactgatttctytttcttttattaccaccgcttaaggataatctaaatgtaattaccatgatggaggcataatgccattccaaataattacagcccaccgtgtttaaaactaacagaactctccccgctgatttacgggttcttttggctcaacacgcgtttcaaacactacctctgggagcagcacttcagataatgcgagaccatttttaaaaagcagatttgtgtagtcgattggggccgaggcggttttttttcctcaagcccgtagtgagaaattggttgttgccatagatcacggggcccgctccg

SEQ ID NO: 21073 - DNA, 600 bp, Bovine  MMBT07692
gggaatagcccctacctcttggaataggattaaacccatgtaaacatttggcatagcataaggcatatygtaagcacttaataaatgtgagctattccttgaagtaatttgagttggcaagccctactttggcagtattaaaagttttggttttgttttctgttttatttttttaatgaagtatagttgatttacagtgtttcaggtatacagtaaagcrattcagttatatattcgtgcatgctcagtcatgtctgactctttgcaaccccatggactgtaatccgccaggttcctctstccrtgggattttccaggcaagaatactggagtgggtagccacttcctactccatcagttacatgtaattctctcaaatcctcagcttctggggttagtttccagtgatgggcttcagtgtgatttctataagtcacccacttcctccttcacttactctttgagaagcaaacactggaggagggaacaagcagccagcttttgcccactgaagtcttctaaacacccagggcttcttgtagcagcagttttccaggacagacccygggttcacaaggtggtttccgtttcagaatatgt

SEQ ID NO: 21074 - DNA, 600 bp, Bovine  MMBT20732
ttaccagtggcacgggcaggagtggttcctcgaagatcccaagacttaagggaatgcctctgggaccagggttgaggtggactgaggccagggctcacggccactcccaggtccacagtccggcccacaggtgagaggcctattacctggggcatgaatggggttagcctgggcaggcccctgctggacccctggactggcacaactacctctggactgtcatagaacggggccagagctgggtcgtggggctgcccacagtcaagtctgcagtcgacacacctgttgctagaggtgccrgctggcatggctcacccagggcccctgggtgatcaggactgcgggagagcaaagcggaagggcctgctcgcaggcgttcagttagctctccagtctgtgggtcattccagcagcgtgacaagtgtgacactctctagttcccctgctgagaaccatatcatgaccatagataagcaggcttggagccgagtccacaggggtagagggctcttccaggcctgccgctgtggccaaggtccatggcccggccactgggatgcaggatctgccttctcaaagaggccctcctcagtcttgggc

SEQ ID NO: 21075 - DNA, 600 bp, Bovine  MMBT18692
agttttgggcttcccaggagaggaggaattttgcaagaagtagctcaaacggctcttccaatcttttaatctacagaagaaaaaaaaaagatactcacttagcggcaacacttgaaactgccattgcagctgaaggcatttttaccaaataaagtcgcccccartagctacagacaagccaaataagacaaaacaacttctccagtcagtcttactcctttaatccagcacctaagtactcaacacaccagtttcatccactcatctgaacataattattagttttrtaagtaaggatargacgrcctacaattatagggtattttaatgaatttagtttgcatagttcaaaggtagatgctatttatggcccacaaaaggcagccagtttttctgcaacggttaattacaattctgagacatttcacacttgaggaagcccacagtggacctgccctgagccagcccatgctcggtctcccttctactctcagagcaggaggctcgggaccacccgagaagctgtgcacaatgaggtgtgtgtgcgcgagattgaccgccccctctcccaactccagcactcattttaagaaggtgatg

SEQ ID NO: 21076 - DNA, 600 bp, Bovine  MMBT01188
tgaaatatcttacatctctatcttttcacttgctgctttcctttgccacttatgcttcttggcttcacagcgagtgtttcctgattcacagtttagtaaattgctgctcacaaaaatgaaactgtcaaagtaaaaaatgcttttcacgaaagaatctaaaactgtggtggaatagcagcagacaaaatggttcaacaaatactgctataatctttctttcattttaccttttactttaaaaatggtttgcagaacctcgctttccttgattcattcgtatttactcttagtacctatgtktccagttacccatttagtaaattactagaaattaactaatattagaaaatgtttattctttttctgctctttgttcccccttcatctttgtaatttgattattaataggcatagtacattttgaggagatattggtaatatataacaaatacttcagaagaaagcatatgtatatattaataatctgatttcttaaaatatgttctaagaaaataatcaagcaaatttcagcttattcattagtaagcggtttataattagctccttccacctccacctcctccatcatgaagaaaacaa

SEQ ID NO: 21077 - DNA, 600 bp, Bovine  MMBT03421
gtttgttgggatcttcacttgccttgtcttgaaagacgctgatttgcatccaacttgagcataaaggagagagaaagttaatcatctcttagcctcttgaacagatccgcacagggtttcattgttgcctgatccgaatctgggtgaaagtccctgttcaccagggtcttggtgagaatatccctgagccccggtccagaaagcttagctctttgaaagctctttaatttatactttaggcaaatctttctatatttgcagttaacctaagctccattcatagatctttactcattaagyagcatcatagtaatgaatgcccagtgagcactaagtcgatggtactcagccttgtagctgtgagcagcaartcagggtagagctttcttccttctgagccggtgaggttacgcaggagaagtccttttcccataggaccgggaggccagcggtgttccagcccttggtgaggtctctgcgcctgtcaggagtaccagctcccacccccggaatctccctttggtgatgctcggaccccacggccagcagcagccgcctgctcctggcttctgtgagtctgagaagagtgcttatcttctc

SEQ ID NO: 21078 - DNA, 600 bp, Bovine  MMBT09535
tgagcaactgaacagtcctcaaagagccttatatatggacaagaatcatatctacttaaagaggtgttatgagggtaaatgagaaagtactcaaaaaggcattataaacagatattacactttgaggtcttaccattactaaaaaaggaccacaatctctagtctaagctcttggtgtcaaacagttcagaattcaaaacttagagtttagaaatataatattgagcccatattccatattatatagcactgacatgaatagttcaatatttttttaatattaagacatagttttaaaayagtgcagttgatttacatcctctcagttcatgtcctgccacacagtgagtaggtcagatyagatttcacactaacaagttacaataatgtattattgaaagacttgggattttagaatggaagtttactatgtatattataggagatggtatatattaaatgcctagcaaacatctggctgtctccttggtgcatattaaatgcttatcccttcttgagctttctcttttgtgtcccctaatccacagcccgtctctcgtttccccagtgacacggctgggcttccatccctcagcctcc

SEQ ID NO: 21079 - DNA, 600 bp, Bovine  MMBT13784
tacactaaaaagagtatctgtaattacaccagatatctccaggggaaaraaaaaaaaaaagatgctgcctgagaacaggtgtcaatcgagtatagaactaatttattccagtggatgtcataactatgataggtccaataactttccaatacagctatatgaccatgtttattttgtaagtcactgttactttcactgtagaattacattttgttttctgtgtctctaatgacttcactgttatcaaaaactgggtattagtaacatcaagatgtcagccactaatgcaataatcaaaayaacatgtatattctcagtctctctgcaaaactgcctttgtttctcctttagaactcaattcaagaaacattaattgaatgctagcaatttcaggattcttgcaaagtactataaggaatgtgatgttgaacaaatcgtgtgccttatcctccaatagccatctcttaaaagggtttgcaaagtgcataaagagctataaagtttaaggcggtcaggaatttaatacacatgagatattttgaactgtattctgatttagccattgttattaatacttagcattttctagctcttggagat

SEQ ID NO: 21080 - DNA, 600 bp, Bovine  MMBT08778
tatctctttgaaattgtttaactgtctagctaatctagctaattgtttaaaggtctagctgacctttgtatgcctctgtttgctcatgtttaaatggtgtgtttaaccatatctattccatgtgtttattatgagatttaaatacaataatgtattgaggttgagtagcacatggcctgccatgtaaacaaagaatcaatatatattagttgccatcatagtcaaagtcrtcctcacttataattagttacatgctctttgctcagcaccagtgtttgtgttgtagaggaggtaagaaayttattaaattctctcttttcttagaaggaatttctaactgtctgagaagacaaaaaataaaaaaaacaaawcaaacacatacaagaacaacataccaaggaaatgcagaacaaccctcaaaaggcacagaatttcattgttgggcctgctcaggtgtgtrggtatggggaactctgcgttagtgggagagaatctaggtcgtagaggctaagtcattgcagcagagagtcctgaatgacatggagaacrggggtgtgcctggaactgggtgggcccargaggatattaaggaggccagcc

SEQ ID NO: 21081 - DNA, 505 bp, Bovine  MMBT07126
ttgcaaagaatgctcagcaaagctgctctcagctactgtacacaaacgtggtccaacccagtagagacatccacagcatatatacaaaatctgggtaatggtaaccttcacagtctctctatccacaatggcaattagataattaatagcaaatagaactcattgatttaaaggtatattaccacaatggggtatctgcaggtttgccagtgaaatattcttgctgttttcatccagacagtacaaatcctgagtttctggactaggtttagtctcttgaagagtcttgatccacataaygtcacaggagcatgtaaatgggttgcccaccaggattctacatggaacaaaaatgaaattcaatcagccttctctttctcagttttagctataaaagtgtctaacaaagcactaataacattatgaattccttccatctggcaatctggtggaagacacacycatctttatagtataactacttattattcaatcattaattgaa

SEQ ID NO: 21082 - DNA, 600 bp, Bovine  MMBT13987
cttaggcaagtcgatctgtgcaaaaacaaagagtcagaagctaggtctccaacaggtcagtctggtttccttctctgagaagcatcaagggctactttttcatctcaaccatgttcccgtcttgcataatctataataatgtgattctgaatgcattttagaaaatgcaagatggaatgggaytctctcagctcctaccaaacacgtggtctgagagacctacaaggagctgcactggagggttcactaaaagaaaaaaggacagccacaccatcctctgccgggggaatgtgcttccammttgacggctcatggtcattttttgttgctgttcctgaraaagagatggcaatcgtggagttggaggttcaccttttgctcttgtgtttaattgctgcaaaagccatttattaccttgtgttcttccccagagggaacattatcctccacagcagccaggcctggctatgtctggctcatctgactgcccagaagtgaacccatcacctccacatgattctggcgcagctctgtctccacgtctgtcagcctccagctcaggaaggccttgtaaaagaaagaacggtagaaactgggatt

SEQ ID NO: 21083 - DNA, 477 bp, Bovine  MMBT18560
atttgtgctctcttaagtgttgccaggcactaaaaasttcaggttagaatgacaagagataacttgagagtgatcttagaagtaagagaccattttggatattctagtccaagacatagctgactgcagctttaccatgaggagcagaagaaccttgtaactgagctcaatccacctgcagaaccatcaggaatgacatcgttcttacgttaaggcatgatatattcaggtgatatgttatatggcaatagataactgaaacagattttacattaaagatctccattcatttttttctcrtatcttaccctccttttgaagttatagcaactggtagttatcacctgtattcctatgcctcttgcagaagtgactcaataacaataacacaaaaagccaagatatgaattgggaggaaggggtagaatttttcaaggagctcagattgattccctctgctattagggtttttttttt

SEQ ID NO: 21084 - DNA, 600 bp, Bovine  MMBT07091
caggcctgagctgaatttctcaaatcatagttctcatgcttcaatattcctgtgatgcttattgctatgcaggataacaggctaagagaaacttcaacactggtggacttaagggaggtagtaatagctcccaaatgaccattaaaatagaaaatgatttgaggtgcaggaggaatttaacttaaattctgcagatatgcacaagtcagaggattctgcacaggttgtttcaggagaaaagtcccagaaaaaaataataatattagaacattcgcatgagaatgatggctggcaaatttyatccagtaaatactatgaagttgaaatccaaagtgactggtaaaaatcttcctcttttttgattaaaacagcagcctccaacaaacattacacagaatcttcaagtcactggtcactattcataattaatgttatttattttaattcttttaattcacttgtgatcattatattttgacttttcctctatcattgccacttttctgggcttcaaaagccaatgccgctttccctcattattccaggtagtgttacttaatgtcagtttcaaaaatggaagcacagaaggatagaaaattt

SEQ ID NO: 21085 - DNA, 600 bp, Bovine  MMBT17174
caatgaaccgctctgaaaaggggccagatctagataaagcctctaatcttaacaaggtttagtgtagaaatctgagtctactgtctggccaagtgagtctacaggcatcgtggaagagaagcctgcttccagcaccacccctgcagctgcccagtgacagcatctcagcacgcacctctgcgccgccggagaggaccactttctaccacttctctgggcaagactcagacctactgattgtgtttataattaaggaataacgagaaatacgactcaggggtacagataagcaggtacacrggaaacatccattttccttaaccttagtagatttcactgctcacttgcatgagtgcagaaggtataaatctctaaggaccctttactaaaatcgggaggggtggggtttcttctcgcatcgctgacagcaagtgaccccgaagtcacagaaaacaagttaggggacgtcaaatgtcaaggtcacacggggagcctgttaaataccagatgctggatgagcaggggcggtcattctgactctcaccaaaatgtgagaacacagtaaggtcaagttcagagaatgaaaagttcacagaagac

SEQ ID NO: 21086 - DNA, 505 bp, Bovine  MMBT11784
aaactatggaaagcctttcaaatgagttaaatcagacatatttagcatagggacacaaaaattgttagcatacatatgagggaagtaaacatatctgtcttttgtctagttttggatttaaaggcttatcacaatttctgtcactttccagtgaagcacaattcctgtgcttttcagtaaatactgaatggataagagagcctcaaagaagaagaaatcaaggactaagtgatttcgaatgagggagaaatgatttcttacatataaggtattgaggtcaggcacttgagacacagattstaaggttgggatttgtgtgcagaaatattattagagatggtttcaggattaacatgtacagtattcaaggaaasgaagcaggattgggcagagaggggaattgggctgtgtgatatattcaaaagactcataaatccactgggatctcagagactggagcaggtttttggagttttcctgagcaccctcactttgagcggatatg

SEQ ID NO: 21087 - DNA, 600 bp, Bovine  MMBT04633
tcccctacttttaatttccaacaattaccaacacagagaatcgggagatagcaggatgcaactgttcatactccatttgctggcccgtatctgaatgggctttaagtgattaacatttcgctaaaagggtctttctatgtgtatgttttgcctaaaataaaccttggggcttccttaattgtttaattatgagtttctttaggttctagtaaaaattagtgattgctcagtatcactccaactactactgtgtttctgctgaaaaaaatgtgaaaagcaaaatttcacaggatattttcrcaataaggaaatgtaaagagattcccttagtaaaaacacaaaaacaagttttattctgccttgcattctgaaaatacagtatgttaaatggaccagtgatcactcttgcaaaacaattttggcattcctcatttttcacaactagaaacctaaaccaaagagcctctgtggcacgaactttgattgttatggtcctggaaaagaaaaacagatgaagaaaaggcatctctgtaacagaacaagggaaaaacacataaacccataatagctgaagaaggaaaaatacagcaaacccaggag

SEQ ID NO: 21088 - DNA, 600 bp, Bovine  MMBT19188
attctctgataacaagtgagatgtgcctcgcaaataaagctttcctcacagtcaatacattcatgaggcttctctccagtgtggacccaggggtgccgagcgagacccaagttccacatgaagcctttcttaaagcccttacattcataaagtttctccctagtgtgaatgtgattggtagttgtaaccaggactgtgcttcttcacacccagggggaggaacrgggcaggccttccttaggctctaaccatggtgagtcacagtccacgtgttgctctactcascatctkaagtcttaygccggctctaaattggtcccatagccagggagaagctgtgcactgactgacttggcctggattgctggtctctgaacactctctcatgtagtgacttagatgggagaacttacttggcttatctcagtgggggcctatgctagtagctggagttgggattactcccacccaaagggcctggctactccctagtcggggagggggaggagaatggatgtagggagggaaccacagtgtcctctagattctctcaggatctcaggacctactctcgctaccactccagggaatttcccatct

SEQ ID NO: 21089 - DNA, 598 bp, Bovine  MMBT06920
  misc_feature (1)..(6): n is a, c, g, or t
nnnnnntttcagcttcagcatcattccttccaaagaaatcccagggctgatctccttcagaatggactggttggatctccttgcaatccaagtgactctcaagagtcttatccaacaccacagttcaaaagcatctattctttggctctcagccttcttcacagtccaactctcacatccatacaatgccactggctttagggatggattaatccatgagttcaaagagtggaattcagagattgtatcttcattattaggcaagctctttccaaattgatggcagatgaagccacagargctctgggaataaaattcttcttacaataaaaattcagaggagcagaaaaagagtggtttgttttcatagtgccatcaaaatttccagagygtctttctaaggtctgtggccaggaaaaaaaaaatcattttcttactgatttcgattatgtgtccaccctgagcatgaggttgaggagtcaatcaattagttgaaagtcttgttgttggaggggaagagttggtgcaatacccctaaggaaaaaaaatctgagattattataagcccctggttttaaaaacaaagaaacaaagaaaa

SEQ ID NO: 21090 - DNA, 600 bp, Bovine  MMBT06803
agaggaatgtgctatgatacctagcacagaagcttatggggaatatcaaaaggatcaatgcatcttgaaaaaaaaaaaaaaaacctatatatagcactctgcacaaagtatatgctcaatagatgatattattgttccactgaaagagtaggatcaccatttctttcttccaggttgccactttgggtcagattcacagctctcagagtggagacaaggcactactggaggtttgtagaagctctttggttcaacttgattagatattagggtacttcggaagccgttagcaagaggccycagggttgggaagagttaatgtaccagaacaatggcaactgttgtcaccgggaaatcagctctttggtttccaaaaggaaagcagaaaagtccctcttacccaacaaacccaactcaacactgaaaattctgactgcagtcaaatatgcctcttttaaaatgaaacactacacctgcaagcatgaactgattgcctggcttttcaagggccagaaagtgaaataaagaaacgaactctcaatagggagccccccgcccccccttccccgttactgaggagaactgagtcagaacaatgac

SEQ ID NO: 21091 - DNA, 600 bp, Bovine  MMBT10088
aaaaaataatttcatacaaccccataattttttgctttttatgctaaacgtacatcatcgttactgatagttatccctacttaaaacaagtcttattttggccttactctctgaggtaacaaattggtcagcaggccaaatctgactccagagagaccttacctttgttcatggtgtgtttagaagggaggtcacgagtgaccacattttctatcacctattctgtttctcaccactgtctattgtcttatccctgatctcatccacacattaacttactacctggggccctacaccackgggttttgtgacactttagttacccactgccagtgttagctgctcagtcactctgcctctttgcgactccatggactctgcccatgggattctccaggaaagagtactggagtgggttgccatttccttctccaggggatcttcctgacccagggatcgaacccgggtctcccacattgcaggcagattctttaccatttgagccactagggaagccccrtggttgctaattaaggggcagctttcctctacaggccaaagggtyctgcactacatgaattcaatgaggccataatgatt

SEQ ID NO: 21092 - DNA, 600 bp, Bovine  MMBT01106
ctgcagcagaaagagaagttgggaatgagtccgggggtggtcagcacccgccagagctggatgacagctttatagaggaaacggctgggacggtccatcctcacggtcctgggactgggtggctggagaatttcaatcaattatagtttttacttgggagctagctcactttgagggagaatttgttacttgaaacaaactacactgtaggcaaaatacattttgtgatgcaaactgggagccacctgggtgtcccgctgtggtttcccatgcttttcttgtccgtttctgccatctacyggccacaatgcaaattactcccgggtttcttgagattctacctgagaggaagggcgttttattcctgtaccttctggatctgaaatgcaatttcccagatagttcaccaagacacaaaatgtatctctccataagtcatagttctgaggggactgaattatctgtttattcattcgctttattagcttagttttgtcagagaggcagtgtttgaattctgcccacctgtgtttaaatcaggccacttccctggtggctcagacagtaaagaatctgcctgcaatgtgggagacctaggtt

SEQ ID NO: 21093 - DNA, 600 bp, Bovine  MMBT10548
taatctatagcttccttatgaactttttgctgattttgctaaatcactttctccaaaaggtttattatttttgttgttgttgtttagtttttaaatttttgtttatttatttggctataccaggtcttagttgggacacatgggttctttgtctccatagtcaagatctaattccctgaccaggaattgaacctgggccccctgttttgggagttcagagtctaagtcactgaactgccaggcaagtgcctccaaaaggtttttgattttttgttttgttttttttcaaaaaaggttctwgcatagtaaacktgtgagacctaatatgcccaaaaagaaatgtatttttcaatcacatttcaataatagcttagttgattgtgaaagtacaaaagtgaagttcttttctttcaaaataatatctgttgttttcttacattccagttactgttagaaaatctgatgttacctttatacttacttctttataggtgatctgtggtttgtcccaacaatattttagattttttccttacttaatttttaatattttattatgagatgtttaggtatagttttttttcttatttacactatttt

SEQ ID NO: 21094 - DNA, 598 bp, Bovine  MMBT21124
  misc_feature (1)..(28): n is a, c, g, or t
nnnnnnnnnnnnnnnnnnnnnnnnnnnnggacactttagatggatctcctaccacttttggaaaaacaaattagaccacctgtcctaatgttatgcatcatacatcatcacagtggcagagagtcagcgttattaatattatgggaggtggtgtgtagaaaagtcatgcagtatgaaatccaattatctaaatttagagactagcattgccatttattagctgcctggccctgggagataacaattacaaatattcactgagcacatactatttgcctgtactttgtttacataatgacyaacttcatacaatcctaagaggtatataacttcattacttccacttcacaggcaaagatactgaggctctggggaaattcaggtaactcaccctaggttacactgttgggaagtggaagaaccaggaataaaaccctagcaatatgactctaaaacacatgttcttaatttctcagtctttgattcctctagaataaaacagagataataacagctgcccaacctaactaatcagaattatattagcaagtacaagggcatttttaataaactgtaaagtaatagaggtcaatgtatg

SEQ ID NO: 21095 - DNA, 600 bp, Bovine  MMBT08079
caatagaattcatatccccccgtcctgcagaagactatgtcatttacataacacattcaacccagttggcactgttgtcacctgtcattcaattaggtatttaggctatgtcctactctagtcataatgaaatcactatgaaaattaatagagaaatgcattctacttgggcagacattgtcttttaagttataacatctccattgttattattaattgtttttgtgtgaaaatatcatgtgattggaccaaattatgaatcagtcctctgtcaaattaaattcttaaaatcaccatcaytattgggttatgctaatgtgaaacagaagcaatcaaacctagcaaacattagaacatgcctaaccagtagagaaacagaatgatttttttwaatttaaatttatttattttaattagaggctaattactttacaatattgtattggttttgccatacatcaacatgaatccgccacgagtgtacacgtgttcccaatcctgaacccacctcccacctccctccccataccatccctctgggtcatcccagttcaccagccccaagcatcctgtatcctgcatcaaaccaccactccttta

SEQ ID NO: 21096 - DNA, 600 bp, Bovine  MMBT04924
aggcccccacggacacctgtgagaggctagttttcggtgtagtgtggtggggaagcatgatttcaagtctggcctgatttcagggtcaaatcacaactcttccactattaactgtgtggctttagttacttcacatctctaagcctcttagcttccgtctcctcacaagtcaagtgggctcttgtcaaactcaagtaagggaatatgcatgcagcctcgagcatagggctgggtctgtgggaagatgtcggatccatgtgggcccctccccttcatctttggtctgtcctgtatgtgatrgaaaactaccctaaaatctcagctgacattgtggttattctcctcattagaaaacatgatggcttccaccggcccctgctagtgcaaggagacactagtttggaaaggctgcccagcacacgcctccttaaactcctccccgcccctcgcattgcattttctattgaaagtcaagttttcaccatgtaaccctcctgattaccaaaacagctgatgatactggggacagacgcctgataggggaaccagtccattgactggccactagctaatggaaacgtgtccaagaatcaagaggct

SEQ ID NO: 21097 - DNA, 600 bp, Bovine  MMBT01236
tgtgaactgtgatcatattttgtagtagagttcttaaatgggtatcatcagctaaattcaatttgactgtatataagaaatgaagcaacaaaatacagtaaaaaaaaaaaaaaaaagactcacaaagattgtctgaagactgaaataaggtctttccagtgtaaaaacatctggtttatgataattctttgtcaagtgaaaactgctatgtaacrcaagtgtgrttatagttcactgtaggactaaagtgaaaataaaaataagcaaaggacaggcaccatcttggagaattgctttgcycatcttcccttgctctcacaccatcagaggcaggtctgtgattccacctgcccaggactatgtgggccaagggcatctgcttgatccaagataggcagtctgtaaatgcttggagatcagtgtcctgagagcagtcatcattgacagatgagtaagggtggctggtggtcagtatggcggccacatcaatcctggggtaggagagctctcagagatggtccacactgtcctacaggctccggagcaggactgagtcctcccgcccacagccatgacctgctccattgacttcgttccctt

SEQ ID NO: 21098 - DNA, 600 bp, Bovine  MMBT05296
tcccagagacacagcatgcccatctgggtaatgggggcaaaggttccacgagcttcacacactgagacatgcgcatgcctgggagtttaaaacctctgctccatggtaccctggggaggtctaacctcccgtacagtgctagcgttagaagcaattgcccttacatcacagctctgccttctccttgatgatacaaagacgatatgtacagctctagtggtgagaaaaagatggaaattggaatgctttgtatgccagaggaggctgcagctatgagtttctaaaccagtttcttaagaygsattgaaggaaatggatgtgaatcttacagctatatctcaacttaawttcagccatcaagggcctgatttctaaaagcttatttgcacttttccaacagaatactacttgcaaaggcagaggggtggagcgaatctatttcctatgaggtgaaacctcctattcggggttttaagtgggctcatgtattatcccaatggctgaccattctcctggagctgagggcacagtaagtccaataaaatcaccccagcagtttgatatatcatttcatccgtttctgacttggagaagtcataa

SEQ ID NO: 21099 - DNA, 600 bp, Bovine  MMBT22872
tgtttcttaggctagccagaatcagttctgttgtttgcaaccaaaacattctgactgactgactccaaattttgtaaacggaaaacggtagtagcatcaagaggtcagtgacttgttcaagcccacgttcttagaactttgggcacaagtataaggccacgctctccaggaagaaattatcctagatcaatatttacaacaggagaacacacacatctaggacagaactcacctttgttctgtgcatatgagggagacacaggaagagaaatgtgaataatggctgggaaatagggagcrcgtatcccagatcttcacaactttcaattcactcaggcagggttttgcagagacccagaaccattctctctggaccctaaggcttgaggaggaatttctgaaaaggtggaagaatcttaggatctcaactgaagaggaacttgggcagataaatatctaaccagggatatgattcaacagaagcaaaactgagggtctgtgggaacagaccacatatgctaacaatagtagtggtagtgttagtcgctcagtcgtgtccgactctttgtgaccccatggactgtggcttgccacgctcct

SEQ ID NO: 21100 - DNA, 600 bp, Bovine  MMBT01486
gtgaatggaccagggttcagccaaacccaggtcatgctcagggctggtcagcttttctgtgccctgctttcaccactcagagaagcttccttccactctgccgagccacactcccactgagggcctgggctggagaggaagggttggaacgggcttcagatgatgctgccgagaggcctgtggagggttgaagtggtggttctggaatgaaagatgtgatgaaaggagcatttctctcagcagccatacatcatggaacttctccaggcagaaaaaagtgagaaacagatggcaatgaasaggcaaatgcaccacagggacaaagctggagtgggagggtgtgaggaggcagcagcccatcggcagcagcagaaagaggggaaaagcccaccctgtggtaytaacataaggcaagtcagagttggagacaggagacaggaccatgtgaccagagactagtgctcaygacacttggagccaaggatagggccagctstttcccaggcagataggagaactcttcctcagaggtcccattgaagactcatttctgcacctgggaaaataagctgctctaaaacaattagggcagtagattty

SEQ ID NO: 21101 - DNA, 598 bp, Bovine  MMBT18369
  misc_feature (1)..(73): n is a, c, g, or t
nnnnnnnnnnnnnnnnnnnnnnnnnnnnnnnnnnnnnnnnnnnnnnnnnnnnnnnnnnnnnnnnnnnnnnnnnacctgggaagtctcctcacctatgaatttagaacagacactactggctggcctataagcgcatgttcaatgattcacatattttgtatgtgagtagttgttcagagtttggattctagagacggaatctctggctagattccaatcttagctcttccattgattaacagtgaccttgggcaagtggcttcatctgtctttgcctcaacatctgtaactcaggaatamtactactcacccatcaggctttcagtgatccccacctacaggtattcacagtgttgtgtaggmccctcctccatcgtgccagagtcagctgtgtgactgagtacagcagaagtgatggtatattgctcccatgttataaaatacactgtggcttcaacgatactgttccctgtatttcttctctgtctgtactgtctctctctctctctgtgcctctccttcttttaggctaggggaagccagatgtcgcgaaacaaggacactcaggctcactgttgaaagtctcatgaagggagaa

SEQ ID NO: 21102 - DNA, 602 bp, Bovine  MMBT21153
  misc_feature (1)..(2): n is a, c, g, or t
nntttctatattgaggagaaataatgttcactccctcctactgactttccccaaattaggcacatgggaacatccctacccaaagaagaagagttctttatcattctgcaggaaggaaaaaaaaaaaaacacaacaacaacaacaaaaatcaatgcctactacaatgtgtctagtaactgggaatttttatgtagaagttggatgggtaactagacataatactgtgcattgtgttgctgtatcaagagaacagttagaagatagtttcctacaagcccctggtctaatttgaggcatctaygagataagggaatttttgagttatgctggtgtgactgctgagtcgtgagataaagcaacrcaccrtgtgtgccctttccctggaagcttcacgttgctttataagggaatccatttctaccccctygagttcaaagctggtcttaattaaatactgtaggtttggcctattaccgctaggggtcattcttttacatgtgtcattcaagaccatctaagaggaggtactgattctragacaactttagaggtttgttctttccaaatattttaactacagagacaaattgcatttggtaaa

SEQ ID NO: 21103 - DNA, 600 bp, Bovine  MMBT01632
catctcattctaccatcctgacagcttctcaggtgcctaccatgtgctcagcctcacactcagaggatctgaaggcactgctcagtccattcaatgttcatgagttattttcataaagttagttgtcagttaggagataaccagctttatgtactgtttctccaccttatacacctatactacagacatcttattgcacatatgacaagatgaactgacttctgtggattgtgcagattttggcctccccccaatcctctgtgaaaatattgaaattgttagtctaattttccctgcctmtttccctccactacctctgcctttcaaaggactcttgttctttagcacctgttgtgtgactttgatcccccaggcttataggatggagaggttcaccaagagtgttcagacaggaagttaacactgctgaaaaggtccatgctcccagcacagagacaggaaatggaagaacacccagaaagcaaggcgccctggctgtggacaccaaggagatgacttttacattttatgtgggagtgagtttggtgagtggaatggcactggagacagtaaggtataacaaatgaagaatttttaaaa

SEQ ID NO: 21104 - DNA, 600 bp, Bovine  MMBT09785
cgtgattatcttctcaaccttaactatgatttattggactagctccctgtaggagtggggcctggtgtgacagggggtggggcccagcagtcttgtctgttatcacatgacaagagtctgaccagagcccattggtcccagcagaagcacccgaggcaatctagccagtcggtttttcttttctttcatatttaaaatttggaatctagagactcagagcataggagctgttatagccaagtaaataacggtggcctagaaacagcaacttctggctgctgctcttgcaattctctgaaygatccacggatccctacttcccacacctggggttgtccaattcctccttctacctcagaaaacccattgtctgtaaaaaaaaaaagagagatttattttttcttggcttaaaccaagtcagaattgatgygcttataacaaaccttaactaactcatttaytaataggatatttttaaacctcttacccaactgatagctgccctccattatctgaagaagagcaatatggaaaagagactaaatttattctctgtagctctraaggacccataggtggaagttagatgaagttagattt

SEQ ID NO: 21105 - DNA, 600 bp, Bovine  MMBT04907
tcactttctgccattagagagggattatctgcatatctgaggttgttgatattctccaggcaaacctgattccagttagtgattcatccaacccagcacttcacatgatgtactctgtatagaagtttaataagctgggtgacaatatacaagcttgtcacactcctttcccaattttgaaccagtcagttgttccatatctagttgtaactgtcactttttgacctgcatacatgtgtgaagcatgccaatattttctaatttttttccctgaaaaatgctagtcaggacccacaaaaytgatttgatgacccaccaataagttgattgaattttgaataaggtgtgatttaccactaataaatcattagactaaacaacaacccctaagaagattcttctttttaaaagtatcctgtggctaatactaggattttcctaatcttttcaattatcaggaacgataaagtagtatttactcggtatgcatagtgtaataatttgatggaatgtgtaattaaaagactaacgttaaatgtctggtaaggcttctagatagatccagtgccaacagcttttaagagtaagyttactaattgc

SEQ ID NO: 21106 - DNA, 600 bp, Bovine  MMBT13562
ttttgttgttgttcaggaagcaaattctataaaaaaggagaaaagttagaggaagccatagacagcattagaattacactacaaatcatttctttttgaagaaaaatcagtacgtgacttttcagaaagtttataattcagtgtttaaaattttaaaagtttaaaattcatgtgtttccatgaaattaaatttactcattagccttgttttaactcagtaaaaaaggtagcaatgtcttataaatttatcaacttttaaattagtctttaagtttcaacttctgtccccaagcagattayagcttgagatgaaccaaaaaagttaagtaaccaacaagataaaatagaggcaacaagataaaatagtggatacactaaaatatccaaacatatgagaatatcaaaagatattccaggaaggcaagttttcaggtcaaatttaaaggatctggaatcaagatttagtcaaattaagctctacattctttaggcaagttgattctccagaactgtttgcaacatctaaaaaatcagatcattgatttttcttgatttccttaatttcatttgatcacttgaagatcaagtaaaacacacaca

SEQ ID NO: 21107 - DNA, 600 bp, Bovine  MMBT21151
agagtatgaaacttacatggtctgtctagcagtagccatcccaccaccttctcagaggaactgcctcatctctatgtacaccagaggaatggtcatctctgcatcacaatactccactagccaggtctcagctgacggggctagagttggayaatcattcaaaatctgcacaaagacagtacctggctggttcaaaaaaacaaactgcaataacaagattccctctatctgaaacttccttctaagactcttagcttgcaggagctagaaactttcttctaggacccttacagttggagragcatgcactggaaaagcaagtgaaaatagagagggctaagagcaggcagaggaaatcagagatgcaagatgatagagattaagaccctmttttcayggtccccaaataattctcagagtgggaaaaagaagagagaaacttgtgttaagggttcattgcaaatgggagaaaacaattataaacagcagctaaagtcasagtttgggggtagagcatttctgccataatcgaagggcagcctgattttctgtcagcaaagcaagggcagcttggactcccatggatgaccactgggtgct

SEQ ID NO: 21108 - DNA, 600 bp, Bovine  MMBT21150
ggtcatctctgcatcacaatactccactagccaggtctcagctgacggggctagagttggayaatcattcaaaatctgcacaaagacagtacctggctggttcaaaaaaacaaactgcaataacaagattccctctatctgaaacttccttctaagactcttagcttgcaggagctagaaactttcttctaggacccttacagttggagragcatgcactggaaaagcaagtgaaaatagagagggctaagagcaggcagaggaaatcagagatgcaagatgatagagattaagaccctmttttcayggtccccaaataattctcagagtgggaaaaagaagagagaaacttgtgttaagggttcattgcaaatgggagaaaacaattataaacagcagctaaagtcasagtttgggggtagagcatttctgccataatcgaagggcagcctgattttctgtcagcaaagcaagggcagcttggactcccatggatgaccactgggtgcttgcagcttacctctttctaatcattggttcatcactataggcggtgtacatattttagcctacttaaaaggctctttttttttttacttt

SEQ ID NO: 21109 - DNA, 600 bp, Bovine  MMBT21154
tctgcatcacaatactccactagccaggtctcagctgacggggctagagttggayaatcattcaaaatctgcacaaagacagtacctggctggttcaaaaaaacaaactgcaataacaagattccctctatctgaaacttccttctaagactcttagcttgcaggagctagaaactttcttctaggacccttacagttggagragcatgcactggaaaagcaagtgaaaatagagagggctaagagcaggcagaggaaatcagagatgcaagatgatagagattaagaccctmttttcayggtccccaaataattctcagagtgggaaaaagaagagagaaacttgtgttaagggttcattgcaaatgggagaaaacaattataaacagcagctaaagtcasagtttgggggtagagcatttctgccataatcgaagggcagcctgattttctgtcagcaaagcaagggcagcttggactcccatggatgaccactgggtgcttgcagcttacctctttctaatcattggttcatcactataggcggtgtacatattttagcctacttaaaaggctctttttttttttactttacaatat

SEQ ID NO: 21110 - DNA, 600 bp, Bovine  MMBT01330
ttacatgttaacagttttgtttgtttcatttgtcaccttggttttagaaattcctatattcttttttttaaaaaaatatttatttttggctgtgctgggtcttcgttgctgcgtggactttctagttgcagctaggggctactctgtagttgtggtgtgtgggcttctcgttgcgatggcttttcttgttgtagttcatggactttagggtgtgtgggtgtctgtagttgtggtacatgatctcagtagttgtgattcccaaactttaggttacagattcaatagttttgacgcatggamttagtttctccatggcatggtgggatcttccttgattagggattgaaccagtgcctcttgctttaccactgaacccatcgaggaagcctggaaattcctgtatgcttgttcttagttgtaggataaaatcctgagagtaatccagccttccagttagttagttaaatagatctgtagattgtgtgactaaatatttaaatgtctgttttgtacaggtacttttgttgttgttgttattgaagtgtagttggtttacaatgtgttaagtttcagcggtacagcagagtgaatcagttatac

SEQ ID NO: 21111 - DNA, 600 bp, Bovine  MMBT22526
aataattcattatctctttcccaagcttgggggggcagtgctggcctagaagtggcatttaccttccacaactttaagtgatgcttttttagctgtcatcttcagatcactttcagccccggccctgtacttctcatccccacggacaacatcgacgtgtctgacacagacttggaggggtggtcctctcctcacctccacttcccctctcctcccctccccgccccagcactgcaacccatctgtattctgatgctgtttgcaccggagcctytctctattgtgaagyaagacagccgygagctgcagggagawagagccgttctgytggagccgagataagtgctgctgggagggaacccagtggagggttggagggggccacatgtgtcagcttaacgggaggatctgaaaaagttatttcaatcccgtctctatgtgggaaactggcagatgcccttctgtggagtgaaagtttttctcttcctctccatcctctctgccaaggaagggagcttgattatcaaggggcgtgaggatgctttttcactrgggaaaaaaaagtccttttcccaaatccagtctctgctctaatgccag

SEQ ID NO: 21112 - DNA, 600 bp, Bovine  MMBT06106
accttcctgcaatgatgtgtgaaacacaatatgtattgctaactagggaaactcaatcaagccttggtgtccagactggatctttacccactccctctggatctagtatagatacagcatgacccaaagaacccaacaaaaatgattctattagactacccagtgtagctcaaagcctcatggtacacaaagatattcttatcttttatccagcacagacataagaagcaatacattccaaaagccaacagatcacgttttagcaaagggaaaaggccatatctcttcaaataaggctamttctgcacayagtcacaagaaaaactatatttttacaattttgaattgataactcagttggtaaagaccacctgccatgcaggagaccccagttcaattcctgggtcaggaagatcccctggagaagggataggctacccactcctaaaaacttgggcttcctttgtggctcagttggtaaagaatccacccacaattcgggagacctgggttcgatccctaagttgggaagaagccaaaggctaccaactgcagtattctggcctagagaatggggtctcaaagagttggacacaactg

SEQ ID NO: 21113 - DNA, 600 bp, Bovine  MMBT06351
cattagtactagtttaacatctttaagcttttaatcagagtgagttcacaattgcattttatataattgaattgaagttttaaaaattggtaaatttgatagaccttattttaatattgttttctgatttagttgtctgtattttaaaaaatataaaccttttatggtataaagaatcaggttattttatatcataaatayctaaatgtataatctttaatgtcrcaactatttaaatttataatcttttagagcctggtttttagataagtccctcatcttaaattattatatcctaaytcctgaaacaaaaatatgttacctgcacattaaayaaggatctattattcttgatatacaaaatgaaaatataaaatcaaaggagaatgggtttaatgtacatttggccaaaaatatgggagaaacctattttgttttctgcaataaccaaagtaatgctgtcattaacacaatcatgttttcaatctgtgtagataaaatttgtttcaaaaagatatactttagttatttggaattgccgagttggaaagagagcaaaattaccttgtgggggaacaatgaaaaggaagacttaagggc

SEQ ID NO: 21114 - DNA, 598 bp, Bovine  MMBT16396
  misc_feature (1)..(64): n is a, c, g, or t
nnnnnnnnnnnnnnnnnnnnnnnnnnnnnnnnnnnnnnnnnnnnnnnnnnnnnnnnnnnnnnnnaagcatcattgaagagatattttaggtaagtgagatctaatcttcagagtgacgactggggtgggagagtgataccagagcacagcagaaactagctttactaatacagacattttctcttaccacctaacttctcacagagcttaccacctaacttctcacaaaaattccatattctacatacaaaggacacaatgaacattgctgtaaatcagaataagaggaagaggctaaayggcattcaactgtggggtgttttttttttgggggggggtgttttgagctttgtctataggaagcaaatttggggccctaaaacactttcttctactcaacttacaacaaacctcagaatgaaacacatgtattatacttgctatattgattaaatggttggaagcaagaattaagcaattttcaaacttctaccataagcaggactagcacagtagcacaatagagagaaaataatgctgaactagaaattaraagaccctcaactttgtcaatatgctgtgcaaacataggaaaatc

SEQ ID NO: 21115 - DNA, 600 bp, Bovine  MMBT16534
tcaaacatacagagtagatagaaggaaactgttatttctcactatgactgtggtaaccatgttaagacacacctttgtgatttgaaaatcagaatgtttatttttagaatagatatctgaaaagtttgttttcctctaataaaagtatttccattctaaaagccccatttacttaaaaacattctgtattttctcctttaacgttgccagatttttttacaacatgaaaaaatctcattcccatgagaaaaaaggcagctgtgtgcctaatatagaactgaagcataactgctttaaaartgggccttgacaaatccattcaaacttttcccatcttcagttgttagacagtcagtggaaaggcaatgatgggttatggaaaatgtaaggaactttaaaaataaaattttctcttaagctcactatttwaaaaaatatcaaaacagtgagaagttattttcacttgatcatttttattttycctatctttttttctgatttatattcctactaaagaatcttaaaccatctgagattttcatcctgattcagtcttgaataggaccatcttaagtgagaatgcttggaacactgaatttc

SEQ ID NO: 21116 - DNA, 600 bp, Bovine  MMBT12746
tctcttaaggtatagtctaattaaaactgtcattcctacattctaagaacatttagattttaatcatgcaattgtatagggacttatttttaatactgtacttcctagataactgtgtttccctcatattgctatcctggttaaaatatacacacacctgttggattttaattatgaatcttaggatattccaaaaggaatatttttaaaatatcatctgtagcgcaatattctaggattctttttattctttgtttttaattaaattctcacaagataagtgtattgagagggatattyagtgtttattcttacttcattttacactgttccctgttttgtgggcccagaatcctgggaaataaactcccctaattcttttgttggtatgattccagtttttatcaatgaaagtcacttgataaaatttgaaagttgtaaggaaagtagagaatattgttcttctgctaatagtaataaatagatatgtgtgcttcagtaaatatgacttttgagaaaactttcagttgagatataacatatatcctrtaaggtgcattaatattaagtttatggcttgatgaatatttacttatatgt

SEQ ID NO: 21117 - DNA, 600 bp, Bovine  MMBT05572
ataaggtggtgatgaggtgactgttgagcagacagacctggggaggtgagctctttgggtgagtgtctgggaagagcattgaatagggcagataaaacagcaagtgctcaggatgggagcatggactatttgggggagagcagagaggtcagagggccatcactgagtgggcaaatatgatctggcacagaacagaggaggcactttcctgcaggacctggtgagttctgggaggaagttgtgctcactctgtctgcagtggggctgtctgtgtgagagacgattccaggattttgagaytgatcgctcacactggctgtgtggaggggacagcaaatatttggcagctctacaagcactctggggagagaagacgggggtcctagccctggggtggtaagaagcaatgagatcaaatgtagagccgaaaggtgatgaggtgaatgactcagacatgctctcgatttagtctagaaatggacagaagatgtaaaaccagggtcagtctctctcagctcaacttgctagtccaaaatcaacagccagcatcatgagtggggccagtggtgatgctctagaaaggcacaatgacgtgatgtc

SEQ ID NO: 21118 - DNA, 508 bp, Bovine  MMBT22632
gtaagaaaaggaaacaactcaatagtcttcmgtttagttcttactttgtataacttgaatttcttagacttagtagggaacaggaagatagtgaatgtattgaaatatactctttcccccatcttcctcattgtcttctctttcccatctctaratttccccarttaatttttattaatgtgtagtaactttctgttagaattgctttgtgaaaataataaaaggccagactcttgggcattttattaccctttggttgtctgtgagccaaccttttaataattgtgggtgttacttggkctccatttttcagctccatttttcagcttgtcatattttaagagttttatggctaggatgcatatccacctggggttttggatgtgactactaagttgtagtgtttgatttatatttgagttcatgtctttagataaaagcgtccatctccactgtcttcattttagcagctctgcttgttgcctttggaatgtgctttagtttctgt

SEQ ID NO: 21119 - DNA, 600 bp, Bovine  MMBT20666
ctagagggaaagtggattactggaacacagccatgtttcactgtcccaatttttccctcatccatcaaatggaaaataactgccttccacgcctcccttgtatgatggtttttgagggatttattgtgttagttcccttggcaggaatgacaaaatggtggtcagattctagtgtcttcccctagaagggaccaggaagtttatctacctgaaccacctcattaaacagaggaagaaactgaagtcaaacatattataaaattgtctcaatattatcaagcaaatagggcagaaccaggrcaagtgctaaggtctgactctgcacgctttcttcctctgtcactcaacatgtacaaacaaaaaggaaatgatccttttgttcagaattaagttctgaaattaagttcactggagaaggctcactgggatgctgttgtaagagcatcactgaacctggaattagcaagggtgagaacaactcattgctgtggacctaatgtgtgcccagtgctctactacaggtcctatacagagcctgtattccccacaagactgtagtctctacaaatacaagaccttcatccaccctttctgaccttt

SEQ ID NO: 21120 - DNA, 600 bp, Bovine  MMBT00726
gtgtgtgaatcataagaaatgaaaagtcccttggtaaccatgtggacaaatggttctaaaatatctgtaactgaacagtgcaggtccatgacaaagtttcaccagccctcagttcacagagggaaagtaacaggtttctatcatacaaccaaaattttaatacaaccaaacttgtccaatttgaaaactatcctttattctgagattatttctttcttatatttctaccgccttatttgtatgggaattcccctcttttatactttgtcaactctatgttctgtcattaccttttctttkgtttttaaactctttaaggattatagactttggtcacsagtaattagataaaaatgtgtaacagaaggttttgcctaaagtctggtaatcatagtactaatgcagcctctcccctaaagcaagaatcctttctaaaacattatcaagaaatgctcatgttttgatgagttctatcttaggaaaatggaacaatatccatgaaaagttgataatgtacatgatccatgattttaaagttaaattttgtgaaagatattatgttactaacaacctaacaatatcaagaaatacatgaaatat

SEQ ID NO: 21121 - DNA, 600 bp, Bovine  MMBT08426
atgcatgtgtgttatagttacagagctgtgccaaaatagttcaaccagtagcacgaacattaattacagccatgtgtggcctttcaggtaaaataattattttcttcactgagtgattatagttgctctactaagagatgtttgaaaatacttgtgagtgaactataacatatttcttagcaagcattcactttctcgttctgaatattcacatcattaagtcattgtgagccaataatgactaatgtttataatgaagcaataaatgaaattagttattaaatttgctgtcagttcttrtctgtgatgactcttgcacttagttttcaaatattaatcttgtattaacattgaatacattcactctcaagaatatctgctcacaaactgattcatgaacgctatggtgctatgctgtaaccatcaaatctgtcagccttagatctaactcatcagaagtgagatctaaagaactgctcggctctactactgtgatagcatggtccttcaggttagcattttaataagactctagttagaatatgactgtttcctctaggcatcctattattatttaatactattaaggaataaatatcc

SEQ ID NO: 21122 - DNA, 600 bp, Bovine  MMBT02892
aacttaaaactgtgtatcatatgaaagtgataggtgaaggtcactcagtcgtgtccgactctttgtgaccccatggactatacagtccatggaattctccaggtcagaatactggagtgggtagcctctcccttctccaggggatcttcacaacccagggatcaaacccaggtctcccgcatagcaggcggattctttaccagctgagtcacaagtatatcatatagtgcttgggaattgacttcctgatactgtttgtctctgggcctctttctgacttgaactttcacaagaaacctrtgtaacagcccatcttaaaagtaatgtgacttgtgccacagtaggaggtatggagtaaataattraagctgctttcataaaaagcattccacagcaggaaaggaatgaagaatcttctttgtgaagaaaagcactaaatcacacagtgagaaattaggaaaacaaaaaccaacagagagcaagccatcataaatagtgccttgaggaagtgaacaatgttttaaaaacaggactcaagcttaggaagctgaaaacatttcagtggatttttgggttgccagcaattttaggatcaactcc

SEQ ID NO: 21123 - DNA, 601 bp, Bovine  MMBT03727
  misc_feature (1)..(1): n is a, c, g, or t
nccatgtagtagcacaagagttctaggagatctgggttttcaccaaaccaaagcatcatatcatttcatcataaccaaagcatcaccaaccctgaawtatatatgaataggaaaactaggtatgacatgtcttcagttatattcatggtcaatatcctataaaatgattaagataagtaagatggaaggacattaaaacagaatggacatggagatattcactsagtatgtccagaaggtcttaaacactgactgtgttaccagttggatagacaacagtcaggataattaaagtgagcawtggtaagatttttaaattttcttaaagttttattatatttgacaaagttcaatttgcctgcagtttactgggcaaacacaaatatgtgttataggtattacactggcttttttattttctgctgagattttcattatacattagcttctcagtcatttcaaaattcctcgaatttctttctgattctgtcatttcatttagcaactggatagaagcagctgaaagtatttcttggtcttaaattagagttggccatgacaaatgttcctgcaaaaatataggatgaatcccacacattta

SEQ ID NO: 21124 - DNA, 600 bp, Bovine  MMBT19142
ctcaatgtagcttgcagatgggtgattagaaactcattacaaactgtgaatggatgcaaaaatcttagctcctttctggaatgcctagatgttatgaaactgcccagtcaccataaatctctttctgaagtgcatattttctttaatataagtatattttggaatagatttggamtttatattatttaataatttaacaatttttttstattcttatttaatttgtattttcattgtgtagagcagacagaaagatgctgagtcaaacaactattgaagagaaatacaaagaaaatatcraggaaaaaatgactggcaaaagcactgctgataatttctataccttcacatttccaaaggcaagatcaagcaaatgggctgtgagaaatggtaagaatgaaaggataagatgagaagttgatgctgttttggttgtcagcatgagaattgctaagacttagatgccaatgtctgagggaagaaaaatacagaaatatgctgagtatccaaggcaaatgatgtgcattcaggtccaggtaccttcttggactttcctgatggaaagcatgcatatttggaaaatatcagcagaggaaagag

SEQ ID NO: 21125 - DNA, 600 bp, Bovine  MMBT14153
gacatttataaagagaatttagcagttgacaatttattgttaatttcaaaattatgtaacaattaacttccaattaatgtagcaattaattgttggcctcaccatagaaaaactccacaaggatgataacatggtaggctcattgaaagaaaatcctgcagagatcacataattacctgagagagatccttgggggaaatgatgaagactgaaagtacttgcttgcagacgtgatgattgttaagattatgcagcaaaaacaaccatgaagagaaggacgcagatgacgaaactgaggcycagagattcagataactcayscaaagtctagtgtaggatgcagctaagatgagttgaaggcattatcctcctcgttccataacytataacaggatttgcctagagcctccaaaggttttatcatctgcaaaatggggataataacagtccagtccttccaaggaggctgtgagttttaaccgagataatgtgtgtccacgctcagcacaaggtcaagcccaggagagacagatgagtgytgtgactcttactatttacagcatcacgatttgacatgaagwrgctgcataaatgattcag

SEQ ID NO: 21126 - DNA, 600 bp, Bovine  MMBT01510
gttctagatttttttttttctagattattttgatatatatgtgtgctgtaggagagaaagaatactttgttcataagcactgcaattctaaccttaaatgtttttttcatttatattgaagtatagttgaattacaatgttgcgttattctactatacagaaaagtgattcagtttatatatatacacccattctttttcatattctttttcattgtggtttatcataggatattaaatatagttccctgtgctacacagaaggaccttggtatttatcagttctgtatttaccagtttrtatctgctaatcccagactcccagttcagctgtctcccacccatctctgccttggcaaccaccagtctctctgtgtctctgattctgtttccacagacaggttcatttgtgtcatatagagatcccacatataagtgattagaaatgcaagcttattttgcaaattcattgtcttcttctaggtttgatgatctgatggccaacattccactgcctgagtacacaaggagagacggcaaactaaacttggcctcacggctgccaaactactttgttaggccagatctgggtcccaagatg

SEQ ID NO: 21127 - DNA, 598 bp, Bovine  MMBT20693
  misc_feature (1)..(216): n is a, c, g, or t
nnnnnnnnnnnnnnnnnnnnnnnnnnnnnnnnnnnnnnnnnnnnnnnnnnnnnnnnnnnnnnnnnnnnnnnnnnnnnnnnnnnnnnnnnnnnnnnnnnnnnnnnnnnnnnnnnnnnnnnnnnnnnnnnnnnnnnnnnnnnnnnnnnnnnnnnnnnnnnnnnnnnnnnnnnnnnnnnnnnnnnnnnnnnnnnnnnnnnnnnnnnnnnnnnnnnnnnnagaaatcctgtttaatatattagggtgttagttatcttccatttatagcaagatggattcagtttttattgactagtatgacakaactccttgaagaatatgggaatggatcctggttccactcctgacagaggggaatgctactatacttgcattttgggccaagaaaaaaattwwaaaaaacatgtttttcyacacacactttcgctttttgccttcttatttagaagttatttcaaaatttaaagaagacttcagttcacagggagaagccttgagtggtgatcataatgagttcactcaattttccacattgttagtctctaaatgacaggagtgggctgttgatccaactactcttaggcattagagaaaatttaga

SEQ ID NO: 21128 - DNA, 600 bp, Bovine  MMBT07556
atttgagcatctacatcatgttagtattcaaatatcccagcacccttcagcttagttcaataaacaagtacgtttgcactgaaataaccagagttcccttgtttctcattttaaagtcattttaatatgttctagacacaagataatggatcacatttaaacatgagaaaattaagtcccatcagcaagtaataatacccaatcatattcaatcatgttgaacaacaacctctactaaaatcatcttctcctaggtgaggttaagaaaataacaacaacaattaaaaaaaaagctattaygttactttcagaaagatccaactttaaaatacttctgtgttatttcccataaggcaatacagtttcttgtgttcatgcctcccagacctctgcatactgtgaccagatgtcctctctcttgatgcttagtgaattccctcatttttcaaatttcaacttatcaagtctatctagatacccctttctctgctctccaaccccctgaacttccctggttctagtcctaaacgactttattcctctagaggattacaagcttcatgagagcaggaactgataggtttcttagatgctaaaccc

SEQ ID NO: 21129 - DNA, 598 bp, Bovine  MMBT18084
  misc_feature (1)..(164): n is a, c, g, or t
nnnnnnnnnnnnnnnnnnnnnnnnnnnnnnnnnnnnnnnnnnnnnnnnnnnnnnnnnnnnnnnnnnnnnnnnnnnnnnnnnnnnnnnnnnnnnnnnnnnnnnnnnnnnnnnnnnnnnnnnnnnnnnnnnnnnnnnnnnnnnnnnnnnnnnnnnnnnnnnnnnnntgcagtgtattcagaaacctttagacacatttgctgtctatgaaatgaggatacaaacatttgtacctctcctctttgagacatgaggatggatggcaaaaatcacttgtacaatactttaagtgtcttggaaaargaacctatygaaatggaaattattatcatcagaagagtcataacagtcttccaactgtcattgttatagtggaaaatggtgattcattctactccccatctcctttgtcccggtggatagaaatcagcttattagtttcttagtgtaactgacagtgtctcctttataaaacccattcccaattcacatttccactgaaattttaatccartgaattatattttgtcctctgtattgccaattcaaaatcgttctttggtaactgtactctctgccttctagttctccttcaggaagt

SEQ ID NO: 21130 - DNA, 600 bp, Bovine  MMBT01748
tccaaaagctagtgggttttcacagacaccccatggaattagggtgaattgcagcggaggtagtgccccaggacccccactctcatgcctcttttaatactttgcatttggattatgagagagtggtgggttggagttcttctgcctcctttcccaaattctcctataatttagttatactgctttaatgttagattaaaaaacaagaaaaatcagaactttggaatcagatagtcctgtatgtgcccctgacctcttctctccactgaggcaatatttccactttttaaaacgttcctyctttttctagtgtgacctctgtgactccctttttaaaatttaattggtttggtttaataacttggaaagcactcaaactaaaaaacctacttccctgttttgcatgtcaattaattaatatctgtggctcattaaattaaaacttttttttaatttacttaaaaaacattatctactctcggtatttccctgaatagccttttaaaaatatgtcacgttgttttagataatgctttcttttagttttagtttttctattttgcattagtttattcatagaggtttctattttcttctttt

SEQ ID NO: 21131 - DNA, 600 bp, Bovine  MMBT22656
taaatctcggtaggagtaggtgccttcataatataccacatctcactaatcagagaagtatctagaggggactgttatagacaattttaatgaaaagaaaccacaatgtgggaaacctgggcttggaaaaatgtcaggtttttattcactcctgtttkaaaatgaataagaattaagggcagagtttctgattagaaacagaagactaagcttaggtcaatttcaccaacctcgtaacttgctaggagtttcagaagcagactttggacttaccttacttacatgctcaaaaggcatacrctgtcttgctaccacttctgatttctgaggttccacccatgtttgtttttaatgagcataatcacacataacttttaataactaaaataattccagcatctctctcccacctttatctacagagcaaaatatactctatggattccgaagaaagaacattttgctcttcccttgaggtacccatctaatgcagacgctgcactggatcctccccttgtcttttatcatttagccatggccttggtatctggggactcttagctccagctgttttcaatggccttccagaaaacagtatgt

SEQ ID NO: 21132 - DNA, 594 bp, Bovine  MMBT18799
ccaaggttttccccttagcagatggagggatgaaattgccatctaggcgatggaagggctgtgggtggagctgggtccccctcccccacccactgcactggttcccttcctgggaaggaagaggagtggagagaatgtggaagaccacccatcccggtgagatgacagtcgccccttctgttttgaaccttcaataatctttttttcttcaccaattcaaatgctgcctgttcagtaccctcttcaagattcatcccctcctttatgacatctagcttgattaattttacctggctgaartctcccagttcactccatattcatacagagatatgttttacttaacaggggagtttttaaaaagagaggtgtaagtcacctttaaaaaaaaacattaaagcctggcttatgttcaccaggggaatgacttagagtgctctattattaatgcttttgtaaggtgaagaatccttttgttggatgactatggatctccagtaattttcagttttgaaagatcaggttgaagacatataatactgattgcacacttagatgatatgtctccgtacatgaggcacctgctaggcatct

SEQ ID NO: 21133 - DNA, 600 bp, Bovine  MMBT13240
ctgtacgtaagtagcttcctcttccatctgacagtgctggccctcacttccaggccaccactggagagaatcataagatgtcccactaagtcatctccaaggtaattcataaaatgtcctattaaaggtgagctacaactatgactataatcttcacacagccatagatgtcctagtttgttatacttttcggttcaacagctaagaaaaaaaaatccacctgccaatgcaggagacacaggagatgcaggttcgatccctgggtcaggaagatccctgggaggagaaaatgacaagcckctccagtgggacacaacttatcgactgaacagcaacaacaacaaagttagactgaggcctgaggaagtccccaggggtctccctgatggccgggggtcaggcggggctaccctctcctcgtctagcacaactgactgcttggagggaaactctggccctcacatggacccctgctgcacttcatctcgctggatgccgaatgttcggctcatcattccagccaactgagatcatttagaagtttgattttgccatcaatcatttcttctctccctcccagctgtgtgtcagctatagctg

SEQ ID NO: 21134 - DNA, 600 bp, Bovine  MMBT17970
gacagaggaatcttagactttacagcatgtgcgttttgttagaaagatagttcctctgtcatggggcttaacaacttttcccaattcaattaattggaatctcacagaaaagcaaatgccgtaaaataaaagactcaaacatctgggaccccaagcagcatccagtggaaaacactaatatgatgcagtttcacagcttgcggatgggaatattaagagccttcatttctaagaaccactgctcagagagtgtgcggcttcttttaacagctagttcacaaggcaggtttagatggtggkttttctcagaatgcaatttagtgaggcatctccaatgcatgcatgcaatcaaagtatactaagtgaatgtctctttggggctagccatggtgttagggtataatggaacacacacaaagaagacacaagtcatttctggcctcacagagcgtggggtctaactgcctttcaaaaactcctggcctagaaggagagagtcagggagaaaaggtaaccccgacaagacatgtgactgctggtcaagagacgcaagcagactgaggcccctgcaccctttgttccctcttagggctttccacg

SEQ ID NO: 21135 - DNA, 600 bp, Bovine  MMBT19042
atgataggccaatatcactgatgagtgtagatatgaaaatcctcactaaatgttaacaaattgaatttaacaatatgttgaaaggatcatacatcatgatcaggtgttaattatgcaagggattcaaggatagttcaatgtctataaatcaatcaatgtgacacatcatgttaacaaaataaagaataaaaaattatatggtaacctcaataaacaaagataaagctgactctggttgcctaaaaactgtatcgatgaaataaatgcactagagataagattttcaaaaccttatacctygacatgacatgcggttcttttggagataatatcccactgtacacatgcaagttcttgtagtttctgatgttggtaaacaaagctgagaacatccaccattatttagttggcaggaattgctgcctgaaaagtagaaaaacaaacaaaagaaacataaaaatcaagaaaagtttataaacatgattttactgatttataaatgctgctgcttcatattggttagtatcatgttttattccctcaaataatttgaagtagcagattatggttgaagtctgtctttccataaaaagcacagta

SEQ ID NO: 21136 - DNA, 452 bp, Bovine  MMBT22366; identical to SEQ ID NO: 4689

SEQ ID NO: 21137 - DNA, 600 bp, Bovine  MMBT01633
tacccactgcatcttatcagtctgcatgaaggcccyttaggcacctgctatcctcttcccgaccctgtgcaggagcagttccaggtgaggtcccccacccagctggccccaacatggtgaatgatctggacctagagaggctcttgcctacacactcacccttgccggtccacaagaccaggccygactcaaggcagtacctaaggaaacattgaaatggagacccaccagctcttgactgaatgctgccaattatttttatgaatacttcagaagtcaaaatctggcagaaaggaaaarcatacagagatatttaccccataaataaataaatcaacctttcttccttgtgaatagcataaaaatgtctttgctttagtggaaactttgtaagtgtgatcttggctttttgccatcagcagatgtctataataagctaaggtctcagacagagatgaattgatttttttttttttttttttttacctcaaagcctcacaaaagacagtgtgcctgagagttcactagaaaaacaggatttgttgttgtttctagttttattatttaatggcaaacagtttaaagcttcaagtaattggt

SEQ ID NO: 21138 - DNA, 600 bp, Bovine  MMBT05886
gaccacagagaccgagtgggtagactctcagcttaagccgaatcaccactaggccactgcatggggtaggcagtactgacaagacattctaggtaaactacaacaaatgggccattctaacaggcaaacaaaatgtcttccctgctcaggactggagtgggcagtcttccgggattcacattcaggaatatacttgtttttttcagcagctttctgaattgtgtcaaatttatgaaaagaaacactgctccatcccatgtgtttttcttgtgaaatggaaaggtagaatgacaaagagasagaccacgtggcagagtcaggagccggaagatgtgtttgagaatgaggcccgccactgactggctgtgttgatcttgggcacgttgtcccctagttcttctgagtcttggatcctcgagcacctcacagaattagttagacaaatttaaaaaatgccccatgtaatgtaaagcgatagtcaattatgaggtgttattcataaatgcgaactgggacgtgacatggagcataatttctactagaattcgcrttaagaaaataagcgtgcatagaacatacagtagatcaatatattgatcc

SEQ ID NO: 21139 - DNA, 601 bp, Bovine  MMBT03804
  misc_feature (1)..(1): n is a, c, g, or t
ncctctacttgccttagacagggaaatatatagtactttacaagaacatttgaatatttaccattttatagatcctccttgactgcacagaagaggaaaaaaagccaattgcactttagaacaatccttcattggggagacgtttttagtgagtaatatttcaaagactgttcaagggtgaaaaaatgktttataaacaataaatattttagtgactccatggtgaaaatttcatagtatgggttttttatacagggttcttccattccactatctgtagtcacttctaaaaatacaaacrgtcaagagtttcctaccaagctaaactcatctgtaaatttccacatcaattgcactttctctagaatcagatargtttctatgtatttgtaaatgtatccacagtatttaaaaaatacttatcaagacaattgacttaaataggtaagtctatgaaaattatctactgttgtatagtaacaagagattaacgttatagaataaatgtaccatagattcaaaagtagattattgaagttagtaaaaccaactacaaggcacatgtctgtatcctcgaaagcttattttcaacactggatgc

SEQ ID NO: 21140 - DNA, 576 bp, Bovine  MMBT12023
gcgtggtgaagccatcatcccaagcagggaggacaggaattgaaagtgtctgctcctttsatcccggctcacctcacccctctggtttttgcttgatttttatttcagttttcctttaataaaacagtgaactagagtaagacattatagttattttggtgtttaatcgtattctagggagttttcatcagctcattttaaattttagatggatgctggtggtggaagttctgggtttgaagtgtggacacagcatcagttattgttcctgcaagccctccggtgcggctccatcctccygcttggcgataaaccttcaccaagggctttgctttttccctcgggacatcttattgaatacttgcatcttcagtaattcatctgggcccagtgctttgtctgttttaatacttctaattacctaattaggtgccataatgcagtgacaaagccctttgtcatttcactcttgtcttaacccttttcttgcttaggaaacactctttgtgtctctttgttgtctgaggaactctccatcatggatattccttggatatttgcctcactccctttttg

SEQ ID NO: 21141 - DNA, 600 bp, Bovine  MMBT13878
atygacttagcagcaggcaatgaattgccattcttttctcaatttaccagcagttacaaagtgacaagaataacactttgctatacagtaggtcagcaaactttttataaaggaccaaatttgaagcattttaggctttgcaagacacacaatctaagaactatccacctctgctcttatagcacagaagtgtgatacaaaaccatacaaaaacaaacgtggctgtgttccaataaacctttatctacaaaaacaaggagtaggctggatttggtgcagggaaccatagtttgcaaaccmttgctccaaagcacattattcttgggaattccctgacggtccaatgattaggatttggcactgtcatcacaatggcccaggctggggaactaagatcctgcaagccacaagacacagccaaaaacaaagtcttaataaaaaaaaaaaaagtaaatgataaagcatactattcttttaaaagaacaaacaaaaaccaaattcattttttcagttagcatttatacttaagaactatagattacttaacagaagactagtatacatttatactgtgttgacttttcaaatatctgatatgaa

SEQ ID NO: 21142 - DNA, 601 bp, Bovine  MMBT01202
  misc_feature (1)..(1): n is a, c, g, or t
nactcttaagggaatgatgtttaaatattccagccctgtctccttttgccttttctacaagaagggttttgatcaatagcagaagtacagaggcccagccagctaggaggcttggctccagttcagctccatgtcccagagagatggacggctgctttactttcagctctgccttggtgttataacatttaaaggaatatttccactaccttcaaaatgtttaggtccacaagccagttacgaaaatgtaatctggacttaatacagagttgtcaccttaccctggagatgatattgctgrgggacttcacagtgccaaccacacaatgaatttcccaggcacctggctagggtatgcagtgaacagtccttggcagggaactttgtacaaatttgcaaactctttgtacagggttaaaaacaagccctgactggaaaagatatgaccttcctgaatagctagggatctccatttcgtgttctctgtagggaaagtgatgataatgatcttgactctctctcattgtgggtgagtgtttttactggcttgagtatcattttctacctacgtgttcattcatcaaaaattttctgtgttcct

SEQ ID NO: 21143 - DNA, 600 bp, Bovine  MMBT10847
ttatttcattctttgtaatgggtatagactatatttatttgattttcataggcaaacatgtaagtaagcatcactttctcctacttcctgttttacaatgaggaaactgatgctccgcattctgcatgtggttccatagcctgggagataccaaagctcatgtttttcttgcatcaagctgcctgcaataagccaagacaccatatttacaggagaacactgtttagaaaaaattcttattggtagagacagtcctctcaatcttagaacataatcaccatcagtttgataggtcctctytgaaaatgaagacaatatgtcctctcaagcttgatttggagggtcactcactatttctgattacttgcaaaattctttactatcatctgattacttcatatagagaaaaatgattcctaatagaagagataattttagtaatttaagtaaattagctctttaaaaagtatgcaatttatgggtgggtctcaagtacacttgtattgagtctagagaaggtaagtatcctgttcttcccagtgcagaaaggacccctactttatataaccgcaggatctcaggctcataggtttttttttc

SEQ ID NO: 21144 - DNA, 425 bp, Bovine  MMBT18626
agagtctctgtgaggaaggtataagaacagcctgttccttctctcctttcagaaaccgtggttggttccatcgtcactgactcactttagctctgctttactgttagaactgttataaatttcacttcatacctgcagcataatttacatttctatgataagtatgatgaggaatctraagaaataaaatattatcaagatccttcatctcattatcattatgcatataattaataatcttatttctgttagtttaggggccataataggtctttgtcctgccattcattgtttctctgmtttattaggcactgtttttttagggactttacatattttgtgtctaataacagccctgaaaatgtgttatcttttccgttttcaggaaaaccaaggctcaaagaggttgttactgcacaaactca

SEQ ID NO: 21145 - DNA, 600 bp, Bovine  MMBT17017
cccgacacagtgactgcgttagtcacggctctccagataagcagaaccaataggatacatacatttagacacaaattctgagatgtataatgaagagagagtttaagaataaaattggccacataatggacggattttggaagtggagggtgatattttatgtgagagctgagtgaagttagcaaggcaaatagggcagggccactactgtgaagggcatttgagagggttccaaagtggggaaaattttgtactttgatgataattcttgtaaaatccagtgtgattggggttgggaayaaaatagtctcgagggtgcacagaggaatcctcagaactttgtagaatcaatctgaaatgaagaggggccccagaaagtcttatactggggagttacatgctccaatgtgcatttcaaaatatcacttttctttgtcagctagagagctggtgagcaaatctcccatccttggtttctataaatctatgagtatttctcctagagacacagttccagttgttacacattccttatggagtttactttacctactttctttgatttaaaagactcgaatgtctctgagtacaaggactaac

SEQ ID NO: 21146 - DNA, 600 bp, Bovine  MMBT00598
aatgctcaacagatgtttactctgaggagctggcaagcacggggcagatgtgggctcacccgtccctcacacctagtgtctgctttgaggacacttcctcctccatctatcctgccccgccccctcttccatcagacggggtggcctctgtgggctggaaaccccagtcagggaaccttttaagtggggaggggaaccccattctcyrcagccctactgagggttgggtggtttctgtttgttattgcctgtgaggtrtgggctgtggggttggtccaggagctgcctgttgctgagggkcccgggcggaggccaggtgggctagccctggtgagggtcyggaaggagaggctttgcttgtctgccaggggctggtttgtctggaagacagcagccggctaagattgtgcaaacaggtcattgtgcaaacacacccccgtgtgtgacctcgattgtgcaaacaggtgtttactggagggtgcccagcttgggctgcccgcttacaaaaagcgccggagctgttgactcagaaggaaccggaatctggacactcattctttcttgaacacaccctgaactttctgcctcccagccttggct

SEQ ID NO: 21147 - DNA, 600 bp, Bovine  MMBT17103
accaaaacttcaacagtggtgagtaataatttaagactccaagctttactgaggattgacagttttaaaagctaaattttaccagattcactagattttactatgtctgtaaggaatagtcttggttttaagttgcagagaagaaattattgaaaggattccgggtaagtcatagatgattcagaaagacggaaacatcagacttggaaagtgagcaggaatgaacaatgttagggatcaaggcccaagtcactccaggatcactcttcaaggacagttttctgaagagaccactactgytgctgctacacacagaaccccacgtctcgctctgctgccggcagaaatggatgttgaccgtgtcatggccactgccactgactcaggtgactgacagctaccactactgctgatgccacgtcacaagactccccatcacccctgcactcgtcccgggctccctgattagttttgagtaggtgcatccgtgrcccagctgaggctgggtcaccacagagtgagcaggcctggcctttgtgtttttataatgggaaatgggccctgcctccctccccaaggagggggattcccacaaggcca

SEQ ID NO: 21148 - DNA, 600 bp, Bovine  MMBT13336
gaggtggaagagagaagcaatatttaatctatacaacatttcctaacattttctttggatatatttctataaaaccttgagttttgccaagaaaatagccagcattttcctggcttcatcttgagtgtaaaagtgtgtacacattctgatagtactagggaaggctctgcccccagcctctctcctagtttctggtggcctcagaaattccttgacttgcagatagccattttctccctgtattttcatatcattttctctctctgggtgtttgtctttgtttccagatttcccactttraaaggacactggccatactgaattaaggcccatyctgatkacctcattataaacttgattgactctgtatggacctgatttctaaatgaggtcacattctgaagcactgggcattagaacatcaacatatctttattaggggacccaggccattccataacagtgtgggtagagggarttgcttgagagggtataygtgaaaatgacaagacagcaaacataggaaagttaacaaaaacactctatcaaacacagttttggagtcattcctatgtaagaaggccttactttaatttgtag

SEQ ID NO: 21149 - DNA, 600 bp, Bovine  MMBT21012
aacatttcctaacattttctttggatatatttctataaaaccttgagttttgccaagaaaatagccagcattttcctggcttcatcttgagtgtaaaagtgtgtacacattctgatagtactagggaaggctctgcccccagcctctctcctagtttctggtggcctcagaaattccttgacttgcagatagccattttctccctgtattttcatatcattttctctctctgggtgtttgtctttgtttccagatttcccactttraaaggacactggccatactgaattaaggcccatyctgatkacctcattataaacttgattgactctgtatggacctgatttctaaatgaggtcacattctgaagcactgggcattagaacatcaacatatctttattaggggacccaggccattccataacagtgtgggtagagggarttgcttgagagggtataygtgaaaatgacaagacagcaaacataggaaagttaacaaaaacactctatcaaacacagttttggagtcattcctatgtaagaaggccttactttaatttgtaggaaaatggaaagcacagggttcttgacagaagac

SEQ ID NO: 21150 - DNA, 600 bp, Bovine  MMBT22456
ggaactaggatcaccatgccaggcccaaggccttcccaagtacctgtcaccaacacttcaaatacactggtcaagtcccaagtgcctggagagagcgaagaggaaaaaaacatgaaataaaggagatatgtaaaactgaatattagaactattatccctcacatggtgaggctacttgttttcactccacaggaaaatgcagccatttttccaagaagccctttgagaggacagcatgttgggagtcagaagactgagtcctgccctgcctccattgttgactgggctgggtgatttagkctgagccagtagacacaccttggcttgaattgccttcattgggaataatacctgttctgtttgcatcatggggttgttggaaaatctgataatggatataacctgtctgcaaaaaccgtaaagcactcttcaagtggaagrtgatactactactattccaaagactaggagcccttcagaggtttggcccatgggtagaaactcctagagacttggttcttcagccctcactctgcatacccctcttccaagaggcagagtgggagaagggatggaacaaatgtccaagaaggcaaagtt

SEQ ID NO: 21151 - DNA, 600 bp, Bovine  MMBT09447
gtgatcattctagatatttaaaatgaaatgagatgttgcccacatcttaaaatcagatatctattcctttaaaaaaaaaaaaccaaacttttttattttgtattggggtatagccaattaacaatgctgtgatgatttcaggtgacagcaaagggactcagacacgtataaacatgtatacatggttttgattgaatagtactcggaagtagagttaaggaactgcaaattagaaatgcttcctaagtgttttaaaggggctgtcaggaaatactatttgatgaaataattttctataasttaaagtgacctatcttctctactgaacactgtagtagattggaaattgtagaatctcggggatgactcatgttcctttttttaataaacaggtcttgctgtctctaagctgaacctcgtcaccttttttgagcaaagaaaggagccctgggatgtgaagaaaaggagacaacagtcatgcacccaggtgggtagggatgaataacgcagattgcgcagggatggtgtctgaggcgaaggagaaactgaggccttaaaatgtggtttgggcggctctgcttcacgggggattccttcgag

SEQ ID NO: 21152 - DNA, 600 bp, Bovine  MMBT07377
tgccctttgtataagagaagagggaagtgatttcatagaccatttctggtcttgagttctccaatatttacttctctaggtatgactttcttcaatgtaactattgataatttgaagatacatttgatatcacagaacctagagatcccaagaagtcatatatgtttctggagacaggacaagtatatcatccacaattattcccattttacctgtgataaaactgattgcttggtgagatgtaatagctagacatatgacatatccattgttgaaaataacaccagtaggataaagacrattttttttaaagtaggtcgtgactctgatatgtgtgtgtgtgtgtgtgtgtgcgcacgcgcgcgctaagtcattcccattgtgtctgactctttgagaccccatgaaccatagcctgctagactctgtccacagaattctccaggcaagaatactggagtgggttgccatggcctcctccaggggatcttcccgactcaggaatcaaactggggtctcttgcattgcaggcatgtatacattttggtgtgctggcacagctgttcaaccacacttgatcatctaatccgatcatttttc

SEQ ID NO: 21153 - DNA, 600 bp, Bovine  MMBT20243
aagacatcagcactttttttttcagttaagttagactctctcctcctgccacaaatgttctttactgtgtcatgacagcagcacattcattttaacgtggcsctgttcttaagacagggcctgcccaagtgtttgcttatctctgagggaaaattgattctacatgaggggataaatagcagcccccatctccctccaatatgaggatgtagtggaggtgattgagtagtggaagttggaggctgtggttattgggtaccagcaaartcgctgcagcaaagactcaaaacagtgcctcckacaagtccatcacttctctgtcattaaactgtctagagggaggcacttccagtccccttttggagccatctgggaccctggttcctgtgctgtttcctgcttctgttttccaaggacatttagagtagaggaagaaagacatcagcwtttttttttttttttcaattaagttagactctctcctcctgccacaagtgttcttctttggggagaagtgatcttctctctctgttctcccctggagtgtggctccctgtgtgtctgctctttagctgttcctgccttgggattatttcttta

SEQ ID NO: 21154 - DNA, 600 bp, Bovine  MMBT13386
tttcctttagtctggcctgatttcctcttttcccaaagaaaagagccctcagctctgcattatataaaagtgagacggggctttagtgtaacatggtatcaaacttgatgtttcagaacaagactttgagtcttgttttcaaaagcacaaaatgagacatacattcatatggtctcccttccttctcaccctactcccaagttgaagggcctgggtattcatgaggtgagagttcagatatagtctccaagccagttaaaaaaacaacatcgcctatgctctgctttcccttttttggcrtttgcatcagtgtagcccttctgtgagcctcttgctggcagggccagctagccagctgtggtgtgattgtgtgttcagtgttcctaaaagctattccattggccaaatgaggcaccagagcaagcctttgcctaacagacagcttctcagtattccaccagtggctctttcctcagccagatggataggactcaattagtctatcagttttccctttgacatatttattctcctttgtgaggccagctgtgggaatccatccttttacttaaaccactttgataaatggctttcattttc

SEQ ID NO: 21155 - DNA, 600 bp, Bovine  MMBT07205
agatctgtcttgtgtgatgtttcaaatactttaggtttggcagaagccaagacacattctgtcaagttctttttccccttcgtttttttaagcccgtgtggattcgagagaaatgtggccatctgattctcattcgtttttgcctaactcaacaacaaaaattgtctcagaagaactagaaaatgtccaagtggcaaatataacctctttcacagaagccttcttaggatctctgtcggtccaccccgaccgattgacattctccaaacaggccaagcattttcacttctttgtgccagytgcacttgctccctgagcctggaatgttcttccctttcaccctctcctctgctcatcgactcctgctccccaagtcccatgcaaagacgacctccttcgtgaaggttttccccaccgtccaacttgtagaygctcccacggtcccctgaagtcctgcaggacttcacttggagccctaacgaccctctgttctgtgctgctttgtgttatagtggttgttgaaccmcatgaatcaagccctcactsatgttgtcctggatgtgaagctctcaaccttaattaaaggccttcacgagaaag

SEQ ID NO: 21156 - DNA, 589 bp, Bovine  MMBT09225
tgtcggggattaatttctaacaaytcaattattatatgtatcttccagggctcatttccttcacagattgtttaatcaaagagacaacagtattttctaaagcttgcaattccctacaccaggaacctttcttacccctctgttaacatcatctgcactgagattaaactcataacatcacatgctacacaaaagaaaacaagtaaaatatatagcccctaaagtcacttgtaactaagcaattgttatgatatgaaaataatgttcatttaattaaaattcataccacatagggtctcratttagagtgttagtttttaaacacctaaaccaggcttctgtggctcaaagctatagtaratatgaaattgtatatatcaacattttttttggtttaaagctaattttataagtaatctctctgtaaagactcaacattcacttatacatagtttataaagtacaattatttgtaagttaatgaaacactaggttcttgtaatatgctttacttgaaggccattaaatacaaatacccaatagcaaagaactacatttctcaaagctaaagccgcatagcctcatgttc

SEQ ID NO: 21157 - DNA, 600 bp, Bovine  MMBT10232
ctagaatagtttgccatgccctcctccaggggatctttctgacccagggatcaaacccacatctcttccacctacactggcaggtgggttcttcattagcaccacccgggaagcccacagtactgtastacacatttattattttttaacccgtgtatamatggacccatgcggtttaaactcatgttgttcaagggtcaaccgtataaacaactgaactgtaatcttacaacttctgtaaaaagtcagccattatttttcccaaattcatttatgccagttctttccccttcaagaaastaaaagacagccatttcagtcaatcaaaactaggttcagtgctttgctagttctgactatagatgcacactgcattgtttcagagtagacagtgagaaaatagtaaagattgatgggaaacataaaaattcatgaaggactctgcacacagattgctttacaagtatctttagattcttgttctactttaaataaattgaaactggaacttatagcctatgcactatacatgtgattaaatcaagaaaaaattggcccagcactgaaacaaggacaaactaaacatcaaaagacatatac

SEQ ID NO: 21158 - DNA, 600 bp, Bovine  MMBT07730
gaagaaaatatttgttcctatgaaaatggcgatcgtggtttccagtggatggtcttggagagagtgggagtcaaaagcagccctttcaggccttgggtggggcccaccctcaggacactcctgtccctgcagtgctgcagcgatccaggccccggcccctgtttctgtgccattcatctgggtggggcgggtggacctatttcctcgaactgtgccaagccagggcttggcacctgttgagtctcttggcaggaacattgggcttttagcagatggcatcaagttttgacctttgcaaarcatttacaatctgaaaatgatgggaaatgatacaaaagtaatgaaggtggtgcaggattacataattacggagttgacagaaccacggatgtctaggccagaatgcctcctggtccggctggtctcattcccctgcccatttctgtgtgacacttcctggcacggaatagggggttggagggcacagtgggacagaacgaggattttatgcctgatgggtctcggattgcttgctaggtctgggagcttgtcgtctcttgggaagaagagctttgttagttgttcagtcatgtctgactc

SEQ ID NO: 21159 - DNA, 598 bp, Bovine  MMBT03788
  misc_feature (1)..(127): n is a, c, g, or t
nnnnnnnnnnnnnnnnnnnnnnnnnnnnnnnnnnnnnnnnnnnnnnnnnnnnnnnnnnnnnnnnnnnnnnnnnnnnnnnnnnnnnnnnnnnnnnnnnnnnnnnnnnnnnnnnnnnnnnnnnnnnnnnatacacacacacacactcacacacacacaaaacctttaaagctaccaaatctttttctctaccacataacaattatgagataactttaaataaatcaatcatatttcgctttgttttgttatccttagactaacttgagtacttataattataataaaagttgagcaatcaayagaacttattcatatttacaaaaatacatgtcatctggctctgtctggagggaatctataccctagttcaatcttaattccttataacatatccataaatctccaaacagctaatcatgaaaatattaatgaaatgagyacatgctttatttataagtcttggcttactaggcccttattacattgccagagagaaggaatattaaaataaatgatatctgtgttcagcactgaaaataaatcaaaagagtcacaatgtcacttataatagattccagtcaagtgtcactttgttgcc

SEQ ID NO: 21160 - DNA, 600 bp, Bovine  MMBT18842
cctcactctataaatgaaatgtacactcagtctgtatactgaatcaatctgtatactgaaatggaataaaacagaattaattatgctgacttggaacctctcaggaagctgcttgggttgggagactcccaagggaattacgcaagggacaacagtatttcactcacctgcctttagagtcgggtgggatgtggtcagctgtagagctcttcttctgctgagcagaggtacaagtttgggtcagaattaaatggctcaagccmatagaggagagacagattctatcctctttcacttgcrgttgtgaagctgtctttaaataaatattaagcacatatttttctatatgtgtttgaagcaatacaaagttgtcccattaaggcatctgtctgtcttggcccagccttgtttatcagtgtcattttacttatcaaagggaatggaccactccttgaacagtcacagaaaccacagtggaactcaggaaacttaaccagtcttgcatcctatcattcacatcccattgctaaataacaattcattccatttgtttattaatgacaattatctgcattgctcaaatgacttcctcatccaaat

SEQ ID NO: 21161 - DNA, 532 bp, Bovine  MMBT11716
cataccaatmggagctcagggctggcccagtgaaagcagtgagactgctcagtgggcgggcagcctccgcccccagtccatgtgactggccccgcaggatgagaaggtgtcccccatactcacagctcgcgccaccagcgtcatcagcattccggtgagaaaggtcaggtaatagcccgggtacaccccgtgccagatggcagagaggaagaaggtctgggtggtgggactcaaggaggcacgttcataacacaccctggaaaccacgacacacgtgagttgtaagaagcctgtcacccycacaaccatcattctttcagtcccagtcaggatttaggaaaacaaccacaccttagcttggccattagcctcagggaggttatggctcctatgaggtttataaaaagattttttacttctgtcttcttactggtatcaccaaaatggtcatttctagtgtgtggggagtctgtactatgtacagaaaaactttaataaatataaaagttattcttatcttacattattttat

SEQ ID NO: 21162 - DNA, 600 bp, Bovine  MMBT03509
taaaaaagtccattctacaccagtaagaccacaacccccaccattcccctggcaatgctgagatgtacggggatttaaacagatggagtgtgttatgggaatgcccttatttatgacctaaaggcatccttctttcccttgggatcaaaggtgaagttattttccatgctaactctgtcctgaggcagagtctatcaactctgccacatttctgctgaattatatgatggttttgaaatgtgagttgatgttcccttgagatggtgctttaatcaggttcattacaataaaaaaatgaawcctagactaacaaaataaagtgacagtattttataggccataggagggaagatgcactgaataatacttaacagatccttaagataaatttacagtgaatgcaattagcctcatccctcctcaaaataggctgttgccactctcttaagagaattggacgtagtgtgcttcacatgcttcagtgctttgtgtacttcacgtttaataatatattagtcatgctgagcttcagtgttttagatattttgatcctttggcatctctgcaatcataaggcatcagcaatcacatgaataacag

SEQ ID NO: 21163 - DNA, 600 bp, Bovine  MMBT11396
cacacatatgtgtacatatttttgccttatttgcctaaaatattgttttgagatcaacacgcttactttttctcaatttctaaatttttctaaattcttcataaaactttaaaaaataaactgtttaaccctgtttcagttttccctaacatgttgtttctctgcaagccatagaatatttcaattaaacttctgttccactgatacatactctattgtaattgatatttctttaaaagtgccttacattttttcctctaacatgttctaagcatctaaaggcactgtactttattttcytagctttgtacatatccttaacatctctggagatatttgccactaaagcaagtgagtgtttatatactgtttgtttattcatgacaactcctaaatgtttggaaagtaataaaaaatgtcaatagtcctatggtcattgaaatgctcccctaatttcaacttcagttttatttatattctcaacattttatgaacactcacagcaactgaaacatcatctcctttaaaaataacctgggaacactgttgtcacaaccactgttctttaaacagcaggtatatcagtgagacagtggtcct

SEQ ID NO: 21164 - DNA, 600 bp, Bovine  MMBT07467
agaatgcagtgtgggatggtgaatgatgtcctggggaaatagtatcagtttttacatagggcagcctctcaggctagatacatagcgtcatgcatcaaagcggtttagtaacagtgactgcctgtgcactccaggtgcccaactcctggcttagctggcttggtgtaaatatagatttcacaatactgggaagaatgacataactaatgatctttcaagaaattatccctatcacatgtcaacaaattgaagactatcctctccaacagctacaggatgggcagctgctctcagctgctkattaaatgcagaccccataaactttggcaagaagttgagcagaggaagtgttggcctcctcccgggaaaactgagatgcccgacaatgagtcaggcctcggctcttgcttgggggagggtgtgcatgtgtctgtctgtgttccatagtcctctgtagaaaattagtttgaatccactagaaaatgcaaactttaatgaaagatcaaggccctaacatacataaaccttattaaatggacacaatagttttagtcttgaaaatattcagagctagcaaactctgttaatcaaataatcaat

SEQ ID NO: 21165 - DNA, 600 bp, Bovine  MMBT08894
aacatagctaggttagtaggtagataggcacttttcactttcttcatgcattggagaaggaaatggcaacccactccagtgttcttgcctggagaaccccagggacaggggagcctggtgggctgccgtctatggggtcacacasagttggacacgactgaagagacttggcagcagcagcaggcagttatggagaaatcactaggaactagaactcagtgaccaaagtgggtacacataaaaataactggattcagaacagacagtgcaagctgaaattacagtactttgttttgtccyatattttacgtaaagtctgctatgtttaaatatagaaccagggactttcctggtagtccagtggttaagactccatgctcccactgtagggggtatgggttcaatccctggtcaaggaactaaaatcccgcatgcagtgcagcatggcyaaaaaacttataaataacaaaaagactatgttcggtcaaattttaaatagtcctattttctgtatgtctgagtagcatgtttttctttgaattctttcatccaaagtaaaaaattaaacaaacaaacaaaaaacataaatcaaacatttcg

SEQ ID NO: 21166 - DNA, 600 bp, Bovine  MMBT16249
catagcttaagaaaaacatttccataagaaaatcccattggttagctcaaggtttgagaaaagttaagttcaggtggaaacaagtgtcctcatggtaacayagaattttaagagaaatctaattttgcatagcgaaggaaaaaatctctgacacttgtttgtttcctcctgccacttaagagagagagaaaaaaaagtctgacacttgaagcctatttcctctgtttgaagaccccttgccttcctgtctgttaccctctcaattctttaccaactgagctccaagggaagccctgctargtagattttgacatctgcttatttctctatttttcagttgcatagttaatttatttaactgcctcctcattasgagttcttaagaaataatatcaccatttaattgggtaggtttcatagacttggcaaaatccatcwatttctattcattattatttggtcttcataatacttttggtaaaattgggctcacattattttaccaacaaagaacctaaaactcagagaaatatatgacttatttcaagtgtgtactgcctttttaaaagctgtaactaaatagaattttcctatttctcg

SEQ ID NO: 21167 - DNA, 600 bp, Bovine  MMBT09371
tctttgcattgatcactgaagaaggctttcttatctcttcttgctattctttggaactctgcattcagatgtttatatctttccttttctcctttgcttttcgcttctcttcttttcacagctaaactcagtaaatataggctgttctgattattgttatcattattacagttagtytgaatacttaagcatgaaatttctgcagcttctcccatagattttatgagatgaatatttggtgcagactcaraaaacatggagtgaaactatagaaactgaagctcaaaatttcccrtctayttgcaaatgtacttttaagccatacaagaagctagtgtsctatgaaatggtctgtgctttatggattagctctttagtcrtggctttcctgcaaacactggagcaagttgttatcagctgatatactcctctaagttacagtgagtaaagtcaccaaataaaattgtttaatttttgatcattaggaaaacattctttttagatgactccagaaaggcacaatttgtggaactagtttctgaaccataaaactgttgagccaggattttacaaaataaaataattttatggtcatacaaa

SEQ ID NO: 21168 - DNA, 600 bp, Bovine  MMBT02719
caagaaatgcctgctaagtacaccaggtattctgttagcagaagactgctaagactgctaattacccctgacatatgtcagattgaatggtcttaggttaaaaaaaaaaaagtgctgagtggagacactatttcaaaaatagtctcctctttttatttataaagtgcttttaaacatttagctttaagaagttgaaaaaacaagttttcagcagacagtagttgcagatattgtgcaaattctcctgtgtactcagtcaatgataaataactgctgccatttcaggtttttgtctgttaygaacttgtagagaaaaaaaaaaatctttatacccaatttctaattatctagactcccaaaagtatcaaactggagaatcccctggcttacgttgyatccaagtcttaacacctaaaatctctttaactccctccactctttctccttttttataaataagaaagacaaacaacattttacatgaggataagaaaaactcttgaagttaacagatttttgaacttctgttgtgggatttcagtgaagttccttattgctgattgacaaataattcatggaaaaaggtaatgcagggcaagg

SEQ ID NO: 21169 - DNA, 600 bp, Bovine  MMBT03843
tgaactccccccccaccttgatttttcatttcattgtaggcatcatgttatagatgttaccaactgggagtagtcacgtggatgaaggtgggctttttatttttcacctttaaaaatgtagtaatgmttgaaatcttgcctgatgctatgaatttttcatactagccaggtagctattcagcccagcgatctaaatctgtacacctcagctgcagtccaagcagaatgaaayggaaatatgtgacggtatttcactaaactctatcatgcatgggcatgccacttcctttattttttacrcatattattcattcacgcagtaaagcaaatcggtttacacacacagacttaaatttgcttttcatttataagtggtaaaatcctttcttaatttattgttctgcatttttatatactaactactgtattttatactttgaattcctcattcaatatggttgagagtatcatgcaattatacaatctgtatactttcaattttaaaaagcaacacaatgacccaactttattacatgtatctgtatatttatatgggcttctctgatagctcagttggtaacgaatacatatacatattca

SEQ ID NO: 21170 - DNA, 600 bp, Bovine  MMBT10851
atttgtgtgatatggaggcagagactggagggatgcagccacaagccaagggatgccagcagccaagagaatctgaaagaagcaagagattgggtctcccctagagcctctggatrggttatgaccctgccaacactttgatttcagctcactgaaactgatttcaaaaactatgttgttttgagccacaagtgtatggtgatttgttatagcagccacagaaagctgatacaggaagtgttcataggagatgggtttttgtttcttctgctaagtgcagacttacaatggtttgactcrtgattttttgacactacaatggtgcaaaggcaatatgcattcagtagaaaccatacttcgaatttttatcttttcctgaactagcaattctagactcttttgctgctgggcagtacagcaagccacagctcctactcagccatgcagtcatgaaggtaaacaaccaatacacttagaatcattctgtacccatacaatcattctgtttttcactttcagtactatatttaataagttacatgagacattcaacattttattataaaataggtcttgtgttatttgattttacctaactat

SEQ ID NO: 21171 - DNA, 601 bp, Bovine  MMBT05561
  misc_feature (1)..(1): n is a, c, g, or t
nagccccccgtaaagtcagaggtgtaggtgagagcacaagtagtaaagtaggcaggctctggttatgggggtagatgctcaaggatttccagggggactcctgaggctcgatcccgcctttgcrtatgtygagcctccttcctcagagtgccgcactctgccccaacattaacccacccagcaacttagtttaaccccatcagttttactgctacttagtaaattaaaacaacataagagggaaatcaaatagtgttgcttttaacccccagtttagcctggataaataacaactctaaaygaaaagaaatcaaacagggtatttgaattaaayacctaaggagcttcttaaaactacctaagctatacagacaaatgaaacatttaccataacaatttcagcgactacagttttcaagtctccacagctaaccattttaaatttaattttggctatctgtccaatctagacagtagggtacatctagggagggaagacccatgacttgctgcagcacttaaacctctaatcccacagaaatttttcttaaaatagctgaagtgaccagcatgggcactcttcttgagttgatattaacag

SEQ ID NO: 21172 - DNA, 601 bp, Bovine  MMBT09920
  misc_feature (1)..(1): n is a, c, g, or t
ncacatgccttggagtaaataaccccatgtaccacagctactgagcctgtgctctagagccagcaagccaccaactaccgaaccccgtgcaccctagagcccaagctcagaaacaaaagagaagccaccaggatgagaagcccacccacctcaatgaagagtagcccccgcctgctgcaactagagaaagcccacacaacgcaacgaagacccagtgcagccaaaaataaaagtaaattaatttaaaaaaaaagactttgtaagaggctgaaactcaatatcactttttgaaaccatcacratttaggaactaaatctaacatagcagagtccatctagctgattcatctcttaaaaggtagacttgtaaactcagggtgctattcagtgctccctattgaaacaaaagaaaaagttagtaactcattactaaaaagataagatgcastgataacctatctacttcaagaaaaggaatccaaatggaggatcacagaycttcctcacttattcgcaggcagggaccacgcacagaggaaggctgtctggaggtcactagattaaatactatggcagcaccaagccagggtccatgaatgca

SEQ ID NO: 21173 - DNA, 600 bp, Bovine  MMBT22801
cttaattcatatgttggaagggagatgaaaggtgtcatcacatgatctgacatcctatccaggaggctgactcttccctaatgtggaagagtcataacccctgactgagaggagctaaagtcaagtcttcaaggaacagtcccatttggactttgttttactgtgcactcactttagaagacagcaaaactgcagaagcaaagtaggcggtgtgaggggatttgagaagcccttcactatggctcattcatgttaagaatctaccagattttttacacttcataccagacatggggaaaraagactcttaagaccatttttaccctattgccagtcatagccatgaggcttgggtttctcctctggcaccaaaaagtgtgagatcttagaaccaagttctttaattttaagaaactgatcctaagatactgatatatccagaatgatcatcaracctactctttttycttctagaactcattgatacttamcagtaccaacaggcccccagaccttctctgttctttccaggctgggaaaagacttcttatgagttccatgggtcatacagttagagagaaagcaaaagaacataagaaa

SEQ ID NO: 21174 - DNA, 600 bp, Bovine  MMBT10261
cctatgtgtgtagtgtctgtggaaaaggcttcactatgaagggtgatcttgtacatcagtgcactcatactactgagaaaccatttacatgcagtgattgtgggaaaggctttactgtgaagagccaactgattgtacatgagtgaactcatacaggggagaaatcctacgtatgcagtgaatgcagaaatgcttctccagccaargcccacctcatcagacatcaatgaactcacactggagaggaaccctatatatgcagtgattgtggaaaaggctttgttcagaaaggcagtctcmttgtgcaygaacgaactcactgtagagaaacccaatatatgcagtaaatgtgtggcaaaggcttattctcaaaaaggaagcttaatgcacacctgcgaactcayactggagagaaaccatatatatgtaatgaacatggcaagggcttagatttccctggtggctcaggaagtaaagcgtctgcctacaacgcaggagacccgggttcaattcctgggttgggaagatctcctggagaaggaaatggcaaccmactccaatattcttgcctggacaatcccatggacggaggagcctggt

SEQ ID NO: 21175 - DNA, 471 bp, Bovine  MMBT09455
atgcctggccatgttctaggtaatgtaatatcatggtaatatcgtggcaacacagtaaggcccttccctcctggagcttgcatacatcttcctattacccagccatacagaagtgtgtcccactgggatgaaaaatgccttgaaacttcaccccactaggttawtgcttcagtgtatagtcttccagatctttcccccaggcatctgcatgcatccatacatctactaacattcttgtttatttatttattacaaaaatgggctatattttatacataacttcccctctccctgcttaawactgtatctcaaacattctttcagtttgtatatacttggacatttgggttgctcccagttttttttttaatactaaagacaatgtgtaatgaaacttttttgttatagtttttgtacgtgagtgttttatctgcctcaggcatatgcatgataatgttaatagatattgcc

SEQ ID NO: 21176 - DNA, 600 bp, Bovine  MMBT12639
cagggattcacactacccccttagttgttacaatttgctggaatggctcagagaactcaggaaaatattatatttctgattacaaaaggatataattcagagcaaatcaaggggagagatacaggggatgaggtctaggggccccaaatgttaaacttccgtggtctctccccatattgtcaagaatgctttaccctcccagcacgacaacatgcaacagcacagagtatcgccagccaggaagccccctagagtttcagtgtgmagagttcttattgaggtttcattgcataggcatgrctgaccracttgactgaatcatcggtcatgtgactgaactcagtgtccagcttccttctccttgtggggctcaaagttacaactttcctaatcccatggctggtctttctrgcaccatcagcctccrttttgagtcacctcattagcataaactatcaggtgtggtctaaggtgccgccatgaataacaaatacagtcctatccctccagaatttttgaggatatagaggttactgaggatagaggttatataggacatagaggtccccagaaacaagggaccgagggtcagccgagtct

SEQ ID NO: 21177 - DNA, 600 bp, Bovine  MMBT19616
gcagacgtgcagaggtgaccaggggcctcctggaggaagatgggtgaatgctcctcaagtgcttgggtgtgtttaggtagcataatgggtaggttcttgtaccctcacatcctggagcttggtaaggattctagctcctgaatcaggtcagagaggcaactggtggtcatggctttcctagacagggtggggagagagagagagtgtgagtgtgtgtgtgtgtgtctgcgcttgtgtgcagtggggtaggggatgcttgctgagcaggcggagagggcagggtggccatcagcctcctcycttccttcccttttcagctcaggggtgtgattggcatgtgtgatgtgtcgtgagtggaggtttccttctaggacagaacccacccaccttgccttggtattagaaagcatctgttagtgctccacctcagtgacgtttctctgggtgactgcaacactgctgacggtcagatgataactgtggccctgacgggctggggagagaccagtccaagcccctcactgtaggcctggagagcatataagagggaaccagggtctggagtgcacagaaaggctgtttttcgtggcatataggatg

SEQ ID NO: 21178 - DNA, 600 bp, Bovine  MMBT16343
cttatagagtctaactctttatctacagcattaagggtctgagaggaggagaatatgttattagtgaaccatctattactcttcttgagatttcttcaaatggcagagagaactaaaactatgagaaaactactggagaggtctaattataataataaagcatccaattttggttagacaacgtaattaacaggctggggaaaggagctaaaataaaaggactagttatgtttcatttcctgaattgttatttccaaaaacagagacattttgttcacttctcattttgtggagctattrcaaaaatgttctgccactatacatcttagagatagtgactcttacttaaaagttgtatgtggaaagtctacggccaaagtagacttgtttcatgtgaaagatycaggaacatatctttcctataagatgatgttaggaaccagccttggtgacaagctaaatctttcaaagataaaaaagtaacttcatcttaactatctctggttagtatgtcaggctaattaaggttaggctagctcggtgatacactgaccataactaaccactgcacatgtctgcatggaaagataacacagataa

SEQ ID NO: 21179 - DNA, 598 bp, Bovine  MMBT13518
  misc_feature (1)..(8): n is a, c, g, or t
nnnnnnnnactcagggattgaacctgggtcttttaggtctactgcattggcaggtgagttctttaccactagcgccacaggatatattaatgaaagtgggggtgggtagtgagccttagtcgctcagttgtgtcctactctttctgaccccatggactccaaggcatcttcccagtccagggactgaacctgattctcctgcattgcaggtagactctttaccatctgagccaccagggaagccccatattaatcaagagactcccccaaactgtggtktgtacaagagagtcatttatwtctgcatagtagcccagaggcaggaaggtggtccagagtgaactggtgggttttgttccatgaggtcatctaccaggatccatctattttgactctctgctctctcctgggatgtggttgactaggctccctgacactgtatcaggcttctgttttagggaaaagggaaagagagaakagagaggacagcacttgaagaaaaaagatgcaaagtttgcacattttgctactgggcacttgatcagctgtggcacgttttacgaccagtgctcatagtcccttagtgagaactaggtca

SEQ ID NO: 21180 - DNA, 553 bp, Bovine  MMBT16850
tttttttttttcaaatagaaagttataatagctactgaataaataatcagtatttggaaaaatattttaactaatcttttcccctcctttctcaaaagctaaattgtttgctatttctgagactaataccattgtacttgttggataatttacagtaaacacacatcctcttaatcacatcacagaaacttaaatagatttgtaaaaccattaaaaaatcaatacttagcttttaggtgatgaattaattaatggagtgtgaatgcttgaagtctgcattacccagcatgcactatggcytttcataatatcactgtcaatgggaacagtatgcaaagtaatataatgtaactagtggggaagtgctgataaaaatatatcaatctctgctacccaatgagaatattccagtaaaaacttccttttggtaagaaatgcaattcaatatttttctgttatgtataatgatggaagaaagaagcattgttgacaaatgaaatccagagaaaaaatagtcagaaatgtcccaactctttttattatcaggcaatag

SEQ ID NO: 21181 - DNA, 600 bp, Bovine  MMBT23144
cctccactttttaatgtatgtcttgtcactaggtggtcagtgaatatttttcttcccctcatacacacagggtattttgtttttaagcattggagagcaacaatagaagcagtgtgtctgaatgcaggaacagtctgggaattcaggkgctgtgaattttatgatgtctttgctatttccctaaagcacgattctagaccatttaatttctttattccagtgtttcttcatctggataacagaaatgatgagaaggccagaattgaaagtattataactatcttaaccctatcagtctaytagccatagtacatgaatcctcataatcctcataatcattctcataattttctttgaggaatggtctgtataaaatattttttgctccttctcactaagaaaaccagttcatgccctaggctcaggaggcttcagcctgcctatagcttcatctcatctcccatgtacatcacaatttgcttttataaattccattcccttagcctagaatgctttcctgccattactcaaatccccttgttcctggtgacaaatcagtatcaagactgagcgcttctcctcatggtcttcatcaactgc

SEQ ID NO: 21182 - DNA, 600 bp, Bovine  MMBT07584
tatttatcagagctcagttgtatgacatgagcagtgcaaatttcaggtttcactcattctgagttgaagtgccctttagaattcaaatggtcttacagcaaatgcaaaaatcaaagcagattcacatatggtaatttaccagctaagccttcttactgcatatttcctgtttgctctcccctcaacccattctttctggcaaatgaggttccttggaatggaacctataatggtaatatattcaacatcattatcaatcatttgtattattgtaatcattgcagttgttgtttatttcaragattagtactgccaggaggtcactgtaaataataaccagtccaagcggcatgtggaaatgctatgaatgtgaagtgtgcaagtttgaggcatttcttctacagactgggtcttagcattgtcagcttaaccataaagatacatctaaaaatcttaagatatctgaaggcagagtacaatttgcagtgggcctataaagacctggattcttatcccagctcagcaataaaatttgtatgttctgtgagtcatcatcttcttctgcaggaggatagatgttatatggaggccttaaatttg

SEQ ID NO: 21183 - DNA, 600 bp, Bovine  MMBT14954
cttattctttcaaagttaatagtgtaaagtccaatattcatttgagtctgtaagcttgatatggttataaaaataatccgtcatattataatcatatctaatacatttcactaattgtgtctttaaggcttaatagagttatttcttttccccccaaaagcattcaacttagacaacattaatgagatcagacttaatttgtaatagattcagtgaaatgaaaaattaggttagcttgatataatacagttggccaaaaggccaaactaaatccttttttaggcaaattcactgtctctmtcctggcctcttgagacatgatacacttgtagtttgtttcaacaattgagtttttaattattatagttttgcaggcatctctgatgacattaactagttatgaccttggaccagctgtctcacttctctgtgcctcagtttcttgttttgtacaatggaaataatatttacttttgcattacttttgagaggattaaaataagtgatgccatcatgttgtttagcaaagtacctcctgtgacaaacacttaaataatattgacatatcattatgatcagttttatatttaattatttgct

SEQ ID NO: 21184 - DNA, 600 bp, Bovine  MMBT10317
ctttgtaccctcctgmatactaaaccactgctcgcatgacctggatacccaaacaaatgtctaggaggccrtttttcctttacacatctggttttgaggttccctcgtggctcagatgtgaagaatctgcctgcaatgcaggagacccaggttcgatccctgggtcgggaagatgccttacacatctcaactccaaggaagctcctatttttgtataccttctatgttgttgagggagaggctgagaagaatggatagaaaaaacaaatagcttagtgatgcgcctggaaaatcagaccrcgttcaagaatcaaatgtcctctgctgtaatgtgtggagatgggtccaccaacacagatttatttgccttctttttggatttccctccttcgttaaaggaccttgtggattatttacggactcactcccatagcgctgcttatggcacatccatgagccccccggtagcagagcaaatcatcagagtaatgaaactcatcatgggactagatgggaccacagaaggtaagagggtctgcagcaagcccagctccctttcattccttcctagacccctctctgcctcccttctgccccatc

SEQ ID NO: 21185 - DNA, 600 bp, Bovine  MMBT12289
atgcttttcagaacatgcttcaatccatatcttttggggrraaaaaatgacctgcctgaaattccaaataaggtgattgaaaacatacacctttctcattattggaacatattttgagatagactctatcaaaaaggcacggaaacatacggctgtaagtaaggaatagttgtgttgaaattagcatcrtgctgatcctgctgcccgcttcattggttactaagtggatgttcagcatcctggccacgtcttaaaaagacaggttcccagtctccacaatagttaagtcctgcttgcccrttccatgtctgaatttgacctttcctttggtggcacaagtctccttgtttaagtgtaaagctgaactctgtgtttcaaaagcctattaagtaagttcaagcaacgacaagttcttcagtgaagtttcattttcacaagttccactttgggtcacggaggaattttggaaagacttcaaaaaaaggaagaatagccttcagggctggctcagctctgctttggactgtcccatgtgggtagggccctgaattctcatctaggtgacactcttattcatcatatccccttagcaccgttgta

SEQ ID NO: 21186 - DNA, 600 bp, Bovine  MMBT16798
ataaatattattttaaaacatccaagcattactaaaatatttaatgtaagaagtaaaagcacccaatagtctcattctcaatagataataacaactatgaacagttttgggtccatttctctagacttttttcccatgtgagaacaatgaaacatttaaaaaaataaaaatgggatcctacaatatatatactgtttgcttcttgctttcccccctattgaatcttttttcctcagtatttttgacttttttgcatggamtgaggtcatctgcctttggcacttactgactgtgagactrtagatgaatcactcttcggctcagggtttcagtttcctcatcggtaaaaggaaacagccccttcccacttcgctgtgatgtaagctttaagggagagagcatgtgaaagtgtaggcaccctgcggtggcctccagtgaaccctcctctgtcctgttctcctgtttgactgggtttggagcactgaccatgacctgaaattctgatttcccgggttgtttctttgtttgtaccacctctagaagttaagctgtgtgagagcaaagaccgcatctcttctgctcatcaccgaatctgtcccc

SEQ ID NO: 21187 - DNA, 600 bp, Bovine  MMBT11454
ccttcaacaacccaatccaatctgtctgcctcaacttccaaatagctagtaatggggccagctggggcctgtgggatcctcagagctctgggtcaatatcttatgcctcgttatctgccagaatgtctgagataaaatgcaggacagcccggacttctacacgcgggtcagaatgctgaggagctcaaggagtgggggatgggaaaggctctgatttgaggtgcccttcgccccccggaccctgcaccctgctagactcacactgtaacagcgtcaccagatgtcaccacccacaccccyctcctgcactcattcaacagatgtcacttagcccatactaggggcttggcggtgcagtggtaaagactcagcctgtcaatgcaggagacacaagagacaagggttcaatcctcagctggggaaatcccctggaggaggaaatggcaactcgctccagtatgcttgcctggaaagttccatgggcagaggagcctggcgagctacagtccacggggtcagaaagagtcggatacgactgagcactggcttcaaaggtgccagaccctgtgctagaagctggagaacaataaagatacgttc

SEQ ID NO: 21188 - DNA, 600 bp, Bovine  MMBT22082
ggtatgttgtttcactccatgtatatcttaagttcaggaattagaataaatgaagtcatattatgacattaacacatgataaatattgatctacgctgacaaataacattgaataatgacatttatagcactctgaaaccttcccacatttgttcttcttttttatattctcataactactctgcaaggtaatcaaccaagggatatttaatgagtttctagtgttgttcaggaacagtgctgggtatacagggaaatgattattggtcccacattacacattaggatatggattgtgartrattaagtttccagggtcagttgatggacgagtcaggacctgcaatgacagcctggctcagcacatcctaggctttgctgcctaaaaacttgccagttcacctattgctgctgtgattactctggggagtctcctaaatatcagtgaaagttccatatattcatctttcttacccttttgttctctttctattgtattcaagcttccaattatatttgaaaaaaaatattcttttttcttttccagccagctgccagatcgtctcattttccttctattcttttagaacagatgatctg

SEQ ID NO: 21189 - DNA, 598 bp, Bovine  MMBT19532
  misc_feature (1)..(2): n is a, c, g, or t
nntatgtctgagtgtacagttttgtgagggctggggtccttggtgcagcccacctctccccgcacaatggaaacccctgtggtcaccagtgcttctcagcaagacctccctgtttagtctcaggacaggtgtttggcaataaatgaaaccttgccccagatcaacgaggcctggagattcatcagcaacagaccaaccagtggggagcccttttaattattttgtgttgaccatgcatttaatgataccttattatggatccaattaatttcattcatgttgcagaaacaaccaagagtrgtcatgttgctgaaatactgtattctgaccctattcttatttttccatccctaggaagcctgctatagcatattcttggtcttgaagtatcataagtacagcatttttgctagatagtgatataaaatgctcatgttttcatgtgtgccatattcatttctgaagcttgtatactattatacgagactgtgtttctaccagaagctacctgatggcacaatcattggggttctgagactgctatgaaaaagagaaacacttctaaggtttgcttctgcttttcctttatacacactat

SEQ ID NO: 21190 - DNA, 600 bp, Bovine  MMBT08270
taaaatgaataatataccctcacattcaatcgttgtctatactttcagctgtacctcattttttatgtcaaagggaatttaaagatttgtataggtatgatctaaaaggttactatttttctatcttatactctgaaagcttatttcatacagtacaccttaaaatcaaatttattgctgtttttcacttcatattttaacagtcttcttgatcctctttcttattctcctggactcacttacatgagaataatcttgaaagaacttactgataggttaacaatcatggacttcggtaargcaaatctattgaccgtttccatttcaacagtggggtcattaagaagatactatagacataacaatgcttagattaagtactataattcctgtttcagggaaaagacataaatatgttctaacttaaaattaaaatttattttaattttgcacttaattggtttggcccagcaattaatttagtactcttctttgttctttgtcataacatttttgtttaagacaaagcaaaacttctaaatcagagtacagtaagtataaatattttagttrgagtcagtatctaaaaatgcctattct

SEQ ID NO: 21191 - DNA, 598 bp, Bovine  MMBT02202
  misc_feature (1)..(4): n is a, c, g, or t
nnnnttgtctctttgcatcaggtggccaaaatcttggagcttaagcttcagcatcagtctttccaatgaatattcaggattgatttcctttaggatggactggtttgatatccttgctgtctaaggaactctcaagagtcttctccagcatcacaattcaaaagcatcaattctttggcactcagccttctttatggtttaactcttacatctgtacatgactactggaaaaaaccatagctttcactatagggaactttgttggcaaagtgatgagatccattaccttttaaccaactytccataacttaaagctaactttgatcacaccttgtcatccacatttggcttcttcctatacatggttctccagtgaaaacgaaatttatttgttcctctctgttctcacacaaaattccaaatgctcaccaactctatttccatttgaaatgacacccaaagtaattgttctttgcacaatgtttaagatcaggaaagccagcttccacttataatagaattctctaaacttctgagcacaggatgtcaactctgtctctagatagtaatcaccgagagctctgtggtcctcattcct

SEQ ID NO: 21192 - DNA, 598 bp, Bovine  MMBT01950
  misc_feature (1)..(64): n is a, c, g, or t
nnnnnnnnnnnnnnnnnnnnnnnnnnnnnnnnnnnnnnnnnnnnnnnnnnnnnnnnnnnnnnnncatctgctgggcatcctgagggcacacggggccactggagctggtgctgcaaagctagggggagtgcggggctgtgtggcatgtctgccttctttctagcgcagaaatgctgattccagccctgggcagactggccacgggcaaaaccagctacaggacatttggcagcatggtgttggagtgtgttgaaacattttctgtagagaagtgaatgttcgtagtcctctgggtgtggmcacrgggactctgtgtccttcagggcctagaatcccagcagtcagcgtcctgcggcccactgccccccagaccagcagctggggcagctgggacccagagcttgctgttggcagctccactctggggcttggttttaagggacagtgtgctctgaagaaacgggaaaaagtgggatgtggtttccgacgggatgacttgatgtcccccttgtcacaaataataactttacrtcagacttggctacacgtgtaaaacacaccgcatagactgtatttatttcagtttgagtttctaaaa

SEQ ID NO: 21193 - DNA, 598 bp, Bovine  MMBT22061
  misc_feature (1)..(152): n is a, c, g, or t
nnnnnnnnnnnnnnnnnnnnnnnnnnnnnnnnnnnnnnnnnnnnnnnnnnnnnnnnnnnnnnnnnnnnnnnnnnnnnnnnnnnnnnnnnnnnnnnnnnnnnnnnnnnnnnnnnnnnnnnnnnnnnnnnnnnnnnnnnnnnnnnnnnnnnnnnagggtggcctgtgtgatgagtagggtctccgggtaaatctctgaacctctacaagcctcaggctcctgctgtgttcaaaccaacccagggctgttttgaagtggattcaatgctcaaacacccccgaacacagggaaacactatatayggacatcaccatgctatcacttctccccagcayrtagaaacccagatttccatgcacccatccagagaactgtgctccctggcacctcatttggctatgcaactcattatactaattattctttaaatctkcggatgttccttgaaaagctgctttatttataaacaagttgcctgacagcaaaccttggagcagaagtattagcttcaaaagccgccaattcaaacatcagcaattcagaggaaaaaccataaatggcctagcacctaatcccagtgctgaataawaaatccatcat

SEQ ID NO: 21194 - DNA, 598 bp, Bovine  MMBT17179
  misc_feature (1)..(9): n is a, c, g, or t
nnnnnnnnnaaaaaaaaaaaagtcctggtttcaatgtggattggaattatcaatagaaacaaaactgcaaagagggaactcaagagatggaattatatcttatgctctgtctccataggaaactaagctaaaagactataattcctggaatcttgaaattctgggtgtaccaattgcactgaaatcgaaatgggtatgataattaaatgacagttgggtttgatcaattagatttcaatttgggggttgagaaaagaggttttgggggacccacgtataatatacaaaattaattctggycaatagtttgccctttcttccattatctgctactttataagcaaactttgttttaggcttctgctatctacctgaccaaggccacagtctagtgagacaagcccaggaaagacgagggggcacaaatagacgctgagacaagaatgctggctgcattccttggcctgagcccttgtggagggtgggctgagctgaaacacgcactagatcgggcccacacacagagagctattmctttgcaaacctgaagggaactaaaatccactgcttttctctttttttgcttttgaatttatcc

SEQ ID NO: 21195 - DNA, 600 bp, Bovine  MMBT14326
gagtgttccatttccccttggtttccgagaaggtttgaggctcctactaatatgctgaccgtctcaatcaatacatttggctcgaggcatttgtgtagtcaattctccatgcctactcttcagcatcctctctatataaaatggctggctgtgttcagttagaaccttcctttcctcatcaatatatcaacgttatacaacagcttgcaaggcatggttagatgaaactattatgttaatcctagtggcttgagatttcacaaataattcccaaatcctataacatttaaaatgtctctytatttctatagagctactacaggaaaataattttttaggaaaactttgtctgggctataaacgtcttcttagacaagcaaaatctgtcattatagtcaagattgattgacctgtctatgtatcaaatagactagtgtaggtaaaggtttataaattaatgactagcatggattttcccctcacgtctacctctttatttcagtgtctgaaatcttgactggctttgactgtgtggatcataacaaactgtgggaaattcttaaagagatgggaataccagaccaccttacctgcctcctg

SEQ ID NO: 21196 - DNA, 600 bp, Bovine  MMBT19308
aaccctaggggtctgtgctctgtctccggagctggtctcggtaagtctccggtcctttgaccacctgcagccagttctagtggatcgatggtgtcctggccctggacagaggggttcacaaggaaggagaggagtgtaaaactgtgtcctcaggcgctgggcagctaggcagtcagctccgacccttgtgttgaaggagctcagggcaaaaaagagctgggggcagctgtgtttaaaagaacaacaacatttgagcagagggagtctgtgaaggatgagtgggatcaaatatttgggtaycaaagagggaaggagatgtttccagatgaggcaagacaaagttccttcctcagacagggcctggtataggaaggatgggcaataaggatccagggaaagaggagccagactgatcgggaacactgtttactttccagaggggtctccccacccagaccaccaggacccccatttccagaagaatggcccagatatctcaagtgcaggaactcttccacgaggcagcccagcaggtaggcctgggtgggttggggggtctgtgagaaaaggtcaccaggcaagatgctgaatggaaatctt

SEQ ID NO: 21197 - DNA, 600 bp, Bovine  MMBT17700
cagcacgaattgtttttctttgtctttgagagcacacttcagaggcctgccctctctggaaaatgacttgatctgtaaatgtcaatgattcaaaaatatttctaagggggattctagccacatacaagtcagaggctcagttagaatttcctgatacttgaggcaaacactcctgtccagtcccacattaggactttccctctgaccttatatttcaaggagggcttcccaatggtgagccgaaacctcctgcggagtcctcatttgcccctcagtcagtataaaggacactctgattakagcctgcaaatggcaaacattttagtagctacgtttacatttattcttactattgttcatagaacggattcaaacgtgattccatttacagtcagctcataaatagttggttctaagtttagccttaatccctttgggaatgagttccttttatggttcacaatgtgacttcctagtttgaaaaagtaaaaaaaaaataagcaaatcctctaacacttagaggaaagcacattctatttcatgagctttcttaaaaattctgggggcgtgcttaagctacttgcttgccagcgtgaagcc

SEQ ID NO: 21198 - DNA, 600 bp, Bovine  MMBT11795
gatcccagcgagcttaagtccatggggtcgcaagagttggacatgacttagcggctgaacaataacaacattcacccctcacattcaactgagcagtacaaaacaactcaagattttctcatatattatgcagttctatacatatctatccagtcctggcatataataacaagttaaagcacttactatggattagtcattgttgtacgcagttatacacaacacatttaattgtcacaagcaacctgtgaagtaggaaatattaggaccacttarcagagaaaacagagayacaagatrtttctagtaaatggaagaagtaggagttgagtctggrgtctgggtctagagtccactcttgtaagccactgtgctccactactttaacatacgggtctctgtacccagcatgtccttcaccctcaactcccttctggactcacacatctttccagaacaracctaaacrtctccttccttaactgtaaagcctttcctcagcagaatgttcaccctctaccatcctcccccatgctgtacaytattccaccatgtggcagggggtctgttgaccggggtctctcctcaccaggctggtga

SEQ ID NO: 21199 - DNA, 600 bp, Bovine  MMBT18867
atataataacaagttaaagcacttactatggattagtcattgttgtacgcagttatacacaacacatttaattgtcacaagcaacctgtgaagtaggaaatattaggaccacttarcagagaaaacagagayacaagatrtttctagtaaatggaagaagtaggagttgagtctggrgtctgggtctagagtccactcttgtaagccactgtgctccactactttaacatacgggtctctgtacccagcatgtccttcaccctcaactcccttctggactcacacatctttccagaacaracctaaacrtctccttccttaactgtaaagcctttcctcagcagaatgttcaccctctaccatcctcccccatgctgtacaytattccaccatgtggcagggggtctgttgaccggggtctctcctcaccaggctggtgaggtcctggaggaccggagctacctcattcaccattacccctctcagtcacaatgcctgccacagcaagcattcagtatacatttactgaactgaacgaatttcaataaaggtaaacgcctatttttattcaaaaccatttcaagttgtccacacagcttg

SEQ ID NO: 21200 - DNA, 513 bp, Bovine  MMBT20141
  misc_feature (1)..(66): n is a, c, g, or t
nnnnnnnnnnnnnnnnnnnnnnnnnnnnnnnnnnnnnnnnnnnnnnnnnnnnnnnnnnnnnnnnnngaaggcgctggccaaggcctcagcctgtctctgaaagcctcgcgagaaggtaaacacaaaagggccgccaaagccaggaagatggaggtggggttcaaggccagaggccagcccaagtcgacccactcccccttcgcctcggaagtgagcagttactcctacagtaagtagtgggccgcgccgcctcagggctgttcttcctccctttccttcctttcttcctcttttggcctygaaagctccatggcctctggtgatggtctctttttccgctttggcgccggtaccaggccggaaacggaggtggttgtgatgaatgggcactgttgtttgggcggccacctgtgattggtgggtactcgtgattggcgggcgggtgggagcggaagtccgccagccctcccgtacccgccttaccgttggtccgcgctaaggccatcggtggga

SEQ ID NO: 21201 - DNA, 600 bp, Bovine  MMBT13592
atgccatagaggacaaagggacctttttcatgtttacacactagcagtccaccagaatctccctgaaacaccaaagaaaacgtgttctaaaattgctttaatcagaactcctggctttcaattttggaacatgaataattaatttattaaaaacatatttctttaattttttaaaaagatttattccttgtcatttggtataccttagaacacttagacataaataaatgaaatggcaaaaggaaggaaagaggagacactacagctggtattccagaaatacaaaggattataagagaycactatgaacacttataaaccaaaaattgggyaatttataagaaataaattcccagaaacatgcaacctactaacaacaaagtaagaggaaaaagaaaatcacaatagactaatatgagaaaggagaatgaatcaataatgaagaatatcataaaaaagaaaagtccaggaccagaaggctttactagtgaatttcattaaacatttaaataaagaatccttgtcaaattcctcacaaaaactaaagaggggggaatactccaaaaatcattttatgaagtcagcattatcctcatacca

SEQ ID NO: 21202 - DNA, 600 bp, Bovine  MMBT21582
tttacacactagcagtccaccagaatctccctgaaacaccaaagaaaacgtgttctaaaattgctttaatcagaactcctggctttcaattttggaacatgaataattaatttattaaaaacatatttctttaattttttaaaaagatttattccttgtcatttggtataccttagaacacttagacataaataaatgaaatggcaaaaggaaggaaagaggagacactacagctggtattccagaaatacaaaggattataagagaycactatgaacacttataaaccaaaaattgggyaatttataagaaataaattcccagaaacatgcaacctactaacaacaaagtaagaggaaaaagaaaatcacaatagactaatatgagaaaggagaatgaatcaataatgaagaatatcataaaaaagaaaagtccaggaccagaaggctttactagtgaatttcattaaacatttaaataaagaatccttgtcaaattcctcacaaaaactaaagaggggggaatactccaaaaatcattttatgaagtcagcattatcctcataccaaagctagataagaacactacaggaaaagataa

SEQ ID NO: 21203 - DNA, 600 bp, Bovine  MMBT10499
ccaggaccagaaggctttactagtgaatttcattaaacatttaaataaagaatccttgtcaaattcctcacaaaaactaaagaggggggaatactccaaaaatcattttatgaagtcagcattatcctcataccaaagctagataagaacactacaggaaaagataattacaggccaatatccccaatgaatatagatgtaaaaatccccagcaaaatactaacrtactgaattctgcagtatattaaatatactatcaatcaccataatcaaatgggatttattccagrgatgtaagartttttcaatatatgcaaatcaacaaatgtgaaagttaaaagttgtgtcgtctcaatagtacaaacaaaacatttgaaaaatgcaacattctttcacgattaaaaactctcaagaacttggatataaagaaaacataactcaacataataaaagtaatatataacaaaccccacacttaacatcctactcaacagtgaaaggttgaaagctgttcctctaaaagcaggaacaaaagtactcatcctcaccatgcctattcaatayagtctgaaaatcctagtcagagcaatctggcaagaa

SEQ ID NO: 21204 - DNA, 600 bp, Bovine  MMBT14022
aaacctctcccagtatttaccgggaggactccaaggatcatccttctagcctccttcaaatgccattttcctaggaacctctgacctccttcgacgctagaagcagagacgaacctcccacccgtggggcctcttccacaggactgggaatccctgtagcctcgctcgtgtgcggtggaggagcctggraaaaagtggcaaatcaataaatgggttttttagtcagtgaagtccatcaagtgatggacagagcaacggaggtccagagagaagaggcaactggtccaaagttattcaggktgtcggtgttgagactagaacccggggtctagtcacgatataatcagagcaggttaatagatttgtttgagtttggtccctgagtgggtaaaatcccctggaggagggcatggcaacccactccagtattcttgcctggagaatcccatggacagaggagccaggcgggatacagtgcgtggggtcgcaaagtcggacacgactgagcgaccaaaccacaggggcatgtgcggtaacgacagcggacatgtatggaaaggtcactgtgcgcaggtgccaagccctccggacacatgacga

SEQ ID NO: 21205 - DNA, 600 bp, Bovine  MMBT11291
cacagacacaagcgctttgtaaattatgtaaatttctatttatctatataattggcaataactgggaattgtaacgcctgacagttcgcaatctctttcagctgcgctctagtggctacgctgagattactgagcagctgaagaagacggtgtttttcaaccgcagggatgggggagaggccgccccatcccctctcccttcccctgccaaggtgctaatgcaatggtggatgctggggtgttagccttggccaaatgctaaattctcaatgagtagtataaggtacgaatgtgaatatycatcatacggaaatggaaaggactgatgtgccagcgagatggtatacagtttcgagaagcgattatttattgtgaaactggtctctacatcaactcctttcggtggatgtgttcgcagcagaatctctgtacatagagatgttaaattctgttctgaatccyrgcttgtgttccttagggcttgaattatgtttttgttaaacgcctaagcaccgtttggctctgtggcaggatggtatctcggaaacgcattcattgtgctaacactcagaaaatactgtcaaatgcaaaataaaaaaa

SEQ ID NO: 21206 - DNA, 600 bp, Bovine  MMBT21675
cttaacccctgcttcctccacttcctcggctgtgaaatggggtcaccacttcctagtcagcatcacaggactttacaaagagaaaattctgatgacaagcagttttgcaacaggaagagctaaagcttcaacgctcaattgtaccagttcccacgagctgaccgtaggctctgctggcctctccctgcctcagtttcctcattgaaaatcaggataataataggactcatctcaaagctgctttgaggattaaatgagataatattgtacttgaagtacagtatctaatagccttagtamatgttatttgtttcccctgatctgcagctcattttaccatttagtatgtgtaccagagcactggaatagataagagaatcctacaatgaaagagaaaaactctctcactttacagacaagaaaaaaaagagagagagaaagatgcagtgagattgggtaacttgcccagggcttctgattcattagtgagagtgaagtttagggcttctaattgttgggtcaagcaagcctccgttttcactcctttgaaggttgtgctggtatttctatccccagataaccctttcgaagtctgatatt

SEQ ID NO: 21207 - DNA, 600 bp, Bovine  MMBT08930
aaatccagattctgcttcttctaaattgtgtgcattgggcaagagacttctctcagagggaatgtctaaaccagtaaaatggaagcgtctggcacaagtaggtgcagaaaagatgttctttctgtttcttttctcacagatgtttgaatatgtactgaagaactactttgaggggggaaaggcccatgatctcctctgtttgtatgttaatagtgataggttttgccagactcagaaaacaagcaggaaaatgggtcctgagggtagctaccgaggcactggagtagtgggattacagcrattacaacaaacacctcatccacttggtgtttccctctagttgtttgtgtccttttaaaatcactcttacatgtgaactttgaacacatcatcccaatgactccttctacatttccattcttttgcctacatttaagatcaaactgtaagagtagcttttcctagtgaatgaaatggataatggggaatatattgtgacactgtacattgtctaactagaaactgtcattcagaacaaagtcagaaagagaaaaacaaatatatattaatgtgtatatgtagaatctagaaaaatgatat

SEQ ID NO: 21208 - DNA, 598 bp, Bovine  MMBT21772
  misc_feature (1)..(45): n is a, c, g, or t
nnnnnnnnnnnnnnnnnnnnnnnnnnnnnnnnnnnnnnnnnnnnncataacagaagactctacacatggacatcaccagatggccaatactgaaatcaatagataagaaggtgtcaaaaataaatgggcactgattttactttatgaagcttggaaaatagcactcttttaggagaggtaataatgagcagtttgctccccttttctcaatgattccatcctattctgaaccaccagctctggtctatgttgctaagcctaggaaatcttcacatgtttgtagtctgctcttttccaaaytccaaaagaacaacttaataatgcagctgagaccaaatcatcaattagcaattcatcacaggatatctagttcacaggaccttagatagaagcccatctcttagtgtaggagacaytaacagttacatctgcaggcgtagcctcctagtacatagcctggaaagaaattcaattaaatcaacattctgagctctggctgtaacatttatgttactgctgtacatctggtgtccattcaagagctsaaacaraaaaggaagtcacagctgacattattggtattggatcaagcaaatag

SEQ ID NO: 21209 - DNA, 600 bp, Bovine  MMBT18335
actcaatgaacatgaatctgagcaaacttccagagaggcagtaaagggcaggggagcctggggtctcaagagttggacatgacttagcgattgaacaacaaccagcctggagatgaagaatgaggagatgtgatgaccatggtaagaatctcaagggagtgacaggtttgcttctgtttttcagaagaaataagtgaaagcaatgtagaggatgaattattgtacagagtagagactggaagcaaggtgatgttttttggaggtggaggtattattacaatccagcaaacctgagaggcrcctgaatgaaagctctgacagtgacagatggaaagagagtgaagcacccaaagggggtgtaattgacaaaacctgatgactgttgtgaaaaggagatggaggacaatttttttwwatttgttttttgctgactttctagatttaagattttttaacttagatgactgaagagatgtcaattctatgactgagatagtaagttaataggatttataggtttgggggaacatgaaagaaatacctgcttatttattgggttggttttttgttttgtttttagtcatgtccgactcttgcaac

SEQ ID NO: 21210 - DNA, 598 bp, Bovine  MMBT15415
  misc_feature (1)..(85): n is a, c, g, or t
nnnnnnnnnnnnnnnnnnnnnnnnnnnnnnnnnnnnnnnnnnnnnnnnnnnnnnnnnnnnnnnnnnnnnnnnnnnnnnnnnnnnnaccccgcctcccctgccagagcagagggagtggaaagcagctgaaaaagaagctttagagaagatccagggggctttgctgatggttcagattctctaatctgcctgccaatgtaggagacacggggttcaatccctgatccaggaagatcccacatgctgtggaacaacttagcccatccaccacaactatcgagcctgggagatgcaactacsgaagcccaccccccttaagcccgcgctccacaagagragtccccacagcgagaagcctgcccaccgcagctagagagtgccccactcaccgcaacagagaaaagccccgcacagcagcaaagagccagcacggccacaaataaatacatttttttttttttaaagaagtaaaagtaaaaagaagtgctggaatttcaggatagtaattaacaaagaaaaaaaaataagatccagagttgcatatgtaatatgagaatgtccaagtttcaaacgaaaaccactcactttgccaaggacc

SEQ ID NO: 21211 - DNA, 600 bp, Bovine  MMBT10914
agttccattgggagaggaatctctaatggtgagatttaatatattgtggcacctaaaaggggggatgtgtagaaatactggggtgtcttctctgtgccttaaatctcaacattccctacactacattagtctatgataattataactttttagggtgtctaactaatggagattttgttgttgtagttcagagttcagaggtaataatccttttacacagtttatatgcattatttccataatgaagtagttttaagaataaaatttwaaaaaaaatcaaaatcaggtcaagaaaacacrgaaaggttgacatagctgctacagttaagtatcacgtttgtctctgtgcttcctagcagccaaggggaaaaatattaaatgatttttattgtatactgaacacatattgtgtgccaggaactttgatagctgtattgactttatatctatcttcactacagccatggaaggtaggtgttataatcctcatcttgcggggaaagttcctgaagttggaacattatcttgccaagtgtcacaaaactaaatccttaagtggagcaaagattcaaatccaaggactctctgacttcatagtct

SEQ ID NO: 21212 - DNA, 600 bp, Bovine  MMBT18792
tcctaacacaaggcacattaatgagcagggcaaataggtagggtggagaggaaaagcacgaaagctgtgaatctagagcagggagttaattccagataaataaccaggacagttcttgctttcttttaggaacgacccaggcccatacttcccctggagagaacacattggaagagcagctgtggccagaggtaagggctttgtcttcatgggagaggtagtgacttcccttctgaagggtgagtcctagtcttgatacaagttgacaggcccttccctgaggccttgggggtatagackaagtgagctgcttcccctgggacaggcaggttacctggcagagtggaggcagcataactgtagctcctggaatttggggctcaaaatctcttcagactgagcaggtagttcccagaagtgcccagaaagacttataaacagcctggttatctctgtgaaccttgaagcagatgctgtgagttatccgaagtcatttgggtgaggttttcccagaacatctacaagataagagttgagagtaaatgctttatctcttactgaaatcagtaattcatgagaaattaacttgtgtctcctggt

SEQ ID NO: 21213 - DNA, 598 bp, Bovine  MMBT17386
  misc_feature (1)..(147): n is a, c, g, or t
nnnnnnnnnnnnnnnnnnnnnnnnnnnnnnnnnnnnnnnnnnnnnnnnnnnnnnnnnnnnnnnnnnnnnnnnnnnnnnnnnnnnnnnnnnnnnnnnnnnnnnnnnnnnnnnnnnnnnnnnnnnnnnnnnnnnnnnnnnnnnnnnnnnatgccacattgctccactttctagcatttatgcatgcttttcctatttctatattttactgatggaaatttggaaacaggttagcattgtgtacaaatgtagccatcttatccagaagtgtattgcatcaagtacaaaagctaaacatttttmttgcctctagaacatgattatgggctcgttctctgaactgagacattctttctttcatccaggctaagagctcataccttaagtagtctaaagtatgtgcatttaccaaattatcaggcccaggagaagctagaaggtagaggaggttgggtccttcaaaatgcccccaggttgagcttttctgttcaccccacayggacccattcaaagaccactgtttgcaaggctctttttagggtcatggttttcatggcaaagcctgtgggtccctggggagtaagaaggagggtgagtgtga

SEQ ID NO: 21214 - DNA, 600 bp, Bovine  MMBT00195
caagtctcgcttagatgaggccatgacttctaccacaccctcttggtctggacctctgtttccccacacaccccagaaggacctcagaagatggccctcaagtccaggaaagcacatctgaaacggactgcccacagccaatacccagcagactgcaccctggcccagcctccagcctacatatgacccataaattctcccagctgaacaaacacattttatggggcctggggacgcttcctggcctcactgttcccaccttcccgtgtcctgctctggcctggccagctccccaacacygcacctctctgggacccccaagccccatccttaagtctccctccacctcctacccgtctcccccagctcccgccacaaggagggtggaaagtttcttctcttatcagccgttttactgccccctcctccctggttacacagtaattgggaacagaactcctggcaagaacgggttgatcctatcagtttgcagtcaacagtttactagacagagggaaagggtcccctcagtgaggacccaggaggcaggtaagaggtgtgcaaacaagagggggacagaaaggacccccaaaggaaggg

SEQ ID NO: 21215 - DNA, 600 bp, Bovine  MMBT19140
cagtcaagttttatatcaattgtcatggtgaattattaaatcactacctttcatcctcaaagtctcctgatttgatgacaaattgtgtggtcatcttactcaacatatgctactgacatccatttggtcaggacactatgttccttctaatcagtcacagtcctcaaatggcagtatgattctttactatctgagccaccagtgaagccccaaagccagctgagtgaaaagaaggatgggagagctcctaaaaatgagtttactttgtgcaagccataaaattaaagacttatacttgaygaactacttaaaaaaaatctcacttgagagagtgtcttctttaggctagaagaaccaacatcacgtgtactttgattatctagttcagaatctgctcctgaaaagctaaacagattaatatttcattaaagcatttatcaatattctgaatacagaataaaacagaaaacaragttaactgaattaaccaatgtttaaaatttaataaatttcaaactagatgaatacrtaacttacatatgtgactcttctttcatcagctgcaaagagagagaagggaagaaaaagcttttaaagtgt

SEQ ID NO: 21216 - DNA, 600 bp, Bovine  MMBT01197
gtttgtacttctctaataattagtgatgtgcagcatcttttaatgtgcctaatggccatctgtgttatttctttggagaaatgtctatgtaggtctcctgtccattttttgattgagttgttttgtttctcgttattgagttgtatgagctgtttaacaactgactcttgtgaaacatcacaagtcagctttataatcacagcttgagtttccagtaagcaagatgacctggagccaaatatagggaaaagatgtgcctcttgctttctgcattcatctttttgtggatctctcaatatrmctagaagaagctgccatcaacccttcagctgaggctttttaagatctcatgtaggaacccaccatactaaaccacacgcctagtcatccaggattctgatgacaggttttgaaagcagagaccagtgtggttcccacatatcaaagtatgcaacctttgtaaaacatcatggaataaacatataaattatttacactacagacatatctctttggattatcaagatttcacacatctgtttctcaaccactcctcagttgctgttgttggatgtgttcttaggttctgaatatagcttt

SEQ ID NO: 21217 - DNA, 600 bp, Bovine  MMBT18908
tgctttttgtattctgtctttagatttgtagcatctttttctttttgctgtaaaccaatcagtagatatttaagggaatacatgttagataaaatatctcctttgaaattcatacttgagcaaatagaatgctgccttatttaataggttccttgaatcttgacagcagagaaaagcagaacttgattatgacttgtagggactggtttagtttcaacacaataaataatcacatagcagaaagtggtgaaaactttatctcatgtgaacatagtatcgggaactacatttccaggcaayagctcccagtaatgccttgtattaaatccattcttgttttctttcaggtccattctttccaaggatggggttttatatgttaagctcagagcaggtcagctctcctacaaagaagatccaatggggtggcaaagtttattggcccagactgtagctaacaggaactctgaagctcgagctttcaaggtaatgtgattggtaaaaactgaaggatattctcatcagaaggaaaaagaaaattgtaactaagtgtgatgctggatgttagctagacttgtggttgtcatttgtcagtatata

SEQ ID NO: 21218 - DNA, 600 bp, Bovine  MMBT05966
agtggttaagactccgagcttccactgcagggggtgcagtttgatccctggtcagaactaaggttctgtatgccatgtgacacagccaaaaaaaagtttaaaaaaaaggaaaaggaatttgaagtccataaatacatcawaacatggcttgggatttgagtgtctagctcataatagttgctcagaaatagttgttgaatgtcaaatatattcattatcctatggctcttgagcctaacaagcgcatctgataaaggatgaggaagtcatcataaaattactaccctttccattagacgstggcatagataaatctgatactgacagagaagttcatcracagtgacagagagggaaacagtcctcagaatagaatgcttcatggctgcaaaatcacttcaagttgtagccacctaagatctgaaatgaacagtgaataatcatcccttggctgaaagactgacaatacaagctaacatctcctggctgtaaattagaaatgtagattagttcatggaaagttacacatattatgatttctaaaacttctctggaataataaacatcactccctttggggcttatgttactctgatttta

SEQ ID NO: 21219 - DNA, 600 bp, Bovine  MMBT08433
cagactttttttaaatggaaaatacatatgtaaattttttaacattacattcagttctaatcactttctctccctactgtggcttccttgaatcagaaatgctttcagattaaattrattttacatgtttccataaataacwgtaataatcatcaytcaccattcaagcataccaaagtatatttcaatattcatatcaattcaccaaattgaaagaaatatcaatttaactcwaaatcataaggagaaatgtggcagttttcaaaagaagttactcaaaatatttagattatttaggamaaaaaggccttcatsagttagaattatttgcataattaatttctatttccatttcaccttaattccatttctcctaatatagatgtgccttgagtgaatatagactaggcaactttctgttaattgtattaatatctttcatttaaaaataatatattgtgatttttttcctatgattaaaatgtaaatttattaaatcttaccttttaaacttttacacatatttatgaaaagtaaattactctgaagataattttggagagtattttctttactttggggataagacagtgtatattt

SEQ ID NO: 21220 - DNA, 598 bp, Bovine  MMBT21312
  misc_feature (1)..(59): n is a, c, g, or t
nnnnnnnnnnnnnnnnnnnnnnnnnnnnnnnnnnnnnnnnnnnnnnnnnnnnnnnnnnntaatattagtaaattacctgcaatttacttgaacacataaccaacgatttgaaataagttgataattaatattttaagttgtactttgataaataccctcccaatgttttgatcttttctgacaattcctaatgctcttcagctgttgtaagtatagaatatatgatgcaattacactgagtttatgtttcttgagttaataaattggtctcaattgctaatggattctttatactgattraatttgcatgttgaattggtttaaattgcctgaccatatttcaaggttaaatacaaawgtatgtggagctattaattttgtgttgctgttgttggtttgaatgatttaggtacttgaagctagagcaggaattaaattaatttgtgccttcaccttagcccagcctttctctttgtataatgtatctgtgacatttgtcttcattccgagagaaratgaggaaaactcatcagaacaaatgaccagttctcattaaactgatgattttgagggggatttcctttgattccatgtaatg

SEQ ID NO: 21221 - DNA, 600 bp, Bovine  MMBT21641
gtttaagattttttttttttaattcattttctcaccccaacccctcacctcaagccaacatcatacctctgtgaggtagctagttgctggcatgggagtggtctatttccaactcagtcaaatagaagctgaactcacaaacatggcaccattttcacagagtctaacatgatttgaccccaaagatgatgagggctggtatcagtgccttacagatttattttggaaaatagtttccttgactactgattcaataagattttctattttargatttatttttaattgraggataattgsttaacaatattgtattggtttctgctgtataacaatgtaaatcagctataagtttacataaatcccctccctcttgrgcttcccttccactgcaaaaggattttcagttaaagagcaatttagtaaatcagaaatatcatgtaaatataaaayggtaaacttaaacctgcttaaaaaaaaatgaatggatgtttaaacatctaggaagttaaggtacttttaagttttctcataagtatactatcttctaataggaaagtttacacaaactcacttatacatacgtgcatgactactaat

SEQ ID NO: 21222 - DNA, 600 bp, Bovine  MMBT18797
catctcctctcttgctcatttatccagcaagaaccacttcagtgtatcctcccaacacacacacacacacacacacacacacacacacacacactgtggttcttgggtatgctaggtatggaaggaccgaaatttctaaccctttcaagttgggtgacacaccccacccctcctccaggaagcctcccctgctgcagcctggtcctctctgcacatctcagcggtgctcaggcgccctagttaggtggcgtatgatcatgtacattcctgtcactattgcagacccctgtttcatctgaygtcacaagcaagtcttctagcttcttgagcacaaaaaggaagctgtaaagtcaggaagcttctgtgttagctgctgggttcacctctggcatgatccacttcagcaaactctcccttgagtatatctggttggcaggacttaaaatcacaaggatgtgacttgaaggatgtgaacctggttgccagggagtctgggaattgtagttcttctctttccaacctgtgcactctctgtctaactcaaggcagacaaacacttggtcaatcctcagtgtctatataatcacagaaagaagacag

SEQ ID NO: 21223 - DNA, 600 bp, Bovine  MMBT10732
tcccagaggtatagtttgataaagacctgtgaccttcacatgtgaagaatcaaaaacaaagggtgagtgggctatgctctgatcttggtgacacgatagaggttgaactctccattagccaaaccacggattaacaacccctgctgcaagttagcgttagcaaacctcatctggcttctagaagggaatctccttttgctatggactgggtcctgggaactaagtcagctctgcaggaatataaaacatagaggcaactcccttgtctctgtatttgaaatatttgtagagatggagcayttaaaatatgaatataaggagcaagatgttgtggaatacataaataggtctggtggcacagctgaaaaaatagtggctggatcttgtggtcacgctgatgaagcttgttgcttaaaggatcctagtgccaaaggctcggtaaagtcagtaaggtaagacactagtctgtttcacagggtggtcttgtgaaatatcaccccatccctggcaggagttacccatcaacaggtgcctttctttcattttctactggactgttgaaccaaggcttggttcacaaatctgtggattctctttgat

SEQ ID NO: 21224 - DNA, 600 bp, Bovine  MMBT11112
tccatggatacaagagtcagacatgacttagcaactaaatcaccatcatttccacatatgtacaatgagaatctaagaagagacaaaaaagtgaaaggggcataaaggaataatgactagaaacttcccagttttgatgaaaaaaattaatctgcagttctaagaagttcaataaaagcaagtaggacaaagttaaagagatccacacctcgacagaccatagtcacactgcccaaagacaagacagaaagagaaccttaaaaataataagagataggtgactcatcaggttccagtgaycctcaagaagattagcagcttatcaaaaagctagtatctagaatgcaattgaagagataataaaaatgctgaaagaagactaagattatcaacaaaaatttttatattcagcaaaactatcctttgaaaaacaaaggataaattaagacatcatcagaattcatcattgggagacctgtccagcaataaagagtaaagggtgatctttgggatgaaactaaagcacgctagactgtaactcaaatccacatgaagaaataaagagcaccagcaaaggtaactatatttataaaaataaaa

SEQ ID NO: 21225 - DNA, 600 bp, Bovine  MMBT19521
gtcagtgaggtggggaaggcatctcccacactcaactctcctggcaatactcagctgtcagggggcagagagcccacagcaccagccctgtgttctgcagcaggcaaggatttaatacctgcarcatttacaatgccagccaatcagcacatccacccagttgtcccaggcaaccagccccatgccagcccccagtcagggcctgaagataccctggtgaaatcacagagaactgcagatggagggcaacctgagaagtcaagttgtccggtggtggtcatctgtggcaaagatcaaatrccctgtgattttccttctcaagaaayaatgcagggaatrgtgcaaactgaagatacagcagccaggtcgttcagtcctacttccgctactgtaggtggacccgaagcagaaaggcagcaagctgtttgcacttcccagacaaggtcctgtggctctccaacaggagaagatggatgttcggggaacaaaccaccctctgccgccacctcagacacccaggccatgacttcggtgattcctcaaccatcccacctccctagcaacggatccatgtttcctccagatccagagaaggtgccg

SEQ ID NO: 21226 - DNA, 600 bp, Bovine  MMBT05268
attcattttccatcaggcataaggtttctcaagagacgtccccctgactctttcctcccatggcttctaaaacaccatgggcccacagcggcccttccccagctccactcccaactgcgtggctctctaaggacccaccagtgttgtgctcctcagcttctgtccccatgtgagtctgagaaatacagttcctagacaagcatcctgggaacctgtgatacgaacctaagctacctcaaaacactctggacattagaacatcactgttcagccctactgaaggtgaaaagggggttggaragggattcactccttagcttttatgtccgtgcrtaattcttattttctttcccacatttatcctagggagaaaatccattacattcggactgagggtaatcatgggcttgaaaagttgtcctgtgatgcagatctagtcattttgctgaggtaaggggctgagcctgaaacagttctggaaaagcaactggagaaactgctctgggtggttctccacgacagcctggactaaaacacccactgtttgttctagaggagtctagtggctgtgactgaagtggggcacccgccttacacctg

SEQ ID NO: 21227 - DNA, 598 bp, Bovine  MMBT10603
  misc_feature (1)..(137): n is a, c, g, or t
nnnnnnnnnnnnnnnnnnnnnnnnnnnnnnnnnnnnnnnnnnnnnnnnnnnnnnnnnnnnnnnnnnnnnnnnnnnnnnnnnnnnnnnnnnnnnnnnnnnnnnnnnnnnnnnnnnnnnnnnnnnnnnnnnnnnnnnnntggtgggcattcagttttggtctgtagtaaaaggtcctacagagtgcctcattcgcaaagcaggaaagcgacaggaagactcatcatcccagagatcatgtaacaatgtacctgcagggctcaatgaacctggcttaataaatgttcactgcttcagtagttyctattaccaaagttgctgtgaagattaaatgatactgtttctattccctttggggcagtggctctgcaggtggccaggactctgcactaagagccaggtctgacagggcttctatcctgatgcgtccactgaccagctgtgtaactgtgcacaaagattcacatctttgagacttagattctcctttgataaactgtggtaataactggggttgcatgaggaataaatattcagtgtctgcacacagcactagctcaactagtctgtcctctcctctcttccctctaccactatttca

SEQ ID NO: 21228 - DNA, 600 bp, Bovine  MMBT14307
gataaacaaccttgcaatattgttagaaaatttctataaaactcaaggcacagagtaggaactcaatagatggtgattattgtcatgattatccctgtgagtagctgtaaggaatgaaaacggctgaggtctaaaattaaaaaattaaagatgagcctaaaggagttgaatctagggaactaaagaaaaaaaaaaaaagggtcaacattggggtcaaaatcaagattcagacccgctggtgagaaacaggagacctgtcagaaacagaagcacagaacagagagaagataagaggccccrccttcagaagatacaaacttgagatcaagtcatgcctcagcccttgcattcttgtacttttccttctggggcagaagtctacccatcagctcagttcccctgtgatctgaggctggcccaatggccagagggagcaggtgtctggaacatagatggaagattctggtgttctttctgggatgttgaagttattgacctattcacactgagcccctactacctaccagtgactctgggtgtagcctgtatgctctatttaccttctctacttcttctctcatccctaagaaatggattggg

SEQ ID NO: 21229 - DNA, 598 bp, Bovine  MMBT20175
  misc_feature (1)..(132): n is a, c, g, or t
nnnnnnnnnnnnnnnnnnnnnnnnnnnnnnnnnnnnnnnnnnnnnnnnnnnnnnnnnnnnnnnnnnnnnnnnnnnnnnnnnnnnnnnnnnnnnnnnnnnnnnnnnnnnnnnnnnnnnnnnnnnnnnnnnnnngaaagaatactgaggctcagaaattcaaaataatttgccccgggttatccaacgccttggtggtgggaccagcatttactctccttcttattagaataatgcaacagtactgccccaaagcccacattcttcagattgcaccaagggctgcctctgtcctctccaaaygccctttggaaaatggcccataagtttccccaaaacaacagttgaagacaaactccagagactcagggttttctggaagggctgtctctcaaaaagcttctgccctgaactggaatcttatttgcatttgtccttccatggtagtttccaattcccaagcagaacacacatttaactgtaaaattcgccttaactaggcagctgtctgctgcagtcaggcacaaggctcaggtgcagctcccagtagggtctcctgaatcagcgtgccagcctccgtaaagcaatgtaagtcacctcc

SEQ ID NO: 21230 - DNA, 598 bp, Bovine  MMBT11372
  misc_feature (1)..(120): n is a, c, g, or t
nnnnnnnnnnnnnnnnnnnnnnnnnnnnnnnnnnnnnnnnnnnnnnnnnnnnnnnnnnnnnnnnnnnnnnnnnnnnnnnnnnnnnnnnnnnnnnnnnnnnnnnnnnnnnnnnnnnnnnnntttcctgcattgcaggcagattttttaccagctgagctaccggcgaagccccacatcctcctcgcagcccttgaatttccacgaaggcatgagtatgtatgtcctgttgtgttaccatacctaacagtatcataataattgcttgtttaaagaattaaaaagtagatgactgagtaagcwwwagctttgaaccatgattgaaaattctatataatttcattagacttttcagttaccatgcaagcagccatagtccttactacaatcataagtaggatatataattcccaaagtactcataaaaagggaagccatgtagatctgaatgggaagatggtataattcttctattacacctagtcccataataaaaaaacaaaacaagcaaaaggtcaatggtggggatggattatatcatcaggaacagtagacgttgcttgaaattcaatgtgaatgggctaataagaaattagctaat

SEQ ID NO: 21231 - DNA, 600 bp, Bovine  MMBT19040
tctcttaggtgcttagcccaatgttttatttcctctccattcccactaaaactccttagctcaggactccattacttctcattctcctgatgacctttgctgaggaaacactagagtgatctttccaaaatgcgaatctaagcatgtcacttcaccacttaaaattctacagtggcttgcattcccctgccaaaccacttagcatggcacaaacgccatttgtgatttgatgcctacttaactttccatcactagatctattactgcccactgtgtaccatgtttagaaatattgaactkcagtcaactttcaatttcccaaggatagattaactacattatgagggaaaatgggtgaaaatgggccaaagacagcttacttgtaaagaaaaagaactaaaagtgtagtggattagagaaatatctacatatcagaatgagtctattatttataattatataggaaccattccatttttacattgtacctattgcaaataaggaacgccccttccacctgggcagtcaaaactggctatgtgcatatgcaatctgttagctgcttttgggtgcaggaacagttttctgcagtttgcctga

SEQ ID NO: 21232 - DNA, 600 bp, Bovine  MMBT16633
ggggggttggcttgtattttaatgtggctcaatctcagtgtctcaggtttgacagtgttttggttttttgttttttctctcctttccactgaagtcattgaaatatattcaccctttcattcacatcagaggtgtaaatggattttctaaaggtttttcagagacaaagtcagtcgctttgtgacttgacttcttcaggtgttgcaaaaagaaagcttagcacaccactaagcacaccatctcaattgcaaggatgctaaaactatgtttgaccttgactctgcaaagagatgggcacartcttttgctagaagtggcccattcaccacctctttgctttatccatctgtataggatttacttgggaaagagaaaagagaaggaatcagatatattcgagagaaaagagcatgtttatttgattttccagcttctaatgatggttacattcacagtttaaactttttagtttacccttttcaccattgatatttgcaaaatccaaacttaaaaatatatatatcagccatgtcacacaaaggcttatatctcgatttgtttcatgtcattaaaaagacatactgagtttgaagctccttt

SEQ ID NO: 21233 - DNA, 600 bp, Bovine  MMBT21383
  misc_feature (1)..(2): n is a, c, g, or t
nnatgtggagatgacttatgtcaagacttgatttcaaaggctggtttgtattcaaagaaaacgttcatagcaagaattcagaattcttgctttagttataaaacaaattacactagttgttgagaaaatggtagatcatttcaaggaacctcatctgtagaattagataaattatttaaggttgcttcctaattaggcctaataacatcaataattaacaattccccaaactcacagcamaagtgctttattcttttcaaagggttttttttttttttttccttattagatactcacatcarttctctgaggtaactgagaaaatgttaccctcatttattgggtgagaaaactgaatattggagatgtctgcagatagtttatcatatgagtacagtcatcacagrttacaatggaattggtgttgtattgtaggctcagtgcctatttcatagtctgtgaaacatcrtaacattttattatagtcaccctgcttctttctgagtccatacagcctataataacttgtgaaatcaagcttacaaatgtaccatgattaaatttaaacaacaacaaaaaaagaaataagaaaacagcaaa

SEQ ID NO: 21234 - DNA, 600 bp, Bovine  MMBT21245
acatagcttgtgttctcaaatcttgtttttatatcagctgttttgacaacagactatatttccctttagaagcaaktctatatcagtttgatgtaaggaattgttaggtgatacagactaacttggcccagtgcattcattcattaaaccacgatatgctgtgaatctatgttctagggacgactatggcactagagatgaaacacggctatagtttggtccctcctatctgagggcctctgctttgggtcttctatctgtatcccctttactaagcatgcgcttggccaataatgctcrgaaatcaggtaattgaatattgcaagagtgttgaatgctcaaggaaaacaatgctatctctgtgtagcaagccggcttgcctgttaatagagagactacgctgagcaaaatccaatgaggtttaaaaatgcagtgtgtcctgggtatgtggcaggaaaaatagctagaaaagtgacttggggtcggataaggaagccataaatcaagcagagatgagattgttcttattaatgttttatttggtcatttattatttcaatggtgaattgaaatctttcatcatattgacccatctagaac

SEQ ID NO: 21235 - DNA, 600 bp, Bovine  MMBT01156
acaatgggtaagacagaactcaggggaatggctcttctggagaaacttttattcacagaagtcctgaatatggtgagactgacttgcctctgccctgctgcaggtgacctggaggaagcttcattgtgaatattctggaaaattagtgccaaagccacttgagtgactgttcattcattctgactccccttagatccatgaatcagcattgcgagccaagagcagaaggcaggtggagaagaggaggctggcggctcagaggcagcgggctcactctgctgatgtggagaaaaataggcrggtcaagcctgcctcctcagagaacccatggatgacagagtatatgagatgctactctgccagagcttgagggaaggaacagttgcttggacaacctctttttaaaagtgtaaatgaaagaaaagaayaagacaaaaactatcaaaagcaattggacacaggtttaagaaaccaactgattatgcaagatttttcttggggaatttccaaaagattgtctcttttgatgaatcctggtcacctacctcagcagtagggtgacaactgaagccatagaaatttggttatttatgaggagaa

SEQ ID NO: 21236 - DNA, 600 bp, Bovine  MMBT17404
cactcacagtttaattagcttagagtttattttgtaaggcagcratggagagaactgttgctcaatttgtctgtatccaggtggcaccgaaaggctttttgtttgtttttaattttcttttaatgtggtgatgattgaaaagaaatgtcagtgatgtttttaatttcataatttacatctgcccatagacagaaattatctgggtggttttttcatctattcctattacactccggggcccacccactttccttacacagacattattggatagaccaaatttcttaactctttaatggwaactgtgaaaacaaagccttcttaaggttaaaatggattagagatactagtttatgggcagttgcaaactccggttttgtaaaaaagcagtgttgatggatgggataatcttgcacacgcatctgctccagatcagaccagcctccatgggtgccaggtgtgtgtcccgagtgagcgggttaacaccctccggggcatctcaggccacttgggatcagatgaggccattcggtactgagtagcagagctgggatatttagccagacagatgtagctcataattcaaaaaagttttccata

SEQ ID NO: 21237 - DNA, 600 bp, Bovine  MMBT17685
tgtgtgcctgtctttctgtctctatggcatcagaggcaaggaagtttgtagttgtgtgcccacctgaacggagactggtcttcctttcacaccctggtggctgtgcgtgttaaggatttattcgtcacattacttatgtgcagcatttaggcgggagggttagggttttctgccccattgaagagagaagttgcaaaaggatggtagcaatccccttcttcattcatattcttcgtgctccgggggaaaatagtacaaagcttcagaatcttccatagacattgatcactcatcaccgtyatctaaaggatgttgagaaaggccgacgggatggaggacattaagctctgtcctgggaaacacattttatgtttctctccttggctgaactggtgtatgtttgggggcatattccttaacctcatarttttcacttcctctgtaagaaactgaatttctaccaagtttagcagttttcaccagttagcaaatgctgtcacacagagcagagttctatcaattagaggctaagaatccacagaatggggagcagcccacagacctactggtgcctaaagattgataatgttaactcctatt

SEQ ID NO: 21238 - DNA, 600 bp, Bovine  MMBT09740
gacaagtgtaaaaacaaacaaatacataattcaaacaataaatgcaaggatttgggctcaagccctacgtctgctgcttaactgcagggagtgaccatgggtcactggttcaaacgctgccctcacctttgccttggctgtgtggccctgggtggtttgagtgagtctctatttctttctgttgttatgagtggagatagcctgtgctcagcactaggacaagtggcgccgggattccagcgccagagtgcttgggctcaaagcccagcctggtcactcggtatccacgcgaacttggcmaagttacttaacctttcaatgcctcagtttttccatctgtggcatggagatgctgtaatgatacctaccgcatcaygctgttgtgaggattaaatgagataatgcctggggacattyagaactgtgcccagcacttaataagagcacagtaagcctcggttgctgtaacttctgaggcttgcttggggattaatggagactgtgaaagtactttgtaaatttccaagctctggacccgcacgcagtatcgattgttctccttctgccttggacctgggccatttgtgtctggcctcgttc

SEQ ID NO: 21239 - DNA, 598 bp, Bovine  MMBT10986
  misc_feature (1)..(102): n is a, c, g, or t
nnnnnnnnnnnnnnnnnnnnnnnnnnnnnnnnnnnnnnnnnnnnnnnnnnnnnnnnnnnnnnnnnnnnnnnnnnnnnnnnnnnnnnnnnnnnnnnnnnnnnnctttggagcagtctctcagtagtctatctagggtgctctatccgggctatagtcctcattttgcccccaaataaaacctgactcataactcacgttgtcctttgttgttttttttaaagctgacagcactgtgctagttctcaggagcttgcttgcacctccatataccaggaacctacactggcatatttggacacsccccaccattgtaaccttaaacaaacacatccagctaatgcaccccaaaactgcaaaacagaaccaaggctaggtctggaacaatgataactgcaatcgtttgcacttgctctgaccttccagactgccttccagccatctcatgggtaaggtgacctgggtttcttacgagtcattgtaagaattatctgcaacgatcattctgaatcacaagatacttccatctggttctgaccggcgactgagatagggggaaagtgtagcgcctccattgattaatacgatcacctctgctctt

SEQ ID NO: 21240 - DNA, 601 bp, Bovine  MMBT22420
  misc_feature (1)..(1): n is a, c, g, or t
naacactagcaggatctgttccttttctcaggaaagcaaacattttcccagaagcctgcctagcaaacctctgcttatgtgttactgtccagaactgtatggcatgtggcctccctgaaggcaagaaaggctttttttttttttaagtgtcttttctatcccagttaataacgatagagataaaggataaaaggattgggagggtgtgttaggttagccagccattgactgttcccaacctgttttaattatgtacatcatcctggcaccagaggtggtgctcagaagacatcatttgatyggccaagccctctgctcatttttgcagttgggagactgaaattaagccccactgaatcacttgatctgagagtgagaaagggagttgggtcctttaaggtcaggaaataacggacagacaagaacactggtattttctatgtattgkctcttttctacagctcattacatgagtttgagtaggctctgggagttggtgatggacagggaaggctggcatgctgcagtccatggggtcgcaaagagtcagatgtgactgaacgacaactcaagatcttggatgaagggaatcttagctgcc

SEQ ID NO: 21241 - DNA, 598 bp, Bovine  MMBT19088
  misc_feature (1)..(114): n is a, c, g, or t
nnnnnnnnnnnnnnnnnnnnnnnnnnnnnnnnnnnnnnnnnnnnnnnnnnnnnnnnnnnnnnnnnnnnnnnnnnnnnnnnnnnnnnnnnnnnnnnnnnnnnnnnnnnnnnnnnnaacccccaaccccacaaatcgcttagagctattggatggagctcgacgcggctgtkatttggggagtgatttagcaccagacttccccaactcggtccgcctgggctcttttatttattatttacgagctcctaatccctccagggcgtgggcagctcccctcatggcgcctacagaccccaaggkacttcatcttcgattcccaggcaagagtgaggggctttccttaaaccatccatccaacacccgtatcaccaacgcaaaatcaactcagctccaagtaatggctggagcgggttactgacacaattgcccaaggctttgtgtgtcagatgggctatgtgtgtgcctatgggagtgtgcttaagtgtacagtgtatgtgactgagtgtacaaaagaatatgtgtgaatgtgcatatgagcctatgtgatcgttaatatctgtgtaatttgtcagtgtgaatgtgtaagttttgtgagggg

SEQ ID NO: 21242 - DNA, 600 bp, Bovine  MMBT01879
gtttaactacttatcatcccagtcctttcatgagggctggatgagtcttctaatgttctgataactggattttccaaaagatcttgaagaatcaaataaagttatttgtattttcattttcctgtacaagagaattctgggatagtcaagtcatgttattgtacacagttggctgaaagaatccagatgatttctggtctcacttgcagagatccgaagaaatcagtttccagacgttagaatttgaaagtgtgtctgagagttactacgtttattccctctgaaacttttattccctcygaaacttttggataagctcaggaaagggcttaaatttaacctggtacaaagcaaaacaaaacaaacataatatcaagagggaaggaaaagaaaccactaagctatgaaaactcttcaaaggcttgcatcatttgttcacagagcactcaaggctatatggcattattcgttcctgactctgcagacaaggaaaatataacaagatgtgttctgaggaagcagcttgttccaaggtaagactgagtttaataaccaacattgttcatggcccaaatgtcaaaagctttgtgttcctcttca

SEQ ID NO: 21243 - DNA, 600 bp, Bovine  MMBT06628
tttttttcatctccttcatttcaaactatggagattcccgccccccccgcaaaaagcactaactcaaatttcccctctctgattataacccttaatcacctcaacttgttaccctcgattccctagacttcttaaatctcaaaagacttcagtgtatggagtcctcttgttttctttccatcagccttgtcttttcattactcttctttttaataaattggtttattgtatcaataatatatttgctgttagtttatagtatagtagatttagcttgatgtattaaaagtaaaaacaacmccatagatgtctatttctaactagtaaaaaaaaaaaaaaaaaagacagctgtgagttacttaaaaaaagaaamctgtcaacatggaatttgttgaataagtacagaactaatatatatatagtcacatttcctaaagccccacacacctcctcacatagaatgtataaactccagctttgagaataagagcaaagcagaaattaaatctatctccctaatttattgcagtgtaacaaactctatcccagcaatactcagggctgtaacaccttcatacttacaactccagtcccaagaaa

SEQ ID NO: 21244 - DNA, 601 bp, Bovine  MMBT21179
  misc_feature (1)..(1): n is a, c, g, or t
ncaatggcaataatattcttaacgttgtttcacatgttttctgctactgcagaatctctagcagaatcacatgatgagagagaattaccatgaaggtggctgcatgaattaataaagttataagcragcagcagcatcacacagtyaggctgctgatgtacaaagcagcaaatgtacaaaggctggtaatgactttttacccttgacacccactcagtcaggttaataagcacatgtgactgaaataccacacaagagtcacaagtcagcrtgaataaaaccacactccttctcctgtcaytgggatattatattctaatagcattttcttttcaataaaacccttacacactttaaacaggatagaattatagagctggaagggtcttcaaagataagctactccaatggttcacaaatatcactgcatgcaagaattttctctagaacttttgaaaaatacagagactggggcaccggctcagacctctaaatgagattctttgggggggtgaggcccagtattacttcaaagttccccagatcaggaccaacattcaggaaacagggatcttctccagacttttaatttttaaggggc

SEQ ID NO: 21245 - DNA, 600 bp, Bovine  MMBT19483
actgaccataaaatgtttgaaatgtttctcttagtgaaaatacgacagttctgtgagtcataaacccaagaactgtaggtcaaatacatcaaatagtatctattgacatgttttatttgtctctcatggtgttttaaaagaactgcgtctatttccaaaatgtcagtttatggagatttcaaaagaaaatctgaatttctaaactgccttaaagagttggaaggtttggaaacactggcmgcatattcctatggccactgtcatttgggtgttttcagaagttctgctcattaggtgggmcctgtacatgtcagtttcttgttgtctccacaatgctgttttcttagacacttcttttgtttatatagactttgtcagttcagttcagtcactcagtcgtgtcckactctttgcgaccccgtgaatcacagcacgccaggcctccttgtccatcaccatctcctgaagtttactcagactcacrtccatcgagtcagtgatgccatccagccatctcatcctctgtcgtccccttctcctcctgcccccaatccctcccagcatcagagtcttttccaatgggtcaactctttgcatgag

SEQ ID NO: 21246 - DNA, 439 bp, Bovine  MMBT20952
gctctttgatgtatattgatcacttttatgaaacacgtgtttgcagttaattgttatagcaatgtattaacttatttggaagttgataacttttcttgggaagaaaaaaggataaatttagatgtaagattagtttaaattgttaatccataatttatccttgagtgtattattttacaattctatgatactttacaaactggaaaaagaaaaaccccaaagctttattatatagataccatctttaagttgtttcattttctgtactttctacattttaccaattttaattgtagccyyattatgatgtgttatggtaaaaccgggcagaatgtaattttgtctgatatttaaaaatgaaaagtatgtaggattttaagcttctaaatatttcaaggacaacattacacatataggagttcatttattcctttttagt

SEQ ID NO: 21247 - DNA, 598 bp, Bovine  MMBT19769
  misc_feature (1)..(66): n is a, c, g, or t
nnnnnnnnnnnnnnnnnnnnnnnnnnnnnnnnnnnnnnnnnnnnnnnnnnnnnnnnnnnnnnnnnnaattggactacatttgatcaaccctcatataacaaacagtatattcattgtatgaatgctgaaaagagaagacagctaaggttttcatgtctaatttctgctgatctacatcatgtagagtcggactgagacacacaggcctacgtagaagcttacattttwaaaaaatgcatctggggcacatttrctgtcatccttctgtctaaataaaataatgccttttttattatgaakaaggcagaacatagttttaaggaacaacttttggtaatctgcaatagcataaaatgctctcatctttcagagtggtacttatataatgagattacatctatttatttttgtatatatgaaagattcatagagcttttggcttttttcacataccttgctttggtgtataaatggcatcctgaagtacagtgatgaatttaaaaaaaatttttttttcaaaaatggcattatgtttatagtatatgcaccagagagagcaaactacttatttttgaaaaactaatattaaaaactcttg

SEQ ID NO: 21248 - DNA, 600 bp, Bovine  MMBT11808
atcaggaggaagcgaggttcccttgatgtctgatagtcattattttgagagtgtttgtttaagggctcctgttgagaatgaggtgaaacaaaaggtggattctttggagagttataaaagcaatgaagaagatctggggaaaggattatctcagtgttttgaagtaaaggagaatagaaatactttagtgttttcagaggtgcatcccagatcttcagaaatacaatatattgagaatgttgtagttcctgataattctgtagaagtttcagaagcacatatactctcccgggggcttgrtacctctacgatggagatttctggtggtcctcttcagactattaaattcaactcaaatgagacatcagaacaactgtattttcaagaagaaagaaaccaagaggcaacttctgtttttgatggggaaaatgttggtgctatgaaaaatgtagcttttcgggcagttattgcctctattgaaccttccaagaaggagagtacagtaaatgaaatccaaactgacatcaacaaatctttaacaaatgacagccaagaaagtgaaccaaaaagtccagatccttccctgttaaattatgatga

SEQ ID NO: 21249 - DNA, 600 bp, Bovine  MMBT09337
gttccttaaatcctgttatttccatggatattcatgaaagatggcctcttcataatccattttcgacagagacatctaaatcagtttagtttccccctgcctccctatctccacttcccagtggagaaatagagttaaaaattctgcaagggtcttaaatcctaaagcctgtcatttttgcataaccttggcttatcaaaatctcttgttgaaacacaactttcttaaataggaaagagactaataacacaggtctcatagtgtagtgattataataaccttcaacatatgtaacatatrtaaagctcccagcagagaatcttacaacagcrttgargttaattccctctggtcaactcttatctcttctcatcttcctctctcttaggaatatttccactaaatgagacccaaatagcccattctgttctccagtcacaaatttagctgagtgtaaattcataatccattcataggaagcattatttaaaattaaaaaaaaaaaaaaaaactaagatggccattatgagaaagacagactcagaactggcttgggtatgagccctgacctggattttaatcaacacagccagtgttttc

SEQ ID NO: 21250 - DNA, 598 bp, Bovine  MMBT19070
  misc_feature (1)..(80): n is a, c, g, or t
nnnnnnnnnnnnnnnnnnnnnnnnnnnnnnnnnnnnnnnnnnnnnnnnnnnnnnnnnnnnnnnnnnnnnnnnnnnnnnnngatgttctttttgatttctcttgaatgcatcccaaagtactactgtttctcctttatagtctttttttttttcctttatagtctttagtttcctttctaggcttcgtttatttgatgacatgtcatccagtcaccttgtcttatataagcatgagtatcatttgaaaattagttgtgtttggagaattttttgacatcccctgtgattttatttttttartattacctggatattgtgaaaacaaaggctggaaatagctctgcttagatactaacttctgagcaataggatatgctgctctatgggcctctgctccttcgaactctttcttagatgttctgaaaatctcatatgtatttttttcatgctttatatttaaggtttttaagctttgattactgccatcttcagccagccaaaaacaactacatagaactttcagagcttattagttctggctaggttagcttgggttgagtaggaggttgaatagacgacttctgaagtccctttcaac

SEQ ID NO: 21251 - DNA, 598 bp, Bovine  MMBT21562
  misc_feature (1)..(153): n is a, c, g, or t
nnnnnnnnnnnnnnnnnnnnnnnnnnnnnnnnnnnnnnnnnnnnnnnnnnnnnnnnnnnnnnnnnnnnnnnnnnnnnnnnnnnnnnnnnnnnnnnnnnnnnnnnnnnnnnnnnnnnnnnnnnnnnnnnnnnnnnnnnnnnnnnnnnnnnnnnnatatttgcctgttgagaggtcaatgcaattgcacagtttcacaaaaaacaaatcattgacaaggggaagatacttggaatttaacagaggatgcttgcaagtagctcatgctgcctgtgtatagcagagacagttctctcatgatgyagaggttactataaagaagtaattattttgatttgaaaaatacatttgggagatgtcagtgcttatggtcccctagacagaaaccatggtcttagctcatcctctttgttgagggacaggggctgtgctctgaaagtgggtggacaggaagctttttcctaaggggtaaaaacagaaccagatttactttgcctacaccagtcttgtggtacatgattttgatgtcaataagcctcatatctcaatctcaaaaactctctatagtcctttcttcaatagtttaaaggagaaaaaaaat

SEQ ID NO: 21252 - DNA, 600 bp, Bovine  MMBT09437
acccaaggccctgctggataaaaaaatacatatctgtaataattctcgaaacaggccccaataacaaagtccacacgtccctttgagacgtgctggcgaatggactctaagaaatccattacccttccttttaggatcaacacccttgtgttaatcccttcctctgaaatgtgagtggggccacaacagcccacaggctacagtagaggtgtcacaatgtcacatctctgttgtcacattagatggcaacacccatcttgctagaagactctctcgctgttgtggggaaacaggcggccrtgggagggagccccaaatgacaagaaaccgaagccttctcgccaaaaccaggaaaacacggaggcccttagtccaacrggctgcaaggatgtgagttcatcaacagccacatgaatgtggaagcaagtcccccgctgggtgctgtggcctgaatgtttgcagccccccaaaattcacgcactgaagccctaaccccttgtgtgatggtgaggcctttgggaggtgactgggggtcgattaggtcacgagggtgggaccctcatggtagaatcaacgtcttaccaggcgctctatctgata

SEQ ID NO: 21253 - DNA, 553 bp, Bovine  MMBT18278
gcaaacaatgcatatgaaacccacaaagcamtactgtgtgtgtcttatagggaaatcataagagaaaatgaatcgaatgactcacaataggatatgtttggaaggagataaaccttttatatctatgagcataaagacgcataaagtattaaataattttaccttagtagtacttatttttgcatatgttaacatttaaactaccagaaacagctcctgaaattggttatgctaatgcctattgctactcattttaaaaggcaattccacttaaaaccaaacctcaggcctcaaaacaayagttaaggtcaaacgaagcataccaaagtcgatatacacaagatatgaaaagctccaaattatatttcaatgacttgtttaatttgtaaatcaacccaatcaacaaagcatatgtttaaaattctaaagacatttttggggtgggtatttctttaaaccaaatgtaacttcaatcccccaataataaatatctccccaaatgcaaagctgaatgtttcattagcctcctaaggggcatattagcatataaaag

SEQ ID NO: 21254 - DNA, 600 bp, Bovine  MMBT19871
tctggggtcaggcctgcgattctgcatttctaacaagctgtcagggaacactgatgctgctggtccagggaccacactttgaacagcgaaggatcaaaccagtatttacccaagtatgatatgtacatgtctgacggcacatacagagattttaggtgagtcataaacattctattttaagatctacacagattttcacttaccttcgtgatgtgaagcttcccttaaatgcatttcaggattaaaaagttaacttgaagaaaacagtaataaataacaagagaggaggcatgcataagyggtaaaaattaggcagggggcctgcaattactgaagtcttgaggaatgcttgtaggaagcatctgagggtgcttgaacttgtaggaagagaaagaaattccagtttagaatcaacagtggcaatgcaagagggagaagcattgcttgatggagcaaggtgactaacagcgaaggtgactgagcccatgagcccagcactgacctggagcatgccatatactctgcacaacagcccagtgaggtcactgtcagggttatccctggtgtccagatgaggacaccgtgactcagggaggctgt

SEQ ID NO: 21255 - DNA, 405 bp, Bovine  MMBT12221
ctctttgtgagcccacaaactgtaacccgccagcctctgtccatggaattcttcaagcaagaatactgaaataggttgccataccctcccccaggggatcttcccaacccagggatcgaacccgggtctcctacattacaggcagattcttcactctctgaaccactggggatatgccctacagcccctctgattccacctctccctcctcagatcccagagccagcccagctgccaagaggagacctcagatggctcaggtgctccaggcttgagacctcaactcagaccacaatgtgygacccttcmcaatgctgattagggttgtccaactgctctaacctcacttcagctcttggtgggtttggggttcatcatcactggctcccctcgcttccatctaga

SEQ ID NO: 21256 - DNA, 600 bp, Bovine  MMBT13314
ctggtcaaggcagtcttgttctcacaaggccacgcacccagcaaaagcaaagccaaggttggtcaggatggaaacaaaaatgcagcccgccaagctggcccctttggcccattgcccacttcctggcacaggcgcccccattccaaactctttcccttaatttctagactctccttggtgtgaacccctcagaggaccccctgtgccactgttaaccctgaggacagagccccaggcccctcctgctgggctggccaagtgtcctgtgcagtcccggctctgttctgcccctgggccagygctgaggcttagggcagacgtcctggctgcttttgctccatatctgtgcccaacaattggggaacaaagatcagggtggatacaaacatagaaaatgagaatttctcaggctttgccttggtcacmtgggaggaaaacccaaggtgcccctcacccaatgtcctacaagatcacccccctgcagtccccatmtgcagagaactaggacatcagaggccccaggagtcaggaaagtggctgaaaatgtccaagagtcagactggaaacttggactgaacttggcgttgctttccctgagcg

SEQ ID NO: 21257 - DNA, 600 bp, Bovine  MMBT18815
atttcaaatgcccgttccacatccctgaccctgatccagtgttggggtgggggtgtagggagtgttcccagccattgctgggttctgctctttacctgatggatgagtgggggaatgaggagccactctcgatcagccctgggctctttctcctctgctttccctctgccactgggctagagtttgctgttagccaacctctataggaagctgggagcggttctggtagcagccaggctccatacgagatcacgctgtggagctgaagagggatcgcagagagccacggactagggctgycttcacatcactgcagatggtttctttcaagatgaatgggctgtccctgccgcgttttcttttcaaaatgtcatgctgtatttttgagagcacatgaagaaataaataaagtgttaacagtaaaaaataaatagaagtgggacttcccttgtattttgctgattgatctggaggagtgggactcagggtggggaacttcactgctgtgacatgtgggctgctaggtccagcgtatggagattctccaatacgtagtgacattgaggacaagaacagcctcttgtagcccctgctaacagt

SEQ ID NO: 21258 - DNA, 600 bp, Bovine  MMBT06010
ggccagagccggaaagggcctcttggggaggctgcacagagcttgcgcgctcctgagccgaccccctggcaccgcgggaagctgcgtgggggcagaggtggagaaggcgctgactgaggagccgaggatctggggccgggccgggagctccggatggaatctatttctagaacccgtggattcccaggagaagtcgagggctattgaaaaaggagggcaagccactaacaagtgatgacacgtggggttttgatgaatgtgctgtatgttgcctgatagaagtaatcggttttcctaacytcggtgtgcttaactgcagaccaagttatataccagaaacttcgttcctgaaaacccagtttcccttgttctttgaactgttacctgggagataaattaaacttgtaaacagtaaaactgccctagagtyggaacattccagtgcagggaaggaagatggaaggactgtgcagataaggtaatcagtgttcggaatggatatgttgagttcgtcctgtcttttttgctctggttgacctctgggtggagatgataatgggagatttgggggtgaaagaatcaaagacttagaaaattaaa

SEQ ID NO: 21259 - DNA, 598 bp, Bovine  MMBT00899
  misc_feature (1)..(94): n is a, c, g, or t
nnnnnnnnnnnnnnnnnnnnnnnnnnnnnnnnnnnnnnnnnnnnnnnnnnnnnnnnnnnnnnnnnnnnnnnnnnnnnnnnnnnnnnnnnnnnnnactgaattttgatggactttgcaccaatcaccaccaccaccaccagaagtgaggagaagaagttggtggtgttgcaaaactaaaaaacgggataattttgtatctgtatcccaaaacaatgacagaaagtgattagatgttgaaatgttggctttgttttaaaaaatgaaactaaatgaaatgtaaatggttgattccaaatagcraataaggaaagatgtgattagatgtttggggtcctggtgattgatctttgtgcctcattgttgacctgctttaggcccttaatttctgccwtgtacactctttagagatggatttgtgactgtgtggtgcaggctgctgtcctccagattctttgccttcttctccctggtgaaggtaaaatgcagaataaagctgaytgtaaaacattcctgacttgatgtgtgctcattcctgctgttcttgtgatgatcattttctccttttttgacaagtctcaaataggaataaaaaacagcm

SEQ ID NO: 21260 - DNA, 600 bp, Bovine  MMBT02090
tcaagttaaaattaaggtctttttgaactattaagcataggaatagttggagtcttaaaaaaatttaagtatttgatagtaaaaatatctaaaaatatgtcttatactttaattcagaagacaaaaygctgtattatagaagaaagtattaattaacatttagttgtaaaattatataactgagtattaatgttgcaacatttagttaatagtttatttttatttttcaggcgttcatttgaatttttagatttattattacaggagtggcagactcactcattggaaaggtatgcatcractcttcctcttccaccactctcccctcccctttgtcatcagttctttagaaattgatggtattggatttgcattatttcccattttcctttaaaagttatttgtactgattttcctttaaagctgaggtgctcctcttactcatcgtagctgtgattttcttctttgtggggtgaatgagggtctcttaggtgaatgggcaagaaattccaggttaaattgggcaagarattccaggttttataagaaattccaggttaaattgggcaggtagtttaaaatgtatttctagtcatgtaa

SEQ ID NO: 21261 - DNA, 499 bp, Bovine  MMBT09974
  misc_feature (1)..(1): n is a, c, g, or t
ntcactaagcaattctgagtacaaggacatattaaaatatcccagtgtttctcctaagaattaggtggtcttctttgattttttcttctctgcttcttctttttccttttctatttcatttacttgtaattcaatttctttggcactaaacatctgaaaagaaaaaattttwaaaagcaaatttcaattayagcaacaatttcttaactataatgccgatgaayccaattatattttataattttattttttatagctttatatcttataacttcaagtacatgatgaaatatttcagaaktagcttaattataacaattatggacaaaatcagaactctacaacatttccactatcattgtgctaaaataaaaagccaggaaatacaatattgggttccatatcttatatatggatataattctgaacacatttgaatgcaaagcttattctattcatgaaaaaataactgattactgaattcccaccccatcccaat

SEQ ID NO: 21262 - DNA, 600 bp, Bovine  MMBT01953
ttkcaggctatagtccatgggcttgcaaagagtcggacacaactgagcatgcaataaaacacaaacaaaaatccaagctgctctggttaaggtggaaatcacgaaatataagcttccctcttccccacctctacaagagaatttgggcactgctggggaacacggtgtaaaatccatggatcccactcgagtcagacccagagctgtcagcatctgcactgcgtttttaatgttcactgatcaagagcgctaccttctgcttacgtttcatcatgaacaattacccagtgactctttatkgattttattttgatgaaagataaatgataacatcttcatgtcagttagttgaactagttcatttattgaaacaataacgcacccccgacaataatggtgaagtagtcaaaggtgccgtggtattttgtatttttcaaagataattgcagcaaggtattctgacccctgctctctcacagcttgacttggtcactcctaagacaggccacgtctgtgttctaccagtcacatacctgtaaaaagtcttgcttatttatgacmcatggggacagcaacatcrtgttccagcttagccacaga

SEQ ID NO: 21263 - DNA, 600 bp, Bovine  MMBT10906
cttctctttcaagtatggatgaacctatgagaaacaaagcatccagtacaatttatatatagaaatatgtttcctactatttacacaggtaggaaaacctcaggcaaggtagattgcattcatgtttcttacccatgtgtataccaactcttccacatggtaaaggctttttatgttgttcattctaactcaaaaagtcgttttgtaaggattgactccaaggaaaaacaaatacccaagaacatttttccatttgttttcctacaaaggtttctgagccctctgccacactctgggatkcccaagtccagctgaactaaacacatctcccactacaagtcctggatggaacaatctgatctcatttgtaggacaaagtccggctagctaccagggtccctctttcctaggccagaggctacaagggaggagagtaaagtaaagtactttgcacctgggagcaaagtaaaacatagaggaaagtatacttgacaagtcttggggttcaggccatacctagaacctctactgaagggactatatctgaacctgtgggctgctacaccaatatagctgactggaccactgatgaacacctaa

SEQ ID NO: 21264 - DNA, 600 bp, Bovine  MMBT09033
cagagcatggtgcaaagcgtcaagttcccgggacacaacagggagaagcagaaaaagaactgagactattagaaagatgccagcaatgagttgtcacctggggtgccaaacccacagggaagaagaggtcccaggtcgcacgcctgggataggaccacagacaggtggaagggaaggctgtggagaagggaacttcttccctcactcctgacattttcttccagagaaggaagcttaactagtggaacttctggaactctctctgccccactgctccagtgacttgctgttaactttggmaagagtacttgggcccccttgactccgcccacatcttgtttctcttgggtaactgttctccccaccttcttgcttttactcttttttttttttttaaggagtaggcrttttacttatgtatttcagaacaataaagacttttattacacraactgaggtaggaggcaagagggtttatttttgcttttttatttattctgtttttttgttttttttgagacttgcaggatctcagttccccaaccagggactgggcctgtggcccctgcattgggagtgccaagtcttaaccactggacc

SEQ ID NO: 21265 - DNA, 600 bp, Bovine  MMBT19352
aagtataaatttcctgatggctgcattatttagatgtaggtttgggatagtttcagtttaaacaagggaaatgctgtataagttaatttcataatatgaaaactggaaatcactttttggtcaaatttcaaaatgccaaagagtaggaaacctcaaaagaggaactgatttatggtggcatttctagagttacagaagtatcttctcttaaatgtaggtttcaaaatgtttgaccataggaaatatccaacagactcctttatgtctctgtgcttcatacatgttagccagtggtctctyagtttacagcagygctggtgcccactggggtagggtcctctgccttgatgatgcacctgagaggctgtgatgggacaggagcagtgctcgcgagccagagtgtctgggttcatttccttatattccagcttacttttcttgtgaccttggtcaagttacttatgctctctatgaaaccattgccccctcataacaatgaaaataaataatagcatttgcttcattgggttgttaagggtataaaaatgtttgaatgtttgccaggtgctttgaataatgcttgtcaagtggttcatgtta

SEQ ID NO: 21266 - DNA, 600 bp, Bovine  MMBT09409
aacagattcctagggaaagtggtcttttgtaatggtcagctaaagctctctatcatgagtttgagtaagctccgggagttggtgagggacagggaggcctggcatgctgcagtccatggggtygcaaagagtcggacacgactgagtgactgaactgaattgaaagctctctgtgtcataggttaagtttcaggagaagccactggcttagcctatataacaccaaacagccacacagtatcaattattcattcaacagggtcaggctggaccaaaggaatgaacttctaaccaagactyccccagtcttgactccatccactctaaccgtcactcagctgccaatgtcatcaattaaaacactcttttactttataataataataactaatgtgcctaactaatgtgcctagcccaaataagtccaagcagtgatactaagcatgttacatatatgaacacatttaataagaaactttaacagcagggtatcatttttattctgattttactgaagaagaaactaaaagctcagaaaaggtgaagtagcttgtgtggcaaagcctagattcaaacccgtgtaatctgggtttcaactat

SEQ ID NO: 21267 - DNA, 598 bp, Bovine  MMBT05911
  misc_feature (1)..(73): n is a, c, g, or t
nnnnnnnnnnnnnnnnnnnnnnnnnnnnnnnnnnnnnnnnnnnnnnnnnnnnnnnnnnnnnnnnnnnnnnnnnctgtcccccatccatgaaacctgtggccataagggcatctttgcaattcatatgcttaagagttttagtttagtattcattttaaaaatgagattctgcttagatttgggccagttttatacttggttacacaaaggccaacttttgtactgtagcaaaaaaagagatcaggtgggatttgcactaagaaaatccaggaggacctagttttcaaccttttcttttayccatacacatctcaccattccattaatttaaattctccattctggttgaagtaaaggtgaaaatataagtttagctaacggggaactgtatttcgtttggtacagattcacttacaaggtatgttaaatatgaaaataaaatgaatacaatgataataatcactttgttattgtaaattttatatgcaactcagggacaagcttcaaagagaaggattctcaaggcaatttctattgaaaacctgcaacaataatctttatcctatagttgcaggttaaaaaatgagtttcaacaaaa

SEQ ID NO: 21268 - DNA, 600 bp, Bovine  MMBT03857
gaaataaaaagctttccaatctaaataagatacattaacatctaactgtatacagatgttcagagaagccacagaaagataattgcactttgttaccaatttagcaatctttcctgctctaattaaaggaggaaataaattatcttgtgaagaaattgctcataacattaacagtacaaatgctaatttaaattatttagatatatgatttattctgtaccacattaaagatttgtcacaagtttagaaatagtctaaatatgtttaagaaagtcacacacaaaaggtaaatattttgtmctattgatattaaagggaaaataaaacaagaaagaagcaaattatataaaaattttaagctatctcctattcctaatctaaagaatgagaaaaagaatgaaacacagaacagggacacaatttgtcaaatgtttcatcaacaagaatagaaagtgatacaaggacattcttgagataatcaatgaaatgtcagccatgggaggagcgtggctagtctcactgctacagtgtacaattgattgctcaggactctgtggggaattgctcagcataagaggaatacaaattagatctctccac

SEQ ID NO: 21269 - DNA, 600 bp, Bovine  MMBT22696
gatgaaccrtcagacagggactcggacagctagagaaagcagcagaatgaccagaaattgcccatccagatgagaaaccgtggaaggggcggccgtggtggctgcgcaccctgaaaccgccacctgcccggcccctcgggaatgaaacagagcgtggccaaccaggcctgaagcgctccgtcagccgagagcgctacgtggagaccttggtggtggctgacaagatgatggtggcctaccacggacgccgggatgtggaacagtacgtgctggccatcatgaacattgtaagtgcctccscctccctggacatggacccccaaaaatgtggagcccacctccagagtcaggaaaagggctgtcaccatcccccccatcactgatcaaatgccagtgaaacagaatgggaaggggacrgggtgcctcagaaagaaagcctgttagtgaaagtagcctagcacagtggttaggagcatgaactcaggagctagccaacctggccttaaatctcagctttgccaatctttgactgtgtgcccttgggcaagctactttgcctctctgccttggattacccacctgtaaaatgggtttaatcat

SEQ ID NO: 21270 - DNA, 600 bp, Bovine  MMBT03618
aaacatttttggccagagacttgaagaccaaacaggagagctttaaaatgggatttaaaggggataaagtggaatgttcaaatgaaactctaaaatcgcagcccatggaggggcagcaggtgtgagctagaaataagaggcctggcagagggggtgccgagcagttctctgaggaactggagcagggtcacatccacactggggacacgctcaccagctgcatcgtgaggggcccagcgaatgggggaggcaagcacgacctcggagacaacagaggcgaggtggctaggacacacagcyaggacgccatgctaggtcagggtgacaaggtcacgtggttgtaggcactgaaatgggtgttaggagggtacacagaagtagaagtcataaacatgagagtggaagcaaagccaagagcatatggatgagattttcaaaagggcaaaatagaaaggattttgctggcggtgtgtgcactacagtcttctcaggcagagacaggctctggctggtgctttcctatttaagacttttttcctaagtagcataggaagaagatggaataaagatgggaagagggtatttattcaagcatctgcc

SEQ ID NO: 21271 - DNA, 600 bp, Bovine  MMBT06331
ctaggagagatactataattatcatcctttataccaaatagccaagggaaattaaattttattcatattaccttgattcttgagattttgagagcatgttgtaggaatttgtacaatctttattatagtacttttatccctaccaggtagggtggaaacaatggacatatcataggccctacataactttcaaatctcacccagcacctgagcctaataatcaccagtggtgctcagaaatcgttttaggcaaaactaagtagacagcttcagcctttctgcctcccgtgcctatccttytagcattttttctttcwtttcttcggaacccactgttcataaatggttccatcctgaagtcagctaaacatwagagatttgataggctatctcattcaaaaattaattgcatttacacttgttttgatggggaaaaaacttattttgtgggataaataatgaaaattcagtcactctgtatcatagaaagggaatattcttggtaaaggggtctccttagcrttactgtaaagaaaaaaaaattagaacctctttcttcatccttgagacattgcttaaaggggtgtctgtggggggaag

SEQ ID NO: 21272 - DNA, 601 bp, Bovine  MMBT06791
  misc_feature (1)..(1): n is a, c, g, or t
nactgcctcatcttcaccatcrccctgatcctgaccatggaaatggtctcctgaatgttctctctgcttctctgagacgctgccaagtctacctcaacctctcacaattttaaaattaaaaataaaaagcttagatcacacaaaactacttaattacaagggaaaagaagatacctaaaacrgagatattacaaataagatgtctcactcatattctagtactcactagggtcacaagcttcagagccagtaactcaaaggctgaagtttwaaatcctgttatcaaagaaccttcttccarccattccctccacactgcctcctagaccctctggttcatagaggcagattactgtggtcaaggggctgttttgtgaggttatgttcaatcgacatgaatctgaagtgcccaggactggcagagatcttcagagccggcctggctgtgtctgtgctcagtcctgtctgactctttgggaccscayggactatagcccaccaggctcctctgtccatgagattttcccaggcaagaatgctagagtgacaagttttcgctgctsttagccgattaaaagaggttttaacaattcaatttgca

SEQ ID NO: 21273 - DNA, 600 bp, Bovine  MMBT07117
ctgaaattcggcaaggatgtaactagagttggacatggagctgagaaaagaactttttcttttttttaaaagtagaagatagttgagctaatggactgaggctggaagagaagttgaaggaaaaagagagatggagaataatggatgtcactaagtctgtgagaagtcagaggggtggaattggaagatggggagaaagggttcagaaagagtaggctactgcttctgttctgataggagagaaggcaggatatatactcaacacctgctgtgaggaaacaacaaggagcatgatccccrtcctcgagaagcgacagtccagttggagtggcaagacattgcaacagaaaagaataatactctgtgataagctggcaggcaatgagtgctggggcgtttgagaggagagcgagatgagctcctgatgctgtgatcaaggaagacttcaggagaagtggcatttgattttgaacttgaaaagcagagtaggattgtactagctggagatataaatggtaagagaaaataaaggagaaaaaagtgcatttcatgtagaggactggcatgaacaaaggattgaagtactgaacttcaattagt

SEQ ID NO: 21274 - DNA, 600 bp, Bovine  MMBT19592
agagcttctccatctttggctgcaaagaatataatcaatctgactttggtattgaccatctggtgatgtccatgtgtagagtattctcttgtgttgttagaagagggtttttgctatactaaaaaactaaacttatagagaaaaatactcatagaattgaatttggtaggcaaataagttataataacttcatccaatgaaatacaatagcctgtcatttgaagtagaaactgtatgtcaaaatttataaacattaaagtaactgtactataaaawttttttgacgaagcttatcttaaygtataaaatgcatttgcaaagctgtatwtgctttctctcttgctgtatagtttcaatcagattttagaaatatttcagcttttaagaaaactacttttcaaattaacctcctagtcctatattggcattgtatgctttctttaataaatctcattttttagaaatggtgggaaatcttttatcaaaatatccagtgatttggaagcaagaaaacttcagattttgcaataactacaaagggaaatttatccctacaaaagctgggagatgaacaaattaaataatgagaactcaaacagt

SEQ ID NO: 21275 - DNA, 453 bp, Bovine  MMBT14175
gggaagggaaggggatgtaatctaacagcaaagctgagcaggggtctactgctcaactctcaggagtcgcccaggacggccacagcaactgtcctaggcctgcggtctccatcctgcgtcggaccctttggctcagaagaaggagaaggggcggggcagrgaagctaattatacactttgaaactccctcaccttgtcacccacaaaggaaggaaccaagggagaggaagacaattttacctcagaccaaagagaatagaaaaataggtcaagtggccatgtatttctcctccccgcccmcaacttaaagcttccagagagaaaggagaacgcaaatgggcttccaaaggggaaagggggaggggagggataaattaaggctttgggattgagataaacagaccactatataaaaaataggcaaacagcaaggacctgctgtacagcccaggg

SEQ ID NO: 21276 - DNA, 544 bp, Bovine  MMBT19071
ctttttcttcttcttcttcttcccccagcagcttggctccgaatctttgctgggagactcttttccgagtaagtcatctaattcgttcagccccagcagccgggcctgaggcacctccagctccagccgatacgacaggttcctcagggtgcacacgcagttctccacggtctgaaacccaacacggcgcagggttaaaaycatcgtagcgtgttagtgcaaaatgcttctgtaccmagcaccagtggcactaaataaatgtagaatatgaaagaactgtttttcactgatgggaacctrcaaactgaaagttagaactctgattccagactcaagttggtgggaccccaagctcacagagtgtgcagagccacccaaagtagagctgaggatctgatttcacactgagtgaaatgtgtggggctctgggaggggagaatgcccaaggtttctgcttcagggctgctgcagtggcagagcccccatattaccagaaccccaccccttctcccagctgggaactctcatcatgacagcaggtgtg

SEQ ID NO: 21277 - DNA, 600 bp, Bovine  MMBT11368
tgttcttaaatattttctaagtggtgacatctcccccaccagcaccccacctgctacaggtgatgtataaaaattctcagagtataagactccactatgcattctgaaatatgagtacaaattgaattactggagaaaagtattttccaagcagaggaaacatgttggatgcccctgaggcccagagaagcacgggcataccaaagaactcaaagaacacctctgagcttggagttgagacagtgtgggaagtgctgcaaagaaggctggtgatayatgcagggacycatgactttactrggtcttcattagtgtaaaatacctgcagtggtttaataagggaatggcatgttgagatttttgttttaaagtcattttattatataattttcatttacaataagttcattttaaggtaatactcactgtttgcactaacttgaacacctttctaattcacaggacttttttcttttgtgtatatatatgactttttgtttatttgttgaagggattttcttttgcacaaagaataagagcattttatataaaatgaaaacaaagcatcttttaattacccatgccttcattcctcattga

SEQ ID NO: 21278 - DNA, 600 bp, Bovine  MMBT03456
agggaactactctgagtgttcaccattagatgtgatctcggacgagccaggtgggctccttgacctcttgagtaaagcaggtttactaatgccgagattgtagggttattttgaaaactaaatgaatttatgtaactcagtggttagtacatgagaaagttctcttccccccagggaggggattaatgcaggacttttgtactcatgtaggtgaagcacttgggcaaggaaaaattgcccaaatttactggtgtctcagcctgtccaagtcttgtcccatgtagatccctttagaaaccrtgttctcagactgttggcgaagtttgggtaaacatgactataccagaatgatcctgagatttcctgaggaaggattaacatgcttcgcatggaattttgcaataaaggaaacactatagtttaattcatagtgatttaaggagatggaagattttttagaggggaaatctaattatagtgaaaataaaatttcatttgcccatcatttccttcattattcattattttttattgggaagataagtatgtacaaagaataggaaagaaaaacatattagagtgtactaggaaaaataagga

SEQ ID NO: 21279 - DNA, 600 bp, Bovine  MMBT12485
attccactattcccccatttaagctgattttcttaaatattgcataagccagaggtaatttgatttcatgtttttatttaaattatatacattagtaccactgaaattaatctcaatacaacatttaaaaataattagaagcagattgggagtaacttaaactaaaacacatactgaaattatatggcttcctaagaaagaatagtgtttataaataattacatttatgaagaaaaaagactaatttgtatcctttctaaattgtgggctataggttaccatactacatacaagaagatyccctgaagaagggcatggccactcactccggcattcttgcctggagattcctgtggacagagaagcctggcaagctacagtccatagggttgcaaatcagacactattggagcaacttagcgtgcatgcatatatatatctatatcaatatctatatatatatatakagagagagakatatatatatcaccttagttcctttattttaactttgaatttaatttttattactttttttgcttatctttaatacttttggagaatatagatttttatatcctgaaactacgtaaatagcta

SEQ ID NO: 21280 - DNA, 600 bp, Bovine  MMBT09648
gcgagaatttaaaagttatgtaattcacatagtcaagaggatgttaagtgagaaactacccagataaattattaacagagaatagtgtatcattttgatttttttttttaaagaaaagcatattaagtatctttcaaagactgtctttaatcatttttttcaatcacacacttgacaatgaaaattggaattattctttgcaagaagcaactgtcatgtgcagcattgtgaaaactccctttagtcccagattaaatttcaaatcatcactcaaaagcctgccgcacacaatcagcacgygtccttgggtggcagccttacccattcctgggctcccattctgttgctggggcctgctggttggtggactggctgctgagacaggaggaggaactactggctgctgtccgtgtcctgatgatcaaaagggaaagaccattttagtgccaataatttggattaagagatttaaacttaagcagaagaaatattctgagaaagtgtaaatttgtgatttttgtcaaagactctcctgggtcagaattcatgctggggcactttactgcatgcagcgaaagtgctgggggttcacttttgttt

SEQ ID NO: 21281 - DNA, 600 bp, Bovine  MMBT03839
ggcagtttcagcaatggaaatatacctgcatttcacttaattagggttggaagataatgtggctgtgaactctcagatattgagcaatgagttttttctccaaaggttatattattctgcttcaaactagaagtatcattggcaccaagactccttgggtacactttttaacaaataaatctgctgcagaatgacatcagcatcattagaagttcagctggccagtagtagaatgtgctggcatacaacctttccatcaaaactaataataagcttccaaatgatcataaagttcaggcmgtggtgcaaggtatgtgtgatgatcacaatccattgcaaagttgaggggacagtcaagggggatcaaatttcagacaggtatacggtcagtcctcctagagacaagagtgaaaggcagccaacaagggtacttctgaatttatacaatgaaaaataatcaacgatggatcagcaggaaaccgaaggtggtgcctcagtaaaaagtcacggttccttacccagttcctggacctgcgccagtcctcagacctggaactggtcactgagggagaaacaagattctcgggagaatagaccctg

SEQ ID NO: 21282 - DNA, 598 bp, Bovine  MMBT05610
  misc_feature (1)..(22): n is a, c, g, or t
nnnnnnnnnnnnnnnnnnnnnntattttcctttatttaacaacatgtatatatttactacctgtctacaatgtcctaatcacctttaaaactttattattaactcattaatactcataatgatgcttttgaaataggagcagtgtaatctccatattacacattgggaaactgaggcacagagaggttaaataacttacctgagatcacatggctgggaaaaggaggaccgaaaaagccaggccaggcagtctggctcccaaattcacacatttgacctccctgtccacattcttcaccwctctttattctaaaccctgtggcatcacttcaataagaccctgagactcattttgtcacatttcacacccctattgtggatgggaattcagcctttttggaatatacttagggacatataggtgatttaaaagagaacatgatcgggactttgctggtggtccaatgattagaactgtgctcgccaacgcaaggggcacgagttcaatctctggtcagggaactaagatcccacgtactatgtggtggggccaaaaggaaaaaaataagacaaaacgtgtttgctgratcagtctgac

SEQ ID NO: 21283 - DNA, 598 bp, Bovine  MMBT10426
  misc_feature (1)..(33): n is a, c, g, or t
nnnnnnnnnnnnnnnnnnnnnnnnnnnnnnnnnctgcctctgtgttttaccccccccccaaagtggagtgtttatgatttggggggatattagcagtgcatgaagcttgacacttacttatgtgaaactcagagtagcatgtgcgatgctgtcctttcaacatttgtgtcgggaggcattgctgggagccgagaaaagccttagctgatccragtggagtggattgaattaatgacaactctgagagcaccagttttagggtaattgctttattgttttggagccagggtgcttataatmtggttcctgtacaaacatgtttaacgtgtgttaatgcatttgcaaaccagagcctctcagcacaaccctgcttttcattaattgatgtcggtagcatggtacagtatttcaaagagctggccaagtataaactgtgtttccaatttccttcctttcctgtgtttggaatgccaatgttaatttgttcccatgcaggagcaggggctgccaactgcggctttctataaagggcttcacggtgaaggcttccagccctcactgatgcttggggctgcctggccaagtttcctgacacttt

SEQ ID NO: 21284 - DNA, 600 bp, Bovine  MMBT02139
agtgggttcagtgtcagggagtttcagcctgggctccacctcccagcaacaggatgcaagtgggcttagctcaggctttctcttctcctctcctagtctgcatattggggtctgggcttacatttttgtttggaggcaaagggttgtgctttatttacgaaacagagaatgcctctgagccttgcataggtgagagacattgggcaggaacctggtccattttgttccttctccttgcgcaggctaggcagaagatgggctgcctctagttccctgagctgtgtgtcttggctgaagagyctgtctggacgaggactagtgtcctcttatggccagggtgactttcttctatccctggctttcctaaataaaaggactgtggtagagtgtcatggtggagaaccatgctcttcacttgaaggactttctgagtacatccaccctagaattatttaactgctagcaaccatggggcttctgtgtgtgaaaaggtggtggcaagagtccaggttcagtgtctggagcagtgacctcctcatcccctgcatcgttctctaggcttaaaccgctgccaccgcctcccctgactcagagtaggac

SEQ ID NO: 21285 - DNA, 600 bp, Bovine  MMBT21683
gtcttggttccaatctctaggttctagtagagcaagggtamtccctcttcyacgtgataggtattccaagaaagctatcctgttgactggtcctcctcaaggtacacatccccttccctccaaccattcttcacggatcttgctgttgaagccctttgccaacttggcagtcaccttccttctgacgctttccattgtgtggtggggtccttcctaaaacatgatgaattgcaactggctgtcaccttgacgtcagagataaaggcctgtggagaaggagacacaaactctgtgtttcayrtttataaacrgtaacatgtactcatagaagaatattgaaaaaacagaaaaagtataaggaagaaaaacgtaaatccctgtagtatgatcttctcaagattattagcttaaactttggtttaatttcttttacttttttcttctctgtatatttgttaatattttttgatgggtaacatataggtctcttcttttcatatttagctttttcatgtcattaaaacttctcaccacccttattttatttacctatttcctgagataataaattgtttccagttttccacttttataaataaa

SEQ ID NO: 21286 - DNA, 600 bp, Bovine  MMBT21684
tcttggttccaatctctaggttctagtagagcaagggtamtccctcttcyacgtgataggtattccaagaaagctatcctgttgactggtcctcctcaaggtacacatccccttccctccaaccattcttcacggatcttgctgttgaagccctttgccaacttggcagtcaccttccttctgacgctttccattgtgtggtggggtccttcctaaaacatgatgaattgcaactggctgtcaccttgacgtcagagataaaggcctgtggagaaggagacacaaactctgtgtttcayrtttataaacrgtaacatgtactcatagaagaatattgaaaaaacagaaaaagtataaggaagaaaaacgtaaatccctgtagtatgatcttctcaagattattagcttaaactttggtttaatttcttttacttttttcttctctgtatatttgttaatattttttgatgggtaacatataggtctcttcttttcatatttagctttttcatgtcattaaaacttctcaccacccttattttatttacctatttcctgagataataaattgtttccagttttccacttttataaataaaa

SEQ ID NO: 21287 - DNA, 600 bp, Bovine  MMBT17551
ttcacagtaaaaatgtagatagatgagacaggacaaaggtaacgtcgtgtccattttcgcgagtgattctttttcaagaacacatagttgcacacggcttcatagctgttgcttcaaaaaaaatgtccatattgtaaggtatggataccattgtcaagcataatccaagcgatatatgtttactttccatttgaaagtcagtatgatatttgaaaaaagcaacataaagtagaaaatttacaagtaatgattaactcatatatcagatctactttcagtaacttgaatgcactcagggayttttggggccatcttatgtgacactttgctagactctgatccctatttcttcacttgtttttatagtccagtcctataaactcacactgtgctgttaaaagagcagacttattcacagatttccatgccatcacgatagccatatatcaatgcactggaaggaatagagaaatagaaaaagattaaattattactgcaaaaaattagaatagtattttttaattgaagttcagttaatttacaatgttgtgttagcttcaggtatatagcaaaatatatacatacagttatatgtatgta

SEQ ID NO: 21288 - DNA, 600 bp, Bovine  MMBT18150
tgagcagggtagatcagacagtttcctggaagagtgaagatcttttcatgaactgaatggtacaaggtctyagcacagcctggggaaggaaaagtcagaggtcagtggaacaacaggttgagagaagctcccaaactgcttcccttcaggaagaagacaggaggataaaaatcactgtagctaaaccttctccctcattttctgtcagtagccaaccctttgtgtagaggagagcgaagggaattctaggtaagtggaacaacacacgcaaagacttggggaatggtaagaattcagcaygactgtaaaaaaggttgggataggaccctgaagcaccaagtcccgtcactctgggggtgctaagaaaggattctgggcagggaaagtggactagaaggtaagaaattgaagacatgaggcaaaggaggatagagccatagttttggcaagaagctccgagtcctaaactgggacaggagcaaacctctcagaatgttctgccatcttttctttgatctcatgactgtgttggggatgaataaatggaagattaggagcttcagagagaaaaagacagagaccaagatggaaagataagga

SEQ ID NO: 21289 - DNA, 600 bp, Bovine  MMBT04393
aaaaacaaaattymtgccttaattgagtccacattctagttggaggatattaacaataaattaataagcaagtaaatttataccatgttatatggtaataaatgctatggagaaaaataaakcaagataggggactacagagtattagggtagagatttgctcttttaagtattgtggtcagagactcaccattgaaaaggtagtatttgaacagagacataagaagtagatagaccaagctgtgtgattcattggaaaaaaaaagaacattccaggtagagggactagctggagccatwcccaaggsaggaaggcttgggctcctggtgtgaagtgaggaggagtagtgagttaggagataagtgagagaatsaagatgccagatcatataaagcattttaggcaagtataagtgaattttaaggctgttgaatggtttagaaggatgatgtgatatggcttatgttttgaaagaatcatcctagctgctgtgttgagaacagactatgataaggcaaagaattagggaaattatagttaggagaatactgccctaactgggcaagaaatattggactatggaccagagtggcaagaga

SEQ ID NO: 21290 - DNA, 598 bp, Bovine  MMBT13010
  misc_feature (1)..(100): n is a, c, g, or t
nnnnnnnnnnnnnnnnnnnnnnnnnnnnnnnnnnnnnnnnnnnnnnnnnnnnnnnnnnnnnnnnnnnnnnnnnnnnnnnnnnnnnnnnnnnnnnnnnnnnaaaagccttcagggactagctggtgctccgtctccctgaccggtgctccgggtgctctccatcacctgcagacactcaccctctggacacctctgtgccctgttgtgcttcctctcagacttcctcacctccttcctcctctcggggttcctgctgcagctcagtgcgtgtcagactcggagctgagcgctggtctgtcrgcgctttgagcacaggagccctgtcgcttcatctctgctccccacaagcccatgttcctgactgttagggtgtctggtcttactgtcgaccaaggcagttgttataaggtacgcttcaactcagaggtgaagccacagccattacgtgtaatagaacagagtgaaaatggatatgaattgcacacaccatctggtgtctgagactgtcacaattatgcatttatgcagaatgatataaaatgcacaaatgaaccctaatttgcaaatttcwtttttttttagattatgcaatatctga

SEQ ID NO: 21291 - DNA, 600 bp, Bovine  MMBT05396
tcactctgccctgcctgcagcaagaatcctgttaaggtggtttagctggatggaattcctcctcacctcagaggttttctcttaggaaatttatacccactgacccttgccctgctccttgtctgtaaatccccacttgtctatgctgtatttggaataaagcccagttctattcagaagtcttttcccccttagtgcaccagttcctgaataaaacttttgtttatttttttacaactttcactactgtccaactactctgattttctgggaataactcagtacatatttgtcaaacamtgttcattatgtccttaatccatggaattaagtaktattagtaaaccagtcccactcctgctgttgtcacgttgcacttacagggctgtatttgcctttgatgatgatcatgaccatgtgttaggtgtaagagaaggaagggacatgaaaatgagaaagaaggtcatcttcttattataataaatgccatttggaaatgggtaaataaaccaattggtattgcataaatcagcagatgtcaatgcagaatakttggggatgtgttctctgtccacctgcttctgtccgctgggcttgact

SEQ ID NO: 21292 - DNA, 600 bp, Bovine  MMBT09143; identical to SEQ ID NO: 4797

SEQ ID NO: 21293 - DNA, 600 bp, Bovine  MMBT14769
aggagcaacaacctgcccaaggcccggccacgtcccaggatcagggcagtgacatttcaggtgctaacttcacttcactctgtaattctcccctgtaatttcccccctttccctcacttctgtaatgctggctcactacctctagcgctctgaagtaagttcacagatgcacagacatgctgtcccagcaaatgtgaatggagaggcagctgggttgactttgaattgtgtatataccctcatgctttcattcagagcctataaatgttttctacttctccctgaagggatgaaatgtcrtctaactctgagtctcacacagctggctcagaattgaagcatcagcgcaccactgtygagatctaaatatttatgccacctccttacctcctgtacatttaacaaacaaaagctcttacattttagacagtaaytttctgagagagggactatattttaccaaaatttaaaggcagacgatccaaaccctccccaaacaacaactgccggccacgatgaaaggagctgggaaacattaaggactttgtgcaaacagggaccaaagcgtattcgtccctgtgaccccggctccacgcccgc

SEQ ID NO: 21294 - DNA, 600 bp, Bovine  MMBT19936
cgatcttttgggcacttccaataacttcctgcttcctggcacttcctgccaggatccttctgcacttgtctcaaccttgtatttcaagaaaagtgcaggtttcaattgataagcactattagagccatgctaatactactctggatatgtgttagctgtcatcctttatgttataaacattacaattttgttcaattctttaatatctccatatgcaaaccttctattaaaccaaacctttgatctccccctactctgaatgtcttcctatgacctgttgccatggagatgatcacataygcctcatgtaattatgtaaacagcagatagttcgtccatcttatctcacatataggctgtttcatttttccttttctgctggtaagttttcatcttagcttaggtgaatttacagcaccatgcttaaggactcaggtgttttaagtcaacaacaaaattaaatttctcttgatgaattaactagactcctcctaattcaatattcaattaatttgaaagtggaagagaccatctttaacaagctggaacccaaattcacaaagagatcagagtttctattttcagttcaattatctgaaa

SEQ ID NO: 21295 - DNA, 601 bp, Bovine  MMBT01258
  misc_feature (1)..(1): n is a, c, g, or t
nccagaatttsctgtttataatagcaacatatttattgagtgtcttataaackctagacactgtgctgagcatkttatagttttttcatttaatcctcatgatgacyatatgaagttggtgaacaccgttttgcagagaaaagaaaattcaagcctagcacggtggactcaacaggctggtcaagcctccagattggtgtttgatagcctgtgttattttgctttgggggaagattattgagaaatttgwtcytktggctggatagtggttttgaagcgcgcccttccgtgtctcaccccytggcaggtagagtgtctccccgcggtctgacaatccagggcgagcccttcggtgtctcaccccctggcaggtagagtgtcaccccgaggtctgacaatccagggcgagccctttggtgtctcaccccctggcaggtggagtgtcaccccgaggtctgaaactccagggcccttgtgcccagcactgggccttgtgctgcctcggtgcttttcatatgcagatgatcgagaacctgctggctgccgccttctccatggcagtgggttcctgtttgtttaggaagtttaggggagtgtctct

SEQ ID NO: 21296 - DNA, 600 bp, Bovine  MMBT02687
gccaatacagtatgtcctcaacacacaaacaggttctgctccgagagcacattcctaagtccacatctttcattaagtccaacaaagttcacctactaacaaaatctgccatttggtactgtactataataggtttataatattgtacttttcatacaaataatatataaaagcaaacagaaaaaagaaaacattaaactatagtaccttgaaagtacagtagtaccagttacatcaccactgcttttatgcttgtttctggacatcctgggcttgaaatagagatgctgtactctatayagtacagtatacaaaagcacaaccatttataaaggatgcatgcatctgacactttactctggacacctgaattaacttacgtgattagacatgtgaactcatgctcatatctttgaacgtctgcaccttgaagagtcatatgtaggggacttactgaatagtctggagagtggactgaccacaataaagtgagcaaaagaaagttagggaactctattatctttcttaactaatttctagaaaatgatctgttttattcctcaggcatatagcatgaacatgacttttcgtttttcataa

SEQ ID NO: 21297 - DNA, 600 bp, Bovine  MMBT12972
tccacactgagtatacaacataaaaatataacttaagtcttttctgtgactaatgtggttctggtatataactttatgtaaagataagtctgagtatcccagcagaacactcattatttaataactctggtgagaacctggaatacttgtattttgtgttgtcatctcattgaaaacatacctattaaactttgggtagtggtttatcatgtggcaagactgacacattgttgccacatggagaagtctgacctgcattcttgcccagctaaggagctacttaccaggcaggtagctgcraaggtgtggtcacaggcagatttcagagagaaccttgactcataccaaatttgaattaacctctgactgaaacttccatttctacatcatagccaagctgagttcattttaacctggacagttaccaggcgtagctgttgtcatccactttgacaatagaacttaagtggaatattgggttttgggtgacagagttcccagtggatctgtaaaataaaaattwtaggatgtggttttagttattagattgaattaacttactagatagagtttagtgttagccatccgaacagtgaaaaa

SEQ ID NO: 21298 - DNA, 600 bp, Bovine  MMBT03513
gtcagacaatttttgttttgtaacygaatattgattgagagagaaatggaaaagattacaggaatcgtcattcatttttgcaaaataagttgtagtttccacatkccatatcaaataacaaatcatatagcaccatctaaaattttggggcattgctcttttccaaacttgctattttataaagaattttagttttgtgttcactgaacaccaagcagagcatgagtctctcttagcttggttgctgaacatgtgatttaaataggttttatatattagratgccctttttttattctcmtggaccaaattaatctgagctcaattgtagaactctaaaaagtactgcggtggaggtgtcagcaacactagcatcaagatcagcaaaggcactgttaaatgtgacattttgcaattaattctagcaaaggtgttcagtcacatcatcccttcagtataatttgtatttgacccttgataatacatactttcttacatttcaagttcattgtttttaagaaatgattttcttcagaacctcctagacttctggtcttaacttggagtgctttttgcttttgcagttgtcttttctttgtac

SEQ ID NO: 21299 - DNA, 598 bp, Bovine  MMBT13769
  misc_feature (1)..(89): n is a, c, g, or t
nnnnnnnnnnnnnnnnnnnnnnnnnnnnnnnnnnnnnnnnnnnnnnnnnnnnnnnnnnnnnnnnnnnnnnnnnnnnnnnnnnnnnnnnngcagagagccctaggaaggccaggctgcagccttggcagggccccggggcactgcagccctggatgggcaaccatgcctgtgaacccagcaggccccagaccctggctctgtccctgctcttcaagagggtcagcccgagctccctgcagaggtgacaggctcaggaggatcctggggaccaagggctaaggaaactggagagcagaaggrgacatccaagggcagagatgtaggagcagaggggcttggaggggaaagtcctggcrtccagggctttacaggggcaggrgactgggagggctatgcaagaatgtcttttcctgcagtttctcctctcttcccatcccccagctgaggagagygcccccaaccatggctgccagagccccagcccagcctcccaagatggagaggaggaaaaggagggggctgtcttcccagagaggacggtttcyaccaggaatgctaaggtgagagccagcaaggctgtggggagggacctttgatg

SEQ ID NO: 21300 - DNA, 600 bp, Bovine  MMBT07036
tgttcctcatttaaaaataaactcatttaaacaatgagaactaattaccacattaatttattgtcaacacagctaagtacaggcaggcatatataataacgtgtaaactaccaagtgagcagaataaaagggaaatgtagtggggttcacctccatgatactgttcatgtaactcactaaagctgtatttgaggttctgttttgtagtttaattaatatcattatgcaaaaatcggcgcccatacatttcccataatactttatctgcatctctttatcctattagttgatgttgatttytccgtgtgtataagggaccaactccagggtgcccacccttgatcctcatcagctagtgtttatgtccytgcaaactccccttctgttgactgtgaataagacttatgatttgagtcaaattgacagratatgtcatgtctcttccacaattatataagcctggatcttgtagcggattgcctctaatctgcagtagtccttgctgcttgacaagtatgcagttctattagggaagcccacatggtaagaaactgtggacagtgtttaggaaataagaaacagacttcaggagccgaaggc

SEQ ID NO: 21301 - DNA, 600 bp, Bovine  MMBT18895
agtggataagaatccaccttccaatgcaggggacacaggttcaatccctgatccaggaaaatcccacatacctcagggcagctaagcccacgtggcacagctgggaagccatcgctctatggcctgtgcgctgcccctacggaagcccscacacctagagcccgtgctctgcagcaagagaagcctgtgcactgtaacgaagagtagcccccgygtgcagcagytagagaaagccatcgcacagcaaggaagacccggcacaaccaaaaattaatcagttatttattttaaaaaagaatyrggattggaagggggaccagggagaatccatctcatagatggcagtgtgctctaccacaagacctcagtaccccatccacagctgacacaccaggagtgagtatctgatgcccagaacaacaatttctaggctggcctgcagtctagttggygcaaaagcttatgcatcaggagtagtggtagggaactagatcagtaagagcctctctctgatctacattcacatactagaatcacagggatgagaacctgcttgttaggggacaatgagacaactcagatctagaagaacctgtagtc

SEQ ID NO: 21302 - DNA, 600 bp, Bovine  MMBT22515
aactctggataactgtcctgacaagctaagaaaaatgacattgggtgtggttgaaggttggtagctagctgcttcgaggataaatgtttccagtgacttccgaggactcaggaataaaggaataaaaatcaccctgaatatctgaacgcataaaagctattttcaggaaatgcaatgctaccttgaaacatatgtctcttcccagtttgttttattcttaccgttttgggttgttgttgttttttaatcctctctttctcttccttcagaatgaggtaggtaattgatttctttatcaasatgccgggtgatacatttttcacggctttcagggagcacagaaaatctaaaaccattgtctggcagatgcagctttcagctgcaatcatctttatcatcaggtaagcctgctggcatatgtttttcaaattttattcagaagcgttgtcttttactggtcaagtaacattctttgtgattgcgttatccaaaaataaaaaagaatttttagcaatgatcgaaataaagcttgttagatcattttaatggtaatgaattggttcctgaagatttgattaaagagaaaactaggtcaattta

SEQ ID NO: 21303 - DNA, 600 bp, Bovine  MMBT21408
cagggacgtggggaaatgggggctgtcgcaggaaccctaacgcattgttggattacagagcagctgggcagctttctacatcttcatcctctgttctaagccacccgccatcagcaaataagacttgtcgtccaaccacaccatcccacttgtgaccttagttttcacttgagtagtctattttagcgtctgtatttcttgattgggagcccacttggtgtttttggtagatgtgaattttctgtgatgcttagaaaattttcttggtgatcagtgtaagtactggctgggatatactcratgaaaattttccccatggagacccatcatttctcatagaatctctcacctctttctgtaccgccttggaagcagagtatggtggatgctgacagatgagactaagagagagggaaaatggccagctccwgcagctagctgtcatccatttgatcaaagaaacatggtagcaattacacggatttttaaaattaacttctagagacatttttatacaatagttggttagtaacagggtaccgcgtctccttggggaattttatctgtttttcccacttttcaaaccagcttagaagcaaa

SEQ ID NO: 21304 - DNA, 600 bp, Bovine  MMBT11130
tattttaccagttatataagtctaatagaggagaaaaagtcctcttaccacctctctttgggaacagtttcttagaattttcctgactaatacgggatcacgtcagtttgctcatttctcatcttctgtagctcatgccacacaaccaatccaaacccactccctttctaaagccaacccaagactcttcaaagtgaactgtatttgtatctgctctgtggtggagaggaaacgcttgggcaagggtcaacagagaattgctcatcaaattctagaatggttgggcagtgagacactctktgaagttggaaggaagcatctgagggtaaataagagagaacggcatcrkgtattgaatagtactcatttggaattggtcactcctcatggaaacctggaaccccaatgccaaacccatacacgtttgttgaatgaatgaatggaataaatagggtgaaacagagtttggataaactcacagatgattgatatgtaactgattagaaaaggagattctatttcttttaggctatggaccctctacttctttctcctttccccttcctctgttaattatgtgaatgacaaagaaagagatac

SEQ ID NO: 21305 - DNA, 600 bp, Bovine  MMBT07985
tcattaacctattcattcttcatggtggcaagggatctggttacatctagtagattgaaacctgagtcagtgtttattgggctgggcctcttctcagatgaacatttacatgttaaataagaggcattgtaccttccaagtttgcactttacagtgtggtatagakcgagatttgtttccatgccatttgatatactggttacagagtgatccacctccaattctttttacttgaatgtgccctattatcatttcatgattagtaggatatccagaaggttcaggcctcaggagattagrgactgagtttatacacacaactttccattagggttatgyagatcatctatcattttgtcacaggttgttggattcgatgtgayttactcactcttctctgaaatcaccccttttgttaaaacatataaaaatgcatacaataatttttaaatacgacatgtatttaagtgaaatcaccatgtccctaattataagcctaattaaatacttatcatggtttagtatactcgccctacttaaattttcacactctaaattttattttaaagtttatatacttaattacaatctcatgttttt

SEQ ID NO: 21306 - DNA, 600 bp, Bovine  MMBT20251
cacagtcttcaccgttaggtcttcaaaggaataattcacatcctgattctcacacctaggaaaagcacagaaggctgctcttcttaggagacaaacaggacggccaagaccctcaactcccaccgaaggttccaagcccagagttcagactactctcctattcctcctggtgcaagcaagcaggattcctccccctcrgycccctcacatcagtgyccagactgatccgtggggcccaggcctccttacccctctgcttggcctgtatctttacaatctactcaaccrcccataagcagraaagagctcatacctggtcaacacctctgctggattctgtgaagagaagaaagaaagaagttatgtaccctcgccgtgagatctgttactcaacttggtgagcagctacttttctgtcagttgcttttgtgagcatcacacatgatctccygctgccaagcccaacagggttaacacagggcagtcttttttcgtgtgagccctctgccgtatttaacaacgttgacccatcctttcctygaaaccctcctcttcctcctttggcactatgacatgagctgtctcctggctctccgtcta

SEQ ID NO: 21307 - DNA, 600 bp, Bovine  MMBT20252
actctcctattcctcctggtgcaagcaagcaggattcctccccctcrgycccctcacatcagtgyccagactgatccgtggggcccaggcctccttacccctctgcttggcctgtatctttacaatctactcaaccrcccataagcagraaagagctcatacctggtcaacacctctgctggattctgtgaagagaagaaagaaagaagttatgtaccctcgccgtgagatctgttactcaacttggtgagcagctacttttctgtcagttgcttttgtgagcatcacacatgatctccygctgccaagcccaacagggttaacacagggcagtcttttttcgtgtgagccctctgccgtatttaacaacgttgacccatcctttcctygaaaccctcctcttcctcctttggcactatgacatgagctgtctcctggctctccgtctacttctccatctacactctttcaatcacagacaagtgttaatgaggatgtggtgggaatataaaatggttcagccactttggaaaaaggcagtttcttaaaaagttaaatataaatataccatcagttcagttcagttcagtcgctcagtcg

SEQ ID NO: 21308 - DNA, 600 bp, Bovine  MMBT20649
tcctttgtcccttgttgagaaaatatgaggagagcataagaatatgggttcacacggtcttgaacaagtggcacatttgaatcaattaaggattatatttacacaaatatgttccacttctgcacagaggttaacctgagttctgaaatgcttgagtgcatcaaaaatgataaagctatgaactagtcacatacccaacaaacctagttaacttggagccatctctctgtgagccagtgggagttaagaaggtgggctcaccaactccaaggattctgtttctttattttctccaaattktgctagaaagcatcttgaatgagactccaggtggctagacaggttcgggcaaagtcttgtctttgacactatcgattcagctttcccaaactctccgaaaagggaagcacctcgaatgtccggtcccacccccaccctccacccctcagcgccttcctctctgagctcaaccttggaatgacagaggtctgtaaaaggatgtctcagccagagctctcatggatcttaaacgtttctggcgagctccccaaggcccgcgcgctcaaagccactacttgaagtagttgagtccygccacca

SEQ ID NO: 21309 - DNA, 415 bp, Bovine  MMBT13873
ttaactaaaaaatatagagaaacctcactggccatcttataggttgctaggcaaatgttaagtcaataaatatattcctttgactaacaatccttggtttgatcagttgtaaccagattcttaaagtcacattccaaaaaacttggctacttttgcatagcaatctgccttggcagcttttcccagaagggacctgtaggtctggcaattgctcagaatttcatgagtagtccagtcacaaatagaagatgctcccaaaggtaattatgagactttcatcagtacagtaattttaagcayggctttactaaagtagcatcaaattctaattggatccactaggcttaatttaaggagccatagaggactaattctaatgtactgttacatccagtatatcagcacaatattatat

SEQ ID NO: 21310 - DNA, 600 bp, Bovine  MMBT20168
tgcttcaaaagatgatctgtctctggggaatagggatgtgctacagactctgcaactgttggtgccgctctcattacagagtctaaccaaatgggatttcaagagcagcttcccaaagaatcattataaggacatttaggtctaaccagatgcatcaagatgtcagattctcatggcctttgcattaattcaaataaagtaagcccttctctgaggttttgaaatgttcagtttcttttttactaaaatactgactcttggagtggaaagcgattgaagtaaagttatgtcttatttacrttattgtgcaaaaggaataagtaaaatgaaaaatctcatttgaaagtattttgtggtttgctaaataaaagcaatatattggtaaaaaacagcaagaaaaagaatattgtgtcttaggaattaagaaatttatcaaactattcagttacaaataccttttgtatgttttgttatatgtcagactctgtgctaggctccaggcaagcccaagaagtaaataccctttctgttgttaaggcacttctagtctaatggtatttcccctgagaactagaagaactgctgtacaatagggtctca

SEQ ID NO: 21311 - DNA, 600 bp, Bovine  MMBT13147
ctgcttccctcgtagggtcgctgccaagccccaatgagatgagtgtgtgacaatgctttgtggattgtgtggttgcagacctgtaagctattattatttccccagctaccgtcgttaagggctcagcggtgccctgcaaccaaatcttctaaggaaatctaagttctcactgagaagcaaacaaaacaagttcattccatcttggcaacaatcagaaaatcagacggaataaaatccttgggagagaaaaatgtcttttgccagaactgcagcccactcaggaactttaagttccaagcytccaactcrgctgaaacctcttccatttctagctcttcttgtcattggaaaaggcaacacagtgagtgagggaaatgtcccttactaggagactttctggaccttttttgcacttgcaaaatagtatcttgaatgacccccaagtgattcagaaatgaggagacttcacyggcttatyaacaccatcaatgcttcatgcaacatgtagcatggatttttcctcctctttaaggagacatcttcctgtctttcctgccttggaataaaatgcattttatggatttcagggtgtcttcttct

SEQ ID NO: 21312 - DNA, 600 bp, Bovine  MMBT20672; identical to SEQ ID NO: 4822

SEQ ID NO: 21313 - DNA, 600 bp, Bovine  MMBT15759
aaaacattggcataagtcctccatgtaggtagggaatagtgtggatagccagaagcatagcaagtagaagaaagcagtggtcccagaaagagatgcatatgagcacagtgatacagagtaaggagcaaaacacattccaaagatacccccacactcaaagtcaaccattatccctccaaaggtgaaattctaggatgctttccagtgtgggaataattgtatttctcacgaactgttcttcctctgttatactgtaatttcctttagtgactccaaccttttaataaaattggttatacytatgaaggcttgcatagcggtgctttggacaacaaggaaaaagagaagtaaaggttggtgtgatttttctgatgtgcaagcatactctggaaggggttgtatgtgggagatccaagtggtgttcatcagagtgagatatagagcacacaaccttaagaagctgcaattccatgaataatccatgactcaaaaagaatacgaaactaaccctcactaactgaatacaagaggaggtgcagaaatagaatgaacagcagaaatatatatatacacacacatacgtacacaatatctgtaaat

SEQ ID NO: 21314 - DNA, 600 bp, Bovine  MMBT22568
ggcagccagcagtggtaactactaggaactcagttcagttcagttgctcagtcgtgtccaactctttgcgaccccacagactgcagcacgcaggcagctggactgactgaaaaagttatagatcctataatccatgtttttggttgcttcttactagcatttttacctctgttccttcttggatggttttctgtccccaccagccatgcacttttttatgtcattraatatcttatcrggaagaagtgtgttttctactaacgggaattttaaatagtattaaagcagatcttgtacttytgaagaatttgacactgatcacaggtacagtagggatactgacaaaaaacgagccctgctgttgccatatgtgcacagaaagaaaccagttactgaagcaagctggtcaatactgttttaggtgcaaaatttccaatcaagtggacagctcctgaggctgcactgtatggtcgatttacaatcaagtctgatgtatggtcatttggaattctacagacagaactggtaacaaagggcagagtgccatatccaggtgagcttgcattcatgtacctggagtttatgggggagaggcctttt

SEQ ID NO: 21315 - DNA, 600 bp, Bovine  MMBT20747
ttcttttgtttccattttttcctaacacatcatatgcataaaacttcctctaagatttagacataacctgtatataaccagacattatttacagagggcatctctttatctactattatttttatgggaaaaggaaataccttgcagaagaagtgagacagaagttaggaaatcatagcaatagtaaattacttttatcaatttttttaattgttatgttctgaaatttatagaaactatataagatctagttttcaaaaccatgccaagcatacaaactaaagtgagacctgctctacrcccttagagttactctggmtcgaatgtcctgtgacaattatgataagaatccatttactggacacagataggaaggatgacaactttatcaatccaccaggaatcaatggaacaacagcagtttctggggtattttgtcaaataaataacactgaggttaaagctgaactactggaagggaaaagctgtcatgctgagatgtgtttgttgaagaaaaggatttcaaaaatgataaatatgaagtaaaaatggaatgtctgggaaaactgaagatgaactaggatatgaagaactttattg

SEQ ID NO: 21316 - DNA, 600 bp, Bovine  MMBT06544
tgagccccagtcctgcctgaaaccgaaagacttccgtgacctctctgcctgattcattaaggctgacatctgcacacagcttacaatgatacaatgaacttgcactgttctttcctttgagcctttgtgacaccttccctgcccaccsccaccccmccccccagcccaggagagaggaattgttatgaataagttcacagggctttcgagatgttaaaaaatctgcctaaggccacacagctgataggtgtcaaagtcagatgcaaaccctgtgagcactttccggggctcctttgacaygaacagaaggtattggctgtgtcatcagacctaaggtacagtcccctgatccttccccctgcccccaggctgcctcccatcccctttcttgtgtcatgttctcctctgggtggccaagatcctaggggtgtatctgtgtaacccagttctaatcagcaccaattctgatcaaccgccwgaatgttggatgactttggaacyttggatgaatccaacttccctcacctggctggctgaragctcttggagtgaattayataattaggaagaggatggagccactacagatccactgcgcag

SEQ ID NO: 21317 - DNA, 600 bp, Bovine  MMBT09656
cctgtgcatcccgtccacgtgtcctggttcctccagggggtggcctgtcctagtctagactggggttccagcctgttgggttcaagtgtactgcgatgaggggggtctttgggtacttcgatacactggccttgctgatgggctttccctgtgctgggcttgagctgaaggactcgtagcccagtgggacatcttaactctccctgagctggttctgatttgcagagaatgtgagaaagagggggaagcaagtcaggccaaggagtcaggaccttgggttctagtctcggctctgctgtygtcttgctgcgtgactctagatacatcgcccacctttctctgggcctcacacagtttgctctttgtccaatggccagccagttccctggatcaaagtcctctggaaataaacatcggtttaacctaaggaagatgtttctgacttggctcccacagttcagggtttgaagatcccagttctgtggcccattcaactttgtgatctggagaaacttgctttacttctctgagcctcagtttcctcatcttcaatagggggataacacttctctgtttgaaggactattgtgagaaaaaact

SEQ ID NO: 21318 - DNA, 579 bp, Bovine  MMBT14868
tcactaatctctgtcagcaatattcacacatgcaagaaaatgaaattatatttcatatctaatctaatgttctggtccagagtaactaactaggattattgatatattccccagaattataaatcttctgaatgttataaatactttaactgaaattactttaaattataattactttctccttcaatctaaaaatgagaattttgaatatatgtagatgggtctaaatgtatttacttctcaattcaagctaaatttataaatgttaagtttatataatttgctgaaaaatattaaccrttttagatttctttagagggataccagagacttttcttgcatataacagtgatgactggctagtcagcagcctgttactagtagcttttaatttcaaagtagactaataagagttgactggtgggtgtctgtgcacgttcttgagtgataatcagtatagaattaatcgtcagtagaggcttatgtcataagctgactgtctaaatgatgaatatataatgaaattaaacagaattgagacagatggttctaacttttgataaatgtgcatatcttcat

SEQ ID NO: 21319 - DNA, 600 bp, Bovine  MMBT21503
ggacacgacttagtgagtaaacaacattcagagcagaataaaaggtgctgcagaagcgacattaacccaggattcctcatacacaggtcacctgttagattattatcttgaagtcctcaagttcaagaaaccataccctggccatccagcttgttttccatctggcccacccagacctggctctgccccttcccctccccctgtcascagatatgctaagggcacaacagtcccactgggtcctgagtccccaaaacttcacaacaaaacctgtcttctcccaaatgaaatkcaagggtycttaccttcacagaggcgagattttgtttctttgttgctttcaacatcgggaaggatgtcaaactgcctttccttggctttttagcatccatttcagtcctgcagaaggagatgaaaaggtaaactggcattagaagtaaaacacagcaagtcccctacacaggaaccttcaagttgcgaattttcaaagatgcaagcgtgtgttcacacgtccagtcacggaagtgagttcacrtgtctggcgtccatcgtcacgtgcatgcgtcctctagagctgggtgtgcttctgtggactttacc

SEQ ID NO: 21320 - DNA, 498 bp, Bovine  MMBT21504
ctgggtcctgagtccccaaaacttcacaacaaaacctgtcttctcccaaatgaaatkcaagggtycttaccttcacagaggcgagattttgtttctttgttgctttcaacatcgggaaggatgtcaaactgcctttccttggctttttagcatccatttcagtcctgcagaaggagatgaaaaggtaaactggcattagaagtaaaacacagcaagtcccctacacaggaaccttcaagttgcgaattttcaaagatgcaagcgtgtgttcacacgtccagtcacggaagtgagttcacrtgtctggcgtccatcgtcacgtgcatgcgtcctctagagctgggtgtgcttctgtggactttaccttataggactattgctgtacaacatgagaaccttactaatgaagacctgatggaattggaggcccagagaaaggacaaatgtagacaagaggaagatgaacaaactgaagaagagacacacgacgcagaagag

SEQ ID NO: 21321 - DNA, 600 bp, Bovine  MMBT09863
ccttggaggcatgagaatgcaacagtctcatcagaggcccacaggactgcaaawtaagaagccgattcagagatagggctattctcttcatccatgcttccttctaacccagttccttcaagggaactgcacccgttgkgggagtcataaatcaagagctgctgtgagacactctgctctttcctgctgccaaaagggaaaagagaggtttttctttgaaatggcatttacttggcatcgctcggagtttcggtagtgccaacgactgttataaacaagcccttttaaaaaataccttcyacagtatactaattggtgaatgaagtttcaattaatacaagctacaagtgagcaaatgtgaatctgtggaaaaattatttctgcataatgtaacaatgtcagggatacaagttaaaagctgtgagaattctattccagaaaccatcaggtcttctactgtggtttattatcctgatcattcatttcaacttgtccagagaaaagtgttcagattctgcttaaatgtgtacagtttattcatctatccttcaatttccccaccacgtaaatgatgcatttcctaaaaggcagtttctttta

SEQ ID NO: 21322 - DNA, 598 bp, Bovine  MMBT13092
  misc_feature (1)..(54): n is a, c, g, or t
nnnnnnnnnnnnnnnnnnnnnnnnnnnnnnnnnnnnnnnnnnnnnnnnnnnnnnattggttgatgagactacgtccagtttttgtgccagttgtagtcagcttcatttcctggttctcacacagccgcctgacactgttgtgtttggattcccaacacggctgggggatgtttatgtccccacccagacagctgtgctcattgaaacagaaggatcgttgatgctgtttacttccagaatggtaaaacgccgaaactcctcgtctctaaaaaatggttactattttatttaaaggtgaaytaaagctgtttatctcaactcagcactatcttataatggttttcccaagttagcgtcaattgaaaatgctcttatgttatttttaaagtgtcaaaaaatggtaggtcttggaaattctgcagatttttatttctggcataattggaagatttggaatatggttaagagagtgtttccatctatttattctaaattggccaagtctggaaaattacagagatggctggtccttttgtcatgagttcccaaaatcagaattgcttggctgatggccggactctgactttcttgaaaagtt

SEQ ID NO: 21323 - DNA, 600 bp, Bovine  MMBT05317; identical to SEQ ID NO: 4528

SEQ ID NO: 21324 - DNA, 600 bp, Bovine  MMBT00535
cttgtaaagcagcaggtcggctttgcaatgccttctaaaggtgaggacgccaaaggggggaaggggcttgtccgtggctgacccagccgtggcctccccagcccttctgactcccagccttgggggtgagtggccctgtcacctggtgaggagctgcccgaggcttcgaggagccagctgtctcgccctcctggctcacggccccgtttctcggcctgcaggaggccggccgccgtgagcaatggggacgctgtggacgcagctttctccgaggtccagcgctccggctggaggcggaasagttcccgtcgcagtaagtccccctccctaccctgccccccaggtctcagccccaggaggctggtgccaggagagccccccttctctaggccaagggagctgattcgggctcatgctccctgaggggctgtcctcgctacatgggcttagtggcagctctgaggcagacgggccactgcccacccatgagactygccccctttgccaccctggagccatggtcccggagtagatcacacatccagctgttcatctgtccccttccccctcaagctcctacaggtcgatctgggtggtggg

SEQ ID NO: 21325 - DNA, 600 bp, Bovine  MMBT18491
ctcacggccccgtttctcggcctgcaggaggccggccgccgtgagcaatggggacgctgtggacgcagctttctccgaggtccagcgctccggctggaggcggaasagttcccgtcgcagtaagtccccctccctaccctgccccccaggtctcagccccaggaggctggtgccaggagagccccccttctctaggccaagggagctgattcgggctcatgctccctgaggggctgtcctcgctacatgggcttagtggcagctctgaggcagacgggccactgcccacccatgagactygccccctttgccaccctggagccatggtcccggagtagatcacacatccagctgttcatctgtccccttccccctcaagctcctacaggtcgatctgggtggtgggtgttccccagtgcccaagatgagggggtccctctgacagcagtaccagacacatgggtgggctcttacggtgcagagagcaggtgccaggaggagggtgggagctgagagagcccacgaggaccgaggcagagtgcagagaagcaggcgtcagggccagagtgttcagattgagggcgaggggacccctggcac

SEQ ID NO: 21326 - DNA, 600 bp, Bovine  MMBT06991
cctcrgcataaccttcttgctgtttgggagaagtacaaaccttgctattcaaagtaggatttttagaccaccacctggaaacttctagaaatacagaatattgtcatccccycctccacccaggaacagaatctgcattttaacaaaatccactgttatgcatagtgatgtttgagagtaaataaagaatgaaggtgagaagaaggagaggagggtggtggtaccctggtttataaaggaattttgacattaaaattttattgttttctgtctttagaaataactacaaagattactcgytggagtcaagactacacttcagaattcaggcagctcttcacctctggaaaaaatcgtcttcagattgatcagaacatgaaggatggacttttctctcaattcataccggcgtatactatagattaggccttgtattaaagtggaaaaatgatcttgtgaatgagagacaaaaaactaattttactgtcaatattttctataatttgtgtggtttattcttggtctacttaagtgtttttttttttttttctctatggaatgatgatcagtaatatcttgaaaacttatattttgcatctt

SEQ ID NO: 21327 - DNA, 600 bp, Bovine  MMBT08280
atctctaattttcttgaagagatgtctagtctttcccattctatttttacagttttagataaatcacctaaccctttcagtcctggtgtcttcatttatgcaacaaagagacaagtctaggtattttctaatcttatgcttgttactaatattacacacatttctaattattattctcaaccatgcaaaggataaagcttgtaactgagcctgtttcttaaccttgtgccccctcaagatttgggcacactaatatttagacaaagaagcacacaactttcatttttttctgatcaattmaaaaagaaacaactgatgttttacaagagggaaagaatattgattttatttatttttatttttgaactgaagaatgacggcaaataataataaaattgcagggtaataaactatgctggcataaacatttaggaccagtaaaggaaatcatcagattctatgtcatttatacataaaatttagagagcaaacagttatcctttcaaagattttaatttatattccaaaatgaacaattaaagattgcataattatataacattgctattgttagatatgtgaatatatgtatattttcct

SEQ ID NO: 21328 - DNA, 600 bp, Bovine  MMBT11809
cctagagtgttttagagaggaagaggcctccatatgaatgatttcttctttactccgccatggcaatgcagacttggaggaaatgttaaattacctttttgtatgctccttgaatttttaacagrtcatctttgaattatcttaaaaaataaaagcaacatggttttcctgattgtaaaattaaaccttgttcatgaagaacatagacacaaaaatgcaaatcacccacgactccaccatgcaaaagtaacacctgttaacatttgaatttctctttttatgactatttcattacattaytgargtaagattctaggtaatttggtaggttatttttttccattgatattaatggaaaacatgaataatattttctcatgttattaacactcttcagtaacataatggtagtggcttcctcttaatattattccattayatgaatrtgctattactactttaaccatctccctactgttgagaatctgctaattctgtatgataattttattttgttttcttgattgtttccttagggtagattcccagaaataaaattactgggccaaatgaaatgagattttaaagaatgcttcttcc

SEQ ID NO: 21329 - DNA, 564 bp, Bovine  MMBT20065
ttctagatattataagttattatattatattatatctatataatatcttatatagatattataagtttctagatattataagttaatttgtacacataaccaagcagtactccttcccctcacttccttatgtaggctcaagttccatgctacaaacagcaagttttctacctgttgtacacaccagaccttcaaccatttgtgaaaacaatcatgttttccctagtattttcttataaggtcaaacactcccattacctttctaaaccttttgctcagcttttagagccatcaacatcycagtcattcctctttgaatgaactctaatttgtcaactactctcttaaacggtgatgtcaagaatgtgctctgactggctatggtcacagctggatcattgcttcctttaatctgtatgtttggtatcttcttaatacagagagtacattgtttgccaatatatcagagcatattgaaaatgtgtttgtggcttataaaatatgtatttgtgggcactggagattgcactattatcctagcatatagaagctaatgagaagtaa

SEQ ID NO: 21330 - DNA, 598 bp, Bovine  MMBT13995
  misc_feature (1)..(42): n is a, c, g, or t
nnnnnnnnnnnnnnnnnnnnnnnnnnnnnnnnnnnnnnnnnnttttgtccccagatgggttgcctatatcccggtcttgtggagagctcaggctgagaagtcggctggtgaatagctcatgctcttgggtcacacttgagggttcaaatttggctccagaacctcctaaccatgtgactctgggctgcagacttcacctctctaaggaaagggcaggacacacacccgcctgccagcgcgtagtgaagagtgaatgacgggacacagcccggagcccggcacagacaagcgccctgttayagcagcggccgctgggatgttgctcatggtgtgctgttattatcaccagtgtggtgattggtccacgtggctgtggggggcggcgcaagggcagtgggctcagcctcgcggtcagcttagagcccaccacccccttcccacaccatgggggagagcttcccgtggtgatgggcatgccctctgtctgccctgtacctggtggtggccactggcttcatggcactggtgagcacttgaaatgtagttagcataactcaggaactgaacctttattgccttgaaaaattactttcttggg

SEQ ID NO: 21331 - DNA, 600 bp, Bovine  MMBT04380; identical to SEQ ID NO: 4713

SEQ ID NO: 21332 - DNA, 598 bp, Bovine  MMBT20119
  misc_feature (1)..(103): n is a, c, g, or t
nnnnnnnnnnnnnnnnnnnnnnnnnnnnnnnnnnnnnnnnnnnnnnnnnnnnnnnnnnnnnnnnnnnnnnnnnnnnnnnnnnnnnnnnnnnnnnnnnnnnnnnttgttatagtcgaagccatactggttcaaaaactgaacactggaagcctggaaagagaactctgagtccaaaaccccaaatgtcgtagggaagaggaagaagttacatgaatgagctacatacctagcaacaaaaacaaacagaaggagaaaaagacagaaaacacttaaaattctggctcatggagcaggcttcckagtgggctcctccttccccttgagaagtccagctgacccctgaacaacatgggggttaggggcaccagctgttcttacagccagacatctgagtatactttagagcctgccctgggtccagmcacaggccctctgcacccacagaccccactgtggggcgtacagtaccacagtgtgtatttagtgagtgtaagtgggctcaggcagttcaaaccctgyrttattcaagggttcgctgtatttgaatgccagctgtgtttcaagtactatgactggtgctgggggccagtgaacaaag

SEQ ID NO: 21333 - DNA, 600 bp, Bovine  MMBT09247
tccctacctgtttgtctcctgttcacctccaaggccaagtttagagcctacctggactccattcaactcagcttctgccctgagtccctgtggaatgaatactgttcaccggccagtctcctggccaccatgtggctgcctaaaggtaataactttgtcttcacatctgtattctctacatgcttcaaaggtggggctttgcttctcaaaatgtttatggtccagcagaatcagcattacctggagcttgtgagaagagtcacaggctccacccagacctgctaaatcagaatcttccaytgaacaagatacctgggtaatactaatacacggccatgttcaagtttaagacgctggatggaatagggtggggaacacttaatcagtgatcctggaatttacttgaggcaatcaattattcctgatgacgttctctctcttccaagaggacaccaccaacagttaagggaatgcaaaccctccagcccttctcctagccctgcagtggctccctgccgtgaactctgcagagcttggtggccagtttccacgtacctaccacctacaccttctactttcaaagaaaccacaacctggacc

SEQ ID NO: 21334 - DNA, 602 bp, Bovine  MMBT21183
  misc_feature (1)..(2): n is a, c, g, or t
nnacattagtccagaacagccccagcattgattggacttcagcttaactgtgtgagtttattttgtgtataaattctgaaggcttcattctgaggcttgtttttttttttttgggtgcaccctgcagcatgtaggatcttagtttcttgaccatggatcaaacctgggccccctttgttgggagcagagtcttaactcctggactaccaggggagtcccatgtctttctcttcctctcttagtcacctggcaaaaaccwtaatcctaggagacccagttgtctcttactctgaacctcaccygagttgcagcacatggccagagaaaagtcaggcaattgtgttaaccatactcgcttcaaatctatgaccaaaacatccagtgggcagtaaagcctgcagtatggttctgccacacttgtgctggtaaattcccttccccacaccctgaggtgactcttattttgctcctctctctcctcacgtttcccacagcccttgaccatgaccctactctcacacactttggagagaagccagagaaccccgctctgaccaccgccaactttacccactcttctcacctttgtatctttgtgattt

SEQ ID NO: 21335 - DNA, 600 bp, Bovine  MMBT22627
cttatgctattcttgcttcctggaacatctcacaagtgccagcatggagaactcctacttgttctttaaagagctaaagtgaaaagtgaaagtgctagtcactcagtcgtgtctgactctttgctaycccatggactatatagcctctgttcacagaattctccagggaagaatactggagtgggttgccattcctttctccaggggatccttctgagccagggattgarcctgggtatcctacaytgcaggcagacttatattgtctgagacaccagggaaggtaaagtttcatctaamcctagcaaggcttgtttcactccttcaagaatcattcttcattcgtgaatgaatttatgtccctttttttcttgaataaaaatgaataaatgaatgaatgagcttatgccccgtcatgcatttttttgtaaaagcattcagattgtgccatggtgttaaactgccttgtttctggctcctacatttaggcattcagtttctgttgagggtcagaattttgatgatacttattcatcttaaaatctccaactttgtatataccatctgttgggtagaaagttttttctcatttcataggtt

SEQ ID NO: 21336 - DNA, 600 bp, Bovine  MMBT18850
ttaaaaataaaactaaacaaaatcatctcagcaaagtgaagatgatccttcctttcaggccttcaccatatgtttgaatgtttgaccaaagtttatatttgaactgtatgaaaaaaattgaggaaggcaaataatttaacatttttctcacaaggctgatcaccacagccaggtgaactctcaaagggcaggtttctttgtccattgtttatacatagtaggcatttaaaaggtactcaaaaaatacttgttgaattgracagaatcaacatgtctgtggctgcccttattaggtaaggygaaatccgactagaaataaaagttgtttccctttcacttattttgtgccagagcccctagcccctccccccccccaatgttaatgaaataccaaagaaaacaatggcagtactgagaaatgcctgtttaaattctttcagtgttattctgaaattgtgactcttaactgtttcctttatcacagataacagtatttgaataaatcttcatttgatggatgagtcacctgccgtaccccagtctactcccccttactttaaaaatttttccttcagaaagggaagccagacatatctttag

SEQ ID NO: 21337 - DNA, 509 bp, Bovine  MMBT05807
ctaccctgtctcaccaccctgtccacctccctcctgcacacagtcatgtccttttatagtccagccctcttgttagcccctctttatcctccaatctcaccccagccactaagatgtcattgcagtaggcctgtttgcccattcaactgtgaaggcttgtatcattaactcatcatgaaccatacccactgagcccagtcaacttcagaatactcctggaggcacccccagtagcttatctccaatgaccagagcaggcactggaggtgaagcctctccctggttgacctgttgttcagmctgtgtacctcccttccatctttccaagactgcttcttgtctcttccactcaaggttaaatgatcgaaatagctcttgcctgtttccttgcctaagacacacctggcagctttgtacaacagcccaagttccatgtaattctttgcaaggatgctctgctagaaaggcaggagattgggatcccttggtaacatcacagtatcttaggg

SEQ ID NO: 21338 - DNA, 600 bp, Bovine  MMBT07356
tgccattctcataagatacgtgttaagcatgttagtgttcacctgaatgagctcgtgggtatcggcaccaggttgcttcagctgcaggaaaacccrgacccagtgtgtgttaatggcagtccatagacagccaggttgcagagcagacggaggtcgacctgtggtagagattcgtgtcactctgtaggacagaggcatcgaactcttgttcctctctgagttattcccaaatctccactaggcttaggagtgactttgagaggaataaactccggatacctctgtgggtgagaaagatayctgagaaaacatacacttgtgattctgtcattcggggagaaagtatcttggtatgctttgacttgttaactaccaccgttccttctagggcagtaacagacattacacaaacttgagccaaaaaggtatgtatggtttttgtcctttatagaaaattactttttgactgacagcctctcccctgcacctgccacactctgctttgggatcaggctctgcagaccacatttctcctctgcgactggctttgtgttaggttctaccgatcatgggccacgtgggagacaggagcccctagga

SEQ ID NO: 21339 - DNA, 600 bp, Bovine  MMBT03943
caaaagctctggggtgctcaactgggctccawctcaagtgctaaaratcttctactggcttattttgaaaaattatttatacaaagtcatgcttgtaacattctgggctctcgtggttattagatttcacaccgaagagggctgagggctaagagtatcaytacaaggagaaacatgagggaggcagatactcaaagagtctgaattcacacctccactggagatactgagagaaaatataggcctgagagctccctggaaggcgagataagagaaattatagatgagggagctctttgyggcatcatagaacgatatctgctcatactcgtagtccaggaaaactccaactctgtgcacttgctctctcaaggagacccttttgaaaggggggaaagtccagaaggtgtgatcggttcccatgagagatcctgtgagcaagaccttatttccggagctgtttctgacggtggagctcctgtacacgcccagctgccactgcgccgccctgcccacgtccacctcccagtagtgccgccctgaggtgaagctctgcgcacccagcacggtggcactgaaatcaaatctctcagggtgacc

SEQ ID NO: 21340 - DNA, 600 bp, Bovine  MMBT02598
tggaagtatcactcttccagataaatatgaaatgtcagtgcttaaaagtcttgatagggtacataaaatctcttgggagacagtgaccccagaaggaaatctgcttgattatcatgtaatgtaccatacaaggttacagcaagatattttgtataaccatatcagtaaaatactggctaccacacagagacacagattaaacatttttcaattggtattaatatcaactctttggcctgaacttttattcatgaagaaaacatgtgaaaaagtcttaaagtttataagagatttcatttkatgtgagaaatctcacattttattctccttttcacacaaaaagcctaataatcatagactactgtagcagacagatgatggtctgttgtatgttaatttttcaagtttgataacaaaaatcattcagacgtcttgaggctgagtcaccacaaaattcaaatggtttttatgcattataaattcacgacttaagaccaaacacatttaacacattgaagaacctgtacctactagaagcagatggtgaagcagtgacttaaaccacctatacaagctgattctccaactgcaggcaggtgt

SEQ ID NO: 21341 - DNA, 600 bp, Bovine  MMBT03919
aaggtcttctgcttccctggtggctcagagagtgaagaatctgggtgccatgcaggggacctgggtttgatctctgggtcgggaagatcccctggagaaggaaatagcaaccccttcagtattcttgcctggaaaatcccatagacagaggagcttggcatgttacaatccagggggtagaaaagagtctgacacgactgagcgactaacactactacttctagacaaaaggtcttctgattactagtctagtggtctttgcacaatattacattacttttcacattgtgtcccaaaccmcctattatgttcacagagtcacatgaagacacagaaatagaaacagcactctgaatgaagtygattacattttatggcaatcaactgggtctagaaactttaaaataacacacacattttaatgccatatgtgtctgtgaaagaataataaagaataatgctggttcttgtttcatggggtttacagtggggcccctttttgtcccataatttccctaattagtctcaattgcgttctccctctaagttcgcaggccaagatagtatctgctttattgccatgggaggaaaacttgctct

SEQ ID NO: 21342 - DNA, 600 bp, Bovine  MMBT01041
ataggctgccaggcttctctgtacatgggattttccaggcaagaatactggggtgagttaccattattagtagtttatgtgtgatttggtgaaaatatttccataaaatggctgggaaacatagggtctaactatgctgtccatggtggacccttgtctatttatcacactcttttccagcttgcaaattgctaatgggtagatcatctccaatctcccaagtcttttcatctctaaaatactttgaatatgaaatatcagagaactgatctttacagatacttgggaagagtctattawgaaaaacaaaatgtcatttaacatgattcagatacaatatttgaattaacgtattgaatattttagcaaaactgaagaagcccttggtgtagagatgggtcattgaattctacctctacctttttcctgaattttcatacatgtattgcatttcagcttattcctctctgtcagtactctatttgaaaattatcttaaaaatggcaatttttatgaaatatttcttaatgttagaattcttcatttagcacaaaaatgaaaggaaaatcatgagtgtttttattgcttacaagagaaaag

SEQ ID NO: 21343 - DNA, 600 bp, Bovine  MMBT06934
actcagggcaggggtggctttgcaaggccacrtggtgggtaggactgagccaaacctccatttccaacttgatcagtaatgtaggtgctattttcatcctgaccgatttctacccttgaatgtgcttaaacccagaccccaccccagagaccctcaggaggccactgtccatattttccaccacatccacaatttctggtctgtctgcaaactggctgatttgggcatayggaccacaggcccgccstgaagtctccaggtgtgatcatcacttttgacattccttccctgacctgcccyaagctcagcagcccttggtgccctcagacagcamcctcgcagtcctcagcaggtactgctgctaactcatccacgggcccgcagaacgcatccccctttggagcaagggctgtgcttcactcctgctcgtgtcccgttgccaggcccagcacagcggcggaaggatgcccccgtgactgcacgtggagtaacctgaacgctaccccaagtcstgtacccagcaagccagtcaactctgggtgtccaaaatatgcctggcattgggtttcaaaggatgaaaaagattaaaaaaaacctttc

SEQ ID NO: 21344 - DNA, 600 bp, Bovine  MMBT20646
tggctgatttgggcatayggaccacaggcccgccstgaagtctccaggtgtgatcatcacttttgacattccttccctgacctgcccyaagctcagcagcccttggtgccctcagacagcamcctcgcagtcctcagcaggtactgctgctaactcatccacgggcccgcagaacgcatccccctttggagcaagggctgtgcttcactcctgctcgtgtcccgttgccaggcccagcacagcggcggaaggatgcccccgtgactgcacgtggagtaacctgaacgctaccccaagtcstgtacccagcaagccagtcaactctgggtgtccaaaatatgcctggcattgggtttcaaaggatgaaaaagattaaaaaaaacctttccaaaagaagatattttgaacaccagcagctgacactgcagaaaacacatgggactttggggccccrcaccctgaagtagaaatctgttatcatagtgtcattaatttgactactcccattgacaaaaatctgagttaagcttgatcaagaagatgacattaatgtartcrttcgtggcacttcacagtaagatcttcaatccagcacaggct

SEQ ID NO: 21345 - DNA, 514 bp, Bovine  MMBT21662
  misc_feature (1)..(26): n is a, c, g, or t
nnnnnnnnnnnnnnnnnnnnnnnnnnaaaagtgagaaagctattcgtaggctcctactaatcttttgtgaagcctcatccgctgtctccattagagactaaaaataacacgggctgatacatgaatatgcaatgaaattttaaagcagttctcccaacttggggggaagattctcactgttacaattgggaaattacsaaaattaatgtgaatttatgaaatcctgcaggaattgaatcccaggtgcttgtcagctcttgagattgagtgatagacaggcatgaaaactaaaggaaaaartggaggcgcctcaagcgttgctttctggactgtacctgcagcatgatgatgggagaattattccagtgctcctggagcagctgctgctatgacctccttattattcccactgttatgctcaatgacttttaaaaacctattttgggcacagttcctgggctctatccaatatatatttttttattcttcactggtatattgccactcaaatagg

SEQ ID NO: 21346 - DNA, 600 bp, Bovine  MMBT07114
agsgtgcaactgaaataagtaaagaatacaataaattaaaattctcaaaaaatagcttaaagcaatattaaaacagcatgacaagaatcattaaaatagtgaatatccattatatcttgctgcatygctgcatgtggcaatctgcgaaaattcttttgcatgattttatataaggtcaacatatggagaatttatcaatttctagtaggcactcagtaagtgcatatttgggttagtgaataaatatgtaaataaatgcttaagcattcagggacaataatggaaaggaaaaagttttawagactgattagatgtcttatggaacctgaaaacctagttttcaaagagactgaagtattgatttgtatcaatggatatttaatttccattaaattttataaattagaaatacatgctaatcttgttactgattggaacatataaatttttttaagtatacttgatttacaatgttgttttattttaaatttttagctatactctgcagcatgtgggatctttgttccacaaccagggattgaacccgcacccctggcattggaaggtaaagtcctaaccactggacaaccagggaaggcc

SEQ ID NO: 21347 - DNA, 600 bp, Bovine  MMBT08435
gatgcatgtataattccaaaatcyataataactagtgtcatcataccatggtagctagaattttcatgcttatattcccacgaagcccacatagtttccctaatagtgcagttggttttaacattacaatgcctagactgaaatagactgaaattattctctgccatgattgctattaagtgacaccagagcattaaaatgaataaccatgagagagaaaggccaacttcctaatgtcttgtggaatacagtgctttttgttttaaaatacagagacaagaatcaacctcaattttcttyatataatccatgtaactgagtgactcattttctccagtttacacaaaaatcaactgttattccattttttccaatatttctctcaagtacatgttgaatattctttttaccatttaacagagtttacttttttttttaataatgcctatataaatattttccaggaagcttgtgttttctttaaaaagattttctttctacattatgcacaaattatattgggtttactccatgagcttttatctaattttcatgtaatgagtttatatatagtctacttgattgtatctgctactaaaa

SEQ ID NO: 21348 - DNA, 598 bp, Bovine  MMBT11681
  misc_feature (1)..(75): n is a, c, g, or t
nnnnnnnnnnnnnnnnnnnnnnnnnnnnnnnnnnnnnnnnnnnnnnnnnnnnnnnnnnnnnnnnnnnnnnnnnnncctcacacctcagactggaatttatactttataatgctttgaaattatataacatttctagatggttcaaaatactctcaaatatcctgtctcataggaacttcacctgtctcagacgcaagtcaaatagggttttaaattyccactgttcttaaataaaagcagagaaatggaggcacgttgctcggggattttttaaacaagtggcaacaccaacaatgggcyggaacttctcgagctgggcccacggggaggcgcctaaagttcaggtagaagcagcaggcaaatgcagggggcctggccccacctgcactgggctccaggacttggcgcccatctcaagatcaaagcctcaagatgagctgactcggggggaagacctctgtaaatacagagcatcaccggctttaaaagaggctgagtcaaggaaaccagtcctccccactgagagcccggggtgccccccacctggccccagaccagcaggggaggatcrgggaggaaagattagaaaraggccctg

SEQ ID NO: 21349 - DNA, 600 bp, Bovine  MMBT12844
atgtttgactcggcaaccccatggactgtagcccaccagattcctctgaccatgggattctccaggcaagaatactggagtgagtagccatttcattctcccaagggatcttcttcagccatgcatcaaacccaggtctcccgtgttgcaggcagattcttttcggtctgagccaccggggaagctattatcatatgcagtaaacaagcttgcttaacctttgtctataaaagagagattattttcattatatcasactgtaagtaaacctgccctctgctctggagggagatatgtctytacaatgcaaggctgtacrttgttgaaagaggacagttcttctgcttacaaaatgtgcagatgatcaagagacccatggagaactatctcccaggaagcatttccattaatgcttcatattatgatgcaaatttgacatttctggttctaatgtaagaattakttactatgaatttaattgagtgcttcaaatctggtggtttatgtcttgactaggaataggaaaaagtggtcaggaagcattactattaatattgtattatttagagaaacaagatgatcaggacatgtttatattat

SEQ ID NO: 21350 - DNA, 495 bp, Bovine  MMBT13979
cttagcaacagcagcagcagcagcagcagcacatgcctaaactttccatgtctctcaactgttgaaaacagaggaaaggaatagctcttcctccttttttctcttactccatttccttccactctggtctgcatcaccagactctgcttcccaacgaagagcagctaggttctaacatggccattttgatgagttatttctacatttttgacagattttcgcagactatgatctacctctgaagtgcaataacatcccagatggcatcttcaatgaggtatctgaatggccgttaattcygaatcaatatgattactcagagcgagctgtgtgtgtgtgtacagagcgcatctgtgggtgttcccagcagcaggcatgcgtgacttaagagcagagagctggggattctttgaggaagcagctgcagggtggggaaacagttagcaggatgggcagggtagaatgatggacatttagttatcttgtattctacag

SEQ ID NO: 21351 - DNA, 600 bp, Bovine  MMBT10627
cccggtggggaagatcccctggaagaaggaaagggcaacccactccagtgttcttgcctggagagtcccacgaacagaggaggctggcgggtcacagagtcggacgtgactgacatgcacacacagcagggcaaagcagctatacttgagtacatttttaaaaactttattgctgcttctttggatattaaaaataagggcaaagtttttttaaccaaatgaaaaaaggagggccctcgtcaatcattctcaaccacaaaatctcagttccaggttaccagggcccctgcactggactcytttccttttgttaaacagacacagacctatgagaccaaagtcataggaacagagttggagccaccagaataatrtcaacaatcatggatgttcctaaaggaaacggatgactacaggaaccacggatcccgcgtcggctctaggatgcttacctgccctttgtattccactggcttcagtcctgcatagatgggcaggaagctgctggccagcaggacctagtggacaaaataaagacacagctcgtgaaatgagacagcaacacgtcctaccatctatttcacacgtcacctactagga

SEQ ID NO: 21352 - DNA, 600 bp, Bovine  MMBT17283
tgccttattgagcaaattgcctccttagcagtagaatgttggattaaaaatagttgtgtctatgaccagactcactgcctaaagaggaaatggatcttgcttcctcactcttcaaagccattgctatatcatgcgagggacattcttagaaaaacttctcagtttccagtttttctccagcaggagcatgtcaggaagtggaaactaaactttcagcctggatacatattttcaggaatggcttcaggtctattcatggccagggacaaaggtgtgaatcagaaagccgtggaaagcaawgaacatgatttcccacacaccctgtgtaattgtcattaaccttcagtggctgggtacaaagcacagttgtttactttgcacttctgatccaaacaggttcttgaaacaaagacattcagaaccaactaagggaaccccctgaaggaatgactcacacaacggagagacatgccacccaagtgaagtctagctagggagatgatatttaaaaatataaaaatgagaatagcacaagacagtgtatcattagcacatgccgtaaatgctacctggaggcaaaaagagaagtctctgtgggct

SEQ ID NO: 21353 - DNA, 600 bp, Bovine  MMBT04239
atttcccctcccttgcctagaccgtgtattgtgagtgaatcacgtaagtagtttatgtagttcagggatctttttttaatatatataaactattggtttgctcatgtccactactagcaaaaaaggttttacgggcaaaattgtaattccctttgaccttctctgattgtgcttggcacatgacagtattgttgtccggtatctcatttacaaataatataatcaagtgcatcatgggtcttctaaaacgctgatgatgtatctgtactgtgagctgctctaataatggataagcttcgytattctacgctccaaacacactcatcacaggaagattctgcagtatgtcttgtgtatgtgtacttgcattttgcatctgaacatgtatataagaatttatgagctttgattgacagttgggcccaaattaggcctttaattatactgactcttttttaaaaaaatcagggacctaccaggatagggaaaagtaattgtgatgctgaggatgcccacgcatcctcagaatgaagaaaagaaataggatttgggaaacccctctttaacyactctgttaagttgaaatgtatttagtttcta

SEQ ID NO: 21354 - DNA, 600 bp, Bovine  MMBT09140
gagatcctcagataatttaattctagaagaaaaaaaaaattaatcttgatgttagaatccaagccttaccactcaaggggaactctgtattgcttaccttctcaagttcccacaatgaaaagatctaacttgaatgaaatttcagagtatactgccctctgtgatatactcctgagactctgccaagatgggctcttacggtcttaaaaggaacaagctttggtgatatttttcaggagctagcatttgctatatgtaatgtaatcagttattttaaaatgtatattttctcagagtcaycagcaatttttattgaacacataatgtgccagatgttattatctcttttaattttggtaatggctggcacatctacttccactcactacagagacaaccaggaaaccacggtgaatgggaattggaatccaggaaatctattccggcactcatttccttaatgagtatgcaattgtacctactaatatattctatttccatgattgcaggggcccttattatcttgctcacagctatttctccactgcctagaagagaaactttctcatactacatgatccataaatatgtttagggtga

SEQ ID NO: 21355 - DNA, 600 bp, Bovine  MMBT22210
agtcacaaagtgcaccggtgttgacagtagagacctatatggaatttattgtttacagagtgcgtcctcagacattacctcactcggtactcatgacagttctgtgagttattactaatgccagggaggaggaggctgaggcctggagaccccccctgggccaggcctgggaagggctctaggaatacagagaaacaagccacctgtctgtcttagagagctttcacagagctggatggatcctgatccctttggctccactgacagcagctctgcacatcctctcccatcaaagagggscttccggaaatatgcattcccctcacaggctctttggtggcaaagtcaagatttctctcgcaattttagggtaacatccagctatgtagaggcaataaatagagtgatgggtgacattaatgacagaccaagtgaaagggactgagttttctaaattgggaaaaaagtatgcttgactatcatctccttggcactttccatcatcttactatttagaagggcacattttttaatgtcattgacaagagtgagcgagcactttatttacatgatcagaatagaaacgggaattgcagcttg

SEQ ID NO: 21356 - DNA, 600 bp, Bovine  MMBT01679
ggcagttcttaatataatctagccaggagatcttcaaatttcatttctgtatccaaactctaaacaaacaattaggtttatttcatgtagaaaaatgatggtgctcattactggagggacagagaaaggatcccctcctcatcccagtaaaatgtaagttttgataatttatttatattcccttaaaatatttgtgactaaggatgtggttaaaagccatggaacaaaacacagctaaatgacctcctcagagagtaagcttatgtctttggtcttaacttgtatagaatcacactaagkgaacaattttttcctgtctgcattctgaaaattgaagtgattgtccattgtcaagcaagggcttcattctttgctctaaactactgatgaattttataaattcttaatcaaaatctttgagggaaattatataatgcaaaatatttttatttcattatcttcctcgagatcaatgagtttaacctttcagtcttactaccttctgaaytgcgacagatggtgtaggtggcaaatattacacatttggtaagaaaacatcatggatataaatacccttgtctttttccctcagatcagtgg

SEQ ID NO: 21357 - DNA, 598 bp, Bovine  MMBT21817
  misc_feature (1)..(106): n is a, c, g, or t
nnnnnnnnnnnnnnnnnnnnnnnnnnnnnnnnnnnnnnnnnnnnnnnnnnnnnnnnnnnnnnnnnnnnnnnnnnnnnnnnnnnnnnnnnnnnnnnnnnnnnnnnnncagaaatacttagcagtctctatttacttcagcagattcttgtgaattacttgttaaatattattctgtaaaaagaagaatctattctgttggaaatacttagcagtctctatttacttcactcttacyacctatgaatcagcactaccaacacactcaatgctgcccaggagtcagttaagaagaatcatgtrtaaggctgcattacttcttcacattataaagtgtattttattgttaacttatgatctggcatggctattgaaataaatttagtcaatggtaatatttgaaataaataaacagcaaataggttaaaaattgtatcawattaaacrtattttgaaattaatgataatgtgaaaattctaagrtcatttcactcttttggggcactcttagtgaaataaggatctcatgtgaaggataactaaatgtggctcttttctgtaattggtattggatgtcaaaacagttaaatatgtctcagca

SEQ ID NO: 21358 - DNA, 600 bp, Bovine  MMBT06018
tccagtttctttccatttgagatcataactcttagtagaacactgtgcaattaataactgcttagaagtacctgtttatttgatctgagaatgttactggcatatgttgccttctctcttttatgacaagaatagttttacaataaaacacatagcctaaaatcagtacactgaaagccacagggaccattatttaaggcaagtccatggggtcacagagttggacatgactgagcacatatgcgcaccatttcttagcctaacaaacttgaaggtgtccctttgagcagcaagtattamagtgggaagaaatagcttcatactgtaactttcctctagaaataagaactgtccttttagtgaagcaggctgctctgtctcacgggatawaatttgggcctttgagaaggaatgtaaggctgctggtctggtttgaaatggttgtgtgtggttgtccaaatccctgaagaaacttttaagtttcttgccaaggccactgctattgaaaacagtaaatatattttcagaaagttagagcaatggagaatgaaataattcacctgtcgtcttttcaaaatgttagtttcctactgggagcag

SEQ ID NO: 21359 - DNA, 598 bp, Bovine  MMBT13589
  misc_feature (1)..(144): n is a, c, g, or t
nnnnnnnnnnnnnnnnnnnnnnnnnnnnnnnnnnnnnnnnnnnnnnnnnnnnnnnnnnnnnnnnnnnnnnnnnnnnnnnnnnnnnnnnnnnnnnnnnnnnnnnnnnnnnnnnnnnnnnnnnnnnnnnnnnnnnnnnnnnnnnnnaaaaaaaagactattccaagtgaacaaaactgtcaaataaaaaaaaattgtgcaaaaacagttacttctctctcttttgatattttacttaattttatttagtctaattggaagattaggcaattaatttgggaacacggttccccccacattccwtttgcctagggagagactatcggatccttgtcttggctccttgacaacatctttcaaatagcctcaggaacatgactgttgctattctccttgcagccctttgatgaccacctgggacctaggatatacaagccaagttccctctctaacctgatcagcatacttccccggccgaacctccaagttacttcctgcttcacacctcttattttaataatacagaactgctgtggggctccctggcctgtgtcttgctgtttcttgcttctctgggtaaaagattatgtctataaataaa

SEQ ID NO: 21360 - DNA, 600 bp, Bovine  MMBT01155
aggcttgcttaatacagcccctcygtaatcataataaatacaaagggcttagattagtgtccagcacagagtgaaaactcagtaagtgttattgtttatgatgacgatgactagacccatccagcaccttaacttgagaacttcctggcatctgactcaacagcccaacacctgggcatcaccacccctgcctgacccagatggatgaggttagcaggggagggagtatgctgagaggcaggcccctggaaatagctggtttgatacagtcttctattggctcagttagtaaagaatctrcctgcaatgctgaagaccctggttcaatkcctgggtcaggaagatgccctggagaaggaaaaggctacccactccagtattctggtctggggaattccatggactgtatagcccatagggttgcaaagagtcagacaygactttcacttttcatcattaaaaaggatgaccaagtgctccgtattctttaaagcaaatgtacataaattaccttaggttagaggaaagatcatttcctagcgttgttacagatatttcctgagttggggaatcttctcagtgagttgagacctgtcccca

SEQ ID NO: 21361 - DNA, 598 bp, Bovine  MMBT05963
  misc_feature (1)..(83): n is a, c, g, or t
nnnnnnnnnnnnnnnnnnnnnnnnnnnnnnnnnnnnnnnnnnnnnnnnnnnnnnnnnnnnnnnnnnnnnnnnnnnnnnnnnnntactttgtattactatgtgtatatcaccttatatttgaagttattaatttactgttatacataagcaaaaaatacctgtattgtagttgaaattggctagctcttaaaacaggcaaggcccttcctcattttacatgattataatataattaaagctatggttagtacctctgaaagtgagagtttggaaacattaaactttggtcatttttcttaygtagatggaaaaaagcacggcaggaaggaggctatcgttctgaaatagcatattgccggaagaactttcttaatagaacatcactgttaaccctagaggtaagtcttaatgcagctgtcttaatttagggtcatatggtggaccagtgggattatgttgggaaaagaaatgcctaggatagtgcttgacacatagtgtttaataaacatttgctaaattaataaatttgtgatttttttgttttgtttaccacaacaggtaacctgtattacatggttattcaaaatagtatttaaca

SEQ ID NO: 21362 - DNA, 600 bp, Bovine  MMBT10188
tgaaggaaggaaggaacattttgcgtctcagtgaatctttctgaccattcaaagcaccgtctccatacaacacgtgcttgccttccgggttagctgattcataacagcctcttcgaacttcacagctccttgaattgtcagcaactgatagcaattcaaaaccactgttacctgctccttccggctcatccagccgaggtcccattgacaagcctcctcccctgtggaaaaaccaattggcctccattcggacatgtatttactcgaatagtctgaatagtctgatatgtccttaagagkgcctgtttttctggactcttgaacctcgtggaacatctgcctggttcccataggagttcaatagaaaaaaaaaaatcttaatacgtgtcctttatttgtcagtgagagccatgattacacccgcttttgaaaattatcttttaaactttctatgtggaatctcaaaagggcgagggctgggactctctgggctctgggtgccatctggcgcgtccctcagccacaagggggcgcctcagaccctgggccaagcccatgaggcagggcaggtggaggactcttgtaaactggctccctttg

SEQ ID NO: 21363 - DNA, 600 bp, Bovine  MMBT10257
acctcagtggcccagggattgacccccagctgctgggccagcgtcagaaaggcgggcagctgctgacggtccaggagcaggtagacgggcacccagcggcatgtggcagcctccaccaggtccgaaagcaggtctgggtcagtgaagacgtccatgaccacggccaccagctgaggggtggggagaggggctgtgggtggagcctggggcttggggggcacattctgggggtgaggttctccagggcgtttaatggtccaggctccgtgggacattcagggaagctgagggggatacccygagacacatactacagttcattcagcgcctatgtgtgaactgactcaagggacaggagtttgagcaaaccccaggagacagtggaggacaaaggagcctggcgtgccttagtccacggggtcgcagagttggacacaaccgagagactgaataacaacgatgtgtgaatgagaagcaaacaggctttctggagcccctccacctctaactgctagaaaactgtcattataaagcacacgtctgcagcagtaccccatgggctttgacactacgtggctgccaggctccagggcttggtgg

SEQ ID NO: 21364 - DNA, 600 bp, Bovine  MMBT02488
taaacagtactctggaatcatttatatacttcactgcattgtgtagatttttcatgttgtgtgcctttaagatatccttgaattggtatgtccatggtaaccagaaccatgtagagtctaagaaaatgttactgattctctctttgaatttcaagaagcacttctctgtgatgcttaaagcctaaattactagattttccttctttgaaagtctcttttaaagggacttttctaatatggaaattttttcttataaaacagcaaaaattacacaatggagatcttacatttatagtggawaatctattagctgcaatcccaagcttcatatcttatttgttaaaaaatacctctcctagacttagcaaaattaccacatttaattacattgtattgtaaaaacaaatatgaagggaccttgatttaaaaaagggctatgggattcttttcacagcctatcatatagtctttcaagctcaaatatgccagccagagcagcaaagcctgaaagaataaaggtatgatttggaaggctctataaataaaaagttgagcatagtaaaactgagacattcattctttttactgattttacagagg

SEQ ID NO: 21365 - DNA, 600 bp, Bovine  MMBT11734
cccccactggctctgtgccatctgtccctgggcacacctgggtactgcagggggatgtcaatcttgggcccgatgacgtagtggccctcctccagggtgtgggctgtcaccgtggtccactggcggcaggaatgaatgagcaggatgtctcgctcactgacgccctcagcatactcccctgggagggggcaggcggacagaggagggaggagagaaaagagaacatcaggaggggcagagagacagggtgacctcctcaccgagacaccgcccgaggacagctctccaygatccctgtcygggccagcaatgctccagggatgggggctgccagctgtgagcttggggctgaatcaggccccgtctctcagggctcaggcttccgatggggcctcagaaaccaacgctgcctccatcctgcatttatccttcgactggactgcctgctgtcccagtccgtgtgctggagccaggggctcctccctccaggagccctgaggcccagggggcaggaggtggggagagatgtgaacagaggatgcgggcccagtttgaggcactgaatggaggcagtctgagctctcacagaaggggcagcaa

SEQ ID NO: 21366 - DNA, 600 bp, Bovine  MMBT10794
cttagagcaacttgataaattatacctttattatccaaatggaagcatttagctttttatttttacctgatccctctggaattcagaaactctcagtgagtattcttattttttggcactatagttatttcaaaagttcaataagaatctgttctccttataacaggacagaattggaaaccctggttacattatcagtgctttgactagaatgtcataaatgaaattcagataaacatgtagactcagatatgaccagacagttggaaggaacttttgacttttagagccaatgaagcyccttggaaaatcagcctggtaccttacttatggtattcacagcagccttacaaggtgagtaaggaaggtcactttctggcaggtacaggaacctcaggatattttgaggacctcaagaagacagaaattcaccaaatccataggtattacaggtgagcctggtgataagttttcagtgtggtttccaggccttgagagaagttcagtctggagatttactatgaaaaattccagcagagtaggtttaaaagtgcctctatggccaaccactattcttgctggacttatacagataatcag

SEQ ID NO: 21367 - DNA, 600 bp, Bovine  MMBT08428
gatcttagttccctgaccagggactgaacccatgcccactgcagtcgaaaggtggagacctaaccatcagactgccagggaagtccctctcttttcctttttagcgcttataatcaggcttctatcatcaccattctcctgaaaacacactcctgtgtgccaccgatgtgtgcacatttggcaaatccagtgatcctctttcattcttcatgttcatggcctctttgtgccaaaatgtgctattaattatctcatcttgaaattctcatgtccttaattcttcataaccattctcctcakagkctacaaggtgtggtgttctttagtactcactcttttcctacatattctcatatacttatttatatccatacwcatctttatttacctatgttctccaaccttaagcactacccttcttgtttaatccttccytccaaatccccratcccctcctttgtatctcttcctttgacttttttttttgtctcctgtatcttcaatttctccctctccttctcaaytggctttttggtaacatattcaagtctattccttacaagtacagtgatggtaagtacaataacaacaaaaggcttc

SEQ ID NO: 21368 - DNA, 598 bp, Bovine  MMBT12292
  misc_feature (1)..(46): n is a, c, g, or t
nnnnnnnnnnnnnnnnnnnnnnnnnnnnnnnnnnnnnnnnnnnnnntccttctaatgctgaaagcccctttctatccccctttccctttcaacctgcccccagaattaaataatttgtacctaggttttctcgtgaatggtgcccactctgatgcaggcaaggtgctgtttgagaaagaaaatgattgaagctcagaagtcaaggaagccaagaactgccaagaaggagacaatttccctctgtactctccttcctcaccccacactttcctcacatatcacactcccaggctgattttycctttcagaggaaatgaagcaaaacacataaatggagtgaaatggtttattcctcagagtcgtaaaaccacagttccttgtaaaaggtgaagaaaatgagctcctcttatagataagtgaggcttttaggtaaaatgtcaatatcccaggccctygataacttcctaacatatgactttctatagagacagmtttttgtcaaccaccatggaaactgtttgacttgaagcagaaaaatgacttcaaattatgaaaatctgaccttcaagtatggagatgcttcctctgaatgatytta

SEQ ID NO: 21369 - DNA, 600 bp, Bovine  MMBT11477
gagagcgccgtatattaggcaatgtatccaagttactttagttttgctacatgcaaaaatttctttgctgagttgcgatatgatactctccctcggtttttatagagggtggatatgacaaacagccgctgaagaatgkgtcggtgttactggtgagcatgctattcaccaagttgcacaatttcctttatctcaagattcccatgctttattttgcccagagccaaactctagragagattgtgtctcttgggactaatacacatgctgccttgggacagctccatacctccttggaartgaaaagttkagaaatgagatgaaatgtgatgttcacatggtaagcccaaattctaggtacaatgagacttctttttttcctgttggttgctctatttttttttttttaacagagtttttaaacrtcrttttgttcaaaatagaaattgttttataggttgtttctgatcttaaatatgtgtatcttgactgtaaacaaaaaacagtcaactttttgatgtgtccccttgcagatttacatacatatatgggtgtgtaaaattttacttgtatctgtgtgctttggaaatgaaagtttag

SEQ ID NO: 21370 - DNA, 598 bp, Bovine  MMBT03189
  misc_feature (1)..(138): n is a, c, g, or t
nnnnnnnnnnnnnnnnnnnnnnnnnnnnnnnnnnnnnnnnnnnnnnnnnnnnnnnnnnnnnnnnnnnnnnnnnnnnnnnnnnnnnnnnnnnnnnnnnnnnnnnnnnnnnnnnnnnnnnnnnnnnnnnnnnnnnnnnnnggctgaagtccttaattagatataaccaggatttcagttgctttctaacaacttttacatccttcttcaaacactgcatatataattccagtagcatttgaaaacaacagattacatgtccctcaagtgaaacaaagcaattcagggaagaatatttttccscaaatggcaaatttctctatataaattctccatgccccaatcacctccatatttgtgatggacactctgaaagcagggaggcctttgcatgcccattcatttggctacttggtggttcactcaggacttttgtttattttaaatctgtatgtcatcaagggaaagaaactaaactacagatctgaagtttttcagctctgtctcaggtaaaactcatgagtctggatcactggaatctgagaaataattttagtataaaccagctcagcaaagatccaggctgtccacaaacacgcca

SEQ ID NO: 21371 - DNA, 600 bp, Bovine  MMBT11251
cagtggttagggtttggcgcttgcactgcaagggcctatgtttgatctctggtcaggtaactaagattctgcaaaccatgaagctcaccaaaaacaaacaaacaaaaaggtgttctatccttaaaatctggtagtattcagctgtgctctataatacatacgtattataaatcttatatctcattaaatatatttatcaaataatgatgcacctggattataaggttttgtagactggtaaaatatagacaaatttgacagatattttttaaatatctggaggactgtagttgaaaactrggtcattaacgtgcattagaactttatctctgaattaccagggagccaagagtaatttgaataatcaggggtccctgatggactagagtctgtaacaaaccatactgctgccttttcctagcatgaacagggctcagttatgatgtttgagcacctcatcaattctaacggactccaagatgtcatgaaatactatggtctcatccctgaagaagatattttgtttatcaaggaacaaattacaggaccacctgaatcacccatcaaagatgcttcaaaggtaaatttgtgtacaaccct

SEQ ID NO: 21372 - DNA, 600 bp, Bovine  MMBT22284
cattcctggtttgacaggttgcaggtcagaattgctgtcaggaaaagaagaaccccaccaccagcgcactgccagctggtggtgctcagagcccttctgcagaaaggaacttgctggacctcctctccccacagccgcctccgggatctctgtgagtcttgtgggcaggcagccgagaagtgttgctcctgtgtgccgttggccrggctgccgcttytccctgagggctgccctgtgtgccgcccctttaagtccccatccaccccgagtcaggaggacacaygccaaaggccaggaccyctggaaagcrgtttcaggagtaacatcagcggtagctgatgatgatgtttttggtctttataggttggttttctgttttcytgatttcactagtttgcagcgatgtttgatygctagagaaatagatcatatagaaaatcctaaataccattccctaaacacgaggttgaatgcgccttctttgcttttatcctgcacatatagtaatatgtggcttgttttacacaagggaggttataatttacaggttgtgccatgctatgggttttttttaactttttaaaaataattttacgtttg

SEQ ID NO: 21373 - DNA, 600 bp, Bovine  MMBT11374
tgaagccccaatactttggccacctgatgtgaaagctgaatcattagaaaagaccctgatgctggcaatgattgaaagctggaggagaaggggatgacagagcatgagatgaytggatgacatcactgatccagtggaccaccatctctgggagatggtgaaggacagggaagcctggtgtgcagcagtccatggggtcacagagagtcagacatgactgagtgtctgaacaacaacaacaaattcagtctctcaaatctgtgtacaaaatacaaataacttaaaaatagtctaaacccwaaggggcttagatattgtgggaataactttcaactatgttagggagatctattagttggctyagtagtttgtttgttttagtatacagccttgtcagttcagttttccattcagaagacatttagcctgagattcctgctacaggaacagcagtagctgaaatgctaaataacagtcctttacaggggcaagtgtatagtgtaggctgatctcatcttgtgtacctgagaactataaaaagagagtgtactgtgaaatagcctaatatgtatatttatatatgttgaattgaatgaccct

SEQ ID NO: 21374 - DNA, 600 bp, Bovine  MMBT19110
ttagtactgtattcatatgaaataatataaacaagtgttatcacctacagggaaaactgaggaccaaaaatagtaaataccttaacccaggctatacaacctgccactaaattaaaatctgtcccattcccttcagcttgtattctatttagcattaatatagtttagtagtattcttactttgttcactcagcyatcttacaatcaggtattaagtgcccatagatttcaggtgctgtgctatagaataacccagcagttaagataggaagggctgttcagataaggaaggctaaagamagacagggcattaaatgagattagggctcctgtcagtggtcagaagcagcatggatgattctgagatacaaagtcacttttctcctctggaaaggctgttttttattgatgctgttcatcttttaaaattatgccaatgtgataatacattaatttatataaatagaagccctaattcaaggtcaggcatatcagcaggatgaaattaaatacctcagtctggaactgtagggggcccatcgaccactttcaacctcctcagctctatagataagaattctttgaatttatacaatagca

SEQ ID NO: 21375 - DNA, 600 bp, Bovine  MMBT00630
gttaggaatccacctgccaacgcaggggactcggtttgatcctggtccaggaagatccaacacgttgcggagcacctaagcttgggcgccacagttactaagcttgcatgccacagctactaaagcctgcatgcatagagcctgtgttcactaagagaagccactgcaatgggaagcctatgctctgtaactggagagtagcccctgctcactgcaactagggaaagccraatgcagcaacaaagacctagctcagccataaatcaattaattaaaataagtaaacaaatgaaggtacckgtgttccycccaaaaacttaatactggccgactttattctttctacaaacattcaggaacctactgaacagagcttgtactggaggatacaagaatggaaagattgcaatgggggtctatygtcccgagtccagcctcgtggaagtgaccactattcaaacaaattacccaacgattaaatcacaattgtgttaagtcctgatgaagaatcaggagtggctctgagagatggcacggagatagaaaccgttcttagagaaaggtgagacatgaaggtgagagaggaaggagatgaaagat

SEQ ID NO: 21376 - DNA, 598 bp, Bovine  MMBT13529
  misc_feature (1)..(28): n is a, c, g, or t
nnnnnnnnnnnnnnnnnnnnnnnnnnnnaagaaataaaagcatacaggcaaattggaagttatgactgtttaggaacttaccgatgagagcagatcgtaagactcaaaccaccacctgagataataaacctgtctccaaccctctagattctagtttacccaattcttctggcaaatacttcccagctataacagctacaacttattataaaaaacttttacttttttaaataaactaaaaaacaaataatgtaaaccatcacattttgacaagaagaatataacaagagtatggaaacrgaatttaaggtatctgttaaaattacctttggatcaaaagatcctttatttttaaaaagaagttcttcaacactctctcttatttcctttggaatatttcgtgcatcaaaggttgctatgtcttctcgcacccctctctttgcaaggaagctagaaataaagcatattattaattcaaatgaggctaaatatagtttgctatttttaacaaaaatatcaatttaacagagtggtatatacaatactttcaatctattagttaaccacagaacagagtaattttaaagtacttaagttt

SEQ ID NO: 21377 - DNA, 600 bp, Bovine  MMBT11100
ttaaagaattggacatggcttggtgaccgaacaacaacaatgaagcctgcgtaaaaacccaaaaggatggtgtttgggaagtttccaagatgatgaacacatggaggtgctgggagtggggtgccyacaggggccatggaagcactacgccctttccccatgccttgttctatgtatctcttccctctagttcctgagttacattatgtccgtttataataaacctgtaatctaataactaaaacgttttcacaagtgccatgagccactacagcaaattattgaacccaaggatgggtsgtaggaacctctgaggtaacaactggagcttgcaactggcatctgaagtgagtatgggatgtggtggaatggggagtggtcttgtaagactgaacccttaacctgtggaatctgactccatctcctcgtagagtcagaatcgagttgagctgtaggacaatcagctagtgttcyaagaattatttcttggtatcaggatccctacccctcccctccatattaagcactaactcacattgcccagtattctcattcatgcacttgtgtcacaggcaaactaaatgtgccttcaaacatgct

SEQ ID NO: 21378 - DNA, 600 bp, Bovine  MMBT22925
atcgaacctaggtctcctgcattgcaggcggaatctttactgtctgagccacaaaggaagcccagtcagaatttacagctggatttcattcagagtggttgaaacccaaggcagttttggttaatattttagtcgctactaggactaaaggaaattctaaaataagtgtctgactgttgttaaacaatatactatacagtccattcaaggaattatcatcatgctgtccttcctgtaaaaaaagtgatgctaatgaccagctgacagtagggcctacgtagtgacttgttttttcaaggrtgctgggttctgctactctctcctgacctctcagtgagagcaatgaaagaagttaagaggccagagtgcagctacagagagaatatgcattgctctggcctcattaacaccgaaactcaaaccaagtgagtcaaacaatttggagaaacagttcccttttcaactcccaggtaaggtgaacctgtgaaaattgcctatggacctggtgccaagttaggtaaacaataaaaacagagagctggttcctcatccctgaaagatgaaaagtctcaaattgagggggaaggaggaaatccaatt

SEQ ID NO: 21379 - DNA, 600 bp, Bovine  MMBT22817
ttggaagcaaatcatgttttcttgtattttctgaaacatttgtgaccagagggcaaagctttgtactcaagggatagagagtttatagatctgcttggaaatgcattttgccatttttttaaactcaattttataaatccctggatttatcacacttcaggaaaaaatctaagtggcattgcacaccacaaagggacaaggcagaataaaaatccctccgcctcgaagactatgaagcggatggcccaagtatggaagagtgaaaaccttgacatggcaacatattcagatttgctccaycccatcaagtctttctggagaaggaaatggcagcccactccagtatttttgtctggagaattccatggagcctggcaggctacatgactgagcaactattactcattcatcaagtctttgaccgcacgtctcttccttatttttgaactgcattcttagtggaaaggcctttttctgaccgtggacacacatcagagtagcttatacatcttgaatttcaattatgtgccaggccctctataagtggttaaatttagaagtttcaacatttttgaagttcttctcaaaacctcaggaagt

SEQ ID NO: 21380 - DNA, 600 bp, Bovine  MMBT10947
ccccagtacaattatagccaggacttcaaccagagagccatgtctgggtctagccttgctagcatatatggctttgataacgcaggactaaagagtctcactctttggcattcattgttcctaggaaaattccagctggaatctccacactatgtactttaatagcacagggaataccacatcaggaaactaataatttctccccgccgaaatgacctcttctttctaaacaggggcccagtaattctccttggaaaattatagttctgttactagagtgtctcttcatctggaaggaawactgcccattcatacggccaggcaaggatgaataaaacatgctggtggagaaatacactaggcgtgaggtcccattcattccattctactgtgtcagcacattctgcagaggtaagtttcctagactgccacaacattttgctatttcttacttaaaatagaggcggagggtagcatgtggcttcctatcatgttaaagcagacttgtatccaagaatagtgtgcaaaagtagaagtgtycctgtttatcaaagatatgtaagaggttgacacttcgaaaataatgcctctgcttagaag

SEQ ID NO: 21381 - DNA, 592 bp, Bovine  MMBT18623
tcaaacaacacatgttgcagtcaacacgaagtgataagatgacagcagaagcaaaagaaactcacctccatcctgggatctctagacatcaagtagtgagctgcttgaaggatcttgcaatacagacaagcaatcctgttattctaaatcatctttcttctttcttcaatagttgaaagttggctgcaactgaataatagaacaaagtctgagcttcaaaatcatgctgcgtctgggtccctttgactgtaagaaatcagctttgaagactacatgaggagcctctgatgtgatctaagyttgtcatttttcattgtcttttaaaagcattcaaaaatacttagactctgttttaattttcaaactttctctattcctagctcaagatttctatttacccaaagcaaataggagataatctcggaatagtatatcccaggccacgcctgggataggtcaggtagtcatggattttgtatccaatggatggtgtttctagattaaaatattttcaaaggtaatgtgatacaaggctcccactgctgtgactgcattggattatgctctggtagtccttatccactaactctat

SEQ ID NO: 21382 - DNA, 600 bp, Bovine  MMBT18555
aggacacttgagtcatggggtccttggcagctgtctttgagaggtaaataacttcaaaaagtccttgactggaagataaaatgtgtgcttttatgcttactaaaggccatctctagacttttctctcatttatttttatgaaatcaatttccttaaggcccaagagtatggtatggtaaaacgaacgagacctggagtggtgagaagagagatagatttccagcaccatacaggggtctgtggtggatgaggaaatctagtccatgcttacctctctgggactctcctcctcactccccrtgtgccagttgtactggaattttcccatcagttttcctgagatgcgtaccctctgagtccttctggaaatctctcctcatcactcttcctttggctgattcctgtatagtcttcaaatttttgacattctacaaagaatgtcaaagaatgacaaatatgtcattcttcagggtcctttcctatttcacttcttcttttttccttttatccttcatgatatctgaaatgcaggtgtgattactgagatttgagcagccattttggaccatgaggtaaaggttaaagctgtacatggcagaa

SEQ ID NO: 21383 - DNA, 600 bp, Bovine  MMBT06846
ggattttctaggcaagaatactggagtgggttgccatttccttctgaagagaatcttcccaacccagggatcaaacccatgtctcctgcattgtcaggcagattctttactgctgagccactggtgaagcccattacatttgataggtgagtgcaaattatccagacttccctaaaaaatgaataataaaagaaaggcgatgcttctcatccctaaagtaggccttgtgtttacacactttctgtatcaaaatgaagtatggatcccagcaaatccactatactttattctcagtgccaytgggcatttctcacagctgcctaagctgccttcagtaaattgttttttcctacaacacacatttctctctttcatactacaaaatacattatttatgtgtatgcctaattctgttattggaaaaagtaagttaatttttagagttattgattttattttgtcaaacatatgttgctcttttcttcttgtgactaaaacaaaaagaactatgaaagaaacaaacaaaatcgatatttctctattaactacgttacttaaaaatcacatttggttcagagaaatgcaggatatgagatagaa

SEQ ID NO: 21384 - DNA, 585 bp, Bovine  MMBT10556
ataaatggaactgtacaatatgtgtccttttgtatctggcatctttcactcagcacagtgtttctgagccagctgggtatttttaaacgtacatggggatttggtatttaaaggaatgctggctgaatccagccataagcaaatgaatcacttctcaatgtgactcctcctccccctcacatctttatcttgtaagtatggtgtttgcatcttggtcctctccagccaggcttgctttagaggtgccctgactccccaactcctatacatgtgaaaggtttggcttgactctaccatacygcattttttttgtatttttttgtagattttttttccctataagtcagatgccataaacactcaaataacccaccttataaaaagtatgtttacaatgtcagaagaattcaaatgaaatgtaaacccttctatttacaatttttatacacataaaccaaatcacaaataccacaaataaatgtgggcttccctggtggctcagatggtaaggaacttgcatacagtgcaggagacttgggttccatccctgggtcaggaagatagatcccttggagaaggaaatgg

SEQ ID NO: 21385 - DNA, 600 bp, Bovine  MMBT00663
catttgctctctccctgcttctttttaagctgcatgcatttagaattaatcagccaagcatgactgagagttttgacaaactcaaaatactagagaaagagttcaagatgttttgatgatcctcaatgcaaaaatggttaagccgttggcctaggcatttgttgtatctgaagtcagtgaagttttggaccacagcagcctgcccagtctcctaggtgaagtgggagatgcatagagggacactgagggtttgtctcttcttaaccccaggattcacactgcctgggcagtagtcagtaycagatggaccagaaagtcagaatgttgagcatctttccagcgtcagagcttmtgcccttggctcaggactggaatcccaaatgctgcagtttgggacaaatctgataccactcactgctcccagggtttatatttcagttctggaagttcatgatgacaggtgtacagccaggcccagctggatgagagagtcaagaggtcacatgacttaaaaattgatgcacagccttctcactaagaaaacaaatgaatttctttttttcttataacaaaaacagtaactgcttttctgttatggaa

SEQ ID NO: 21386 - DNA, 600 bp, Bovine  MMBT08612
gcaaagataactttcttgaggaggtgagactagcgtttgatgtcaaaaaagacagtgtttgtacagcgtaggggaaaaacagatggtttctgagatgtgcgaagcaaggaaagcaaagggagcctggtgtgtatgggaactgctgaaacagagcccagattgcatgttaggaagccgtgggaaatcatgggagaccagtaggtcgggccagattctgatgaggcttttaaagttactgttaactaaagtttgagatttttctggtagctgaagcaaatgattgattgatgaagcaggggrtggggaaacattgcactgactaaatgttgaccattataattttcagcgcaacagctgctactgaaattgcagtcattcaaaacgaaaaatagacactgttgttctgaaatagcttggactatttggaaccctggagcctgagtgctggcgatgtggtttcactaagaacatgatggagtgcgggttcctgtttttcttttttttccataatgatttgttctatggattgagaattcaaactgagcaacaatttcacagtcggagttggagtgtgggttgtataaagttgcagaagcattt

SEQ ID NO: 21387 - DNA, 598 bp, Bovine  MMBT16264
  misc_feature (1)..(21): n is a, c, g, or t
nnnnnnnnnnnnnnnnnnnnntcttatgagattacgcctaccattttatatagcctcatcatgttgtggttagtatgatcatttgtattctcatgaatccatagtatagactaaccctttctctgcttataatttgcaccacaggcactgagtaaatcatattctaatgaattatttttaaaaactgttctaagattcttgtaatatattaaactatatgatgttagagttaacttgaaaagaaagaaacacaaaagctttggtagtgctttagcttgcaatttaagtgtttccaaggtrtacctttgacatacatactctgtacaactgacccaggtattataactaaagtataaacttctcagtgtaatgtctgctaaaagcttagactgctcttttctagggcccaggaggcattaatttaaaagaggtgtcatttggaagaactaatatatatcttgtggcagtagaagtgtctgccacctcatggggttggggaaactcactttagttcagttcagttcagtcgctcagtcgtgtccgactctttgtgatccattgtgagaatttcacagaattagccaacattttgcagacc

SEQ ID NO: 21388 - DNA, 484 bp, Bovine  MMBT09065
ctgaggctggaacaggtaggtaggcactctgtatgctcctgaggaaataataagaaaggaaataaatacactcctagcttttgaaagtttccgtctcggaagcttgccaaatacacgcagtatgcagtcttccaccaggccttggtgagggtttaattacgcggctgcgaagcatcattactgctaaccaggagaacttgctaactgaaagagacctggcagttcacttcctccacagatttcagatttttctttttcatttttgctttattaagttggaactctaatggaaccttccckggcactcatctcctagtaactctttgaactcacaccaccagagagaggtggcattgactgaaccttcacaatggcgaacacgagcaccgattaatcagttcccttgaaaagaaaattggaacaggtagagctggagactggctttcagacacaggagttggaatcattattctgaaataatctc

SEQ ID NO: 21389 - DNA, 600 bp, Bovine  MMBT06519
gtatttttggagaataattaaatatatttaatttaagaggaattattttggctaaattccctagaaacttttgctaattaagaaaatagtatgtgtagaatggccacctgatgtgaacagtggatcactggaaaagagggcgtctgccttcattctctccctgatgctgggaaagatagagggtagaaggagaagagggcatcagaggacgagatgaatggatggcatcaccgatgcaacggacgtgaacttgtgcaaactttgggagatggtgagggacagggaggcctagtgtgctgyagtccatggggtcacaaagagtcagacacgacttggcgagtgaacagcagcaaatataatgtggaaagcaggaacacaggactgggcaagagaagaagctagtccttaacaccctacaactggggcttcagctgatcctgcaaggaagatctcagggaccaactgctgctgggagttcagcatcagttcagttttctggaagtgaagaaagtggactctggaaccagactatatgagttttaatctcatgcatcctgttaatagtaagctgtgtgatttgatcaagttagtcaacctctc

SEQ ID NO: 21390 - DNA, 600 bp, Bovine  MMBT06454
caggctgccatggaaatggggatgaaatagactccagacgtcacccagctcaagccttctccacagacacggtgccgcggagaaatcggggcctctcttcagggctcagactgtaacttggggtgactgtgaatgctcagccttcgccactctttaggatgtgtgaaatttataccccaagaggccaaaagccagatacgccattcatcacagcacaccactcagcacacaatagccatgcgtgttctatcaggagtcactgatctggggcccactggatgtatgggtttaagagagacyatacgcaaaataatgtgcaaatacattctctagtgaaagggaccatagcctttctcagattctcaataggcccatgtcttcctctcaaaaaaaaaaaaaaaggagagagagagattttaagawctttgttctacaccaaagaaattgtacagccggctcaccaggccacaagagcccttctcygagatcacttccctgtgaaagcatcatctatcatcacccagggcaccaagcggcagctgcaccacagtcagaaaactccaaatggyccagcagcccaataartcacccrcccatcag

SEQ ID NO: 21391 - DNA, 600 bp, Bovine  MMBT08068
tctagaagtactcacatatgacagttcaatacaaagtcctggggaattgctagaaagagatatgcattctcataagaaagacttaatagcattcagagcaaattaaatgatatgcacttgtagagatttgagagtaagcgtttttagttgtactcccatattacatggctttttcctttcaaaaattctactgagcataattatgaaaatgactgataatttagataatatttagtgtcagaatttcaaaaacaaaacctgaatgtttactctaaaagtaattatccctcaaggaaacayataaataaagttacagccattgccacaacaatccaaccagactcagactatatggtaaatttataagaaagttttgcagtttgagtagtctcaataaggtcgcataaagatgaacagaaatgacattttatgtaagaagccggagatttaagtgtagaatataagaatgctgagaactaagaacacgaagatttaaagagagaataagtggttggcagaattatcagcactcaattgcattaatctatagagaaggaaagattatttgagaggatatggaatccttcccatttttgatat

SEQ ID NO: 21392 - DNA, 600 bp, Bovine  MMBT03474
atttaaacacactcgtcccacgtactgagacaattaagccacaggaggtctttatcaaataatgcactctcttgcttttcccatacacagtaatgagcgggaacggaggatttaataccagggtaggcgacactcaacagccacttgcacagcttggtatatttagctaagtccttgggcagaaaaccgtggctttgcccatgatatgcactgagagatgcctgtcatggcctgaaacaggcctgtccagcttttcaggaaaagataagcctcgtccaagcaaggtaaaggccactgccrtgcaggtttctgggcctgggtagggctttaatttttaatttcatctccacctagcgccagtcctgtcttcactaggaggccccaaccccacccaagcggcagcgtgctttctgcttggatcatccggccccagcctcctggggccctcaccgtgcctttctaaccagaggctgggcttgccctggccaggcccctcccacggcaggctccattcatgcagacacgcacgtatataaagtatcgttcaaccaacccagacaggccgcggcacagacggggtccccttggaggggcccgagt

SEQ ID NO: 21393 - DNA, 600 bp, Bovine  MMBT08556
cccatccctgggattctccaggcaagaacattggagtgggttgccatttccttctccaatgcatgaaagtgaaaagtgaaagtgaagtctctcaatcgtgcccgactcttatcgactccatggactgcagcctaccaggctcctccgtccatgggattttccaggcaagagtactggagtgggttgccattgccttctccagaaaattttttttttttttgctaatgatatttaaattttttaacagcattcaactctttgaaggacgctgtgttgtaatacacatttcattttttattyctgctatttggaaagtaacttgtgatgccattacgggacctggggagattatgggtggtcacggtgatggctgccgcaggcttgtaggaccctctctggagtgcttgagtgagtgggtgaaacccccgttttctgtgaaatagtgaagtggctacctgtcctgcagtctggggacaaggactaggagcgccctttgctgttgtacctccaggctgatgtgagcagcgctcacgggaaatttctcaatggtgacagtataaatggacaaattctgaaaaaagtttttaaaattctaccttt

SEQ ID NO: 21394 - DNA, 600 bp, Bovine  MMBT07480
agagaccgcaactgtcaggaaacttttctaattcagaagagtcattaccataactggaaaaagaacattaaatgcgtattacaataaaagatagtcatgttctcatccaccactgtataactcacatatttgatccctacatttgtcattgcttatccaagattagaaaactgtgtaccaatagagtggaaaataaatccaggactcctaagctgcctctgtgaattcctcctttttgaactagtgaatattagtggaactggaaaaaaattactaaaatgtcttattttcttttgtcgyctatttatatagatagatgtacagaaacttcttgaaatttccaagaacactatccaataaatatctaaaggtrgatatggaaaaattaatcaaatggatgtctttcaatagaaaaattatttctctgggtttgttataaagtatcctgatgatcctggaacttgcaacaattttaatagacactctgtatggagaccttgttgataaaccattctacctttggtaggagtatggagaaatgtagtcctataactaggcaaatactatgatattttatggtgttataagatttattataac

SEQ ID NO: 21395 - DNA, 600 bp, Bovine  MMBT04944
gattgcccaaaccaaaactgagactttccttcttactcacctacttaaccaaaagcaactagtcactaactccttttgattctaattctctcaaacctgttcttcttctgatccctttctcctcattatctttctacatgtatttctctgatttcaactaggccctcttccaatatatcctcctcactacccaaagcaactgtcaaacaaatgctaactcttattaagtccactattttattttaaaatcctgaccatcaggttaagattcaaatgcctttatttagcataagataacayttaccatctggccactgcctagaagttaatgggaaccaagagaaccccaagaagacaatggcgcgagcgcttactgcartcascactcctctcccatggacgccacatacatatcaattcttcttacaattatctttycaaaggcamcaaataattttactattcgaggccaggctttacctgatactaaaatatgtgatccactggacaggaattagatacgattttattatattaaggcttataccattaggctgctgttgcagtgaaatttaatacatttttatgtaggtagaaaga

SEQ ID NO: 21396 - DNA, 600 bp, Bovine  MMBT05292
acgagggagrggggcagagtagggtagcaggacagccccaggctctcagaggtggggcgcccagcccgcctccccctttgcaaatgtgattaggtctctgcagagcagctgaaatcaggttagcatctctgagccgagcccagtaatcacagcccggagcagagcaggtgctggggttaaagcggcttctgagaatgaggacaagctgactcacagccctcaaaacacgaatacatgggccctgccgtcaccagcctggcacatcttcctgggaccctgggtcccatgctgcccacatgytgtgcagggagctgcccagggatgggcttggttggaagggcctccagcatggccagtgtgcggggttctttaactggcagaaccagagctaagcatacctgcgctctcttcttggtctggtcctgcctgtttatccccagaccccacgctgagtgtctcacttaagctaacagtaaagtagggggtcccaaagacacccaaatcaggagggtcctgatgagtgaatataatgtctgcaaagctgagacatgttctcagctgaggccactcccaggactgggcagtgttttcttgatttta

SEQ ID NO: 21397 - DNA, 600 bp, Bovine  MMBT01697
aacaatgctttttacaacaccaactaaaaaattaagccaactcttaggaactcaactctttgattttccagatccttgccccatgctatcggtatgtttttctttctactttttacccacttgacattgaaaattgagttggaggaccattacatagacaaatatctgtggatttgtccaccaatacagtgtcctatctgtgataagttttattatttagaatttaaatgtgtaattagtgggggaaaagacctagaaaaataactaagaagttaatcataaattaacttagtgcagtgyatattgaatgaatggctgtcaatatctcccttagcaaacatgagaaacacactgagccaaaggcacactcaccaacctccaggaccttcatactctcatctcaacccccaccaagcctccttctgatgttgggtgggctgacgcacaggcaagaagtagtgaggagccaggggtaagcccctttcagggaatggagaattgacgttagcaatcagactcaatttctagctctcactaagtttatggatattaactgaatttgagagcaaaccctccaaggaacttagctgaaatcatctc

SEQ ID NO: 21398 - DNA, 600 bp, Bovine  MMBT08390
gagagaactattggtgtgactatcacataaaatacaaacatatttcacatatatattttgaataatttcatttcaaatgtatgtcattctatcttaatactaatatgcatcatttttgtgatctgctttattttattctcactagaacaatggatgtgtggtgagggagcaataaatagaatcatctgaggagtgatttgaaattgcacattctcctttgagaaagagagttggcttttttgaaaaaaagctccccaggtggtgattaatccttgatacccatcccagctgataaccagyatgctagctgcaagataaaagcatcctacactatacttatcaatttgcaatgaaattaaatgagcatagggtatcaactttcttttcctcagtgaaaggcactgaaccagaaaatcaaataaagagttactttattaaaaaattaaaaagctcgcttactctacaaagatacattttgagaaatattctggtccatcaatataaatacctgcttggagatggaggcgtgtgaagtgacattgttggtacccctgttgttggcgtgacgtggctcggtaactgagtgccttgtgataagct

SEQ ID NO: 21399 - DNA, 600 bp, Bovine  MMBT11148
tatggctgatcactactaaacctatttacttgtttgtgatttttattctactataatgatttttattctactaatatcaaccttttcatgatccaacatcacaattattttagtaggagcaaatataataattactgccctatattccctgtacatgctaatcayaacacaacaaggaaaatacactcaccatatcaacaatatttcaccttccttcacaaaagaaaatgcactcatatcactacacattctacctctattacttctatacctaaacccaatgacatgggttctactctratgacatgtcacatgttgggtagcaacttggacttttggagattttttttttttttgcatagtaaatatactgaaattattggaagtatttgtatttaatgmcaaaaattttgaagaattttatgttagttctgtttcacactcaggtagttttgatagcttgacttttaaagaatccttttaagatcatgaagcattaacacatttcagaaatactaatgtagacctgaagataatgatctacacacataatgatatacctgtcaagagatgattaataccaagagcaaaattcatgaa

SEQ ID NO: 21400 - DNA, 600 bp, Bovine  MMBT07786
taaatattcactaagtggaataattattaacaagaaagaaaaaaggtctgacataatatgaatcaatactaaataaaaacaagtccattttctttacatcactattatagattttgacctttactttgtaaatgtgctatgaatcataagatgctgctattcttcattccaatagctcttctataagaatacratgtcccaagtttagagaaaattcgtattccttttttcaaagcaaagcactgctgtgatttttttwaaattgttgtttataacaagtctgattccagtaaacagtastgttgtgattttggttaactttttctataagtratttatcatgtaaaagaatagtgccgttttttatagctgttagaatatattttgtgtaataattttgtagtgatactaactctgttatgtgttttacaatgacaaattttcacatattgaaaagatgtgagaaacgtaataagcaggaaattaaaaacacaggaatacaaaggtaagagacattataataatggttagaaatttaacattttatagtataaagcgttttcacatactgaatctcatttgaacaaaacttacaagact

SEQ ID NO: 21401 - DNA, 600 bp, Bovine  MMBT05344
agaagttgcccatttcagagaagccagaagttggcaatttattttcaaaagaaaaatgttaagcactgtaggaaccaaacaaaacactaatggcaggatgcagcccagcagtctctcattggcagcttttgggttgctcattaagccactggaatgtgacaggaatccttgtcagatttgctccatgtcccacacacactgcctggaatagagtaagcgctcaataagtgttgaattcgaaccaggcagctaacagaaatgtcagtaccctctctgcactgtggtttgacgttcctaagratagacttctgactgataatactgtgcacctgggtcctggtgaagcttcgctttctggttgtcagaagaatgagactaagacactttgcattcctgcttggctctggctttgctctgattgcatatccaggaggggcagtgatcgcaggatgttgagttactgaagtcagaagtctttggttccagtttcagccggggcacttgttgaacagacacatcacttcacctctctgagtttgtttcctcatctgtaaaatggaaataaatctggcccttcatgccttgccagggctatgaatt

SEQ ID NO: 21402 - DNA, 598 bp, Bovine  MMBT12823
  misc_feature (1)..(78): n is a, c, g, or t
nnnnnnnnnnnnnnnnnnnnnnnnnnnnnnnnnnnnnnnnnnnnnnnnnnnnnnnnnnnnnnnnnnnnnnnnnnnnnnctttcccctcactcccctgcgcttctctggtctcactccctctctctccacaccgattctttttctctttgagctaagcctgtactattaatataacatcttctaacccaaaaagcagtggtcagaaagggaaagtttacaggttaagacattttaaagagaacagtattgatgggcatttgggctgcaggcaaaatacaaacctgattctgtataaaccaygcagtctgtaattttcttccagcatacttcaccgttttgagttacaatgctgctgatgtcgcaactttctctgacttcaaacccaagtttacagatcatgtcatacactgaaggagaaagacaggtggcaatcggctccccaactaatatctgaaatataaaacataaaacacactcttcaacagaaaatattaactttataatatatttaagtcacaggaaaactgttatgtcttatagaatatactcaggaatagttactgtgttaacactttctggatgtcagaagaactatatg

SEQ ID NO: 21403 - DNA, 598 bp, Bovine  MMBT12668
  misc_feature (1)..(57): n is a, c, g, or t
nnnnnnnnnnnnnnnnnnnnnnnnnnnnnnnnnnnnnnnnnnnnnnnnnnnnnnnnnccccccccccccccttattttataggtaacacataaatatctttgcttgttaagaataattctggttaaggctgaggttccctttgtgatgctctgtttgtattacaatacatgatccttcactgttcattttcttataaaatgcatggaagtataaaatttttcctccttaaaggacaccaggaatttaagttctttcctctgaacgctttcctatgtaggtctagctcacagagttgactytgcttcatatttgtgtctcctgcaagctttaatgcttccaaattggctcagctgtggctctttgccttcacttcaatttatcaggagtagcttcatcagcaaaggattcaatgcccaatccaaaacctgtttgcttatgtaagacacagtggaaaaggcagctccccttcaatgtcatggaagctggtgggagtagtgactggagaacttgtgtcctagaggggcacccactgggagccagggaaaaggaaaactttcctctcttgtgtcatctggtccttccagctgttgctcagca

SEQ ID NO: 21404 - DNA, 598 bp, Bovine  MMBT11229
  misc_feature (1)..(125): n is a, c, g, or t
nnnnnnnnnnnnnnnnnnnnnnnnnnnnnnnnnnnnnnnnnnnnnnnnnnnnnnnnnnnnnnnnnnnnnnnnnnnnnnnnnnnnnnnnnnnnnnnnnnnnnnnnnnnnnnnnnnnnnnnnnnnnncccagacagcccttcaaaatggatttccatttgaaactactcccaaattatatgctaatgttttaacatggtttattgaactaaaataatgcaggtacagagctttaaaatacatacatatactagaaggcttgtaatgaaaaaagttgttccctggcctactctttaggggcgrtagtctcaactctattacgtattcatccagattagatgcatatatctaaataaatccatatactactaattcttgatttattcattttaagggttatttgttgacttcctgccatgacagttaaaaacatgagtctatcacttctgttccccacctcccttatttatgtaaaaattttagttaaaccaataatcagcatttaaattatgtatgcaaatactgtttaccaatgagccaatgggtactacaactgtgccttataatttatacagcccttcatttttcttagagttaatta

SEQ ID NO: 21405 - DNA, 600 bp, Bovine  MMBT01111
cccttccaggaagaacacaagggctcctgagtgcagaaaagggcaattaactaattcattgtgtccttacatttctataaaataacaccttttctgagttgataaggtttatatgtctactttttaaaactggcaaatacaaaaagtatgaagaagtacttataatcagaaccagctatgtagtttgtggggtccactggaaaataaaaatacggggtcccttgttcagaaatcattaagaacttaaagacaatgacagcagagcatcagactaagtctataattctcctacatgagggrccctgggcagctacacaggttacacacccatgaagacagtcctgcttattatcccactccaccccgaggcaaccaccgttaatatgttggcataatttattcctttaatccctttttatgcagcttttattatgtggttgagatcatactctaatgaaaacttaatatctgatttttatacttgatattattttatttgcattttccatgacattaaaaactcttagccaccaaggttaatggctgtataatattccatcgtgtgaattagttgagccattccagttgtttctaatattt

SEQ ID NO: 21406 - DNA, 600 bp, Bovine  MMBT12393
atactgatcaaaaggagcggaccccttgagatgcatttgacctggacaattccttcaataatctggtctagcaggctcaatttctccacattccctctagtccagtcccattaaatcattctaaaggggttaaataacagacatcccaacccagatgccaaaaagcatttgatgatgggttagatctgccaagcaatcattgctattcatcggtaaaattagatgtccatatgaatgtgcgtatagaaggaaatttcagtatgtattgtaactgtgtgtggcagtctgttgccatggaaygctcacttctctgatatttactgtcagacttcattcacagatatttcacaggcagatggtttctttcactggctcaggagccacttcaaagtgttttgattcctgaccaagtcgtatattatacttcctttaggaagattttcttcccagctgccgactttaaaataaaatcaagaataatcaaaaggttgcacaaccctttcagcttaactatcttcaaagagcagacagcaaaatcttctttaccatagcgatgtattggaaattaaataatatctaacacttctttaaaggcaacat

SEQ ID NO: 21407 - DNA, 600 bp, Bovine  MMBT08774
gagcccatgtgagcaactagggcttccaggagtaattcagtaatgtcttaacagattaagtttctgagccagccgcatttattctgtgaattaattagaataattattttaaaaatctgctagaagaaaagaggttgaatgaagactcttaatttgctctgtactggattttggaagttaaaccagcattgcatattgagaaaatcagccactggaaatatgtgactattgtctattctaataggttgctttagctaaatcttatattattttatggatgtgtgaggggattagaaacasatccccaccttatggttcagattgttccaattctttctgaatgaaacttggcttttattgaccttggttgaaatcctctggcagccagggtcccaaataaaagcattactgcctcgcaggtgtgcaaactctccttcgccacactgctcatctcttgggctttactaatttcttaaggcagaagctaagcagggagaaatccagtgtctgggcattagggttccttctcctcctttcctgagatcacagtgttattatgtccataactgtgtgattaatttaacatctggcttgcctact

SEQ ID NO: 21408 - DNA, 600 bp, Bovine  MMBT00720
gttcccactttaggatacaaaactgtatatattacattttctaaaatctcctttttataattttatataaaaaaagaagatgcattaaatcattaaaaattaactgttctacatgatggaattttagttgattttttctatttactttttgggtattttcagttttttattaaacaaatatatggtatttatatggagagtataatatatttttatttgtactccttctctttatgtgcctctcaatttagtacccaaatctataagaactcttagagaaaataaatatcagtgattgaytttttrgctggccaggtgttggataagarccttattattaatactaccacatttatttattacaatacccctctgttatggatgttcttgtgcttttacaagcagcaactctgggttttctctccaaatgtttgtgattttaaagcccaagctcattcgtatttcacaaaataacttcctaggagctgttaaaacagattttttatgacagtcaaggagggtatacttggaggatcccaagcagaattactcttactctgagtattgttactctgaaagttctgatcttttatcttacaa

SEQ ID NO: 21409 - DNA, 600 bp, Bovine  MMBT07476
cttcttctccagaagtctcttttcccactagcagtcactaagcactcagtgtccactcatggtccctgagaaaccataggaaaaattcttcacatatcacagaaagtgtgtgctctccaagtgtttgattttggccagtaacatggctagtctcatgcctgattgtactttcaaaccatattcgctgcctgattaggataatctgtgtcaaaattgctatctctgtgtagcatatctagaaggatcctaaggaccagtactgtgtgtactgaccttaatttatcctaccttaattatttyccaatctatttatctttctcattgtttatattttccaccaattggtctgtttttcttccattggtacatatacatttctgggaactacatcaaattctttcttcaaaggagaagtgttatataaaaacataaataaataaacattttttgagtagcactgaaggaacattatggttaaacctttagccagaacttatttaaatgaagagcattggtggtctgactttcttaaatgttttaaaaatttcctagcattctgtgagggtgtgaatgataaatgatacattatctgctaaaatt

SEQ ID NO: 21410 - DNA, 600 bp, Bovine  MMBT02403
caagttctcagggaatgtgaccagaggtccagaagggtggaacagcagttcacccaaggcagacaagagtccagtgtagccagaactctgtgctcatgatgcggagagatgggaagtgaggttgagataggttgaggctgaattctgggttctattttggggtaaaatttcaatatggaaatttctgaggaaatcatgaattttaaagcaaaattgcaataagctaatgaggatgtcataaaatctgtcaatccagaaagcatgcttgatgtgtaacttctgctgcagattgtgggacaygtgaagagccttccatcagagacctcatcagcttcctccacctaatacccgccatcagccagttacacactgctcagtcaatcaatggtcactgataaatatcagagctttccaactcacgggagaccgatgccttgattttcctcgtcttctgaatcaatgagttggcagatgttctcaagcactggtggtgggtactgattgaatcctcctattgagagaggaaaatgatagttaaattttaaactataaattgtatgtgctaaggggaaaagaactgcagtaggaatcttcgtgaag

SEQ ID NO: 21411 - DNA, 600 bp, Bovine  MMBT08840
tctttaaaaaagaagcagaattagtcatttctgaccttaactatttatagtaacaatgatagagaatggctacaataagtcatattttggctcacaagaaagggaaagtcttgtttttcacagttcctttagcagttcaagttcagctcttcaatgataaatgctgaataaacattttaaacatgtacaaaatcactgagtaattatatggtgttattatatagatagatatttttttatgtaagtgtgatgtatctttgctggtttaaccttatctggtgaaagaatcaaatgaatgcmtactgggagcctttcaagaatgggtgcaatcctctaaattcagaaaataagtattcttaaagaaaatgggtcaacaggccaccaaataaactacatagtgatggatattrtcyattgtttgaggttgtcgtcacaccaaaaacagagtatacttcatacctctatcacttacagataaagtacaaactcttcttcctgccttccaagtgctcactcaatagataktccattcagtcttctctcctgcttatccacaaaggccctgcacttcacaatgatcaatcttcttattttgccttg

SEQ ID NO: 21412 - DNA, 600 bp, Bovine  MMBT03387; identical to SEQ ID NO: 4675

SEQ ID NO: 21413 - DNA, 600 bp, Bovine  MMBT03010
ccatgatcatgaggccagtcctcaatggggctgttccatccttgcccagaaggtgactgagagagggcaggagtggagaggcagtgagaatgtgaatactcttgttggcagtccccctggtcaccccaaattaacaggtccccaaaacagggtctctggcttgagggcagcagctgaggtccagggtgggatcctgcttcctagactgcactttgtgctgggaaacaaactcgaatacctatgggggcccaagcagtcatataaatgatagttcacttttcatttgttaggtatttctgygcaccatttcattttgtcctcccttctgtgtgtagcaagtactgttacatgcccatttcacagctcgggaaattgagacatggaaagattaagaatcttgtctgtagtcagagtgctggttaagtccatggtcaatcagctggcctccgaagacctcacgctccattgctactctccgctcccctctccaaggactctcccagctctgatggctcttacaccactgcccagcatccaccccatcctcagagctgttccacacctccgtgtacacctggcaagcgtctgcttaaatgaagt

SEQ ID NO: 21414 - DNA, 598 bp, Bovine  MMBT09088
  misc_feature (1)..(14): n is a, c, g, or t
nnnnnnnnnnnnnncttatgttttaaaaacaagtaagtttttgcatgaaaatggttcttgagaagaatttgaagtatttaggcggctagagtattacagattgttttggtaacactgtagtgacctaatgaatgctgtatcaaaaaggtaccgtataaatacaccctactgacttttaaaaatatagagtatatatattattaagtttctggcaacttggaatcagtggagtgcaacagatagtttcattgtactagaagaaagttgtatgattctgctatagctaattttgttgctgtycctgctgttgttatgattattagtattttactatagtgaaatttaccaaatctatttttataaagtatagcaaactggcaggtcataggggaaaatgaggtcaaattttaaagtaagtaataatggtctcaatattttttcagtaagacgtgtagataatcatgttttagcataaacataattaatatctccatgtatttgttgtaagatttacctaatgaaatttcatctctggcttaatttttatatctaattgatgcatttaaagtttaaaattgtcagaagtttggtgttcatt

SEQ ID NO: 21415 - DNA, 598 bp, Bovine  MMBT08061
  misc_feature (1)..(137): n is a, c, g, or t
nnnnnnnnnnnnnnnnnnnnnnnnnnnnnnnnnnnnnnnnnnnnnnnnnnnnnnnnnnnnnnnnnnnnnnnnnnnnnnnnnnnnnnnnnnnnnnnnnnnnnnnnnnnnnnnnnnnnnnnnnnnnnnnnnnnnnnnnnttacttttctgtatttccttatttttcttcaaaacaacttaaatcactattaatcttgaacaaagacatggtttgatttcatgttcttactgtagtacgtttcatctggaatgtagaattgtggtgggcccttcatgcctgtggctaagagacacttgaccaratgttccagggataactcataaattactgcttatacaacatgaaatacactgacatgakattgacatcaaagagtgggtccccactgaaatcatggttgctgatattaaagttgaactctcagattatgtctttgtagaaaaattaaaatcgaggaggatcgtaaactcctgcatttgcagtaaaccagcctgaataaacaagcaatgacagttgcaggtaggaggtatacttcgcgtttgttggaatggatatgtagccaatttatctaggagttagcataaggtctctatgttctt

SEQ ID NO: 21416 - DNA, 600 bp, Bovine  MMBT05205
ttccatccttgtctagagtacatttagtcttactttaccaaaaaagactctgtcttcagcctccactaaaactgctctcagtggacatcaatgccttccttgggaaaataacgttctttcttttaagaatgggttctctaggcagcagtttttaaatgttgacttccctttcccttgactttttaaaagttgcataatttattgaggtgaaatggacataacataaaatcaatcatttgaaagtgagcagtttactggcctttagaatattcccagcgttgtgcaaccaccacctctatygagttctgaaactgtatacaagcccctgtgtccccatcttttgaagtaaaaggcttcatatttagtttcccaggccccctctgagactcaaatagctggctcaagagttaatgattagaaaatgtgaacatgttgaaacaaagagctgttgggccaggaaactggtaacaatttcaggctgtaagttggccacatagcagttacctaactctcagttccctgaaagatatagataacaaaagctgacacacattcctaagttgtttttcagaaaccagatctctatcatatgaaaactgc

SEQ ID NO: 21417 - DNA, 553 bp, Bovine  MMBT11180
tttagtttatgttgtaaactcttctccaactataatttgagactttgaaagtcagtcctgaccaatcttatgcaaccttattttttggcacatttttttgctacagaaacacagattaaaataatttcccaactttgtgggaaaatgagaaactctcctgttgtctggcgagagacaagagaactgtgaaatgtcactgttgggctttgagttgggatccagagtggagcatgtgtttttggaaaggaagctctgtaaatggctgcagaaagcagtagctagtgggggaggagagaatcytggctcaagaagatttgggtcacaataaaaagtactaggggctttcctggcggctcagcaataaagaatccacttgccaatgcagggaatgcaggttggatccctgggtcgggaagatcacctggagaggaagtggcaacccactccagtactcttgcctcggaaaccctgtggacagaggagcccggcaggctaaaatccttggggccacaaaagagtcagacaaaacttagcaactaaacgacaaggaagt

SEQ ID NO: 21418 - DNA, 600 bp, Bovine  MMBT10387
ctctgctratgccttactgaatttgatcctcaccayctcattcatgagaagggagtcactctaaaggactaaaaaaaccacagaaccagagtgacaaaggcatccttccaacccacattgctggagtccaaagccaggttctttcccaacacgaggccaactccccagcaacagctcagccctgagccaggaagcagaaaaatcgcaggctgtggaaatcccccttagacctacttaccccacagtccttagcrcagggagctctctagttgaccttgcgtgcacacatccctatgcagrcctacacttatacccgattgggtgtacacactctgtacacaygcaggtatatgctactatacacagttacaacatgtgcgtgtgtccacactcctatgttataaagaattacacatgtggtttgggactttctggtggtcctgtggttaagactccgtgcttccaatgcaaggggtacaggtttgatccctggtcagagaactaagatcccacatgccagctggtgtggcaaaaaaaaaaccaaattatatacgtgatatatgtccgcacatatgaagctcagtgcttaaggcttacatt

SEQ ID NO: 21419 - DNA, 600 bp, Bovine  MMBT08329
aaaacagagcccagcccatgaggaggggattggccttgtagctgagtggctagtccctgagggggcagggcctaacctgacacctgccacctacaggctggactcaggttgggggcagcagagagctgctcccaccccggagcccacgcctgcaccaccctggaacccaggaaaaggcaactctgtgaatgtgaaagagcaaggactctgccagcctctacaagctccctgtaacaaagcttgcccagggctgcccagccactgcagccccaaagcctgggtcttatctccttccctccygtgggaaataaatgcacgcactggggaacacggccagcaagggacccctggcatttgagtctcctctgagcagccgatastccaaggacaccaccctgtgttctttctttcctccacttcgtgtgattacraaggtctgcccaggctggacacttgggttccaaatcattgaacctgaggtcaaccatttgcctggtctttcctcagttactgctgtgccctcagcccctggtgcagtgccaggaggcactgggaaaatattcttggaatgaatgaatgaatgaacacacactgtcttaa

SEQ ID NO: 21420 - DNA, 600 bp, Bovine  MMBT12142
ttcagaggccatatgatgatgaatcacggtcctgtttacagtgctaacatttttgttctcccttgtagctatgacaggagtctgaagagattttcagctyattctaattttcttccatgaagctgctacttactgtccarggctgatgctctttgcagaaagtatcctgggtagctcagggtttcaggatcttaaaagtgtctcctaaccagagtgcaaggacctaaaggcccttaattaagtttctaatcacaaacaagatggtcttgtattaagggccctttgaaagtagcagcaatygtgtcattgtgtctccgtcccgtcaccgtatcaaataggattcttattttagcactgaaagcaattctttccttgtagagagtgaagagaaactctcaacagtcagtytgacgaacagaacacagtagagcaaaacacatttccttttctctcccacaaggctgtggagctgactttattttatttgacaattacagagcgaatgctattttacaaatcttgggctgtttaatcttcgtagcaaccttgtgacataggtactattgtcatctccagtttacagaggagaaaaggacacac

SEQ ID NO: 21421 - DNA, 598 bp, Bovine  MMBT03248
  misc_feature (1)..(29): n is a, c, g, or t
nnnnnnnnnnnnnnnnnnnnnnnnnnnnntttattacatgaatatcccaggtatcccaggagcgttagtggtaaagaacatccctgccaacaaaggagacgtaagagatgtgagtttgatccccgggttgggaagatactctagagaaggaagaggcaacccactccagtattcttgcttggagaatcccatggacagaggagcctggcagggtccaaagagtcggacacgactgaaatgacttagcatgcacgcacacgaatattatctgttcaacaatatgaaaaattaatagatggractgaattaaaatgagacataattctttctagtgattagttattgagaagcatggcttaaaagaagcatattttactattctaaatttggagtgaaatcttttagaaagttcttatttaacaatcaaaattaaaagatctgtkttgtctgctttgaaaggagttatgttatcatgagaaagcgtctctagatatgtgcatttctctttcttgactatttatcaaagaagactttctggattgaacctactcccatcaccagatagatttcagcctctcacaaagaagttatgtgcttt

SEQ ID NO: 21422 - DNA, 600 bp, Bovine  MMBT10842
cctaatgctcctgatgaagtctgtgagcaacatatcaagggtaaccaactgcaattgagtcttagaagtatagggtcagtttagaactacattttctccccttgtgttcttgggtggaaggggactggcataagtaaagtattctgctgagaattatgctctacggaatcatttttagtcacgcctccgaaaacaactcggttttaaattcccagccattgtctgtgaagcctggcaacaattcttctgctgtcccttcaggaatagcaactgatgtctctcctaacatttaggttaggygtgcaaaaactgtacgagcttaaaaacattcaactgtccattccagagagggcagtgttagtggtgggaatcatcattcactatgactacagctgctactttcaccatcagtaccacagcccccatttcctgagtgccttctggttgtcagacatagcactaagctcttcacgttcattattttattcacaacaacccatgggtgtaggcagcgtatttgtttttgttttacagatgaagaaattaaggggcagagaaaaataacttacctaaggtcccagaggctgtaagatgcagaac

SEQ ID NO: 21423 - DNA, 600 bp, Bovine  MMBT06836
tttaactatctttttctgtgtgtttaaaaatagcatgtgttacttttaaagattagaaaatatttaactttgttgtagctgtttttttattgtattttactttattccctgatatcttcatggatgtatacctcaaatatgtaagaaaatacttttacttgtggctttataagcgtcagtaattcctcagtccttaaaactatcttccatgccagttcgtgaaattttcacaaagagtatcttacatctgtgatatgaatttgttgtgaggaggttgtttcaaaattggaatagagggargtcaaggaatttttagtttttcttttacctcactctccagaactacccccaacagataccacaagcaaagaactttattttagttccaaatttaagaatagtggctatatatgaaggcatttgacaaggacaaagagatttaaattggagtatattttgaaataggtgaagtcatctatatagtaaggcatgctgctgtagggtaaaatgcataatgtcaattttcagattctttttcagtatcttaggattttgagctatagatttgaaatatacaattattgtcagaaagtcctaagc

SEQ ID NO: 21424 - DNA, 600 bp, Bovine  MMBT00638
tttcagtctgctgagaattttagatgagtatgcatcagatgggcatgaaggcctgctggggccccaggatttactggacttctgttgtgcctttcatagtgacctctgcaagtcctgagggtgagaaaggagctgcgggcaaagggtttggttcttgatgatgggggtgaggctcttgcttcagtgagaagggcataagctttgaggttagaagaatttgagttctactcctaacacatcttctagctgtgtgacttgaggcaagataccttatcttttgaagatagtcacctccaaaaytaaaaaaaaaaaaaaaaaggttatggagagatcaagtttagtaactgatacccttggggatttggtaagattagaagtgaggtatgccaagccactagcccgttgcctggtactaagaagttgttcaataaacactggtaaagtttgttattcttgtatgaactgaggattcaggggtggaagaacatatggaaagtcttctctctatattttaaaagtccctgcaactcaaggagaccctactgtgtgctggactttgcgttaggccctgaaaatagaaagagggtctaatcacaaccc

SEQ ID NO: 21425 - DNA, 600 bp, Bovine  MMBT10076
taatcttaggctcacagaatttaagtaatgaacctagtaactgggtctcggtctaagctttctggctccttgtttggtgatcttccgttttgctttcttcctgaaatttgcccgttagcctgtgttgtgtgagagacgatccacctgctgcattttgtattcacagcactggcgacgagtgacaaacggcgggaagtgtacaagcgcgtgtaggctgttcccttctttaacctctgtctactgcagaggctgtaactccagaggcctgatacacatgtctacaggtaataaatctgtgtragttatagctgtatccttgtagatttacaatgataagttttaattcatgtctggcaacatatttacataaattacagcaatagagtaatgatgccatatgctggaatgttcacccagagaaattcaagaggcttacggcagctggctttcttatggccacaaagggccgccctcatatatatgagaaagaagcattgaatttggtattgtgggcattatacagatgttttcttactcttgacatttgtctgaaagtaaactatgcttccagtgcctctcactgcattaatgaatagtctc

SEQ ID NO: 21426 - DNA, 600 bp, Bovine  MMBT07991
gtgtgattggcatctcttctgggtgacagagaagacttggctcaatagagaggggatctgtagttgtaggtaatgcacaaagttggcactgctcataagtaaccactgattgattatatctttttgtaattgttaccttcttactctatcataaaaaaaggaccatcagcttagagaaacagaatgaacactgaactrggcattcaaagataagggttctaaatttgattctgtaacttacaagttgtgggacttacagatagccaacaaattttgttagactttgtgtttcttgcccascaaatggagaaagattagactctatattcatttatggcccttccaactctgatagtctataattctatgagccaaaaaaccatctcascatcattgtaatagctttattttccaaaaattgaagaccagagtatttacataacaataattttgatttataagggactcagcagrgtttctactaagagaattttatccaaggcctttttgtttagacttcctttctctacatcaatggaaaaacaaaatttctcagcttactcaggtacacatatcctgaaacagtaaaagaggttaaaa

SEQ ID NO: 21427 - DNA, 557 bp, Bovine  MMBT07160
ccctgcaaggataggggattcaatctgtgttgtcattcagacaggattagactttggctttgcttttcagaaatcttgaccttgcaagaaaataagggtttcacgcctcgcttttattcttttctttctttttttctcctagaagtcatagaagttttcaggtgctaaatgagctgggaatttaagtccctgagctcatcattgtcttcctttaagttttctagtacaattagcaatgaccaaccaaccaatcaatccaccccattaaaatgctctaaggttgcaaatacttggccactyggagtcctgtcttttgtaggaactttatcacagatatctaaggctaaaatctgagtaactcttttgccatttcactagagccctcttcaccaatggcaacagattcattaatgcctttaaatctaatcagatcagagaaccaattccagaaaactcagaacctattcagagaacccgtccttaagctctgttccttaggagctattcttggaacctcaggcagttgtgtaaggtcattgcctccatgtctgatggtg

SEQ ID NO: 21428 - DNA, 600 bp, Bovine  MMBT06932
gaactgagaaccagagggtaggaagcacaggggaagggttctgagctgaccttgaccttggcagtgggtcagggagggatgagtcagcagagagcagatgaaaagaggaagaaagagagcgcgcgggaatggaaatgtagtttgccggagctcagaatcctctcctttcgatttgattccccgaggaatacagatccccacgggggatggtggtggagaagtggcccaattaggactggattcaaagaaatcgccggtggccctttgtgtagctcattagtgaaagagggactggaggcrgcggcagcgtgaggagggtcccggcaaagaccccgcagcaggaggagacggagagcagaggagagaccactgggagaaaatcatcagaactcagtgttccccaactgggcaacttgagcgcttgttatctgcctctcctgagtcgggagatgggctggagcgtgtgaataacagatgaagtgctgtgtagatgatgttgattagaatgaacagtttaacaatgtgcttaaatgaaaatttcagggctggagacccaattaggagtctcattagaggctcagcacaaggggcgccggcttt

SEQ ID NO: 21429 - DNA, 600 bp, Bovine  MMBT02896
aggcaagcatactgtggtgggttgccatttccttctccaggggctcttccccacccagagatcaaaccaacatctcctgcactggcaggcactggcaggtggattctttaccactgagccacccttaccatacaggcactgtgccaactcacctggcatggtgaggttggaaggatacagccagttcaagaaatgaacctctcacattgcaattggcaccagaagcacgtgggttgttaatgagaaacaggtttgaaatctatggagacaagacttagcctgcaaaattgattccaacawcagacatgcaaaaaagcagtgaaggaatcagttctcatctacaccttgtcaaagcagaagttcacctctgtcaatagtatactcagtgatgcagtatatacacagttataaagactcagacattattttttcttttttatgagaatggcatactaaatttcaactgcaacttggccggaagtttagctttttgttttaagtgagaaattacaaacccctgatttgatttttatataaagcatagcttgttttataatgtgaatgtgtttaatagataggaaaagttaagataagtatcta

SEQ ID NO: 21430 - DNA, 600 bp, Bovine  MMBT11646
agacagcccaacgtgccccttgtaacttcagggtgtggggaagacagtaagagggctccctgaggtcttgttcataagtgcacagatcccagtttttgaggggttttaaagctctttttgtgcaaaagagagcaacactatgacaaaacgattattttgcattggatagaacaggaaaaactgcagaatctacccaattttcagctttctgggattaccgcatgcctcgtgtttttcaaactgaaaaatgtagcatttttgcttcacaggcaaagctggaaatcagctatctgctctaaygcctaaaacagtggatttaatccaagttctcctagggatcctgttttattcactgccctgagcttatgttgggcttccctggtacctcagctggtaaagaacccgtctgcaatgcaggagaccctggtttgattcctgggtcaggaagagtgcctggagaaggaatggggtacccactccagtgttcttggacttccctggtggctcagatggtaaagaatccacccgcaatatggacgacccgagttctatcccagggttaggaagactccctggaggarggaatggtaacccactcca

SEQ ID NO: 21431 - DNA, 598 bp, Bovine  MMBT09369
  misc_feature (1)..(26): n is a, c, g, or t
nnnnnnnnnnnnnnnnnnnnnnnnnnatgagggactatggaatctatcctttgcccattacatgcatcatagttcaaaccacctaaaaagggtgtcttcatgaccccctggtcggcatagcctgtatcatttccatctaaataaaccaatctttttcccctcaaaatagaactctgctataatttgccctccttccataaaaactggagagagagaaattcaatggaaaaattgagtcccaggatgccaataaagccggggtgtctgccaggcaggatctttgtgtgtgtgcatccctaygccccccagcaccagccagtaagatctctaccctgagagaattacattctcacctcattctccttgtgacctggggtcaggtaggaacagggcaggtttgtgaacttggaagagagtcgcactaacaggcccctgtggtaatgaaatctcgaccatcacccctgtaccagactctaatcaactgagtgggggggttgttgcctctggccaaaggagcagagataacaaggtgttggaggagtcaggatacatcaagcaagcactccaggcagaggtgtcttcgtcaaaaagcctctcc

SEQ ID NO: 21432 - DNA, 600 bp, Bovine  MMBT11141
cagaatgtggttgctcacacccggaacgattaaacactcactgcattttttcaaggcaaattccacaaktcacatagttttagaaatcattacagagaaaaagaacaccacacacagtactttcataagagcaaacgctgtcatgaccacagaataccaaagaataagctctgcacatattcccagtttcatctttagttttccttgtttgtttctagacactattttctctgccactgacagtgtttaccgtctccggttgtcacataatgaaacagaagccgaaagcctgattatggygttagtagtttagaaagacaccaacatagctaggtgtcatattacctttgttttatttttattattttaaaaattctctctcctgagacaggctgtttttttagtctgaggatcctgaggaatcctaggtcagcagagttttggtaactggaaggttacgctcatagctagctgcagggttgagatgggcttccttggttgctcagttggtaaagaatccacctgcaatgtgttcaattcctggagagacatgtgttcaatttctgggtgaggaagatcccctggagaaggaaatgcaac

SEQ ID NO: 21433 - DNA, 598 bp, Bovine  MMBT08153
  misc_feature (1)..(47): n is a, c, g, or t
nnnnnnnnnnnnnnnnnnnnnnnnnnnnnnnnnnnnnnnnnnnnnnnaaaccagttgggcccaacagacacatacagagcactccacccaacaacagcgcaatacacatttctctcaattgcacaacgaacaatgtccaggacaggcccccaaacaagtcttaatagattctttaaagagactgaaatcatacaaaatatcttttccaaccacaatggaatgaaattagaaatcaatagcagaaggaaaactgaaaaatccagaaatatgtggaaattaaacaacatacttttcaacaaycagtgagtcaaagaagaaatcacaagggaaattgggaaactaccttgagacaagggaaaatgaaaacataacataccagaacttacgggatgcagtgaaagcagtgttaagagggaaatttatagttgtaaatgctatagaaaggtctctaatgaacaacctaactttatgctctaagtgtctagaaaaaatgatactggctgacagtttatgttctaaggcctcagagaccatgcttcctggatggtatgacccaccctgacttcaaatgttccctcggtgtttcaacatctgcagc

SEQ ID NO: 21434 - DNA, 600 bp, Bovine  MMBT07832
acatagttctgtgagctgttgaacttttgaatagctttaatgaatcctgtagggtcttgcactcactcatgttatggctgggcataaaaatgtcagtctttttctaaaagttaatgactcagaaatcttttcagatttctctggatagcaaacagttttttctgagtgctaggttttgttggattgtctcctttgcaacctcatttgagtgagaacaggcaattaacaagtatcacgtaaccttaagctttggaggcaccaaatataaggtagcaaaggtggaggattatgctgttttayatgcatgtggtcgagttaagccaggagactctctgattttgcttcctcatcaaaaatgcacttgtgccatgcttccctctcatgattatttcatatttcaagtaagcattcaatatctgacaggtttaattgtgggcattgaggtaacatggaaaataagaaataaaattatctgctttcataagtatatattctaggggaaaagaaattaatgtataaaaagtcataaagacaaaggatacaaaatataacttcaccacacatggtgatcaaggaaaaagtctctaagaaaacgatata

SEQ ID NO: 21435 - DNA, 600 bp, Bovine  MMBT10821
attgccttctccaaaatgtttactatgtgccaaacattgttgcctggcactctacagaaaatatctcacttgatctttttaacttattttattttttatacagttttaaaggttacactccacttatagttattacaaaatattggctatattcactgtgttttacaatacatccttaagtctatcttatacccagtagttactggtaaccattggtttgagctctgtgtctgtgagatctcacttgatctcggtagtaaccatctgaggtctgaaacattatccctgttttaggcatcmgttcagtaggcagttctcagagcctaggactctaaagccagtgttcttccttttctgccatggtaccttttttcttccctaatgttttagccatgcctcatggcatgggggatcttagttccctgagcagggatcaaacctttgccccctgcattgaaagcacagaatcttaaccactgaaccgccagggaagccccgccgtgtcatcttttaagtggctagttttcagcaaaaagaaggtacactgtgtgttatggctcatagtatagtttttaacagataacaaatttttagaaagca

SEQ ID NO: 21436 - DNA, 600 bp, Bovine  MMBT01452
ataacatttaatggtgaaatcagcttctaaaaataattctttatcacttcaagaagctttattaggaggttcaatttatgattcacagtattactatcttagtgaaaaaattgtagttttatattctttggaaatctccaagttgctggaggccaagtaaaccagattagtaccagtttttaaaagattcaaaggttcttaaattcagaagtcataattgctttaagaaattgtttcttacaacccaaatgtactatcatcagctgagcagcataatacagacttagtatgataaggtcyatccatgcccttcttctgaagtctttatagaactgaagagtccagggaggacacagactgcagaggaagggcatattgagggttttcactgggaggggggagcggggcagagtgagcagtggtttagcccagggcacaagcagacttgtaaagctgagttctgcttctgagtgggctagagtaggtcatggtacaccaactcacttactgacaaagagcagaaaaaactggataaataacaaaagttatacttttaatggcatcagagagttgaggaagctacaaggatcaatggactaa

SEQ ID NO: 21437 - DNA, 600 bp, Bovine  MMBT06613
aatgggaagagtttccattttgcaagattaagagttctggaggcaggcagtggtggcggctgcacagcagcgggaatgtgcttaacacaaccaaactcacacttaaaaatggtcacgatggcaaatttatgttgtgtgtatctcgccacaagtttttttaaagcccacagctcaagagtcatgtccctcttctgaagtctggagtcgcacctgccagatctccacgcatcaccctgaatgtagggggtgacacctggaaccttgttggaaactgagatcttatgggaaccatgaaaaatyggttccactccagacctcctgaaccagaaactccagccctggaattatcactgcaacacgtttgtcagatgactctaatgtccctcaaatatgagaactattgcccaagagtgatagatgtagggcaattggaagggatatgtttgaggtgtcttgaaggtagaaaaatatgacttggtgtggaatggacacggggcagagaaggcagaggctggatagatctgaatgaatgaatgtcttttaaaactattctgctcttactttttcttccttttactagagtcagaaagaaaaaataaa

SEQ ID NO: 21438 - DNA, 598 bp, Bovine  MMBT12747
  misc_feature (1)..(31): n is a, c, g, or t
nnnnnnnnnnnnnnnnnnnnnnnnnnnnnnnaaaaaataatttgaaatatttttgcttaataatgcctgttaaaaccaatatattccaatggtaatcagaatcaactaaggatcctgaaatttagttttgtaatgaagtaactgtgtgactttgccagtatctctaatctctcaggatttgttttctcatctgcaaaatttctgcttgaactagacaaccttagtctctaaagtggaaaggaacagtgaggaaactcccactttttaaatatatatagtgttaaatagatttaaaaaaamacaacttctttttattaagaatagtagatatttgaaagggcataaatattcagcaaaaatggtggccagattcctgacaagcaaactctggtgtgttttctcattaacctaaattaaactatgatcgtaccccaaacagccttatatgtctgtgggttcctgccaatatgcagttggatttctcctctgcagctgtctgtgatgctccaaagagacaagtgaatactgttgtaaaataaaaagtggagaaatggaatcattaaagcagaatgaataaattacaatgaccttatacaag

SEQ ID NO: 21439 - DNA, 600 bp, Bovine  MMBT10581
gtaagagcaagcaaaacacaatcaggcaattaatctgtcagccttaatttagctcagctgacttttcgcttaatgctyataaatgtggtgccttcgattctgggttccatagtaacctccttctcccaaagcaatgactcatctctgtagaggttgcccttcggtgcaagagaagaaatccagtgctctgggaatgcgatgggtgtccagagttgcatgaaacatgctgtttatagcatctccagtgtcaaccyagttcccagacaccagccatcgcctcgtccccaaatcacccctgcstaagctgccrtatctgagacaactggacaacagacgcaagtgtccaccttgtggtcactgcctgacatcacagcctcctgaccccagctctccccagtgaagccctgagttgggcatgctttcagaaagagagtctgcaggagacagcattctgttaggtgttgtgtgaggtctcgaagctgaacacctaggcttgggggcaggtgacaaagaaacaaacccayaagacgtacttcctcctgagttcccmgccagagcaggccctgaagagttctccagcccattcagactctgacaaac

SEQ ID NO: 21440 - DNA, 598 bp, Bovine  MMBT13501
  misc_feature (1)..(54): n is a, c, g, or t
nnnnnnnnnnnnnnnnnnnnnnnnnnnnnnnnnnnnnnnnnnnnnnnnnnnnnntgcttctgtggttaccagttcttggggtgacacaacatacttgggagtcttccctgaccccagattgtgcagtgttcttcctgtagaatgtttcccctaattttgccaccctggtatcgtccatgaacattactaatacctctccatcctgccccaacttgggctcgctgagtccatcagtggatatgtgcaacctttctccaaatgaaagactggatgtgtgagtggggtttggggaagggggtmattggagatgggattacactttctggtacctctgtctgcagaaaccattcttgggcactagagaaatttccaaggtggttaggcttctttttttttggtgggagggggctaygccacagtttcagacttggtttcaaatcctgaaaccaagtttcaaatcttggtttcagaccagggattgaacccatgtccccttgcttcagaaggctggagtcttaaccactagaccatgagagaaatcccctggttaggcctcttggttgattccctatcctctgtttcttcctgggaatgatgg

SEQ ID NO: 21441 - DNA, 600 bp, Bovine  MMBT04885
ttcgaagtctagattatgtaaaaaggctgacataggatttattgaatttttaatgacatatacacaggctggcatccatgtaaggctggcatctggtgttctaagttatcactggtaaagtttgggttcatcatgacagcaacttcagaaaagcttgtgctgaatttattctttagcttgaaatcttcagtcacttttctttagcttattctttcttttcatgcactgtcaagctctggatttgaaggcaagtcattcaagtttaaagactggggaatccagatagtctcagacatgaaygttctttgataaacttctaatgattcttaagaattttggaagtacagaatcctctcagatcctacccaggaaagtggaatattaaatagtataggctcagaggaaattcaccacaaattaggaatccttctaaggaaaaatgtatcctcttcaaagtctcacattcttacttcttaggagctggcagaacacaccaattgatctttaagttattctcacttggcactgaatctctttgtgtaagttaaacacattaacagacataaaacacataacaaggacctactgtacagcacagga

SEQ ID NO: 21442 - DNA, 600 bp, Bovine  MMBT12425
atgtttttattaagaagttygggttctttaaaattttagcacttttaaattaaaaaattatttgatacatgcttctctagtcaaaatcagatcacatcaaaggggagatggcagcagcttcttggaaacttagctgttcacaccactgggtgcccttgttcttgcacattgcttggaggtttataaaacactttatcatgcattatcttagggggttctcacaacaaagtccttttgatcttattttataagtgggaaactgctcaagtgagtcacttcaacaaggtcatgagtgaatgscatagctgggaggctggtctatgactgctaactccagtgttgcctgcaatgatctctcagacagagataatgtagttgatcttcacttgaacgatatctgtgtattaacacaaaagaaggaaaactgatagtttgggatggagctgaagaactgagacaaaaataatataaataagcctgggggagtttgtaaggaggagtgaatttagcagtgctgattttgctggaggctttttatttgttatgattaggcattccaaatgccgctgcgtaaccttgaaaagggaaacaccatgatga

SEQ ID NO: 21443 - DNA, 600 bp, Bovine  MMBT12716
atgacaggttttaaaatgcatgcaatgaattaaacattatggagttgaacctgaaagtttaaacttttatcttaaaattatacctctactaataaaacttcatagaacctttgaatattattaatgcacccacattattaatgcacccacacaaatccaatatgtgtcaagaagtttaggtcaagttcttaaaatatactatgaatatgatagcatatgttttttttattgatcaagtatgctaatatcatctaaatgaaggctcaaagggaaaaatacagagccatgttggatttattycattctggatactagaaaaattcaaagaacatggaaaaatagagattataggaagcataagtgtttaaattattaagcaaatgcacaaataagtatcttattatctaattattttcctttctcttgggttctttagaagattacagtcgaagtattgttcttgatgctataggattcagtgcctttttaaataccagcatattcatcagactttttcacctgctttataaatataaaatacatttttggttatcatgtatattcatagtgatgccttgataagaagtagatagtaccaag

SEQ ID NO: 21444 - DNA, 600 bp, Bovine  MMBT05498
gatttatcattctttaagtgaagaatttggccttatttaactgttttactttttctcataaaaatagacacaaactcaaatatgaagtttatatttcatgaactgctaaattgttaggaacaggttgggtatatatcttatgtagatcttgtttctcccagaatctttaaaaatggcattgtttgggtcatatctacctataagcagagtccaagcatttcagtctgggattcaggccctttggcaggccaaagaacactgttggggctgtatttcatactggtaccccctagggtataraatagataagaaaaaagacagagaaaagatcttgagatgcagactggccttagccattaccaatactttacatattgaaagttatttctcattgacatcaggaattttgccaatctaattattttatttattaatgagctagagaacttggctatgagttttaatattgaattatgtttgaaatgagtatataagttaccctgataagttagtgtgggtatcttttctactaatttgattcctaatgtgaaagttgttgatcttcacataattcatggatattctgttccctcatcttct

SEQ ID NO: 21445 - DNA, 600 bp, Bovine  MMBT01484
ttcaaaactcattttatttccccaaggtccttaagagcagttactttctcatatatttatttattcattcatttatttttaattcattcaacaaatatatattagatgcttactatatgccagggatcatgttaaatgttgtagatacaaagattaataagtcacaatagatgctcttaaagagtttgcagtatattatgatggcaaatataaagaatgacgaacacattgcaattacagggatgagggtagaaggtggtagcaggaaggaaaaaaaagtgtaattaatgctagtaggaygtgaggatacaagacatgatttatagatatcctctcaagtatggtttgaatgatgaatttttaaggcagactaggatgggaggaaatgttactattaacagatgaatattacacatagggaaagaactagaagaagacatatcacttacaagtgttgataaataaggttggagagatgaaccggtgaaaaacttcataataagtaaatttaaggaatttggacattgtcttagaggacatggaaaactattagggaggttttattaactgtggaaagggagatgaataaaataatctaat

SEQ ID NO: 21446 - DNA, 600 bp, Bovine  MMBT09525
ttctgccccaaagaggaccttggtgaatgactcgggctgtgtgagcctgagctctctgctgtgcaaaatggggcaggaggacagagctaacggttcctgcccgagcactggcctcagagggaagttgtgagtgtctgataagccctctgatcttggtgactttctgttgcatccctacaccccactctctccaccttcttgtgtataggcactcacacacaaaacactcactcacacacacatacacacatcagccagccagccgggctaattagttatacctccaaaacacaccctgarttttgaacttgaccaccctttgcaatctccacttccctggctcagtcaccatcatctctcatcctcctttccatgaccatctccctgggcttttgattctcctcttgcctctcacatccattctctgtagatcagccaaatggatcattttgaaaggccaactgaatcttgtcactcccctgctttgaacactccagtgactccaacacagacagaagaaaatccaaactccttttcctggcaccccagccctgtgtgatatggacttcagcctcctcccacgcttaaccttgtcccgtt

SEQ ID NO: 21447 - DNA, 600 bp, Bovine  MMBT10346
ttgttagagtatggaagcaacctagggcttccctggctgctcagcctgtaaagaatctacctgcaatgcaggagatccagcttcaattcctgggtgggaaagagcccctggagcaggaaatggtcacccactcyagtattcttgcctggagaatcctgatggacagaggaccatggcgggctagagttcaagggaytgcaaagaatcaggcacaactgagcaactaacataacacacggaagcaacctaagtgtccatcaacagatgaacagataaagaaactgtggtacatatgtatgsagcggaatactacctagccataaattggatgaaatattgccatttgaagcagcatgggtgaacttatgctaagtgaaataagccagagaaagacaaatactgtatgatatcgcttatctgtggaatctaaaaaatacaacaaactggtgaataaaacaaaaaagaagcagactcaggatctggagaacaaactagtggttactaatggggacagggaaggagggcagggcaatataggagtaggggatgaaaaaaaagtttattataggattatatgaaatcacgtgtgtgagattttga

SEQ ID NO: 21448 - DNA, 600 bp, Bovine  MMBT01825
tcgttaattttgtttgactgtatacctctactctggagcggtgctctttgaaaaggtgaagttcattttatttttattttttacgattgatggtgtggaggggaaggatgagacaggaagcagagagataagctgataaaaatgacaaaatacaactttatgtttaaactggaagaacaaaaggctgtttatgagttgtgatattatttggtattgaagagtaatgcagatgtaattaaagtcttccaacccaaagttttatccagagagataaagactttcttttcagagtcaggcagyatttatctcatacaagcaaccctggtgcatgcagctcatttatatgacagctattatgaccatgatatctagagccagggccagaaacacggtcccaaatagaatctttcaatacctgtggcgtgaaggagtgagtatgcatacagagagggtaataaaatcctacatttgcatagtgyttttctcttctttcaaagcagttttacatctattagaacacaaaatggtaatgttagttttttttttttctaatgatcatttggccacaattctctggattatgttgttgaactaagctga

SEQ ID NO: 21449 - DNA, 600 bp, Bovine  MMBT02236
atttaaatcataacttttactgattgttgctccagattctatagaggagaaacagaaaaaaattcatttctggttgcataagttgacaatgatgtttaaaagacagaaaataacctattaaagaatttgaatagacagtgagcaattcatcgtcatgaatcaaaagtataaaagtaaatatttgttttttcccctaaatatcagaaaatatttactttcacacatgatcacctgaactgcttgttcttttgtcagagaaaatagtaagattatcaaggacaaatgtatcaaatttcatayatgcaatgctatgtgccaagcagggtagaaatgaaaaagtgacataaagmttagtttttacagtcaataaatttaaaatcttgctctctctttaacttgttatctgataatgagctaatcactaaaactggctcaagatttcttctattaaaataattcacaaagaattcacctgtcacatccagcacagcactccaggaagtctccccacttgaacttgtagccacacaagtgtaagtgccagtatcagaaatctagtgtgcatagaagggagagaataaaactgttttaattgatttg

SEQ ID NO: 21450 - DNA, 600 bp, Bovine  MMBT02408
aaacaagaaaagttcaatcatttaccttttcccagcttgtttttcaaccaaaaaagataagaggttttgtttgtttctgtttttgtttatccaagagaaaactatatgttttcagagcgaagagttctaatccataccatctttataggaacgcaacagggatcaattcactttagaaaataataaaactaaactgacctgaaaatttctaatctttgggtttctgagagtcactctgcaaataaaagaagagtcagcagggacaatccagatctataaacaccaaatatttgctcttaycatttcaagccagagggagtgattcacatgatatacatttgtactgacttctttgtccacactatttctgaggaagaaacttaccttcctaaatgccaactactacctctaccgtataatatcagcccacctcacacccaacccacgtgctgaaaggaacagttacatcttctttttaaaaaatcaacttcactaaagtatctggatgagttttgacaaatgtgtacacctgtgtgctgctgctgctgctgctaagtctcttcagttgtgtcccgactctgtgtgaccccatagatggca

SEQ ID NO: 21451 - DNA, 598 bp, Bovine  MMBT08790
  misc_feature (1)..(166): n is a, c, g, or t
nnnnnnnnnnnnnnnnnnnnnnnnnnnnnnnnnnnnnnnnnnnnnnnnnnnnnnnnnnnnnnnnnnnnnnnnnnnnnnnnnnnnnnnnnnnnnnnnnnnnnnnnnnnnnnnnnnnnnnnnnnnnnnnnnnnnnnnnnnnnnnnnnnnnnnnnnnnnnnnnnnnnnncatacactaattacatagacatcacgaagtcctatttgtcctcagtacctccccagacagcagggaaataataccaagggtaggcatgctaagtgatgattcccccccaccttactgtcaatcatcccagagcrctcacaggggcaccccactcaatctcattaccgaatcctaagggtaggactacaatactcaccaggaascacagttcaaacagcakgctgcctggccaacatgtgagtcataatgactccttccctgattttaggttttggtgttaatgcaataaatatcaggtatttctcatttaaatccaatgttacaatacacagacaaagcaacaaaacattggtaagttcaatttaggaatctagataagaaatacagtcaaaggttgaagttcagagtcatttaatcccatttaaaaacaaa

SEQ ID NO: 21452 - DNA, 600 bp, Bovine  MMBT08824
ctcactgctggcatttggaacatcgaccccgagtagacagaggcgacggaggacccggcccaggggtgggctggagatgacctggagtttcagtagcaactcttcatcatcaaaccctggtggttaattacttctaaaatcaaggctgcacacccacaagataactctgccctcgtttcatcctttgtaatttctaggagatgagagatagatgtacagacagagagatgggtagatggatagataggcagatagagagagagagaatttacagtaaaatctcagacagttgggaagaasagggtaggcataaatsagttccctgagggaagaaagtcagagctcttcctggctgaaatccagatcttcactgcagacagttacaatgctatctgttatctttctgccccaaggaggatccagcaggctgggcacacttcccttccgagaagtaacaataacacaattaaaacgtttacattttacagcctcttctatttttcaaagattttttcaaagagctccctgcttgcacatcccaggagcaggcacagcaaagacagcagagcgtgaagaaggaagacggagcgtggatccgaa

SEQ ID NO: 21453 - DNA, 600 bp, Bovine  MMBT04967
ataactggcaacccactccagtgggggcttcccaggtggcgcagtggtaaagaatccacttgccaaatcagaagatgcaagagatatgaattctatccctgggttgggaagattccttggaggaggaaatgacaatccactccagtattcttacctggaaaatcccaaggaccagaggagcctggcgggctacagtccatagtgtcacaaaaatcagacatgactgagcatgcacatatacacaatatttgatatagatattctataatcatttatattcaacttttaattcctgctctytgaataagtatccagtctctctctctmtatatatatatatgcatatatccacacacacgcgagtaaaggtcatcatttgttcattcatttaggtattacaaggagttatgaaatcaatattataaaaattatatttttatgatttgtagagatgcagacaaattacacttgtgcaatatttcaaatgtatacatttccttcacctgcattaacattacattgataattataaattagtagataaaaataaatttccgctgttacctaaatatagatttgatgatgtatgagtctgagaat

SEQ ID NO: 21454 - DNA, 600 bp, Bovine  MMBT07410
attctccaagtccaccttctcttcaaagagctgcctctccttccagtctgggcttgcctgcatggtgctctttggggtggaaaattccttcaggtcatcaccaagctgggcgatgggaggatgggcgagctccaggcttcctttcctcggaagggcatagatggcctctttatggttgtctccctcccggactctgctgaggacggggtaggacagctctgcttcctcgaaggacccatactttgtaaccccgccatctccacctgtcaagcctcccttgcgttctgtctcttcaaattytctcaacattgctttgctcccagcaccctcgaccgagggctgccagccttgggatttcaggatgcttctaactggggagtcggagttttctagcgaagaagcaaacttctgctcagtggcaccaaagctgtcatctggaagtggctttgtccgaagatttcctgcatacatgggggggacggtagatgccacggtggacacggaagtgttaatggtgggagagaaagccatgagcttgccactctgcacctgggaggagacagttcaaaaataaaagctgatttaaaaacaccgcttggg

SEQ ID NO: 21455 - DNA, 600 bp, Bovine  MMBT02224
gtctaccacagcatccctagcacccagcccagagcagatattcaacctctgttgagtaaacctctctgcatcccattctgtttgggggagggggtgggtgagaggaggacttccatggagatgctctacggaaaactaaacacaatccttgaggttggtaagtactgcatctgaggtgatcctccctgggctcaggggcagtttctagtattcctatgggcacctgagggggccacgtttcagactgtttgccgggtacctaaacccacagatgtggtgacaaggtaatgacccgatttkgtgagccgcttgtggactcagccatattcctcacaatcgcatctcttcacgtggraacctctggactgacaaaaaatatctcacttgatgaactgattttaactggcactacctgccctgcaagacctcaaagacattttttcccaaacaactaattttatcttcatgccccagcacacctgcagccctggcggggctcagcacccctcccagaggatgcataagcagcaaagtctgttttcctcccttgtgtttaaaggggaagccccccgcctccaacaccgaaggttctgtgggctg

SEQ ID NO: 21456 - DNA, 600 bp, Bovine  MMBT00755
gcacctaatgagcatgaaataattcctaagaaaacaaaataagctgtcatgatgtgtttgtccccagtgattcttatacattatcagatgttgtcacctctgctatagtgcacagcatatgaataagttattcttgcttgagtaactgcaactacttttctataaacagtctcactagtgaaataagatgtcataacaactccagaattttcctctctgaggaacatcttctcagattaaggaattaaggaaaacagagaacataggttgaaggtatatgagtaataagagcacttaaartctgtgaatttttagtgtaaacaaaaaaggcaaccaagcaatagtgttacagattgaaaagttagagaaacagaaagaaagkttgggtcacaaacaggcactgtgctagcacatgggaatcgaaaaaagtgatatatatcaggctaagtaaaaagctgcagagctttgcatacgtagaacatgggtcatttgtcatgggcagagtttctggaagattggatatgatctagttctaaggaaaagggctaaaatttccaacagcaaatggcayaaaccagagagtaaaaactatgtgttttc

SEQ ID NO: 21457 - DNA, 595 bp, Bovine  MMBT11970
tattgtttaaaattgtaattttttatgtatcctagatgtatacaggtttttaagtaaaaaaaaaatgggattgcattatgcatattattctgcaactttctgtcattcctcttactagcctgtcttagaaactgtttccatgcctatccatggaaatctactttactctttccaacttaaacatagaatttccatggtatataatacaataccaagtaggggtagaccatactttatttaagcaattctattatggctgtactttgagttgcttccagttgttattacaaatgatgctaytgtcatccttattgttaatacatattattgtgcattagtttgggtatagcataggaataaattcttttattgggtcaaagaattattgggtcaaaggatttgtacttttgaaattgatggacactacaatttgagccttcaaaatggcttgtaaagtttataaatcccaccaacagtgagtgtgagtttgtttatccatacacttaacagcaatgggtattctctcttcataatagtcagatggtcattaattcagtttgcatttttctgataactagtgaggctgtgtgtgtca

SEQ ID NO: 21458 - DNA, 600 bp, Bovine  MMBT12083
gaaggctggaggtttcagagcaggggagtgatgtaatatgatttatatatttttaaaaaatgtcttcttactccttgctcatattaacaatattattaccaatgttactgtcctcttgactttctggtttggatgaagtgagttcattgaatgcctgttctgtggcttccaggacaccagtggccactaagcacccagcagctgagagtccartgccaagtatggctacagaagatcctgaataagtatttagtatcagccagggcctcatctggcttgctagatggtggatccaaatcraatgcaccatctgctcagccttaatgcagttttaggggcaaagcagagaaaattgtgtagtaggagcatccctctaggaccctttctagcctgacttttgccatcagcatctctgtctgacgctgatcagggaagaaaaaacttctcgccccacctgagccactccccaagtcaaatcactccacagttgaagagcatgctgggtgagctcccatgagagtgtcctcaaaggctcctggaccctcaagaatgtgagcagtaattctcaaaatgaataaatagttctaaaggaacatctcc

SEQ ID NO: 21459 - DNA, 598 bp, Bovine  MMBT07673
  misc_feature (1)..(39): n is a, c, g, or t
nnnnnnnnnnnnnnnnnnnnnnnnnnnnnnnnnnnnnnnctttaaagctttacttagaattgaatgattctctttggagcattaaccaaagaaatcttggtatttaatcttgaacaaaatctgaacttcatttcattctttcagttactttatcctatatattaccgtaattctttggctaatyagttagttcttcaaagtggagtttgcccttcaagtatttataaacacagaaacttgtttgcataaaataaggcactgaacatttactctctcatgataaattttctggttaatctyctttccatcgggaaaagatttctttaagggtttatttaaaggatagctttatatttaagctatacttaaattcctgaaagcctgcactgcttttataacttctatttgcttttatctaggccactgatacaggagaattagtcaggaatggaattcccctttggctttggactcaatctctgtgattaaatccacaagggcacaacaaaaatgatttaccagggccacctcaggcagttctatgtcttggtgcttattttagtacctaagttggaaatctaacacaaccctatcctgg

SEQ ID NO: 21460 - DNA, 600 bp, Bovine  MMBT01255
attcactacgaaaacctttatgaagcacctactctgtcagcagaaagagtgggccctttgaagaagggagaaatgaatgacaaggtaccccctctgactcttgctggccatgtgacctggtttgacctcctgggcctcaatttcccttcccctctgatgagaagagatgatgacctcccagcccagtgatgagataacctgagtaatgggccttttacaggcccatcgagtattcatttctttacccttctccccagctctgtgaaaaccaaggcagtcttagcctcagtgatggacagwccagggtgaagcaggccttggagccctcggtggtccacatttgatttcctcttcctccagcagaaatatcaatggagcccaggggagaggggaggctcatgcatatgataggtgtcaaggatggcgtttgctctttagactagcccggtgctttgttattagcatttaataggtccccagaaagctttgaagataataataggtctcccctccctttcaactgatgatcttgacgtgatatacttatgtctgtaataaaattcaaaggttctcacaaggagccaagacttgctcttatct

SEQ ID NO: 21461 - DNA, 598 bp, Bovine  MMBT06267
  misc_feature (1)..(2): n is a, c, g, or t
nncacatgttatctgatattagggtttctatctcgtgtgcttcctttccatgataaaatctgtgcccttctccaagtacgtcttccctcagctgtccaggcacatgataaggtgtcattcctggtccccttgtgtttaggagggccactggaccaacgaccatgcagcacgtttaccacttcatgttgagctgtttaaatggctctgcagaacctttctgagctctccctccctctgagtggcaggtggcagccctggagatggtggctgtctatcactcagcacctatggtgactaccrtgtgcagagcagaatcatggactagtaactgagtaagcaaacgtaatatttgtttaagtcactgagatttggaggggctgtttgttaccacaaataacccactgtaacctgacttactttctgtccactttgttttcccagtttctttattatatgaacgatataattttgcttctatgtgctcatgttttcatggtaaataagaaaaaatggagggatgaatttaatatactaagtcatttagtctaattacctttataaatttcatgaagggaaagcagacagtagatacattcat

SEQ ID NO: 21462 - DNA, 600 bp, Bovine  MMBT09783; identical to SEQ ID NO: 4788

SEQ ID NO: 21463 - DNA, 600 bp, Bovine  MMBT11835
aagtacaaaattaataaacacggtggaattcactattatcgtaaaccagccagcaatattttatgtgcaccctagggtttcattttggaatttcactcttcagtggatggagatgaccgaaaatcaagttgagtttcatcagtttgtgaaacatccctcaggagttgtatggtcaacctgtctccagatttaatcatttataaagcttttcacttttcagtcaattaaatattgccacctgagaagctatttctgaagaagctggackgtgtttctcatggcgtggaggcatttctccayacctgggcttcccagggtagacgggctctttgtggggtggctctgacatgttggtgcaggaaccgcgtgggagggaggaggggaagtcctgcctccctctatccccacccagtccgttctgctcatgcacacgccacactcatcttggaaacatgcaagtcggggtgtcgcctggggagacggttgattgcggtcactgagtttcctaccgtgataatccctgtgcctggcagccagccttccctgtaccctgctcgctggctgcccaggctgtggcagagggcaggggtggctcctctc

SEQ ID NO: 21464 - DNA, 600 bp, Bovine  MMBT11337
ataagaagttatgtttacactatactgtagtctgttaagtgtgcagaagcagtatgtccaaaataatgtacatgccttaattaaaaagtactttaatgctaaaaattgctgaccattatctgagccttcagcaagtcataatctttttgctgatagacttactcagtgcagggttgctacagccttcaatttgtttgaaaaaaaaaaagcaaaccaacagtatctgtgatgtacaataaaatgaagtatgcctgtactgggttgtgaagttttcagagttttattcttaatttcctagcrggaattctatagaaatacagtccatcagttttaagcatgtctctatcagatgactttctcttttggctaatatataaagagatatataaargaagttatgctgctaaaatgttattttatrtgcataaaggaaataacaatatggcttcttttagatgctgtttggccagaaaaacactattcctaccagggatggaggtggccagagtaggtgatagatgagtattcattgatttcttgattgatgaacctgattatgagaaggaaatatgttaatactgtttttaayagctttatagg

SEQ ID NO: 21465 - DNA, 600 bp, Bovine  MMBT04354
atccatcaattataccaatgtaccaatctggtgggggatgttgataatgcaggatgatacatacgtagggggacatggggatataaaaatctctgtatctcctccttgattttgctgggaacctaaaactgctccccaccctccttgcaaaaaaaaaaaaatcttaataaaatgcacaaattaatcttttaaagaaaaaaaagtacccttcattgttaccaaactttgattttcagctttatgtcagttatgtacatattaatcagaaattagttagcatattattggaaattttccctyttaattttaaaaaattgcccatgctatttttcatgaactagttctatagaagcttctgtagtttaatttatttgggaaaatatgttttactcaaacttacattctatctttttcttacactttgttttaattacctgagatcctcagagcagtaaaggtagaaaaaaaaaataatgcaggtaacaaattactgccttggttttattatctattacttcactattgcctgaagtacactatttattactttcagtctgcttgaatttcttatcaggtaattctctgagtcttaaatagttt

SEQ ID NO: 21466 - DNA, 600 bp, Bovine  MMBT10087
cagttattttcagttcctaattagcaatcagaaatgagctaggacattttaatcccataaaaagttatcattactaagcatcatttatagactggggcttcctcgatgtctcaggagtaaagaatccacctgcaatgcaggagatgcaggtttgattcctgtgttgggaagatcctctagaggatgaagtggcaaccactccagtattcttgcccaaagaattccacggacggaggaggctggtgggctacagtccaaagggtgacaaagagtcagagatgactgagcatgtacccaaaractgtttaactacaaatatcttgtttaattgactcacrgtcacagcagatattgactttttattaatctacaaaattttaaaggcccttctaatgttaaaagtaacaaaaacataaatagaataagaaatgtcttcagttcagttcagtcgctcagtcgtgtccgaatctttgcgatcccacggaccgcagcatgccaggcctccctgtctatcaccaactcccggagcttgctcaagctaatgtccattggagtcagtgatgccatcctatcatctcatcctctgttgtccccttcttc

SEQ ID NO: 21467 - DNA, 600 bp, Bovine  MMBT04757
tcaagatccacaggttaaacaaatgctcaaatatcctctgaggctgtggatatcaaactctttagaggcacctgggattctgattcacaagttaggatctgtgaatgctaaaagctcctacatgcggctgctctagggtagcttatcattaggcagagtgaaaccatgtctttggtagtatgtcacacaggaagacaaaatcatctatttctagtgcagtggggcccacaaaagtccctgtggttccaagaattatgattgcagtagcagctcagcaggcataataatatttctggtaaytgaaatttctgaggcccatgccacttatacaaattggtatctgaagagacagaagagagggggacacaatttcaaggattttacctcctataggtctaaatgtgctttaatggtatgaagattgaattcttaaatgctctgatttccagttaattctccaatgttcatatttttacagtgaaaatctgacttaatcctctaatggtggagatggttgctatgatgagtcacacctgtgtcttcacctgtctcagggcagtttcttaagatgttctgagttctatgcagtccattttcttt

SEQ ID NO: 21468 - DNA, 600 bp, Bovine  MMBT09142; identical to SEQ ID NO: 4511

SEQ ID NO: 21469 - DNA, 600 bp, Bovine  MMBT02492
cttttctggtttccatttaacttcaaatcctaatcacagaaaagaaaccttactccttccctatcctcccaagcctttccccctagaaactcacttgatgatcatgtaaacaaagacaaacttaatataatctatttatgaatagtatttcaaaaatgagaactatattatagtcacatgcttttacaattggaaagactgcacaacaaatactgaaaatgttagttgtacattatcacagctcagaggaagagagaagacatgctgaagaggcagaggacacggctttaaggaaaacasaagccgagaacaggcatccagggcctttcctgcagtcagagacttctaaagccacagaacatttcacatcaagaaggataaatgaggacatgacctctcagttcctgtccttcaaagcaaaagcaagccaatcctatgacaattcattctttgaagttttactattggttatagatgataggtgtttcgaaactacaaaatctcagcctgaatatttagttcctacaaccttattcactccataagcattcataaaatattacctttttacatttttaaacttgtatacactttcatatt

SEQ ID NO: 21470 - DNA, 600 bp, Bovine  MMBT02676
gagtgatgatgcctaggtgtccatgtgggatagatggggaattgtggtacctcgtgctgactcgtaaagacaggctgagtgacagcatggtggtgaaggcagattggggcttcagtttacactgatccagctgcataactgggattgagaaataccagctcagaagcagcaggatcctcttccccaggctggcacagcgtgccagttcagccgttcaccaattccgaggtctctgtgaactgtaataggctggaaaccagtgaagtttaaatgaatatataacccgggcgactcctctgrgtcagcatcttaaagtatggccatttttctcacatttctaacaccgtttcaagggtatcttacatctcagttcagatttgccattctatccaattggatttcttttcaattcaacccaattttaaccccaatgttcaagctattttttcccattatgcccataaatggaagcaaatcatagtatcttgtataaatgcagctgtttttccttgtcttctcttttctcattttagatgaaaatcttctttctcctttctttttattaaccacagcaccctccctctgcaccccgctgacttc

SEQ ID NO: 21471 - DNA, 600 bp, Bovine  MMBT06916
acaatattattaagcatcatcaccatactgaatcttaggtctccagaagttatttatcctgcataactgaaacttctaccctttgaccagcatctcccgactcccctcaccctcctgcccctggaagtcaccatattctactctctgcttttgtaaattctacttttggagattctacatgtaacagagatcatgaaggaattgtctttctgggtctggcttatttcacttagcataacactctctagtttcattcctgtccttgcaaataagatttccttctttttttaaggttgaatrttttactatattttatgtatgcataagcatgactgagcgacttcactttcacttctcactttcatgcattggagaaggaaatggcaacccactccagtgttcttgcctggagaatcccagggatgggggagcctgctgggctgctgtctatggggtctcacagagtcggacactactgaagcgacttagcagcagcagcagcagcagcaagcatatatagctattgtcaaaaagacaaaagataaatcttggtgaggatgtggagaagaggaaacacttgtatactgttcggtgggaatg

SEQ ID NO: 21472 - DNA, 598 bp, Bovine  MMBT03153
  misc_feature (1)..(64): n is a, c, g, or t
nnnnnnnnnnnnnnnnnnnnnnnnnnnnnnnnnnnnnnnnnnnnnnnnnnnnnnnnnnnnnnnntttatttagttccgattttcttaaatgcaatttcactgttcttggataaggaaagatatattattaatacttagttattttttctttcagatgcatgtatcatatctgaagatagaatgaacaaaaataacatacagttaaaatggagaaaccccccaaaaagatatgctaaaacaggggattttattgaatttgagtgtaaacattcacataaagagagaacacccatacaatcwtttcgagtcctctgtcaggaagggaaatttgaatatcccgcatgtgaatgaaacaagcacaacttccctggatgtacgcttaaaagtaatcttagaggtgggctgttagtatttgttatgtagtcactgctacagttattttctttatactttcagggatggtttatcacagttttaattagaactctggattttcagaggttcttaaatttgtaagctgagtagccaaggcttctttcatagcaggaccatgygtatccgagtcctgagtccccctctcctgtaacacacgcagaaa

SEQ ID NO: 21473 - DNA, 600 bp, Bovine  MMBT01000
gaagacccagcacagccaaaaatagataaataaatttaaaaaaattttttgttaaagattagaaaaaagaattaggttgtgctggcacagagcaggtacttaataaataattgtcaaatgattgcataggtaaatggcagcatcagacatggggtattgttttgtttatttattttggtaagaaatggtgaagttttaaaaagaagctggtataattgtattatgatgatagctctgtggagaacaaggtcaaccacaggcagggacatgatctaagaaaccatggtgattgtcctaaaygatggactgcgtgccctgccccccacttcccatcatcccggaaagcctgcttctctgcctctgtaagaagccaggctccaatgcttcccctcttttgaaatatttgtgggtcagtgaatgtcaacactcaggttacatgcagagtgtgtttaaacacacactgggaacatcaacacatatcctattcctaaggagaggaataaggtctcctaattgcayttgtgtgaargttgacatggctcccaggaaggatctggggaggtgacacatagtgtggccgtcagccctgaagtttgtcga

SEQ ID NO: 21474 - DNA, 600 bp, Bovine  MMBT12974
tttggtgatgttaactagcttgtcctatatggagaaggaaacagaacattatgttaaagccagcagagctttttgagatcaggctctgtggctttcaaactgtgctctagggaaccctgggagttccatggagcttttctggagactgtgtgagacgtgagggattcctagacagaggggtccaggtgcccttaactctcaaccatcttctacttccattcattttgtttctcgggctttcacacctgattttagttgaagaaaggtttctatggtgaaagaaaggtttgtaccttctcmgtatggtccaaatccatccttttagagaggaaataataatataataacagtaaagtgcacagtgcctaaacaatgggccagacatggatctaagtgccatccttgtaatggcttttttagctctcacagccaccrgtgggggctggcaagcaatcagcaaagtaccagacaatgggaccgagccctcaccatgtcagctgttaagtatgtgggtgacatccccaggaggagaactaccgcttcctcgtttacagaagacactgggcgcagaatagctatgtggactagctggcctgatgc

SEQ ID NO: 21475 - DNA, 598 bp, Bovine  MMBT06477
  misc_feature (1)..(161): n is a, c, g, or t
nnnnnnnnnnnnnnnnnnnnnnnnnnnnnnnnnnnnnnnnnnnnnnnnnnnnnnnnnnnnnnnnnnnnnnnnnnnnnnnnnnnnnnnnnnnnnnnnnnnnnnnnnnnnnnnnnnnnnnnnnnnnnnnnnnnnnnnnnnnnnnnnnnnnnnnnnnnnnnnnnttgtagaattcccagtgaggaaaatgggattctgttcaagagtgtggcaagaatggcattgatgtataattccaaatgggaaactttaaatgaattttctgtagtttagtgcctacagagaactgtttgactctgggcwactggctatatacttattaatattyctcctgattttgaaatcagttcaaaacctgagtcattctataaccatttttcattgacagtcttgtcaatctaaataacagccttatgataaaatcatttagaatgctatgatgtctcagcctaacctcattgtctgtttatcacttcttaatktgtatttgtcagatttttcttacatggaaaatgcattttaaaattatactgtaatgtatatgacataagattatttaaaatagtagtacttctctccccaaatgtcagtgtgctggaat

SEQ ID NO: 21476 - DNA, 600 bp, Bovine  MMBT12929
gggttctttactattaccaccacctgggagccccgtttagaggatactgtgtgcctattctgtgtgggacacagtgctgggggtactttccacaaagcaatgtgacgactaagaatcagatgagagggccccttggctggaagccttctccagagcaagtggctcaacccattagaaggtggaggcacagactttgctgcagggttaacatgttggtataaactctgctgcataacagctgtcacgggagcagtgtagagacttaagagatggatgaaggaaaagaaaaagcatcaccayggggtgcctgggatgcagggaccgtatcagagactttcgcaaggaaatcacacctgggactgcttatgtatacctcgtggcatcagaaaaagcatcaacctgacttagagagaagcctcttccgtgaggaccgaaagggctatgctcttgtgattttatgtctgaagccatcaaacatcctacctggtttgctctttcaaggtccgtcatgatcatttcaatttcgtcggccctggggaggtgagagggagagagcaggttagtcgatgggcgaggcaggctcaggggccaccactgttc

SEQ ID NO: 21477 - DNA, 598 bp, Bovine  MMBT09986
  misc_feature (1)..(196): n is a, c, g, or t
nnnnnnnnnnnnnnnnnnnnnnnnnnnnnnnnnnnnnnnnnnnnnnnnnnnnnnnnnnnnnnnnnnnnnnnnnnnnnnnnnnnnnnnnnnnnnnnnnnnnnnnnnnnnnnnnnnnnnnnnnnnnnnnnnnnnnnnnnnnnnnnnnnnnnnnnnnnnnnnnnnnnnnnnnnnnnnnnnnnnnnnnnnnnnnnnnnnncatctgaatctattaaataggaaaaactagcaagagttgatagggcacaatatttatgtgcttatatttaaatggaattttaagcactattaatagagcactaytttcatgtcacagtttagcttaatggaatagagtcagttatgtaagagcactggtagtgtgtgactgataactagcgtattttaggaataaaaataaattgtaaggaaatttttgtaaaaaaatctgttttgaaaggctgaaatatggtgatttaaatgaaaattctgtagtcataatacttatatctggttagactgagtacaatttttagraaaaggagactgaatcaactttgwaagtctcttaagaaccacatcacttttaatcactgaaaaaattataggaataagttactgc

SEQ ID NO: 21478 - DNA, 598 bp, Bovine  MMBT02597
  misc_feature (1)..(84): n is a, c, g, or t
nnnnnnnnnnnnnnnnnnnnnnnnnnnnnnnnnnnnnnnnnnnnnnnnnnnnnnnnnnnnnnnnnnnnnnnnnnnnnnnnnnnntgagaacatgggagtcctgactaaaagagataatccaccagcagaattcttaggctgaatgggtgagcacatgggacaagatatcatcaaaggaagaaaacgagaaaataacaaaaacaaacaaaaaacaccttatgttattactagggaaactcctgtgttatgtgtggattgaataggacacttaacatatagtctgttatgtctgagaaatastctgtacataatgagctcaaactatcttaggaaacacatgcactagtgagggtcttagatgtaaggtattctactctactgctttgaaaacatgaaataaaagcaggaaragggaggaattaaaaatacttttatcatctccaaaaatcttagcggcttctatgattttgagaaataaaaacaaagaaaaygacagaaccagctgtaacagatggtactaattagtatcttagaattcattaggaactatgtcaaagttgactggctatttgcaaaaatatttctgataagttgtcta

SEQ ID NO: 21479 - DNA, 600 bp, Bovine  MMBT08126
ggagattaaatagcctgagaatggctttgtatattaacttcagggaactcaggtcttgccctaaagagtgacacctgatgcctcaattgtaggtaatacatctttagtaaacctcagatttcaagtaggctgctcggaaggtgagacaaatcacatccagcccgtaaatgtctttctttacggagactgaaatgccatccctgggtactcacatttacatgaatagcagatttaacacttgagacaattgaagtttctcacgaaatgatgagtccttggccttgttgacaaagtgccccrtgaagagcactgctgtcgtctgaactgtcagcagaaaaggtataatgtgattaagaccaagtggtaagccaagactttgggtctggtactcattggtggaatgacttcgggtcatttctcattggtggaaatgagagagaactggaccaagcacagtcagatggtagcagaagaagaactcctggtcacttatttttccagcagttaaaaagctgaacaaacatggatggacctagagattagcatactaagtgaagtcaggaagacagataccatctgataccagtcacatgtggaatt

SEQ ID NO: 21480 - DNA, 600 bp, Bovine  MMBT10240
acacggtccatgtggacaggcccctgctcagggaagccctcgtgtccccaggagtctgggtyggtgtgggatgatcgggccacgccctccccctactcctgccggggtacacgtactacatcgctcttgctggtatagacacggtccgccaggctctcgatggcaatccacttgaccggcatcttggcgatgcgtccctgacggtagtagtccccrttgtagatcttcttggagagcccaaagtcagccacacacaccgacatgttctcattcagcctgcccagattgggggagaggaayggggtcacagcattgccccctccaccaggaagcctgccctcactctcagacatgtctctgtctcctgccctggctgtcctgcttcggggtgaggatcggtcagcccccaaacctgggagggaactatgttacttcttataccctctgtgaaaggtgggtctgaaaagggctgctagggggccttcccagctctggctttttgccagattctaaggtccttcccaggctccttgggttggattctctgatattttwaaaaaawwtttaaatagttatttgacttcactgggccttagttgc

SEQ ID NO: 21481 - DNA, 600 bp, Bovine  MMBT03036
gccttgctggtttgacaaactgtggtgatggtttctaaaacaatcctgaagaactcagggagaacatgatctccactttcaggcagcttaggtctgaggagtgagaaaaggagaatgcgtcatctcagaggggaggaaggagagtgatattcagccctgtttctgacaggaaaggtgaccagcttgaaactggtgggtttgtccctttaactcctgacgagaattattctcttcctcgctgagctctggctgcgttgtagaaggatgcctgccagaagctaatcaagagttttcctaagygtgagccaagccttaaatggcccactattaaaagctgtgtctgacattaccagtgatgtcatttcctcccgatccattttatttgagggaggctcatttgtcttcagccaggagagccacattgacttgaatattgagctgcagttagcagcttgaagcctgaggcctctttcatctgaatttgtgattctagtgctttaagatccaagaggccgcagcatccctgaattccaaaagcattagtgaggtaggcttgctttctttttaaattttttttaatataaatttatttactttaat

SEQ ID NO: 21482 - DNA, 600 bp, Bovine  MMBT10236
ccgaagcgccctggccctcgagccgatgactcagcatatggaagaggggagggggtcagcctgagtcagggatgggaactcctccccgtctccagggaatcgaaactggtattccctcctccaggacagcggccagagccgagccggcccctaggaaccccagaaagcctcccatctctcgttctcccgccccttagtccgactacgagcacagggatttggagcccaactgggcggcgggtgccgggcatctcccttttccctccttttcccgtagtcctcaagcctctgtttacaggmgaccaaaaccctggttacagagaggaacccgggcgtccgggtcgagcctcctcgtcacggcttccaggaagccccccccttcccccgccccttgtgagtgagtcactggcgagagggaggctgcaaccgtgccagagccgcccgcagccgcccagctcacgggaccggccgggaaggcccctcagcccgagaaagcgccgcaccagggattcccccgtgctctgtcggacgggcagatcagcgagcctagcagaatctcctcacctcaataaaagcccgcagtccgcggtcacaacctgc

SEQ ID NO: 21483 - DNA, 600 bp, Bovine  MMBT07598
tctctactcgcatgcttgcagcaagaggtgaaacaggtgtcgatcacacaactgcctgacaaccattcagtgctgatcaccgaacaagcatgtttatttaattatcccaacaaccataattgagccacatctaagtttctgatgtcactgacttcaactattcaactccagataaatactcaacttaaaaaaaaaaaacctgaaataagtgacaactagaaatggctgaatcattgtacgttttagacacaaccattaatcttagttttgctatatgctatttggtactttttgattcartagttgggattacaaaaaaaagtttctgtattcaaacctatctacagaatgtcaatataaaatgtgtgactatatacatttaatacacacatacacacatacacatactctcacatatctagaaaccagcacttaagcacgtctccaattctcactaatgactcaataaatcatttgttaccttaagaccagcttagacactataaggctgcaacatatggctaaagaggtcaaacacaagcacccacagtcaggctgattaaattgttcctcctcatgatttttcacaagtagtaatac

SEQ ID NO: 21484 - DNA, 600 bp, Bovine  MMBT05814
aaacagccacagccataaacctttcaagtaggtgcagagaagagctgtttttcatcaggtcattgtaggcagcctgggctgccaacttcccatcaaagcctcataaactcttttacgaggctcataaaacgctgcctactcctgttaggggagaggaggacggccatcagacccaaatcatgctggtttcaattgcttcatttccatacatcagactccttggaaaaccaaaggcaggccacagccagataataaagtggtccttgtgttcctgtggtgctcttttaccaggcctcccamgccctgtgatgcatagtagtgtttgattacccagcagagcaattctgggtggtgaagtcggcagcaaggatttcagggaaccacagctctygttcagagctgaagtgttggctgccaactgggttctgctttctctstcgggatgtttagagagaatcttcctgacaatctctcatggcttttccactgcagttgggcatagaatctgccccattcttatctttgtcccttgcaaggattgtgggtgtcaaaaraaaagataaccaccaccttgttaattaggttcatagatccgccaag

SEQ ID NO: 21485 - DNA, 600 bp, Bovine  MMBT06425
tctgctggaagatggaagagtctgagtagtgtcaattcctggattaataaggatggttggctgaagttcagatctcaagaaaaggcaagagaagaataaagacctgggagaaattgctcttgagccctttagactgtgaggtgctatgggaataaataccactctaacagtttcaggctatgtcgcaattctscctgcgcttagggaaaaaaaaaaatcctatctctctttgcaatgttaacaaacttcaaagcattctgtttgttttggaggaaagaaggtggtggagaagctgtgagsctccatcgcattgcagcaagggccacagaggagcgcaaacttgaagaacggatagtagcagccaccaagaaggaagtcggattgtttctggtgctgatgggagagacaaagagggtgaaatgggaattctcatggggttatacattccatccaagtgcatacttaggtacaagcttgaccacgccttcctcattcccatgcttagctgatctcactccaaagtaaaaataaaagcaattcgcaatcatcctattatttcctttggcttctggagcactgacaggaacttgtggaggggtc

SEQ ID NO: 21486 - DNA, 600 bp, Bovine  MMBT02558
agagttcaaggcgcttttcccaccgctcagttctggctgagatctgtgttctgaagacctatacggggcacatgaaggaagttaatgtatatcgagaagcaaattcagctagaaagtcagccgaaaaacctggctaatttggatcaccaagaaccttggtaacaaagctctcatcagacttttacttggatgtttccattataaggaccacttttggaataccagtggctgcaatgcgctaggtgttattgtctgtgattgatttagacttcagtgatgtgcaaaaggcaaataaatgcrataccatttttgttgcagaaagttctgcctcatcaaaaaagtattggctttttggggggagggagcttctcacaaagtgtattagtaagattgaatctttatatagaatttgaaatgtcatataagtgggagatgtgttgaagggcaacagacmgaaatatgttgcccttcaggaagttttaaagacatggtaagatttaggcagccagtttttgtcatgggcatccatagattattattagttcattttctgacagtgatgattcataaagtcagaacaggctacctgtttaactagaa

SEQ ID NO: 21487 - DNA, 598 bp, Bovine  MMBT08888
  misc_feature (1)..(156): n is a, c, g, or t
nnnnnnnnnnnnnnnnnnnnnnnnnnnnnnnnnnnnnnnnnnnnnnnnnnnnnnnnnnnnnnnnnnnnnnnnnnnnnnnnnnnnnnnnnnnnnnnnnnnnnnnnnnnnnnnnnnnnnnnnnnnnnnnnnnnnnnnnnnnnnnnnnnnnnnnnnnnnttgatgactgactagaagtggtgaaaagaggctgggatcctggataatgacaatattcacaaagagtccaagaggaaaagtctggctgaaaagacatgaatgctgttaggaagaggctgaatctgaggtacctgagagacactyaaatggaggtatacagggggcagttgggcacatgggtccggaactcagtagagaagcctgaacagaagctagaggcatgtggattttcagtacgtgctggtaattgaagccatgactgcagacggggcagccagggaaagcaatcagagtgggaagagcagactgaagcaactctrcatttagragatgaaagtccaaagggacccaataaagggaactcagaaggagctaacagatttgacagcaaagaggactagccaaataggcaaagccaaaggaggaagggacaaccagcaga

SEQ ID NO: 21488 - DNA, 598 bp, Bovine  MMBT03853
  misc_feature (1)..(34): n is a, c, g, or t
nnnnnnnnnnnnnnnnnnnnnnnnnnnnnnnnnngtgactgacccccgactctgctccctgggtctttcacttccggagtctagcctggtcttacacaatgctattgttaaagagaaaaccacaagctttaagatgtcacttgtgctaaagcccaggataataaatctcaatttagtacctgacttattggcagttttaacctacccagaaatgtcaaccagttgtgagttttttsgtcaacatcaatgaagtcatctgtcacatggatcctctccatccccctcaacaccctacctacrgaagaagatgacttttgcatgataagacctttttattcccttacctgataaaagaagctgtcctggtctaaaaataattctttcttttcttctgctaataactcccttgctccaaacttctccctataaacaccttccactctgtaccgtgccttgtagcacccttctgttttctaggtgggatattgcctaattcatgaattcctgaataaagataattagatcttcaaatttatttggttgaattttgttttttaaacaagtggagacttcaggtgtccaagaaagcacaaagaga

SEQ ID NO: 21489 - DNA, 515 bp, Bovine  MMBT10586
ctgggagccgatggcaaagcggcgcttgagctgcttctcgatgcggctcagcagctcctggtcctcctggctggtgaagccttccacccctgtgggtgcgaggagggaggcgggtcagcgggtggggacctcagtctgcccacagcggggaagagccagccagtccccgaagagaacatgagaggaagacagagggggagcctggggacagccaaggcctgagcgagacgacggacagaggcctggagtcaaggacagggcaggcatgagcagaaggatgctgcaggcagagggaacagyaggtgcaaagattcagaggtgggaaacatgcccacttcattcaaaatctagtcgtagggccagggacagggccagagtgggggccacatgggggccaggtcccacaggctagagggcacagcccaagttttcctgattctggtgagtggagcagccactggaaggctgtgaggagggcctcgagctgaggacagcacctgggccccaggtggcta

SEQ ID NO: 21490 - DNA, 600 bp, Bovine  MMBT13698; identical to SEQ ID NO: 4670

SEQ ID NO: 21491 - DNA, 600 bp, Bovine  MMBT03584
tcagataaacctcctaaagcaataaagctagttagtggtaaaactatgaattcaaaatgggcctgtctgaatatgagacactttctgtcaactagaatgggcttcttttatgttacagacttagatttatgcagctttgaagaggattagcacagatattttctttcccaagcaccaggtccttcccaaattaaaacaactaccagatctcagctatagcagcattctaataactgatttcttttcacaccctgaaaggagaatgccaacctatcatgattctagaaacaaataatatckcatatatgaaattgagctgtaatagtcaaaagatggtgtgaagtgttggatagtccttacaccacggtagatcaatagtagaaaataacagagactttccaatattagccaatacttattttggtatatgatgttcttgttgactcaagacctacatttgaaaattctgagtcttctcattttcaactttcttcatggagaaatatcaaggaaatattatttccctttaaatttatcctttggaatctacaggataatctagctaaaatgtgagaaataaaaattcagtgacatgttaaa

SEQ ID NO: 21492 - DNA, 600 bp, Bovine  MMBT06156
ataattttagaactggcagcattggatcttctgggtgatgaactgttagtatgatgaacatcactgaaattttgaataatattaaattataaaaattactaccacaacaaaaaaaatacaggtaaattgtaaagtatatgtrgtataattctaaagtcaagaggaacatggaaaggctttctgctcaccatatttatttatgcatcagaaagaaatctggccataaaaaagagcagtctgtcattttacaaaaattataaaatcagagtttttacaaatattataactattgggaaaatwatgttggaagatgaagccaaaacaatagtgaacatttctgaaacataaagggggctagaacygtgttagagaaaactgctagagctttatatgttctaacacaggattagtaaatgttctaagccatgcactgaacaagaagtccctgaaaagcctgatggcagaggtggaacttgtcattctatggataaatagatgttaataaaggttatgaagtttttaatcagccacagccatgttgcctcctgtctctgtgccaggagttcattatgagatagaagttaatacatataagtaaaa

SEQ ID NO: 21493 - DNA, 600 bp, Bovine  MMBT10926
agaaaaaggaggaaagtatgacaaatgtgacagagtcctaagaaggcactgggaaaagtgcaaggctgatggtgaggaagaacttcacttcaccagagagaggaaaaatatagtttatgccactctaactgtaatcctttgcatcttctcatagctgtggttaggtcaacgaggccttgtttttagctcttcatcctctcactcaacagtcaaacctgaagaggcagaaccacaccctccttacagactatttgttttaaaatggagtcttttgtatagaaatttgttttgagtggctamacttgattttatgtctgtaatgagtgttctcatggtgaagtgcagcctttcaaaggaaggctttgaaaggccttcctatacttactaacacatttacttggcccagaataataagagaagccatccaatacaagggcaagcatctcaaacctaaacagaatatttcccttgtctttgtctaagtaacaaaataaaaattattttgcttccagtcagacttcaagtcttgaacatctattgtgtttagagaacaatttcttaggtacaagaggctaaaagatacagttgaaattaaagatc

SEQ ID NO: 21494 - DNA, 598 bp, Bovine  MMBT02299
  misc_feature (1)..(165): n is a, c, g, or t
nnnnnnnnnnnnnnnnnnnnnnnnnnnnnnnnnnnnnnnnnnnnnnnnnnnnnnnnnnnnnnnnnnnnnnnnnnnnnnnnnnnnnnnnnnnnnnnnnnnnnnnnnnnnnnnnnnnnnnnnnnnnnnnnnnnnnnnnnnnnnnnnnnnnnnnnnnnnnnnnnnnnnaatcgtatctattggtaagcagattcttatggcccccacccattggttactacatactgtgggttaattggttttataagtagttaagttcttattttcttacagtttcagaaactgaggcttccctgggacttsggagttagagttgattttcctagcacaaccttgccctatatacagggtgttgcccttctcatccactaacctagcataatattttccaccttcctaatctttgtactaacataattgcaataaattgctgctgctcttgaagataatctctcttctcacatctgggtttaagtctttctttaagtaaagctacttaagcaatggggaggaaagagcttttccataaagttaaggtctttcctgataaaggtaactactccacccctccttcccagttagatcccctgccagcaatagc

SEQ ID NO: 21495 - DNA, 604 bp, Bovine  MMBT13864
  misc_feature (1)..(4): n is a, c, g, or t
nnnngatcctataatctggtggagaacagaagacattcatgcatgattatgagctagaaaatgctcaatgccatgagagtcctacaagaaaattctttgaggattcctcaacctgagagattactacagaggtagaagggaagtcttcagagtggaggtgcagttaatgctgaaccccaatggatgggcaggatactaaacaaacaggctttttaagcaaaggaataacaacggtaatggcagttctttcagtaggtggtcccaaagatggaggcagcccagctgagaactattccgatattaycccaaatagtccatttggagtgaagcagaattgtgcagaggggcacttgagcaggagaatatggttctagctggatcgtagagagccaaaatgcccaaccagggaattcagacttgatttagcagctagtaggaagccggtggatgtttttggacagtagggaacatcagagtatataagaaaaattaacctgcaaggagatgtaacatggaagggagtgagggataactgaagctggggacggctgagggcagcgtatcagactaccccaagccaatgcagggcactggccatgggagt

SEQ ID NO: 21496 - DNA, 600 bp, Bovine  MMBT06919
gtattgttatccacagccttttagggagtgatccaaacttgctctcaggagcgtaatggaaaccggacagttacgaaactaactttgctttcctgtaagacagatgttctctgatccacagttgaagaaacaatgaggccatttatcagtgaaaggagctgcttctatctgaactcaggaaattgatagcaaatggctgagaaacaggttgttggcagttatgcccgagtagaattaattaatctatacattcactagacaaatatttattgataatattctgtctgtcagacaccatgmtaagtactggggctataaaataaaattaatgcaatcattgggaagcttgtgagtctctgttaactgtgtttctccttgggatgattcaatttaaaaaaaaatggctcttgaataggtttgaacatctcaaaatccaagagtttcaaaacacatgagtaacgtggcttgcctcccatgttattgataatgcttgcctttgtcctcagaacggtgttcctgtcacagaaagagacaaatttaattgtgatcaccagggacagtgtagcattataaaaaatgccagaggacattctactcacc

SEQ ID NO: 21497 - DNA, 590 bp, Bovine  MMBT09010
ttccagttactggtcatgcagaactggccacagtctacccagtgctgacagaaaggtcaaacagtctccagttttgttccagccaggggtcactcaccttccatgagtttggcaaaaggttccgggcatgtagaaggaatgggaagggcaagcttgttcatggccactccataagcaactgctaagccatcgattccccggaagggcacctcaccagtcaggagctcccaaagcagcaccccatagctagggagaggaagaagacagaagtcacacaatgaaccacagctgtaacttcaytgaaatagctaatgaggctttgacgagcatcccacatcttctctaacatgtagggagactaacagaacagacatactgccgtaatataaaagggaggccaagccctactggctataagcaaaaagccctactggctataagcaaaaactctggagtcaatcatactcggtttcaaagtcttattcttcaaattcctcatctgtgaagtgcgaaggacatgagcagttggacaaggctatcatgaaatgaatgctctattgtttaaatcatgctcaagggccacagctatt

SEQ ID NO: 21498 - DNA, 600 bp, Bovine  MMBT08601
tatatagatttacatttaaattagaatagaatgtatatttttaatgtaagcacttgaggcattttaaatttattttaatgctttgttaatattctgtactaggttcagctttctctatacacctatttgtctgctgaatttattggaactgctaccatttacaccaccatacgcagagtaggaacagtattacagcttatgcatacactaaaatattactactgggtcattaatcctgctgatagtagtggcattacacccaaaggtttaggtaagtacagtattacctatgtaagttgkgccatggtgatgaaattgggaaagaaattagatgaagaaatattgggaaaactttgatttgagggggaaaagggaatttattaagttaataaaagtagggaactgtatccatgtaagacagatgttataatttatcagtgtatagtaatatattataatttaaaaaaaataattttttcccaaatctgacattagtaagcaatttgaaattgccacaatctgaaattttatattctctactgttgaaactgtacagaattactactaatttatattataattgcaatgtatactaattta

SEQ ID NO: 21499 - DNA, 600 bp, Bovine  MMBT07919
aatatgattttctgcaccttcagattctgtgtgagtcccagtagaataaattatgtcacattattccttttctccatatatctcatattatggttaattacattacatgaaaaaatgtcattttttcataatgtaaccttgaatcattgtctctgataataaatacctaagttctattgagttctgtatccttgtgagtttatttgagattaaaaaaaaaaaaaagcttctgatatcctgaaaaattactcaaattctttcctggcagaagaaaatgcttagaatcaggaggaatttagwgaacacagaggcaagagggtatctctgtacactgaatcatgtgagatgacttagggccttagtagaagcagtaggtctcatgtgtagtggcgactaagcctgaaaaaagaaatagaaaatggatgcaaagactataaattcaaagttaaagagttttccttttaatcttagaaaatgagaaaccagggaaagtaattggaatactagtggaaagatgaagaagcatttgagaaagaaggaatgctggatataactcaaatagaggtctttgtgtgacttttatgaagtaggtggaggttc

SEQ ID NO: 21500 - DNA, 600 bp, Bovine  MMBT02960
atacatggaatagctaatactttctttagaaaatctaaagaatgctttatcttctgactctaattgcaacatagccttatacaatcttgttaactagaacagtcatggctctgtcctgcaaaaactttttttcggtgattcaaatcatcacaccctcacaataaagctaaatattatttctgacaaataagttactcaacagaaaacaattcattatttttgaagcattctgatttttgttgtcttcacatgttttcatgggaaagtgaaatagattttatcaatccccactgtgcttarttgctcaatcgtgtccagctctttgggaacctctggactgtagccagacagtctcctctgtccatcagatttttcaggcaagaaaactggagtggatttccatttcttcctccaagagatcttcccsacccagggatcraacacatgtctcccaaggttygaacccatgtctcccatgtctcctgcattgcaggcagatttttactcactgagccatcagggaagccccactaattatatgctgtttcaaatggaaatcttactggcatctcttgatggaaacaaaagtgacttgaccca

SEQ ID NO: 21501 - DNA, 600 bp, Bovine  MMBT04288
gagatctctgaggtatttagttttagaatatcaagatattttcaattgccacctggttttcctccttatactatatattatatttgtcatttttatatgaatttaccatctttaattctgcagatagtttattctgactagtgaaacagagcaaaggtatgttttgaaaaattaataccccatcacttgcacttaattaatgatatcctaatataacaaaaatcaacagctttgtgttaccttcaaatcattctccatctcacaaactatacaccaaaataggtgattttgtcatagttygcacattgctcttaacccatatttctctattagtattataagtggatatatcttcatttaaatagcttcagttaattatatgttatgcatgcattagaagcccttcaactayggcccatgtggtgtacattcacattctttcaagatcttaaccagtgtcaaaattcttgaaataaatawtgctatacatgtatctttccatgttgttggcattcttatgtagttatcattattgactgaaagaatatattgctttagtgttaatacatagttcagttcagatcagttgctcagtcatgt

SEQ ID NO: 21502 - DNA, 450 bp, Bovine  MMBT09347
aggctgtccacactcaacgcctggctgggagagcacagctaaaattgcagtgagcggtagggaggcactgaggacgtagtcacccaaaccatcattttggcacattctgttctttgccacaactaccgaacctgtttcccccagtatctgagtggagctacatgtgtgcctgtttttgaccaggaccaaacttggttttgacatcttgctggatgacaagctaatggttgagggtggtcgaggacggtctcttgagttttgcaaaaccaaggtctgccctgaacaggatcccgggatagrggtggtagaacatacagtggcggacgcagaggcattcgttcggggggtggtggtggtggtttccccgcttggtggtgtccaactcttttgcgattccatggactgtattctgtcaggttcctctgtccatggatttctcaggcaagaata

SEQ ID NO: 21503 - DNA, 598 bp, Bovine  MMBT05776
  misc_feature (1)..(29): n is a, c, g, or t
nnnnnnnnnnnnnnnnnnnnnnnnnnnnnatggagctggttctggttacagactttttacctcttgctgaggacacatcccccaatgtgggttattataagcacctgatacacatttgccaaagaattagagacctcttatctgtgatcaccgatgtgactgatctcagttctgtgtcagacttcactctttctatatgagagcaggggacaccttgttttaccatgagggccctctttcagcaccgcgggagcacagactgctgggtcacactcggctgcctttctccagccctgctcrccactgcccaccagctgcacaggttcttaccctccatctccctgacgacaggtgtgacttttgaagagtccatgcctcatttagctctggtaatggcttaattgagtcggaaaatgcaaggacaggagcgtgataaaaaaccagctgagttgggttcctgttagtcattggaaaaaactaccagggaagggacaagaaaggaaggatggactggagtggggaggagcagcatggggtgccgagcaaagtggggcagagagctcagacaaagcaaataaagaagattaataggagagga

SEQ ID NO: 21504 - DNA, 381 bp, Bovine  MMBT01947
tattccaagctttcttcttaggagaggagtggctacagacttcacttaaggatgaggctcatttgatgggagaccgcaccccttccagtcgggaccctgtggaggtggaccgaggggtgagctcccttctaagacctgcctctttatcagtcgagtgctacagacacctggggacaagaggctgggacttccattaagtccgatgcaggaaaatccctatcgaattccatcttaatgaattctggagagtgctgcccagattcacaggtaccttgatttttaatacaaaaaaatatcccygggtgtcaggaggttcaacttactgaataatacatttcctacccttctgcctggttctatataggaaaaacattatcaggt

SEQ ID NO: 21505 - DNA, 515 bp, Bovine  MMBT10817
ttaatagcatttttcatgttctctctgttcagccttctctacctcccagtgatatacactaatgcttttccacgtgtccagagaagagtcacctctactcaacactaccatctccctgtgggtactgctctctttcaggattctttgtcacatcttttcagtaccactatttcataccataatgctgcatgttcttcggatttctcagtattcttcaatcaccctatgttcattagaactagaatcaatgcttccctcccatgtaaacattacacttttttctgcatatgaatcctccamcatttttcaaatcgttgaattcttttatgctttttttcttacttacaatgaatcaccaccatcaccaccaccccacccccaacatgacagataagactcagtttgtgacttgaagcatctacagaaaaattcaagtgataaacataacattttacaggacttcacatgctcccaaatctttattcttataaaacacgtttattagtaagatttat

SEQ ID NO: 21506 - DNA, 598 bp, Bovine  MMBT10464
  misc_feature (1)..(47): n is a, c, g, or t
nnnnnnnnnnnnnnnnnnnnnnnnnnnnnnnnnnnnnnnnnnnnnnnttctctttgatgaaagtgtgtatttattaagtagttctgtaattaaaattttgaaagagtgacttatacagtgctctggaataatactatatggagagttatagatttttaaatatatcattgtgtcaaagtattcctgtgcaggttagcttgctgttaaaactattgcaatcttatatgattaacatagcaaattaaaggaaaaatagtgtgggataaggataattgaccaacaattaaggagaaaagtagyacagcattacagggtatacaaatataatactgtttttaaaatttctaatttatttgttttaaatagggcatgtggtaaaattatactagaccaatgaaattcttctaggaaactaggaaaaataactctctgaatatctcctagaagggataaaatatttgttacgaaatattttagctttgtatactaatatttatctttttagaaataagaacagagttataacaatggcataaactaaaataaaacaatgaaaatacatattacttttataaaataattagcaatgattaaataa

SEQ ID NO: 21507 - DNA, 522 bp, Bovine  MMBT11756
gagaaagaatgattttctcagtcaracaaaaattgagggcatttgggctggtagacctgccttgtaagaaatattaaagccattcttcagagrtaaggaaaataatataggtcagaaactcaaatctacatraagaaagaagaatgttgaaaagaggataagygaaggtaaaagaaaacttatttttccaattcttctttgatctaagagataacagttgcccaaaataataatggcaaaatgtatttgatttatgtttgcttacatatatatatttgtaactgctaagtcacttcagtygtgtctgactctctgcaacactatggatcgtaacccaccagkctyctctgttcatgggmtttttcaggcaagaatcctggartggggtgccatttcctcctccaggggatcttgctgactcagggactgaactcacatcttttttctctcctgcattggcaggcagggttctttaccactagcaccacctgggaaagcctatatatgtatgtttatgcttat

SEQ ID NO: 21508 - DNA, 449 bp, Bovine  MMBT02730
tcaagttcacccatttgacagtcattatattttctgcttcatctctgcttctgtaagctctgctggtgtcagaacacatcattcattcattcaatcaacaaagatctacttaatgccagttttcttgtgtgtgtgatgaacaagacaaatccctgccatcatggagcatatgatctagattttaaaatttatttctgtacttgaaactacaaaggtagcagaatttataaagctgaaaagaaagtaggtaataattatgttaaagagaaataaaatattaaaaattaaaaatggtaaaamtggcctgccaattagcagaaatgcaatatgatatagttaaacattggctaaagcaaagtttcatarggatttatagaggtagtgtggtcattgagatgtcaacataggttgttccgacttcagttcctctcacaagtagtgtgtgtctg

SEQ ID NO: 21509 - DNA, 598 bp, Bovine  MMBT09043
  misc_feature (1)..(92): n is a, c, g, or t
nnnnnnnnnnnnnnnnnnnnnnnnnnnnnnnnnnnnnnnnnnnnnnnnnnnnnnnnnnnnnnnnnnnnnnnnnnnnnnnnnnnnnnnnnnnntgtcaagaactctgtttcagaagaataatcatttggataagttgactttctttcaaaagaaagcaaaatgtagggcatttacacctataaaatcaattgtcagcacttaagaatgatggatgcttgtttcatgacagatgagctgtcatggacacgatgcttgtatttttacatacgaatttcttggagatataaaatatggagaaartgatcacttttcactgactgtggaatgcttttcactttaacccacctgacacttaataggtgactcgttgccccaaggtaaagcccttctgaagctttcagacttgaatctgaattgatttgatcccaggagattggtctaccttgattattctgttgtcagcctggtttggcaattggttcaatgagtctgcctataacggaggtagggagagagaagagtggttggggaaattgactgattgagagccatctggggattttacttaatgagaggaaatttagaagggtccatgtca

SEQ ID NO: 21510 - DNA, 598 bp, Bovine  MMBT09164
  misc_feature (1)..(41): n is a, c, g, or t
nnnnnnnnnnnnnnnnnnnnnnnnnnnnnnnnnnnnnnnnnggtgacggtgcaaggggggagcacacagagagtaagtgcattgctctaaaagcattcccagtagccatgatctttgtaggaacaaaaatccattgtgcaggactgtaatctgagaaactttctgttaccgtgcttgttcgactcaccagcattgatccctggtacatgtgaccctttgaaaaggagcaccacgttggtgattcctcttattactaaataccattgtgttcataatggccatttatatatggttacactycacgcccgtttggttaatcagcgttcccaaactctctgatgccacctgaccagcataggatgcagacctcggcctcctgatcactctctttaccctgtcctctgttgttcctagatgtcctctatgagaatgaaatagggagcttagcatggctggaaatasggtagcacaaattctggggggagagggtggcgggtgtggtggagggtgtcaggacgaaaaagcctggcaaagtcttgaggaaaataggttatttaatttaatttaatttttttcagttccacaaaatgtctgcatg

SEQ ID NO: 21511 - DNA, 512 bp, Bovine  MMBT11364
  misc_feature (1)..(41): n is a, c, g, or t
nnnnnnnnnnnnnnnnnnnnnnnnnnnnnnnnnnnnnnnnnggtgacggtgcaaggggggagcacacagagagtaagtgcattgctctaaaagcattcccagtagccatgatctttgtaggaacaaaaatccattgtgcaggactgtaatctgagaaactttctgttaccgtgcttgttcgactcaccagcattgatccctggtacatgtgaccctttgaaaaggagcaccacgttggtgattcctcttattactaaataccattgtgttcataatggccatttatatatggttacactrtttccatacaattcccaacttgattcataacttctctatagacttctcattattctggaaatctaaaattacttcttaataaaaatgtactctaaatgcaaattatcaacaaaattaaaatgtaaattttcktacacggatacatgcacataagtgactcatacctaggaccctggaattctcatcctaaagaaccagagtgtacatctttt

SEQ ID NO: 21512 - DNA, 600 bp, Bovine  MMBT11084
tgggaagatgagtataaaggatttccatcccacacatctctagacaaactaagcaaagactttgtctggtgtaaatgaagaaaaaacaacaaaggacatttgtggcatggtgactaaagggcaagcagtcacatgtttagttaaatgttctcagagatggagctaacactgttagaactcccgagagcttggcacttcttcagcaaactctcatttagaatgaagagcaggcttcctggagttccggagcaatgctctctggggccatacgggagcctgagacaatggagaaatacctgytcctatgtacattcatcaaaatatccttcaaaatattttgaaccaagtgagaaaaattaataaaagctctatgatcaaaagacgtgacaaccatgactcgttgatatatggcagaaaccaacacaatattgtaaagcaattatcctccaattcaacataaaattttttaaagacatgacaacacataaagccttgcactgcccaatcttttgcatacattgtcaagccttataatataaacctgcctagtgagcaatttgaggaccttggaaccaggaaactcagggctcactggacatg

SEQ ID NO: 21513 - DNA, 600 bp, Bovine  MMBT11272
gatatatgtaaaacccactttccttatgaagtgtttattttttgcatatagaatcctttrtaatctaacaccatccagatataagagccatttagttgcatatgtaaaaggacctatttgaaaagtaaaggaataaagtggcctttatgtgcttgggggcctttctggggaggttcaccagagaaatggaagtacacacacttcctcaagaaattcagtgtccctggggtctctaaatcgtgttattttctcactgtacatgaggcctcattgcatttgctttatatcctagtcattctytgtcacagtggcagagatgaatattttcttcactgtagttgttttcctaagaagctaaaaatattggaaggaaattggttttttctcttctgccttatctttgcataactattctcggggatctcagagcagcgtaggagatgacctctttttttattgtcgctgtagcgccaagacagagacacaagcagcaggcaataaaagcaaccctggcctctgcgactgtctttggaactgacaagatgatggttgcactgaatccactggtcagttccaatttagtccaatccctgatttgac

SEQ ID NO: 21514 - DNA, 600 bp, Bovine  MMBT07469
ttatgcgtgtgagttgcttcttgtagcacaggtgtggaacataatcagatgtggattagaaacccagaggattgccattgttattttatggtaagaatgtagttttcagaaatactttgaagtgccgtttggggcattttaggggaaaattttatctgccctcccgctgatgagacattgagagattcttttgtcctacatgtagtctaccattgctcttagtcatttttccagtttccatccttgtgactggtgctttatgtctttgcaaattaaatccatattttcccctgctcctckttctcttttatactgaaataacttgtgacatttgaaagttaaattctttgatctcacattttacatctttagatcatttgacaggattctgaaatgcttttaatgagctatgtcaccttttcaggttatgataacacagtgttctcmttgtatgtaaaactgacattttgtcaaatggtttaggtattaatgcatatagaatttggaaagaaagatgagactacatgatctgaacattaagaaacgcaactcagaacagtgatccttgtagttctattttagcggccagggcctaatgag

SEQ ID NO: 21515 - DNA, 598 bp, Bovine  MMBT00724
  misc_feature (1)..(119): n is a, c, g, or t
nnnnnnnnnnnnnnnnnnnnnnnnnnnnnnnnnnnnnnnnnnnnnnnnnnnnnnnnnnnnnnnnnnnnnnnnnnnnnnnnnnnnnnnnnnnnnnnnnnnnnnnnnnnnnnnnnnnnnnntggacatgaagaatgaactagtaactaacaaagctatatgttgattaaaacagcatgtggttaatttttaaagattgctgatctttattaaggatggtgaggctaaaaaatcaaatatttttggctaacatatctattgaccagagaggcagtgataaatactctggtcattaaaatgctwtttcagtcttgttaccacaaaccttgactgcatgaaacatagttatagaagtaaaattcaaaaatctattaggtctctgaagctctctgtktcttrtatctacagaggggagctgagmagtcacattataatttgggaataataacatacaaagatgtatgttatttgaatattgtttctatgttcagaatcatttcagtcaactcagtgcctcccattgcccttcatccatcctaaagtcacattgtgtacttctctgagctctccaaataggcaccctcttgttgccaagcaacca

SEQ ID NO: 21516 - DNA, 600 bp, Bovine  MMBT06763
attccctggaggttgcatacagtcttgtcctaaaactaaatttaaatactctgttatgttcccaagtattaagcaagtttttattaaaacaaatattcttatccactgaagcagacaaaaatattgagtctgagtgagaaaaaaagccctaatcaatcaaaacaggaaaacttttctgacaaaaatgatactttaagtctcttttttaaaagcatattttgatgtaaaaagatacaaatataaatgtaagtatagtatttacttgcaaaaatcacagtgagattctgtggtatttaagtrtattgctgttaagttgttagactaggaaacaagagtccagaatggcgggggctaaaagacaaggaatggaaaagcccgcaaaaatagaacaagggaagctccaaggaccggagtgaggaccttaggtagagcaaacaacactcctggctagcccaatttacatagggcaggcccagggggagaaagaacatataaaaagaggtgccaaagggctgggggtctctctccctccacccccactccccgtgtgctggtgtgctcttctctttgcatctttgggtcgacatgccctcacgcctc

SEQ ID NO: 21517 - DNA, 600 bp, Bovine  MMBT20043
ttgggaagtccaagatcaaggtgtcggaagatatggtgtcaggtgaggtcctgcttcctggttcacagacagctgtgtcttcttgctgcatcctctcatggcagaagggctgggggagctggctggtgtctttgttatgagggcaaatcccattcatgtgggattcattcaaccccattcaccctcacgatctaatcacctcccagaggccccatcatttgggggagctgggtttcaacatatggattttggtgagggggagacacaaatattcaatctatagcaacctctttcattgtmtagtttacatgttttgtctctctcttctaaacgataagattctggaaggtctgaaccatgttttcttcattcactacctgccttactccatcagcaagcagtgcttgtcgctcctgtgtccacatccattcatctttgtagacttaatgttgagcaccctgcctttgaccaagaaatgaatccactgctattcagagattttcctgtcttctgactcctctttctcttccccaaccaagttgctttgggaactaagggaactagcttcccctcctctcgtagtgagagaggtctggaagt

SEQ ID NO: 21518 - DNA, 600 bp, Bovine  MMBT00788
aaaggggacagtctgcggttgaagtgagttgatttatatacctagtgcttaacagccagagcagctcaatcaacttgcttttcctctctctttccctcaggccttccctccagctaatgatagttttgacttccacactgtaagaaaatctggtacctggaaaaggcagaggttacttcagttcaaccagcaagccaactgcagcactgagaatagatttgccctctctgccgcgctggcatgggtcctctgcacaagctctagccttggggatgtggagatggttcccatatcaggatkcggatgacacacaccaaaggagagactgcttgtcaagttaatttctctccctcacgtttggagaatggaagggagcttctccatctgagatcttagggccccagtatatgcctgtgttatatcccatactctttttaagggcttgtgagtatgtcacagtctcagccttatacttaagcacaagcatctttgtgttgaggggggaactcggaggtataagctatttaatatgctgggagcaatttgcagggatgcagcttagccacgaaatctgcttaaggatgctgaacatcaaagtct

SEQ ID NO: 21519 - DNA, 600 bp, Bovine  MMBT04261
atgcattggagagggaaatggcaacccactccagtgttcttgcctggagaatcccggggacgggggagcctggtgggctgccgtctatgggttcrcacagagtcggacacgactgaagtgacttagtgttagcagtagcaggactaacgtatgaacgaaatgtgtcctacaaataacacatgaaaacaaagttagaaatgagtataatcctctgagtgtgttgtatgcaacagtttataccttcagttctgatcacagacatgcgcttccagctaagggccattaatccatttactgctrcttgttggagtgaagagaaattatcaaagacttttccatatgtttcagtgaatacctctttaattgtggattgttcagcttccttatttttctatgtatatggcctctttgaagattcctaaagccaattctctttttactcaaattaaaaaacagcaacaacaacaagyaagctactgtggccacagttctgattcctttggtcgtgacaacgcctgcctcgttcttaatatttcatcctaacctacttccacactgagtgtacttctgcagcagtaaaataagatgtaaaaacttaga

SEQ ID NO: 21520 - DNA, 602 bp, Bovine  MMBT11292
  misc_feature (1)..(2): n is a, c, g, or t
nncacatcaaactgcacttctaaagttctgccgtcgaagaaatgctagagaaatcagtttgggaccacgagtgatgttatgacaaccttgtagactctgccactttagaatgaaagtttcaagctgtaaccaaaaaaaaaaaaagtctctggagccacggtttatccaatatattgaatccagattttgtaaaccacaaaaatgtcatcctagagatcatatgtagaaacatgttttcttcagaagttttaaagtggaaatcaaatatacaatgaagacaattagatgaaatttggaaaaarccaagcccaggagatctggggcaacttcaggctggggccagtttgcaaagggaatctatgcttcccaaacatggtggaaggggagggttccaggatgaagaggtaagggtagggtcgcaaatggagggatacagttcccaaggctaaagaatcccaaggatttgaataagtgggagagagcaggattttattttattttttaaaaatctgcagtgttgcaattttactgtgtaggatttcrttttatctaatcttggtaattccgtgttggatgatgctggtctccgctgtgtgctctgc

SEQ ID NO: 21521 - DNA, 600 bp, Bovine  MMBT20972
cctcctctcccttgctctgtttgtggggccccctcagtggaaagaagcttcccagtggttcagcagtaaggaatccgcccacaatgcaggagacacaggttccatccctgggtaggggaggtcacttgaaggaaggcatggcaacctactccagtattcttgcctggagaatcccatggacagaggagcctggcaggtaacagtccatggggtcgcaaagagtcagacatgaccaaagcaacttagcatgcatgcatggcatcggtggaaagaggtgcaacttggatgtaagatgtggakgtggggcccacctttccatgtaagacctaacgtcttacatcgatttttagcatgaggacccaactttagatcgaacacaggatcaaatccttcttatcattaaaagaaaatactttttaaacgattcacaacaataaagccctctgttttcatctgctatcaccatgcctgtttctcagaaggttttgaaactgaaatttcaaaatatcctgagtaataagactctcttctgttactgaccacatggaagcaaaaataatgagagggctgagaatcagcatgtttacagaccaattctta

SEQ ID NO: 21522 - DNA, 600 bp, Bovine  MMBT06287
tcgaacccgtgtctcttgtgttggcaggtggattcttaaccactggaccaccagggaagcccccagtgtcagcttttgaggatatgaccaaggccgtgctgccagcccagtgcccagcctggcatgcttaaagaacgtttgcagttcaaatctacgccctcctcacccgcttgacgtgtcatggttggttttccaaacccagtatttagtctcgtagactcctagtttcatggtgtctgccgataagacgctaactcaccattaaaaggaatggatcagatggaattcaggtgcaggatsaggtctgsatagtggttctcaaagtgtggtccccgaaccaacaatatcagcatcccccgatgccattagacgtgcaaactctcctgcagcaggggtccccaaccyccgggccatggaccagtaccccccatcagatcagcggtggcattagattagaaataaagtacgaaattaatgtaatgcacttgattcatcctgaaaccacccctccctcccacgtgtgtgtgaaaaaaccgtcttccatgaaaccggccaaaaaaggctggggaccactgctctacaggatcagaagctcggact

SEQ ID NO: 21523 - DNA, 598 bp, Bovine  MMBT07058
  misc_feature (1)..(168): n is a, c, g, or t
nnnnnnnnnnnnnnnnnnnnnnnnnnnnnnnnnnnnnnnnnnnnnnnnnnnnnnnnnnnnnnnnnnnnnnnnnnnnnnnnnnnnnnnnnnnnnnnnnnnnnnnnnnnnnnnnnnnnnnnnnnnnnnnnnnnnnnnnnnnnnnnnnnnnnnnnnnnnnnnnnnnnnnnngtattgccccgttcttaaagaactccgctctagtgaatttagggggcaggggcaggggcgggaagacaagtacgtgtgaaaagtatattgattccacaagaggaatagtgtaaggctgggcagaggtttttmaaacagaggaaacaggtaaaaaggggaaacagcaagaggagggtggaggtgggggcaggagaggggcgtgcagggctgggccccaggacttctacctgccacctgccaagtcagctctgcttttatcaattttatatgaggctttaaatgaaatttctttcaaaaggggaattctgctgatgtttaaaacataaaagagttgaaaactgatttaaagaaagaactcatgttgacctggtttcaaatctcagttttaccacttactcctcagtgtgttcttagactgagctacttagac

SEQ ID NO: 21524 - DNA, 598 bp, Bovine  MMBT08201
  misc_feature (1)..(196): n is a, c, g, or t
nnnnnnnnnnnnnnnnnnnnnnnnnnnnnnnnnnnnnnnnnnnnnnnnnnnnnnnnnnnnnnnnnnnnnnnnnnnnnnnnnnnnnnnnnnnnnnnnnnnnnnnnnnnnnnnnnnnnnnnnnnnnnnnnnnnnnnnnnnnnnnnnnnnnnnnnnnnnnnnnnnnnnnnnnnnnnnnnnnnnnnnnnnnnnnnnnnnnttggaaaatcctatagatagaggagcctggcaggctatagtccatggggttgcaaaagagtcaggcaccaattgagcacacatagacacacacaactttacatrtatgaggcccatatctttatcttcagtgtctctatcctaaccttgttgctggtagccasgttgattttgcaggttataggggctttttaaaacaaacaaacaaacaaacaaaaacattgcaggcatgttggtttggggagagattcagggtgcacttgcaaatataggtctggagttcaagaaggttttctgtgttggatatttagggagacttttctatgtcttgagaatactaaattgaccactttggagatcttraattcattattcctcatattaaataatggtggtggtttag

SEQ ID NO: 21525 - DNA, 578 bp, Bovine  MMBT05394
caargaccaagggaaagtgaaccagttctttgattcttgactttggtggagtgagagagggttgagtttaggcagtcatttccccatcttgaatccaagtgytagagagtatatttatttcttaattaatgtgaacagctgtttatgacaaagaaaagatgaaagataagtaaatccattaatacttctttcaacctcatggtttactacattgttttcatttttctctttctctctcactcaccagtcttatattttaaggttctacccttaaatgcartgtgtccattcctattggtycagcttcatttatcaataaattttttgaaaaaaatagttttgatttccctgtgttttccctgagttatttttcacaatagatgaaaagtatcattctcaaaaccaaatcattcacatcacttctcttcagttgctcccctgagtttccacattcacttaacattaatggcccttcgtaaagacatgtaaccttgacctcctctccagtcttactgacttgtggtttcttcttctgacattatactgtcgtagctattaaatgcatgtttcttttgtat

SEQ ID NO: 21526 - DNA, 601 bp, Bovine  MMBT04587
  misc_feature (1)..(1): n is a, c, g, or t
nctttccaatggccctgtcactcaaacgttgttcatgacaagctcatgactggtagagggacttccctggtggtccagtggctaagactccacactccccatgcaggaggcctgagttccatccctggtcagggaactagatttcacatgctgcaactaagactcagggcagccaaataaataaatgaaaaggggggaaaaaaaaaagctcatcttctgttggttccctccccagcttgaagccttctgctgcgacccccttttgaattcatcgtggtcactttcaatgtttgcttccttyttcactaagcaaaaagtctcagcgtagatcctacaacctggatgatcagttttgttcagagaactttcttccattatgttccaaatggacttcaaactcacatggcacttacagtctagcttgtattatacaagcatttacaggcagacctcagtgatactgtgggtttcattcctgactattgcagtaaaggaaatatttcaataaagtgagtaatacagtttttttttttttggatttcagtacacataaaataatgtctatattgtastctattatgtataccatgatattatgtct

SEQ ID NO: 21527 - DNA, 600 bp, Bovine  MMBT04662
acagaggagcctggtgggctgcagtccacggggtctcaaaagagacacgactgaacaactaaacaacaggcagcggggctgatactcagtgtatgcagcaacccactgggaagggtggtagaataggatcctggagggttgtggctgtggtaggtgttaaccttttagttgctggattgtggggagaagctggactcagggggagcccagggtggggctcaggaggctcagagaagaggctacttctcaaacagcacagaatatttcaatattttaacaaccacagtcatactgctcacmatcagtcaagagtgaggagctcataaaggaaagactgagataggcagggagaaatggggaagaggggttcaaattagttagggccccctgctgggttcaatcccttggttgggaagatcccctagagaagaagatggcaacccactccagtgttcttgcctggagaatcccatggacagaggagcctggtgggctacagtccaaggggtcgcaaggagtcagactcgactgggtgactaagcacagccctgcttggaaaggcttgttgctgccaagaatgactatttggggtcactacgg

SEQ ID NO: 21528 - DNA, 600 bp, Bovine  MMBT12244
ctgactcaatggacatgagtttgagtaaactccgggagctggtgatggacagggaggcctggcgtgctgcagttcatggggtcacaaagagttggacatgactgagcgactgaactgaacagaactgaagttagtgtgagtctcccagtggttgacaccaggttcatgggactcccagctcaaggatggagacttccattgtttccctggggtgagaaaagctggccattctttttcctcaggaagcacagctgctgacacataaaccagagcatctccctcattctttgcccatactcwctgatgtgggcctcaggccctggctgtggggtgttctttaaataatagctttttcttcaaggccttgcctgtgatctgattgatggtggcctgggagaagccagctgcttcagtgggcaccacacacagacgctgcactgtgtttcctgtgtgtctttggcaggtcttactctgagctcctgcttctttccttcattcagcaagtgttttctgaggggtagctttgtaccagatactggggtgcagggatgagcagtaacacatggtccccaacctccagagactcagatttaggacaga

SEQ ID NO: 21529 - DNA, 600 bp, Bovine  MMBT16599
agaaatatctgattaatttcatgagtgattacatgatgagtggtcgagggatgccgctgttctttgcctcttgcaaaggactccgttttgtgccctcacactctgcaccagaatctaagtccagaatctctccagtgtgtctgattctaggaacaagctgcatgaagtccccagagcgtagagccagaaatgaggtgcttcttccacacaactaggctttgatccaaactagcaggggagctgtgtgcagttaggttcaattattctggggagaaaagtggtgagagtattagaacaatrttattattattgcatttggatggyaggtattcatgtttctccatgaatgtgtaaaatcctcccttccatgctgattttaattgaattctgacaaatccaactttcctgaggcaagagaaaatgagaatgttggtattagcatagctttcccccttgttaactgtatttacatatcaactcctgggacagcatacattattttctcctttgtgcctaggttttatcacagcagcaccaattagctctgttaagcatctttctacagatacacaggaatgtgagagatttttactaccaaca

SEQ ID NO: 21530 - DNA, 600 bp, Bovine  MMBT12807
gcgggaggggccggcccacctgaatccctgtgtaatacacgggccctggcaccagaccagccaccaacagggtgttctttgttactttttttttctgacgaggataaataagaactactttttgttcaccctaatatgccctcttgggtttgaggacataaaaacaacagtgaaaaagttgaaaaccatttgttgttgctcaggatctctaatcagtgtattcatatcctcgtaaaacatatgcaaatctcaggtcacctagatttttaacattttcaaatcctttccttacctaagatytccctatttaaaaagttcagacctatttgcatttttgtcgagttgcgtgtaatttggtttttttttttttttttacttaaaatctacttatttatttggctgcattgggtcttagctgtgatatgcaagatctttagttgtagcatgtgggatctagctccctcaccagggattgaaccagactccctgcatctacagcatggagtctcggccactggaccaccagggaagtcccctaacttggttcttcttatttctgtcgagttactcaaaggactctcaatacaatgcactgacatt

SEQ ID NO: 21531 - DNA, 602 bp, Bovine  MMBT11816
  misc_feature (1)..(2): n is a, c, g, or t
nnaatacaaacatgcaacmcatacaagtaattaaatgttattataaaaaagctacattcttcagtttattcttttcccatcytaataattttcacatttrtttcctaaatctgatgtgctgtgaaaaaaataagctttttaattcaaattagcacaaggcagattgattcaagtagtaatttagtatctctagtaatttaatccttccaatagtaacctaccatttctctaataaaagagaaatatctaaacttcaccttcaatatattctgaccatattttacccatctaacaaaatctcycccaatacccaaactaaatatttctctwttaagtcaatctatacctatttgttgttgttgtttagtcactaayttgtgtccacctctttgccacaccatggactgtagcctgactagctcctctatctgtgggatttcccaggcaagaatacctgcatgggtcatgatttccttctctaggggatcttccccactcagaaatccaaccttcatctcctgtgttgcctggcagattcttgaccaccgagccaccaatctatacctatattttgaaattattttttcctcattgcttgtctc

SEQ ID NO: 21532 - DNA, 600 bp, Bovine  MMBT06706
taaaatactcacaataacatagcctatctttcctgatttgccaggcaaagcagaaataaaatcatgctgtctgkgtataaggtaaaaattaactgttgtgacacttcatatttgtattcctctcttatcttctacattttataaaactaaagagtactaattaaagttactatacacttgaggaactaaaaagaggaagagatccttcartataaatattygatctaaaagaatgagaacaagctaggacagtatagcatgtggtttaactaagttttatataatgaatgaaagaaaccraactagttagccataatttagggtagctatgacactttgaaatgtacaagagatgcataataagcagagaaccataaaatatttgaatcttttcaaaataacttctttactaataactgtatgatttataatgttgtctatgatgcagacacaatcactattaatgtaccacaatgttttaaaatctcagagtcattaccctcaaaaaccttagttctataaatattcctgcctcattcattttgtcatactgtgcagcactgaaataatataaagtgacatttactataaaaagcatac

SEQ ID NO: 21533 - DNA, 598 bp, Bovine  MMBT11803
  misc_feature (1)..(101): n is a, c, g, or t
nnnnnnnnnnnnnnnnnnnnnnnnnnnnnnnnnnnnnnnnnnnnnnnnnnnnnnnnnnnnnnnnnnnnnnnnnnnnnnnnnnnnnnnnnnnnnnnnnnnnngtgtggggcccactggctccatcgaaaggctctgggacgaaggctcgctcctggctcctgactccgctcccggccatccctctgctcccttctggaactgcagcaacaacccacagcaggtagagaaagccacagagcagtgtcagcgcaatcacgctggagaacaaggcttctctaagcagactgtttctgggtgccrgctgttggcaggctggagggaccaggcgaaggctgtctgatggactgctgggcgcagagctgtggcctgctcacgctgcagagcctttttgatacccagcctgggccccccacggctccccattcgcctttgttctgggagctccgcccctgctccctccccactccccctcctccagcatcctgttcgacgggcaggatcagtgccccgcccttctgcatccatcaacgggacaggccgcgggcagcccacgaaggccagcctgggtcagagggggcctcctcaggtaccctcccga

SEQ ID NO: 21534 - DNA, 600 bp, Bovine  MMBT04876
ccttggaagaaaattccctttgtttcctgatttccattatcataaaactattaaaacatcaataagaaataaattaagatctatcaaatgaataaataccatctcacctctatcttaataagtgcatcctttcagctcaatgtttaggagtgattatggcggtttttctgccaagacttggtatggagcaatacaataaatgatattttacacatggtgtgtttactagatgaagttaaaatctagttcaaattagagtgtacaggttgatatcattagtgttactcatgtgaagacttwgggagattctggtcaaggtgctgggcactactaagacccaggtctggctcacgcttttgagaagtgtgacaatgtggggataaatatccttttggtttagctcggattctgagttattttctctccaagcagtgcagtaggaagtccgcaccaattcctcagaccagtccaggtcaggataccgactcagctgagcccttgctgagacctagaggaaggggatgggctggtgaggttgctcaggacgccyggagcttgttctcgtgaaaggggcccgggggacccagcagtcagccaagg

SEQ ID NO: 21535 - DNA, 600 bp, Bovine  MMBT14434
aatcgcttttataatgacaagaagagaaatcaggtcaagaaatgcatgtgaatcttgttgtggagaattaaattagaaaagtygtggaatacttagaaatcaactgagttttcacattgtggacaatttaaagggagggttcagggtgattagcccttgggcagaatatggttttagacatgttctattctaagctattaaatacaaaatgtataaatgttatcttaaatatcaaatattaccaaaggcaatttaatagcaattaattttgtgtcrtctcaaaagctccagttgaaaacrtctttgttgtaataaaattcctacayytcttaacccagcattttaagtaatgaatttaattatgaagaaaactgctgtcattaaacccttcttcttaatcatgcctgtgtttatgrcaaaaaaaaaaaatctgttgccatggaaattttagtgtcaaagttgcaactcataaagctttacagaagtataaagtaaaaataggaaatgatctttagcaaggtgaaacttcttccttaatatatttttaaaaacacttaaattatggacagcaggtagattttacaagtgaacctaattttg

SEQ ID NO: 21536 - DNA, 600 bp, Bovine  MMBT10630
tctttctagagaatcaatattattatcataaagtctatccatcaaacaggacttcaggtggctcactggtaaagaattcatttgccaagcaagagacatgggttcaatccctaggtagggaagatcccctggaggaggaaatggcaacccactccagtactcttgcctggagaagcccatggacagaggaacctggtgggctatagtctacagggtcacaaaagagttgcayatgacttagcaactaaataacaagaacatscatcaatcaactcatgttattccatttattgggtctayctatattgctgagcattatttcataatttttctgtgtgcacatacwtcttttgcttggtatattcctggaaaatgtcctgatggccagactggttattcaactctctaacatattcacttgaaagtcccaaaatggaaatagttactctctttttccctatgtccataaatrtcactattatccattccccgccttgctcaagcggctcaccagccttccttggtttagtctctctcctcatattcaatccttctgggagtcctacacgttccaccctctcatgaaaaattttagtttcc

SEQ ID NO: 21537 - DNA, 600 bp, Bovine  MMBT02419; identical to SEQ ID NO: 4516

SEQ ID NO: 21538 - DNA, 600 bp, Bovine  MMBT06736
agaaagatgaagagaacgaaatggccaagggaactgggtccacaagcatcattgtaatcaatttttaaatctatcataaattacagtcttacataaaatattttrgggagaaaaataatttctagctaaaaaaataggtaaattacctctaatggaattctgttctgccaaaggaaaatactccaaatctaattctagtcttcaccctgtaaaaatgatcattatttttagtggtttccaagataatgtgcttcaattatgctcagctattggtttaggtaatttcatattaagtgaatstcaaatgtagtcaaatatcacaaaacatttaagtcacacttttaatctaaaaaaaatctagatatttagacaccttttcctaaaacaaatatattacctttcacaataaccatcaaaatgaggtaaatttttcttttgtttttcatacctatcaataatgtttcttagttatttgcacttaaactgactattttctctccaaagtattctactgtctccactagtttatttttctattattctatgtgaataaaaatgaggcattcctatcatacaacaaaattaaattatgttatatgc

SEQ ID NO: 21539 - DNA, 431 bp, Bovine  MMBT00951
ccaaaaagataaaacacaggagtatccaatttagttgacttcattccatcaagacaggtggttaaatggggaaatttctaacccattaggagagaaaataattagaacataaaatatatgaaatcatgtactttagtattgcaataaaatcaattaaccatagcttttcccagttttctagaacattctagacctcataaattgaataatttaatcataattttttaaggacatacttgacctcttttgactaactggaatttcaacattaatgacccaaacctaactttccacaatcaytggccaagggatttctgtgacttttcaacactaaatatagaaatgaaatttatattaccacacggctctttttcaatttggcatttataccgaacttgaaaaccactctaaattcctcttaatgttttatg

SEQ ID NO: 21540 - DNA, 600 bp, Bovine  MMBT00732
cctactggatagtactgctgcagaatattaaataaaggtattattgtcattactcaaactcatcacaaaactggaatcagacttggagtccgtaacacggtctttttcctgtccacaccctagagaacagctcttctttcttggttacccttttccctgattgataaggcaaaccctttacagagagagactttctcatctctttctccaaagtcaggcacaccgttggggccaagaacaccaaacatgtcctcctattgtccaaaggaggggaattgtctaaggacagtcatttgctcrctccaatccttaaaatctaagatgagctccacatgcacagtttaagcccacattacaacccactcccaatgcagcacatatacattttacttcgtttccttgtgatcgtgatctttcagagcaagatgcaaacagagttttcaaaactgaccgaaccttttattttgtgtctggtaaacacacagctaataaattccctaggaaacagatttgaatgttagacagaagtcccttccaaaaaaggatcttacatacaagggttttcaaacctcaatacatattaagatatgattgaataaa

SEQ ID NO: 21541 - DNA, 600 bp, Bovine  MMBT12426
agatgttataaaatacctgatacatattaaaagtagaagtaatgatacatcacattttgtaagtatatttttgttaaaattcgtatgaaatgtttttttgagaggaataaccaaaaacgtctttaagcagtacacaggggagggcagaggagaaggaactagagagccctgtgccagtgtatttttaccaatgtgagaacttaccgctgtctctcgtgttcctgttttttattgtgtgtacaatggacaaatgagtcctaattgacaacatctagtggtgggctgccgtctatggggtckcacagagtcggacacgactgaagcgacttgcagcagcagcagcagcagcagtcttactagtggtattgatgtaaactccaatctgatgaaaataatttttcccccatgtttgtatgctgtttgacagacggactcgagatgaaatctctgaggccacctggctgagactcagccctgttccctcccgctcctctccgctccctgtcttcccaagtaagctgtggagccgcttgggggccacgtgaccaagacagagtcacatcctctgggctgggctgcaggccccgccgcctcctgccc

SEQ ID NO: 21542 - DNA, 600 bp, Bovine  MMBT10066
actctgctttcttcataatttttatcacttgttgaactctcaaatttgttggtgtacctattaattatctgtctcgcctccgaaatacaaacactctgaggggctttgtcagtcttatactccattgcattctgggtgcctagattaacttagcacttaataaatgaatacagggccaggggtgagggtctggaggcccaggatcagctgtcccccaagaggcctcctgtggcagcagggtcccggagatctctcaccaggcaaggcaggtcatggcctccccaagacttgcatggtgaygatggcgtgggctttcccagcagggttgggggatgctatgtgttcagaattgtaagagttttcctaattcctttaaagagggaaagaaggagaatgacaccagccaaggaatccttgaaaaaagccgcctgcctattgtctgttcccatttctctcctcattcactgtgctaagcttttcagatgtggacgtgtggctttctgagagcaggaagagctctcggtgtaatcagaggcccggtgatgacagagaacattccgtacctgtctttgattacttgggtaagcttaacctcaatta

SEQ ID NO: 21543 - DNA, 600 bp, Bovine  MMBT09518
tagcctcattgcaagcattaatatacataaatcagtggttccaggtactagctgtactgatcctactacacgttaaaataaaagaattgtttggagaactagaagttttgcactcctgtatcattaaggtcattccaggtgctgggaatttctaccctgtatttagctattaatacttctcctggattctaaacctcacttggatgcgtaaacctcattgaccttgaggccagaaagttacctttctcagctgactcacctagaaaatggagagcccatttctgccccacctgccttgcrgcgtggctctggggagccaagtgaggctcagacactggtgttatttggaaaggaaagggctgtccaaaggccttagagtaatgctccaatatccccagaccaggttaatactgctgcccttgtctcctgcagtcccagatctggctggttccccccactggcaccctacccccagtgacacgacctcccccaatccctgccccagggaccccaagctgaggcttaccatagagttcttggatgccctggatgtcatcatgggacaggcggaagttcttagtataggtataaatgggcgcc

SEQ ID NO: 21544 - DNA, 598 bp, Bovine  MMBT11949
  misc_feature (1)..(4): n is a, c, g, or t
nnnntagcgacggaccaccaatataatgaggattaaaaatactaatatctgaacttgaaagggctacactaaaatgggaaaacagcaaaactctctcactcatgtcatcaagggaaaacaaggtgtactcttcttagtatcatacttgctctccagaaatcctatttactacgagggcatcaagtttgactagactggataaactcagcactgagctggggtggcctttcagaattgctattatacctcagtggccacaatgctgagactacgtcacttgtaatacagctgaagttacaytgcttttaacagtgtctcaagacgtgacaatacttagggaacagattctctaacgtaggagagatggagaaaggctgggaagtctgtaagaaaggagagattagggcaaaacctgagatataatatcaggtacttttacaggtgaagaacagggcctaggcagaaatgaaacatctcctgggtgaatgggtccctcagccctagatgatgggcagcagcactcgggagatgagcagtgctcggaagtggtacgtagtaggaattcaaaatgcctccgctgttataaaaacaaaattct

SEQ ID NO: 21545 - DNA, 600 bp, Bovine  MMBT02904
acttgtggttttaactgccacaaatccaaaggtgtggagccttcatgtggtattactcctcttaggtctgaatcaagaatatgattattaaaaatttactgaaaagttctggcatttacttttctcctttgttaattaaaataatgatacctatgtctcatggttcttttgagaaataaatgaggcattaacctaggaaagactttagttcagtttctggagtgttacattttcatttatattactataaaaacttttcagactacacaagaggaaagacaccatacaagtttatagaaytgaattatgttcagacaagagttttttaaaaatgattttgctgtgaagagaagaaattgatttatattcttacagtgtatatatatatatatatatatgcatagataagtgtatgtgtagtatacatatacttaatacacatacatctgtatgtctgtgttcctgggcaatattatacataattaacatttacataaattactgttacaaaacacctctgtgaatattctcttgttaaactcagcaacaaacctgtgaggtaggtagtacaaggtataaagaaacctcacttggaaagag

SEQ ID NO: 21546 - DNA, 600 bp, Bovine  MMBT07210
ttttccgtaagatgttatggaaaacccaaatgaatatttgggccaagccaatattattgcctgtcctgcccacacccgcactgaatgaacagagacaaattctgtcatgtaattcttcttcatacaaccaactggttagacccccaagtcaatggcatacagtcataaatgaagtcataaacgaaccagagaagtaagttctagggccaaggggcgtgagacagctcaaggcctttaaggctgcaacctgggctggcctctggaaataggttacattcgtgctgaagttatgaggggtgygggcccctggtgagagtgaactgcatgcaatttaaatactaccttgagaagcaaatcaaagtcttagctttaaagttctccaactcacagatctaccaacctaaagcagcccttagtctttccacagtcatccactttgattttggcaaatggatccacaggaggagcagtagggaaagggtaacctggccagtgagaagaaataaagttagaaaatccaggaacagcgtttccaatgagaaaagctactttttagtaggttgactattctctatcgcatgagtctagaaatggtcaaag

SEQ ID NO: 21547 - DNA, 600 bp, Bovine  MMBT10884
tgcaaaagaaacatattttcaggtggcaaattctactccccttcaggccccaattcctatgttcacttcagtcgcaagccaatcttaatagttcatggtatggatattgatgtgctaatggcaaagtatttgcaaactatctatccttaaagttaccccccacccatgtacacatatacacacaaaatgatggttcatctaaaacacagctaaactgtcatcagttcctatttgcaaaaaagcaatttctaaagtgacattagtatgcattcaagttttcagatggattaaaaataacaratttttttttctctgtaattttaggtctttactggcactcatgtactgcaaatcactgatttaagtgggcacaaagatgataataaaggggaaaaaactcgagaaatctttcctaatctgtcactgattaaaacagaaagcaccatttttgaaaagtagataaagtatctaggtaaaattgcatttacttaccctcatcttgaccctatagttctttcaataattattattttgttttaaaaaaagttctgtggtgttatggatcaacagccatgagtaggagtccattttttttttcaa

SEQ ID NO: 21548 - DNA, 600 bp, Bovine  MMBT05323
agctgagagccgaagagctactcttatttataggatcctgagagtgtccgtgatattgggtaagaaatcacactgcagcaaacctgctgacacctgagcgtcaagaaatctgtctctactaggttagcccgagggcagcagaaagtcaagacaggctggcatcagacgccagtgctgtccctccccgtttgtgatctgggataagtgacctccctgagcctcagtttcttcatctctaagatgagaaagacaagaccccatcaaagggctgctgggagggttacaggtgaggatgtattygaggcacgcagcctccagctcacagcctccctcccgtccctgctgccacccgctgctccgtgctctgctgggtctgtgaagcttggctcttgctccgctgttactgtccagtctggaggactatactcttcttttccggagaccttgactttgaatttatgatgccttcactggtactgtgcctgccycttgggatgtaggtgggatgtgatcccaggccagagaaggtgtcagggattgagagtgagtttggctgggtttaggtggcctggcttaagcaagaacactgtgccagggcct

SEQ ID NO: 21549 - DNA, 600 bp, Bovine  MMBT05698
acatttcaaaacttactacacacaagaggcaatttctctgctcttgaaaaccagtttaataattaagactaaaactactaattagtgtatccttttgaatcaatttaggtgctaaaatctttcagccctcatataattttaactattttaggagaagaagcaaaaatatgtgtacatagagaagatgaaacaaaaggaagaaattcacatttgaggctgggtgtacgtgtcatttgcaatcacttaaagcaaacagtccaattcctttccttgtgttgccttctacctaaatggatacaratttttttttagttggtgcagtatgtcattattaatgtagctatattatatgatgaagatgaaggtcataatgttgactgtgaaagcaataatagtgatgataataataatgctaacaataatggcagctaccaattctaaacagttatgatacatcgattactccactggttgttccatgtgagttgtacctttatttctcttaatacaagaaagggcatattattatttctaattaacaagtgagttaatgtcactttaaggattaaggacccctttatgggtctcaccttagttaga

SEQ ID NO: 21550 - DNA, 600 bp, Bovine  MMBT01251
caaaaaagattcaaatataaatcattaacataaaaaagggaaagtaatttaaagttctgcttcaatattaacaagtagtgcactagcttttaaagttttgctaggcaggctggggacaatgctcctctaagccaacttacaaactagcaaaaaatcaatattctcacctaaataggaaaaccacctggagactttagaagacagacacagatacaattttaaataaaacaatgagttctgacattctctacatttttgaaaaggataaaaggcaaagacttactaaaaaatatatacaaracagccaagaagctcaatgacactgcaattccaagatttaggtctactgtaaaagcaaacaataaaccaagccctccacaaaggagcagggtcagaaacaccacaagccatgaaaactgaaacagaggttcaatctgttgtcctgcaaaagttttcatttcatctgaaagagaaattaataagaaaacattatttaagaaataaaacatttgaaaatttcacattttcactataaacatttacctagctagaatgttgctacttaaccatgctaaccaatgttcactttgctaagtatct

SEQ ID NO: 21551 - DNA, 600 bp, Bovine  MMBT08389
tagacatagcatttacattttagaagaaagactgacaggtacacaattagtgtactcattaaaaaattatgtgttctgatttaagaaagaaacaaaatcttctctctattctccttccaaaaagtctctctgactctgcttagaatgtcygtaatagttattcttctaggcttaaggccagttataatcctaayagttatctggaaaaaactaacaaaccacattcactcactaatatttcagaaagaatagtttattaaatcatcagtattgattacttaataaaagcctagggaagtmagacagagaacctggcaattttgttggacctggtggctaaaattgaggactccagaaagaaacaagacaccagaaaattcatggaactctctatttaagcactgtgcattttactatatatgttataccttggtttacaaatattaaaaaaatttgggacaatagtatctacctcatggggttgttgcttggattaagtgagctggcatatttagtgctcaatgaagttagcaatcatgattgtcatcactgttactgttactttaaagaggaagatgaaaagtatgagacaaaagagag

SEQ ID NO: 21552 - DNA, 600 bp, Bovine  MMBT03107
tcccctggagaagggaatgtcaacccactctagcattcttgcctggagaattccatggacaggagcctggcgggctacaaagagtcagacacgactgagcgactaacactttcacacttgaccrtgtttgctcatctctgattttcttgcaatcaacaagaaaattaactgcaactaaagtgttattaattaatactttagattacttttaaaagaacttcatccaactcgccaggcccctacaatagaacagcacaaagactgctgtcaccacctcacgaccctgtgggagctgaaacratcactgagggcaaggagatgaaacatttatgaataagactatttgcagttaccgagctgctgagattaagtgaccagagcagttgttcttttaaggcatacaccgactctgtttaggaaaccgatttcgccttcctgcttcccccgtgcgtcctgggttcgttcaattcaaagccgcggaggcaacagcgatgcagcttccctgcacggtagctgtgatgggtgcttttctggatcattcttgtggaagggtgagaggccttgggattgcttagcttgaaggcaagaaagcagagatga

SEQ ID NO: 21553 - DNA, 600 bp, Bovine  MMBT05227
gtcaagaacgttttcctcatcaccgggagaaaatgccttgctgaagggcaggaggaaaacagcaagatgagtaggctgtgtgacgcgctgccagcaaaacatcccaagtgatgacagctgacgtgctcacagtattttaggatctctccaccactcgcacatttgttccttagatacactgacgaaggcccacagtacagatgattgactctcttcccattgaggctttgctactgaggcataacagtatcaaagtcatggtcctgggaaacacaagctattggtgcaatgaacactacmctgtgtatattaataaaattcttcagtgcctttcccacaggattcgggaaccttcttctttgcctcttggtagcacagcttcctctgcagtgtctctctcctagacattgcctcgatgccaccaacagtgtttgcccagccaggcctctgctgttagggccttgatctgttaaatatgataaacttactctcaataacatggctgttcatagtgtcatgagtggcgctgttgaaatgacagctaaattgaagcttcattttcaaggcctcaactaggaatgcaacaatacaaacgatgaa

SEQ ID NO: 21554 - DNA, 600 bp, Bovine  MMBT04504
tcaaatgcaggatagaaaaattaagttatttgaaaaacttcacacacaaaatctctagcaattgttttccaatgtgattttgccactttatatgtcttaatgatgttctaaacctgtgcctctgtggatagagacagacccagatacagatacagtataattaggtatggcatccrcatctgtgtcgttgcctgcacctctatctatgtatctttgtgtatatgtatgtgtttggtttctgcaaaaataaacattctggaattcagacaaatgcatcaagttcatagcatgttgaaatgratagagggctctctataaataatgaaatatataattaaatagcgtttcctctacttctaacaggcaagattctttcttatctgtctttacagtaaagggagccatataactagaaaaatacaatgtcctttttccctaaaaacaatctaaaacatctaaaaacaaatgatctaatatcagcatctaatcccttaaacaaattagtacaacatacatcatgttaactgttgatgtatatgttagggatcacccaaagaagaaagtgataaacacgtatagaaacggaaagggcttgctagt

SEQ ID NO: 21555 - DNA, 600 bp, Bovine  MMBT06605
ttctgacttatagttggacttaccaactggtgaaaacagctctgctcttcctctctgataaggaaaaaaacaagaaaaaagaaaaatgactgatttaccactctccttgctgtgayggacgcccaagaactcatcaaaggcatgcagtattgtgctctgagcagcgcttcctccagagtaactcaggggctctttggagacaccttcgtataccaagcccgcaggcagtgctgggttatccttccatctaggtaagaacaaaagtcagatggaagtgcatactaggatttaagagtgtcktttctgatcaggatacagatcaagcaagaaagggaacaccctttcctatcttcttttctctcctcttctttcaccctgattccacgtcttcatcttttttgtctgagtctccctttttctgagtcccccaaccattttactcatttcatttactcatttactcattttactcatttctgatattttagggggtcttgaacattcttggcgtgtatgtgagtaactccacaatgagacagaatcagcaaccccaagaatatgctgtgtgtgtgtgtgtgtgtgtgtgtgttagtcactcag

SEQ ID NO: 21556 - DNA, 600 bp, Bovine  MMBT00615
ctgggtctcttcctggactggcctgatccaggacttgttgatttgtaaacatttagaggaacgccccccggtttttcaccttcggtgctttgtgtttgtcaacctaatgactgaaacagctcagaattctcagctgtggggctctcggggctcccagaaggctgcctgcttccaggcctgctctgtggaagtgtcatgcgagctgtgttctgtgtgaccacgtgcgtgctccctgggatgtgggtgtctgtacgcaggtcccgtggtgtctgtctcagggtcctgtgtctgtgtccccartgtaatcaatgcagccctcttcctacccagtcctgagggataatggcatggaggaaaacctgcctcccagggaggagggtccctagaaacccatgttcccaggaacatggaatgtcactggagcctacaatcctccagcacttgcaagtgcccagctcacaagatcaaagtgggaggtgccaggttcctctggagcactgggagaggagacagtgcccagctcccgaggccactggtgggcatccttcggcactgaccaacagggtctcccaggagaaggggtgtttgaaaactgaactt

SEQ ID NO: 21557 - DNA, 598 bp, Bovine  MMBT04846
  misc_feature (1)..(14): n is a, c, g, or t
nnnnnnnnnnnnnnatagctcaacttcattttaagatgttttgccttctatggcaatcaaaatcaaacttttgtaagtagacgtgtgtgtgtgggttacgcaactcctgtcagcagtgcctgcggtctttgcttgaccttggatgaacagctaagccttggaggtgggtgtgtgcatcaaagctgcctacaagcacacgggtatcccaggttgctcaagctccaggatgagaagagggtcaaggacagtcacctctgggctctgtataggctttgtgaaaggtcacatcgtctgcctaaytggaatcaactttctttcatgcctgtttttatctccacggggagaaatgccaagtgagctgggaattaagaagtcagggagccagctgtgtaaccttgttaaagtcacgttagacgttgggtctcactttgcttatttctaaaacgggaccagatatgtttgaaggcaacttccagctcacattcaggttcttgtttttttcctgggaagatcccaggaagtgttcagagttcaggtagtcacttccccctagtcagatgtcatccagccagcctcctgcatgtcaytgctttgttcc

SEQ ID NO: 21558 - DNA, 600 bp, Bovine  MMBT06667
ctaaaacctctcatttattagggcaaatgcagagaatgttagataccaaaggtattttgaaatacaccctttaggacttcctgcttgacgcattttctatcatagttccatgtgcctgttggagaattatggaacttgtgaggactgtgccatgcgctttcggaactgaaacagagtgactgatatttgaacaataaataaaaatcatccaaggtgtatgctatccaaaaaaattaccataaactaaagatgatcatttttatcaactctatgtttcataaacatataaattaggcaaayacattaacaagtttcctcatgtaaaacagctgaacagactgtaaatttaaccaaagaagagatgggtgagggaggcaaggccaacccctctgttacctttaagcaaaggtggccccaaaggctcaggaaccttcaatagaatgttaaaaaaatgcacaagggacttccctgtcggtaccgtggttaagattctgaacttccctgcagggagcctgggttctgggttcaatccctggtcgggaaaccaagatcccacatgccactcagtgtaggcaaaaaaaaaaagcccaagaagacact

SEQ ID NO: 21559 - DNA, 600 bp, Bovine  MMBT02276
gtctctgagttctatgaaagatgttaagtttcaagatgtggtgtatgatttatgatgattgttttcttctcagtttaactagattctctagagaactgaaaaggaattttcatcaaatcaccctcaggcctctgaaacaccagcaggagaattgtgagtcccctataaccggcaaggccacttcctctcaagtgaagacattttaaaactggtcctggcaaagtaaatatttctaaatgtccttgaatgttgtcatgtcaacttcagtcatgcatctaaaaaataaattcatgacacagrgggcttaggtaagtggatcacaataaaatgatcactatcatggtttttaacatgattattatctctaaccatgatactgatcatttgaaaacctattcaaacccacaaagattcttctttaatactttttgtgtttgttagctctcaaaagcctctcctttgtcttagaaataccttgagctcaatcaagtgcaaatcaagctgctaataatgaatttagtcacaatttattgagagttcactgaaggtgcaataatactaggtgctgcagcaagaaattttaaaagaagtcacactgtc

SEQ ID NO: 21560 - DNA, 600 bp, Bovine  MMBT02771
aaactgaattattaatctagtaataggtcatcagttctctttgctgcccagagttttctatcactgatcatttatcactatccctacttttaacaaacaaacatttttctcttgcatgagaaaaatgagctctaaataatatatctgttcaaatgtgaatatgcaactgactgctaaatcacagattattttatggtatttaattcctcaattgtcattcatgccaaggagtgactcaattttccaaccattttatctattcaaacctgttaaagttttctttatatagtatgttatgayttcatttgcatgtgacatcaatgtttgattcatttattaaattctgtctctattcctctctcattagcttgagataaagtaatgcaatactgttatttaccatattcttctttgtgatgtcaaatcacactttcaatttattaaataactttggaagtaaaagtctaggtctatgaaaatgtctttcaattacaaattaacccaggatattatctgagttctgtcagaaacagaaatgactcttggtattgcaaatagaggaaatttratactggtaactggatatatgcgtgatggaag

SEQ ID NO: 21561 - DNA, 605 bp, Bovine  MMBT09679
  misc_feature (1)..(5): n is a, c, g, or t
nnnnntagggaagcctggcatcctgcagtccatggagtcgcaaacagttggacacsagtgagygmctgaactgaacsaaagaagaaaaagtaacaaatctcagcaaattatctttctagtcccctctacaagccttgtggtgaacaaggtcagcctggaaataaaataaactatatgaaagagagcagagaaggagatagcagcaagcctaggratgatctaaaactcctgtcaaaatgagaaagttcaccctaagaatgcaaacacaggaaaaatgttctggtaggtcagagtactgactacaygcaattcaaagcracagtcttctgaaatattgcatctgggtgagaagaaggtagaagttaaggaagaatcttkggagattggctgataaaaagaacaaccacagcaaggcgggaatggggccctataagacaaaagaacacaaaaatgtctaaggacattcatctccttcctaataataatatctgttagataaattgcattttctatactagtagaaaagataccatttcaataggaatctgatcacttccaccagtcataaaatagataagagacttccctggtggtccaatggttaa

SEQ ID NO: 21562 - DNA, 412 bp, Bovine  MMBT11662
agtgaaaagatgattatcttaaaaagaaggaaatgttagctgttctgtctcaagtgcttgctgtagacttaaagtcaaacacagtacttacacaatctgttctttgatggctggaacttgaccctcatccctgtcagcagtaatgaaatttaacaaacattgtttaataattccttgctaggaactacagcagcactagacctaaaaatgagtaaatcattatcacttgccctctggatgctcatagtctaatccaggaggcagctacaaaaactatagtatattgtaaacatttcaccyagctatgtaaacaaaagggtttgagaacttgcttcctgtgggagaggaagaaagaagtttgtgaaatctgcacaaaggagttaataacactgtcatcagagccggaaaagaa

SEQ ID NO: 21563 - DNA, 570 bp, Bovine  MMBT02192
tttagatttccagcagtaaacagtcctccaggatcaaccacattaataattagtgagaaactgaaagggtagccacaggaaaaacagctaagattttatagtaactgacaggctttcacagaaatagaatttgtttcgctttaactgaccagtgaaaacaattgattcatttagttaaaatgtcagtcaaaccagttattttaacagttggcagtggttaagaatgaaattagtcaaatccgttgaaaagacaggcaggaatttagataagtctgttaatccccatcaataataaaaaaytgaagggaattccttagtgtgatagagcaaacagagctatgggtgtgggctctcaccttgaaacactgacgtttcaattgggaaactgaccgacaaatacaaagaagatgctaaaaacacttcaaagcaacataatgactatgagaaaagagtaggctggttacaggattaaaaggtttttatctcagcagaaatgtttatggatttgaagaatgaaagtatgaaatgtatcctaatgaaagagaatgttcacattcatagtctgttcta

SEQ ID NO: 21564 - DNA, 598 bp, Bovine  MMBT06908
  misc_feature (1)..(5): n is a, c, g, or t
nnnnnacacttaaggtacttggaacggcttcagacacgtggtgagtttcatcagtggcacctgtgacctacgggcatcagcatggctggagtgtctcatgaaggtactggctgtactcagtgggctggaggagggccaggggccgggaagggatgaggttttaggaagaaaggactaaacrcacacaaagaacacactcggctcagggagtcagcggtccccaccaaccccagcaactcaccggaactcaggaagccgaagatgcccgtgcgatagctggccgtgaccacaatgaggttrccracagcagccaggaaggagccatccactgccggccggtccccactgcccttgccctccgcggcattgtggaagaacaccagcacggacgcgttgggggsctgcagggggtgcagamatgtgggggctacaggcggccacctccccctccagagcttgggcagggcacctttgccatgtaggtgccagaccgagccaacacacaactctgggtgtgtcaacacacctaccccaaggccaggcaggggcaacagagcagcccaagagagaagtggcaaagctacttttgactggaaac

SEQ ID NO: 21565 - DNA, 600 bp, Bovine  MMBT13815
atgtattatttttatgaatttttaaaagaacatkaaaggaaaaataaaaaaaacatmtgctaagacaacagtgtggggagaagttcgaatggccacygtctgatactctaccgtctctgagacaggttcttggcatagatctgactgacaaaatcttgggcttgaaawtttaggggtgatgcttckccctccctacaggccttgaggtgctgggaggagaacagctcgctcagatgctgcagcacttgggggtgcggcatgtccttcgctgtgcagaagtttaagagtgcataaaacatsccctccagccacttgatgttgaggcttattccccctaaacatcagtgagaaaggaaacaccagtgagyaccacctaaaaaggtctacagggaaccgaggacaaaccccagacagtgaacggctaccttctgtccaagacagtttggttatgtaaacttctttaccagaccaagagccctgggtgtgccctttataacacgtcatgtgttaaccctacctacagataggttaatgtagacattgctaatgacaaatgcatcttgggaaatctctggaatggttcttgcaataaggcgcact

SEQ ID NO: 21566 - DNA, 600 bp, Bovine  MMBT04583
tgaatgctaaaggcaccaggccattcggcggctcttttattggaaggtgcagatcgctcctggggacagccccgtgaaatagcacacacctgtgcacacgagacagacccaggcagggcaggtgaccgagggcaggttcacactcgaattttaggcctcgccaggggacagcacaggaaacagagcactcgcaccataaaactgcagagcaatttccttatcaccatctccacgactcagaattttttttttttttacaaaagtcgtttaccaaggggcaaagttctcagcccacggaaytcccggggctrggctcccccgctgctggcagagtccttccatgtcccgcagagctttctgggggctgggagggggcccctgggtgaggcggcagacgatgccaccgcaccataaatgaggggctgaaatgaagctggtcaagaggtctggtctgggaacttgcttcaactgcccaggttcagggactattttgagaatttcatttagccagagtcaaacaaggcaattggtaacttgcctaatttaagtcacctgtccccaagccggggtcccattcagttcctcctgcattgttggctg

SEQ ID NO: 21567 - DNA, 600 bp, Bovine  MMBT09202
acagagatgaagaaaaatgtcttttttctaggttttgttaaaacatagttaggtaaggttaaagtcttcctaattagccatcccacagctgtgtcttctcatttgcaaacaaatgacactcagctaagaggaggaattctcctcttgtgaattctcagaaattatttagaaattacttagaatctaatttttatacccagggatcctagtaagaagtcagtctcattactgcttatcagaaattacttttcttctcaagtccttttttaccctgaaagagcaattttgataagaagtgamgatctgagtcaaagagaggggaaaatcattgcaaggagtgatcaatgaagttcagttagccaggcttatttagagttgctgagaaatcttcttgccagtgtccaaatcttgcaaaataataagtaccctactcaaaatgtgctttgaaagcattggagaaaaatcatatacctgttatgattaaagctacatcatgatagcatatgcttgaggacagaatataagcaggagtaaagacaactgaaaacaggtgatttgttagtgttacatgattttgggctttgtttctctgagtcctgc

SEQ ID NO: 21568 - DNA, 598 bp, Bovine  MMBT11466
  misc_feature (1)..(104): n is a, c, g, or t
nnnnnnnnnnnnnnnnnnnnnnnnnnnnnnnnnnnnnnnnnnnnnnnnnnnnnnnnnnnnnnnnnnnnnnnnnnnnnnnnnnnnnnnnnnnnnnnnnnnnnnnnactttgtaaacttagcctttagagaggagataatcagaatcctgtgacacagtcacactgttacacagttgacatgaattgctttgcattaaagtttttgaatttatttttgagttagatcagatttgacatctggtattaaaagctactgtcatatatgtggtccttcagttaatttaaaaagttggtatgtcasttatatgaaatgcatattctcaaaggacaaagggttttagggagtacaaagctaccttgaaatatgatgtctgctttttgatcagtttttccatttttagtaattcagatcacttcctcactcttacagtgctgtgcacattaacagtgagtgggcgggtagttgaccagctgcgtagtctccgcttttctccaccccaagattatgtattggtctttagtcctctattgtcttggtccattaggatcatttctgtgtcataaaataaagctaaccttcaattcacctcctcctggct

SEQ ID NO: 21569 - DNA, 598 bp, Bovine  MMBT03518
  misc_feature (1)..(4): n is a, c, g, or t
nnnnagagcttgctctcttttaatcatgtaagagcacagtgaaagggtggttttctacaggccaggaagggacctctcaccagggaattgaataagccaaagccttgatgctggacttttcgccttcggaacttggagaaataaattcctattgcttaagccagtcagtctatggcattttgtcatggcagcccaaactgattaacagagtcaggtgaagaaaatttctaataggtattttagtttggatgtctgaaaatctgattatatgcttaaaaattagaatttgcggcttgaaawtaaaagttttataaactatatctcagtaataggtcttcatccatcataaactccatgttctatgaagtttctttagtgttagaatccactggaggagctcttaaattatgttaacatctttcttaagatgaacatgagggcttgagatacctccaagtaagctgaccaacatcagggagctctgtctttacaattctttttgctctgaayttcttttgataacattgtaccaaaaaaatctttatcaatattttccatctatatgaaaaatgcagctcatagtatgagggctcagaaa

SEQ ID NO: 21570 - DNA, 600 bp, Bovine  MMBT05203
ggcatgcatagtaagtgcttggtaaatgttggccaaggtcccttggccagagttctgttggtgaataagatgaataacagtatcaagagaattttcttattttatattttgctctcctacttctgaggacaaaaatctttcaaagttaaatattttggtctatgaatacatacaaaatttatttattttttccttttggtcaatgaataaggaaacacagaaaaaatcaatctatatcctctttcaaattcccatgatgttatcagggtcagaaatgtcatatttcaacaggatagctcrgatgggacacaacagtttgaataaaaacttccactaggaaaactgccctctgacttctggttcctacagcacaagcaggataagtcaggtggtgactgcctcctaacaaatataaatgacacaattgtttacttggtgcaattttaattcagccttaaagctctctacagccaattttggtactgatctcctctaatggaagattaagtgccttgaggcaaagaaaaataattgttttgacattatgagatcaataagtcctggaaaccattaaactgtatagtgaaaggccctgagcgt

SEQ ID NO: 21571 - DNA, 600 bp, Bovine  MMBT05577
tggaaaataatcttgtttcagttttattatacattaatataaaaagtctcattttatgagacatctaaaagaatcaaagccacttctacagctatatcttaaactccaaatctgaaaacaatttattatattttgactttataatattctatattaaaacagagaaaattccaaatacacactttttacaagattaacatcttaggcagggttttccttaaaaaaccgagaaccaaaaaagcccacaaccaaatacaaaccttttttctccattttctagcactggctattgtatttgtwttccttataaaattttttttactttaaaaattgtgtaactgttggattttaaccagtaatctggttcaaaaattgtgcaaataaacaaaaaaatatgaaaatagtgtgttatcagtcttttgaaaataaatcccataacaatggcactttttgccctgaattgatgggaaaagacatgccaaatccatttgctgaaatttagcatcttgcagtaatgtttctttcctgctccttcattttctttcaacagacaaacaacaaaggtttcttttataaattatgataaattaaaatatttat

SEQ ID NO: 21572 - DNA, 600 bp, Bovine  MMBT05489; identical to SEQ ID NO: 4669

SEQ ID NO: 21573 - DNA, 600 bp, Bovine  MMBT08677
cctccttgaaagtgtctagctggtccaaggtagcctgatcccagtgagtacatcaggaggccaataaaatgctaaagagtttttagcagcgttcctcgataattaagaagagattgtgtacacatttcattttccttttactctttgacatgcacagaatttagaacagtaactatttcagctatttcactaccagcctgagatacgcagggctattaaatctcagagcatctcagaagcatgggtggctggttcaaatcagatgtgaagcctgatctacatctcaacttcttgaatcayatgatgcaacaaattcaagccatttgaattagatttttgctggcaaaataactgataggaacttgtaagataaaatatggtggtagagatggaaagaatcaggggaaaacaacttattcaagggtatcagcaagtgcaaaaagtcactgatgatgatattcagttatcacgaaagatggtattatcaatgcaatattcaaagaggccagtgagttttgagagagcggtagaggacaaagtcacatggcctagcaaggactagatttgttgttcagtcactcagtcgtgtctgactctttg

SEQ ID NO: 21574 - DNA, 600 bp, Bovine  MMBT07281
ctatatagtttgagagtttcttcctcagaaagaacgacttaagtaaaaataagacacagaggccctctcttttcattgaaagaaatcattagcaatctttacactccttgctgtgagaaaaaagtatgctttatgctagtaatatttgctgttttttctacatatgtaaataaatctcatacgtatatattttaaacagtgatctggtttcaagtgtcattacttagaaaaaaagaaagtcattccaygtggtgtctttggcagttacatgcactaggttatttagagacgatttccttygttgatgctgagtgttgccatttattaaattgtgttcgtaatagaacatgtccaatttgcggcttctacagctcaagagtgtttggggttttgaggaattgcaagtttgtaagatggcatgtggcctcaccattttgtttatttgtttgaattatttgatgttagatgagctagagtctcataaagtgataccgtactatacttatgagctgaatcatgcaataatatcttttaaatgattcttcttttagaaagtggaaagtctaaaagaagtaccgtggattcaaaggtaagaactaa

SEQ ID NO: 21575 - DNA, 598 bp, Bovine  MMBT03102
  misc_feature (1)..(8): n is a, c, g, or t
nnnnnnnncaggcctatttacagagtctttctgaggtcttcactttcctaaaaccttagccactccttaaggccaagtcaggtatctcctcctctaatgtagcttttttcatgtggatcacttcttagagccttataggtcctagaattggtcattaatgaatttctatttcattctcttttgtttcctttatgtaatttagtttaaccatcttaagcagactgtgagctccataatggcaagttctggaatcattcctgaacatcccaggttttcaaattctatgtagtcaatataatrgcaaaaataatgaagataatagcaataattgtaatttaatgacagactatgatttcccaggcaccctgctgaactctttacaaacactatctcatttaacaacctgtgaggtagatattactaggttcagtttacagatgaggaaaccaagcttcagggattaagtagcttgctggagtccagttgtaaatcagcagctgcaattttcaccctagcatgtgtgattccaaagccctttgcartattgatcaagtgctcccctcccctaccaagtctgctacctctatcttatagtcat

SEQ ID NO: 21576 - DNA, 600 bp, Bovine  MMBT03808
gctctttaagtagataagatctcccagctctgcatgaaattgtcctgacctcagtcctttagcagaaagattctaattctaatgaaatacagtggaatgagaaattaacaaacaaagcaacaaatccattatcagccgtttcctcagcctgctctttaaactggagctctcagacattcaatcaggtttgtagttacacattaaaactgccaagtacaggtggacagcttctgcttctgaaatattataagattacaatgatgttgaaaagatcagtttaagtttgaatgttaagtaaaraatgacatacctargaatcattgcatagtttaccagtaagtctggatttctgaagatagtggtttggtgtcttgatttcagatataaaaattacactgcacattttattgtactatwcaaattcaatttctrtatctagaaaatgcatagaactaagtttgcctagggtcacttgcaatgcaggagacacaggagacatgggtttatccctgggtaacraaaatcccctggagaaggaaatggcaacccagtattctgcctgggaaatcccatgggcagagaggcttggcaggctatagt

SEQ ID NO: 21577 - DNA, 600 bp, Bovine  MMBT07560
aagtcttcaatgtgtttcttctcggaaatgtatcttctcttaagagaaagaaacaaaaagagcaagaaagccattagctatgagtgaatttaatgttgcaaatatataaacttaaaattaataaagttcctagaatctgactcttattcttcacaacttaagagcttataaagtctgggatgtataatgggtcagttagcctcaagggtctcagggcaaaagttggttttccccaactctatggtttcaagtaatatttgtaaagtggacttagaaatactgagactgttaggttcccargtcaaatcctgccttcataatctcctgtgcataacagtttatgagaccctagtctcagaaaacacttagaaataaaaagaattaccttggtcttgaaaacattctagaaatgaaggcatatgtaaaacaattatcctccagttaaaaataaattttaaaagaagaagaaaaaagaaagaaatgaaggcacagtatktttaattaggggaaagaagaaaaatattgtgatttttcttctcataaagatgtccctgaagttcatttttggaagatcatgtatgattctaacatctgaaacaa

SEQ ID NO: 21578 - DNA, 601 bp, Bovine  MMBT07600
  misc_feature (1)..(1): n is a, c, g, or t
ncaaggtggtgcgtggtttgtgactgcagtggtgaacggaagtgagttcaatgaaagagaattaaaaagcaaggataattcctgatttgaggctaaagaggctaagacattgattggtggctccatttgcggaaacagagaagattaaaggatgaacaagttctgaatttcgaaggcagacaatcaagagccagtgcttcacatgctaagtttgattataacatacatagattttttttttttttaaggagtaaagtaactcttgtcaatcatattctgaattctacttgctttccagggstggaataatctttcctctgtgatccttgcatcagatcctttaaaaattccatagattctgcccatttagcaaatggggcctcactgagtggactgcatatatttcagaatctgtttgcgagaagttttttctctggttaagacctcccgagttttatgaaaacatctatttatccttagtcacaaggagattttcagcctgttgcaacttttattggcactgccaaaaggaaaaaaatatggaagcatttcaatagtcctttaactggacccaccaaggtccccagagcaggcgatttgt

SEQ ID NO: 21579 - DNA, 600 bp, Bovine  MMBT07626
ggaaactaggtttctgcaattgaacattatatctacatgtgaacttcctggtagccaagctttaccatattttcaaggtttgctgcactaagcatatttgctatgatatatactatgatacatacttaatgtatatattatagtaaaagtatgtacattaagatgctttacattgtttactgagatgtaggtaaatctcaaaagcagtggctatgaactgaagagaggaatcaggtgtactggtagcttttttcaaacttcagtgcttccccagattcaagtaaacagcagcaacacacycagggcttagaaactgaataccatggcttcctagttggcrtgtgatcactagaatctcaatattgtctattatgacccttacctccctggcatttgttcttcttagaagaaaagagagatcagattaaaatgggagccagcatatattgcattttcttttacaaggtttttacatttctaaactggactgtctgcaagaggaccattcaatgaattttcttagtcaagaaatggcccacgttaacctttgttgtggtggctgttcagtcaataagttgtgtccagctccccctccccccc

SEQ ID NO: 21580 - DNA, 600 bp, Bovine  MMBT09958
tcctgggtcttctctcacctccctggttactcctcagcctctctagtgctgttttccttctgttgtagcttaaaggctgattttctctggggtcccctgttcatcttcttattccccatgctcccttgaggtcattttattgacttgtggtttgaattatcacctgcagtccaaattgctttcccaaggctcagagcactgtggccactgcctctggaaagcctctacatatttggattttgctgccccaactctagcaacttgattcttttctgtgtttcacttttcagtgaatgtcascacgatcttagttgtccaggacagtcatccttgactatccctattgttttatttcccatgtgaaattgatcactaaatcctaattctatatcccaaattgctttattttttttaaagtgtttaagttataatttactcaaatttatttaccttctgtctttgctgattcttctacctccctgtgttccccaaatagaagcagcctcagggactccatggctccctttttcctctcctttctactgtctatctgagtcactttcactttttcagcttttcttccttttccatcatggtttg

SEQ ID NO: 21581 - DNA, 600 bp, Bovine  MMBT03338
caacaactaattcaggtgggycctgaaactctaaagttatatattatgtcatatgctaaatctaaaagcattcaacttaccattcaatcaaacctttagttgatatacaggccawatccccagaaaaaaaaaagtgagtaagccaaaattaatcacaataaaaggaacaagtatttttctttatgctgtataacacagatactttgaaaaacatttttttagacatagagaaaccacattgataatttctaaaataaaaattttacctataaarataaaagtacgcattttggcccatayattttctaaatgcttattccctggtaaaacaggaatctgcattgcatctaaaaatatattatccygagggatgacactttgtgagacggtatgacttagtaaacttatttttaactaaatgatgattcattttcactatgcaggtttcaggtaactacaatacatgyayacatagtcccattcttgggtatctgactttcagtagatctcaagacattgcatctattataataataagtgctagtattatattggatagtatgagcagggcagaacctatgtttgaattagcatactgaa

SEQ ID NO: 21582 - DNA, 600 bp, Bovine  MMBT09612
agtaagagctactgtcagtgacagcaatggtgtgatacaaacaacacgtgcatttggtctttggagcatatcatttgacccacacacctgtctcaggaacaagggtgacttcgtggaggtaaatgtagatacctacaaggggcaggtggaataaaggaggaagctgattagtgacaggaagacagtggagactggagaaccaccaggaaggcctcagctactgttattgctatcctacttccagcagagttttcagaggcctttacagacctgagcatttaatcctcagaacaacctacwgaggctgctaccactgtgattcatttgcctctggggtctatatyctggaggcccagtacttcccagaagttatgaatttttaaaaatgaaattctcaatgttgacaacaaattcctttcattaaacacttcagactcctacactgagctgccaaacaggacaagcaggacatatctgtgggacaaatttagtccatgagctgacaatgtgattcctctggtctatttattcctttcattccactgataagaaagtttatgccaagagagctctgcccatatccacattcctcttctccta

SEQ ID NO: 21583 - DNA, 600 bp, Bovine  MMBT09763
cggcagattgcagtcgcaggctgatgctcctggcagtcacaaacaccctgggtccatagaggccaaattatggcccctcacctgtctccatatttattgatgaggtgagatgggtgcagagcggggaggaaggacctgcagcgttaccactccgcccagggaaatctggaccctaattctgtgattcattcaacaagaaatgtttattgagcacccactgccagtgtgccaggaaccaaccacgggactcctggtccagtgctcttcatgatgccagttgcctctctgctgtgtgtgcakttcaggctgagacccaactcaggagagctggaatcttctccaggagactgtccccactgggtggggaggacactgggaggagggcaggccttcagcagctgcartaccaccatcctgtggtccagagacccagagagraggcaggaggggtctggggagcagtgctcacaggtgggacaggatggggcctggtcagctctgtccattttccatgtttaataaatagttcttgttggacccaggcttcccaagctcttgaggggtgcaggggggcgtcttctcatggtaattcaggttctg

SEQ ID NO: 21584 - DNA, 600 bp, Bovine  MMBT08486
agggtttggacacttacctaaggtatactcacatttttttccctccagggtccatttatttattcatcaaacagatattagttgagggcctactatgtgtcaggcactatggccctcatggtgagcatggcaattaacggtcacacctgaatcaggtgtgaaatgcccgctgtgataagcatggacagtgtacattgtggagacagggcatgtacagtagagcccattacacagtatctgaattgtcacagtgatcagaggaggcttccctggtggactgaggtctaaaagatgaggtcrtggtggtggaggtagtggggstggtcaggagagaatrttgagaatgttccagacgaaatgagataagtctgcctggctctgtggaaggagagagcrtgcagctttcaagataggtaagcaccagtgcgcgaggcaacctggctcttggagagrtcccctcctggatgtactggggccaggaattccctgttcagacctcgtcttggctccattccacagacaacctccctttgcagaaacaaagygtgctgcagggctatcattttagcccmagccagaaagtcagaggaagctgtgtgg

SEQ ID NO: 21585 - DNA, 582 bp, Bovine  MMBT03138
cagtcttcccaagtataatattttctcagattcctgaatagctactgatgatgtgtaataaaacaactgctaatacatctgggtttgagtgagatatcaggaaaacaaaactatcaaggtgacctacaaaaactcacttcccatctgtctccattcctcttcctctaaaacaatatgtagggcaccttggtatggcctcaaaaaagatagggaagagggatgaatgacttttttaaagagtcattcactttaacttcccatactgtataatcctatgttgggggcttttgtgcaattatmatttttacagctagtaatatacacattgtacaaaacttaaaagattttaaaagatctacagaagaagtctccctcccattcatttcacttaatcctccagtgtcttatcccgggatgggggcaatggggcaggcatggatggtgctaagcagtgttttaggtcctggggacagagaagcaaacctaacaaagtccctggcctcaatgagcttacattctagtgtggagagacacaaaatagggtcctgggaagtcctatgagaaaaataaaatagcctgagg

SEQ ID NO: 21586 - DNA, 600 bp, Bovine  MMBT04473
atcagccagggttggcttggcagctagtgaaaatgaaggtggaggtgggaggaggagcgtgatgtgggaagagagatgcaaagacttggagtgaatcactgtctttatcaactaccacatgtatcaaagggaaagtctcgtgtacagagcagattacatttgctgctaacttcaggcagggcttctgacaagccgaggaaaggattactcttttttatggaaattcaatctagtttgatgctggaagttatggattcatctaaaatagcaagtgacaggcacagcaacacatcagacacygctcaggcaaacagtggagtctagagcccacccatttctgcaggagcccttgatggtcagtgctcttgctgttgccatggaagtggtggggaatcattaataattttacagatacttcagggtaggggccaggaaacagcctcttcaaactgtgtgttgtagactcttcatggttaattcagaccagcatacacagcaatagattcrcaggatctttgcacagagcctggggaatggaagggttttctcacacctatggccttgggaatgcagttctccattcttttgcaagtctgggga

SEQ ID NO: 21587 - DNA, 600 bp, Bovine  MMBT05675
gagtgtccatattcagattcatggccaatttctacacattgtatcttacatttttttcccctttgaaatcagttgtattttactctacagccatttgttcagaagctttctgggaaagtgatagagttgaacttgtaggttgaaccacagaagacagaaattggccaggaaggactgaataagcccagggcacagacaggccttggtgtacgcctgtcatgaacagcctgctggggacaaaagaaatgtggtggggagagaggctatgggagaagctggaggaaaatcataaagcagagmtgcttcyacccctykaagggcccaggccactctgagttacagcacttacatcgacatgcagccaaaggttgtatttctcacatatatctgcaatctcctgtatcggatcaaaagctccataaacagtggtgccagcagttgcattgacgtagagagggacgtaaccctataagaaggacaggctgattagtctttctaacctcccctcctttccacacaacgaactgcagtagcattcatttccaacagagatcagctaagctggtgtgtatctgatactatatgtgggactactctccg

SEQ ID NO: 21588 - DNA, 600 bp, Bovine  MMBT00708
gaagaaatgtttgtgattgttatagtcatatcacctgagtgacttttacagtaacttcaatccagggagttacctgaagacccatcacttaaatgtggcttttttaagaagtgggaacttttgtatcatcaggataaaaggaagcacagtgcttaaagaacagactctatccctgactctataagtctatttgtatgctttcaaaaggaaattctcttgggcagataagaagttggcagactgaaaggtaatacataaatttccatgctcaacagtcaggacttgagcaggcttgtctgygatgcggcccataccatccagagctttcccctagcctctcagttcctgtatattactcatggctctgagcaacagatcagggcagtgcttattgttcagggtacaaattcatcatctgaggaggccgttctgaatggaaatctgcccccttctatcctccactctctctcctcctcaagatgcctcacagaatctgaggaggttgggaagcagcagaggcaggagcagttagcactgcattctgtgaccctctgaggcttcttactggacaagggatgctgtgttccctgttctgagtat

SEQ ID NO: 21589 - DNA, 600 bp, Bovine  MMBT04654
gacgctactctagaccttcagagagcaggccctgctggttggtcctactggtgtgcagtgtggtagtcagcacccttcacaaccagtccctttatctttaccacagtgaagactaagaggccatttgttgtccttgtagacatcagtgaagactgaggaagcagcgccgctccttgtctcagaggaatggccagttccgagtctggctcaggaggaggctacagacgtcagtctcatgggtgaggacaggcctctgactggtgtccacctttcccgtcattaaccctgactcagccatcrtgaacccacatttcctacacacacttctttccccttcttctgggctcgatctccacacttctctcagcctgtcattttgtatccctcacaatcacagtaccttctattactagacactcagcctactgattcttgctgttctctgatcatccctctgtattgcctgattccctcaatgtctcctcctttgctcctttttttccccctttgcaagggtcccatataatttgtcattttcacacatcccttaatatctggaaattccacaaacacctctgccttattccttcttcacatcag

SEQ ID NO: 21590 - DNA, 600 bp, Bovine  MMBT09496
tctgaaaactccaagcacactccacactagatacttctgtttctgccagaccttgtccacctcagggcctttgctcttgtgctgtgctctgcctgcaacaatcycctgtcyggctcccacatcactagccatctcattaatcgtgtctcagttcaaatgctcactctctaccttaggagggttcccctgagcaatctgtgctaattcatcacccctcctcaccrcagccattctgttacctttctctattgtacacaataacagacacccctcactttctacaactatcctatttatacygttyttaaaaattaacttataaactaccttctcccattgaagattgaaactctccaaaaccagggatctcttgttcactgctatatcccagatgcctagaaaaataactggactcagagactttatcacacaaatgcacaaatggattgtttctactgctgtttagccccatgaagtggtgggtttctaacacttgagcatatcagagcagactgagtgagtttgtatcagagatggatttctgcattgcatggggagcacttcccagagctcccggatgcaaggaacctgtgatgtgcc

SEQ ID NO: 21591 - DNA, 600 bp, Bovine  MMBT11115
acttttgatatatattacctttataaaccatacttcattatcaaaagaaagaaacaaatgaaaaaataaactcattttcaaaaaagcttccaatatatatccaaggattggtaaagatttagtacaagctcctattttttttctttaatgacacttacagtatagtagagtaagtattcaaggtcagagtaattgctttcagaccataccagaccctcgcacatcagagtcaattatgttcactctactctattgaaagcaggaaattgggagtaatttatttctaacaacaaagggtgrsaaagttgaaagcatccagaggaaagcaatcaggatggtatatgatttaaaaaccatgtcacagaagaaatgatgaaaagaactgcagtgttctatcccagasaagtcgtatagcagcgtaatagytatctcaatatatttgaaaggctatccctcacragcttcccacagagtgggaaagggtataasaggctgtggtagatttattctaaagttctttgaggcagaataaagaaaaatgtttatcagtcaaggagggcaaatttagatcaacacaaaaaacaattttctgtgaattaa

SEQ ID NO: 21592 - DNA, 600 bp, Bovine  MMBT09151
aaaaagaaataagtattctactccattacttgtttattagaagaaagcctccctctatgccccagaaatgatgtgtttatagccttttgacatagggtggtccattaatatccatcaatgggtgggttacagaaaacattagaatcaaagtagaggaaaagcaccattctccaagtctaaccttcatggctagatgaggcacacccaaatataagtgcaattaaaataacattctaaaaaataaacatatatttattagggtatattagaaaatcttctaacaagaagcagaatctgaaytcatacattttatgtgggggagtaaaacaaaacaaagccctatttaaccctctatcagttagataaaatccatcatttatattttttaaaatctctgacaatgaaaactaaatggcatattactctgtaccattaaaataattatgaactaaaatataaaatgagtactgacaggtgacatcccagtataccttcataggattttcaaagtttgtgttcaagctctaaaacgtaacacttctaaacaaagtgtctttggacatgcccccatggcacactacctttccttgtgaaccagag

SEQ ID NO: 21593 - DNA, 600 bp, Bovine  MMBT10290
ggctcacagtccacagtgaagctgttggtatcattgttgtactccacagggcagacaaaacatctgtacccagacatcacataggacagctgaggatgagaacagacagacaaaggagacaagttccagccatcttgcctgggcagtagccacctgcttaggccatgctcctcacagtacctagcaccctaattgcaagctatgcactaactcagaggttcatgtttcaccgtatgtgttattttacctgaattctggaaaaaactgaaaaggagacttacgggctactgaggcctcacmtgtacttgctcaaacaaccaggtcctgaataaatccaggaaagacctaaaggaatctgagcaataactataagaagttttgtcctatttggagaacctatggttcatttttctcaggatctcttcattygaaattacaagtggtgaggggaacagtayagtragagggcgacaaccaagaggaaagaagcagaagaccactaaataggcgagtgagtcctgaaggacagctagacaactctgaaaaggggagagactracttgaaggtcagaagcagggaatggtgcyctaraaaggggt

SEQ ID NO: 21594 - DNA, 600 bp, Bovine  MMBT05677
atccaaagactactgcttaaaataaaaatctgaaaaaaattaagtaaaattccatgacttagaaaatcaggtgccatttgagatcctttaattagagatgtgaccatttggaaatcagttctgttgatagaattcatatagaaatagtaataaaactatttccatgtgcatttttattcctttagaagagtgtgtacttaaaaatagtgctcctctgccctcttggggaatgtattcttagtcatgaaatatagtttaaatgtatcaagaattttaatttatctagacaaaacttttgtkgaggaaaactatctctcatgaaagggaattcaattaagagaacagtcacaggatgaaattccttgagagagatctctctcttaactctaaaccacacctgaaacatgaactgtaacacaataattttcaagttcataaactcctttatatgtctctctcctcctccccaaatattccatatgaagggcttcaaatcccaaatgtgctcagacttaaataagtgagctgctgtcttagagagtttttagttagaaaaaatcagaacagaagagctaatactcgggagagttctctttagca

SEQ ID NO: 21595 - DNA, 600 bp, Bovine  MMBT11666
aacagtcaaaggctttagcgtagttaatgaagcggatgtttttctggaattttcttgctttttctatgatccaacagatgttggcaatttgatctctggttcctgtgccttttctaaatccaggttgtacatctggaagttcttggtcacatactgttgaagcaatataatttggtactttaagtgaaagtgtctatagtcagaagctggattaagaagtgactgaaatttgttggaaagatctatggaggaagttgaagcaatgagtttgaatgtggtcatttaagaatagacaaaggracaaaaaccaaaaaccatagatgaccagccacgttgagggagctactaaatgaaaaaaggaaaaagcagtcaaacaatttgggagaaaaataaggaaagagccatttcactgatgccaaactagtcagaggaaacgcagttttcatatggtttacacttgagaagctcagcatctttgaacactgttgaaaaaccatccaaatacaacattcgttcagacccgtcagttgcacccgccatctagacagatggcagctgattggcccaataaaaaattatggtccaaagggtcctagaacc

SEQ ID NO: 21596 - DNA, 600 bp, Bovine  MMBT03661
atgggattccccaggcaagaatactggagtggggtgccatgtcctcctccaggggatctttctgacccagggattgaacctgggtctcctcccattgccaggagggttctttaccaccagggccacctgggaagcccctctataacccacccatgtcttagaggaagagctgctctgaagaagagtgtctagaacttatcttcagagtccttcctcaagcccacctttctgagttcttcagaatctagtgctgggaaggacccactgatggcgtgggaacatcaccaaatgtgttgtcarggtacctgatataaatcccagattcagcaggtcttgtcttcaaaggactttaatttcctcttctacaaatgggagaggacaatacacatcaccctggattgcttgaaggatgaaatccagttgaagaatatggaagttttcatatttgaagttaggtaattacatggttagctgattggtctttatctgcttattgaaagccacaaatcatagtagatttaaatatggatataaactgatataaatatggatagatatagatttaaatatattctcctcagagagcttaaaacataccca

SEQ ID NO: 21597 - DNA, 600 bp, Bovine  MMBT12854
agatttatagcttgaaaagtgccaaaaaatcaagaatttaaatcctccctgatttatgtctagcttgttagaggctctagggctttagaaatgctaaatgtttgagtgatgctctgaaggttgagctatattcctctttcagctgattattattaacaatggttgcctctaaagctttagtagctctcagctgtaacctttacacttggtacattcctgctttgtgaggggttrtaaattccatgatttaaaaaaaattaggaacatttttgaatttttgtagccaacagttccgagatyggttacctgggagatggagggttaagcatcctttatctctgctcacatatctgagctactttcctgttgaatgctgcaagtgtgtaatgagtgtttactaaagaacaattctttacccaagaagagaccatgataagcacagtcatttgttgtctgtatttgttgttgcttattatggatccaggagcatttggtgttgaaaaccaaacctgcatcccccacatggttactktaaatgatttaaatcaattccttttacacagcatcaggaagtgcaatatgtagtaactaaatatgcca

SEQ ID NO: 21598 - DNA, 600 bp, Bovine  MMBT14242
atcctcacgaagggaaggcaggaggtcaaggaaaagaggaggatccgcggtgcttgctttgaagatggaagacggcgtcttgggcctgtggaaggtggaaatggtaaggaagcgggttgtcactgtactgtggaaggagcacagcactgtggaccaaacatctgccctttggagccataaaacactaacgcgtctttttatgccgccaaatttgtgatcatcggtaacagcagccattggaaatgaacctccacatcatgatactcttatctgtattcagaaaggaggaacctgaagcayagagaggctaagtcacttgcccgagatcacacagcttactagtggggaaagtgcagatctgaaccctggcagtccttctctggaayctgcccttttagccactgtttaccacatgggatacatakgctgtctgtctggggtttgctttgattttgcttacaatttcttaggtagtagatttttccagcctttaaaggctttcakagtttggaaaatttaaaacatatgtgaaagagaatgatgtaatgaactcctcaacacctgtggccaaacttatttcgtctatactccctctccttg

SEQ ID NO: 21599 - DNA, 600 bp, Bovine  MMBT10939
cagcttatccacctagttgccaagtcactttaagttcctcttagtttttcatctcccttgctcccagtctgctcagtcaccaaattcttttacaagataatactttctaaaaaatctccctctctccctatctctgctgtcttagattaggccctgcattcttagtgcctgaataacctcagtggccttcttatctgaccttcccgaacctctgtagtctagaccagtcatgctaaaatagaaatctgatgtcaagcccctgcttataggctttctatggcttcatttgctttcaggatwaagtctaaactcccttccccaacatgcaaggtctttcgtgattcagctcctgccagtctttcacacctcaactcttgacacttgatatcccagccatcctgaactatttatgattccctgaatgggctatgttttctcactcttccgtgactggatatgtactgctagtcctcatacctgggaaaccattttctctgactttgttacttgcttagatgacacctctggaaagactttcctaatgtcccactccctttgccaagtggactgagagctacttgaaggagggaccttgttttc

SEQ ID NO: 21600 - DNA, 600 bp, Bovine  MMBT08076
aaactctacctcacttaaacaataagcttccacttggattgaacctatcattgatgattatatttgctccccatgttttttttctctcattggcctataacaatttaagaatttagttcataactcctctgcagcacataattttcatacaaacaaatgagggtcttaatggattgacttttctatgaaaccaaagttgtttttctatgaaatgtcttttaattttgaattatcattccataaaaagaagtttgactctggtaaaagcattaagcatgagtttaattgaatgggctattygaacatgagcttgaacacatagctatttgggctatttgaacacagctctgcctgcagtggcaatggtgagcagaggtaattttcagacttggcaattaactctaatatttagggacatggaattttaaacctatgcagggacactgaaaaggatgtatctctgtgaaaggactagaaaaaacttccccactgtctcagggagactcaaagggaattgtcaatgcctaggtctttaggttggataaggcaatggcatcccactccagtactcttgtctggaaaatcccatggatggaggag

SEQ ID NO: 21601 - DNA, 598 bp, Bovine  MMBT09825
  misc_feature (1)..(79): n is a, c, g, or t
nnnnnnnnnnnnnnnnnnnnnnnnnnnnnnnnnnnnnnnnnnnnnnnnnnnnnnnnnnnnnnnnnnnnnnnnnnnnnnnccaaatttttgtagtgaatctcaaaaaggcttcctacataattagtgggagacaatgatggaagtcactcctggcatgggattttaaattcctggtcttgtgtgttttctccaaatggagcagtctcttcacacagctctaataagaggtgttttattcacattatttatatgggtatctttaactttgtattccagatagtraggaaaaatttctacacrggaaaaatatgtttacaagataactatattataaaaagctagtttcattgtgtgtttgatgtcatgtaattaagtcaataacaaatgaaaaacttttttttggtagtcggattgcaaattcactttctcagatcaaactttatgaatcagtttgctcaattttaaagtaaataaatgcacctgggtttctattgcagcaagagagatttactcaacaagctcaacatagatgtatttgtactggatgaaatttacatattaatcaagttctaattgccttttttagccaattgtatgc

SEQ ID NO: 21602 - DNA, 600 bp, Bovine  MMBT05721
gaggaaaagggatgtactttgtttgcaatattgagtctgtttctctatagttttgtttcctgttctcattcttgaccgtcaggactctgagtacaaaaccatacgtatttgtgatataacagtacattacaataaaactatagagagagctcaatattgtaaaatgttaatwtagcgttttctcacaggagaaaccatcccatcaggtgatactgggctgagttcaggaggtcctgtgaagggagaagtcaagcagagccaggaccccgcctggcccaggactacacacaggtaactccractcagtcactgagactcagggcgctcacttagcccttcasagctcacctcacccctgccttaaagagcaacacgtgacccagtgttcaggttgtcctgagccttggacacgattttccattctctgctaagtgtgttgtccagaactaacctgtgtccccagttgaacttggggataagaactccaattgccaatgctgtgcttacatgaaatctgaaataatgaaatccttctttgcaacatgtgctccttagggaaattgttcttattgattcttattttatggaaattgttcttat

SEQ ID NO: 21603 - DNA, 600 bp, Bovine  MMBT08786
gaaaaaaaaaatcaactagccaaaatagactcaaagcatgctaatgttgccactaatatccaagagatatattcttcaccagaaaaaccacttaatggggaagaagggacaatgttagatgtaaaaataacctcagagtgtatactctaccttacacacgtcgacagctctgctctgagatagataaaaagcaggctcagcttcttaaagttcctcccagccctcccaaggcctagagtrctttaaaaagagggtayrtctgataaatagtgtttgaaacaattaccaagtaaaacttargcagtaagaaaatgtggctttgccccagagccagagaataataaaatacacgaaggtatcagtgataaaayggggtattcattcataacagccaatatctctatgctagatgttaccctaagagcatatttaaatttggtacaagcttaggaggcaagtcttattttatccttgtttaagggaaaacamtgaggcatgagggacatgtttggagcaaacactttgctccaaagtktgctccaaactcacaacactaaatagaagtctggcttctagccgaggttgtctggtttcagtacc

SEQ ID NO: 21604 - DNA, 600 bp, Bovine  MMBT01246
catgcagtgactcatcagaaagtctagaatgtggaagctggcctggacagtgtattctttcctccttgttggacagactgggaaatggagatggaaactctgggtggcttgccaaaggtcaacgtagagatagaattagaatcaaggtcctctgagtcccagatggttctcttttcactccatgtgctgcctcctctttggggatttccttaagagcaaataattcaaaagcaaaatggtagagaagagaaacacttgggacatgacccaatgatgagcacaaagcatgattttggggawaagattgacttggaattgaatctctgatctgccatgaagacttctccaagcctccgtttcctcctctgtaaaatgggggcaataaaggctacctttcaaagtcatattacagattagggaaataatatgcagaaagaactcaggggagtacggctggtgatcggcacatacatttcccttgtccctagggctgtgactcaaccctttgcagggagcttggaccagatttgtcttggctgttgccagttaaaggatccctgggtgaggctgtgtgagatgagtgctgtgagttcttacgga

SEQ ID NO: 21605 - DNA, 598 bp, Bovine  MMBT06727
  misc_feature (1)..(220): n is a, c, g, or t
nnnnnnnnnnnnnnnnnnnnnnnnnnnnnnnnnnnnnnnnnnnnnnnnnnnnnnnnnnnnnnnnnnnnnnnnnnnnnnnnnnnnnnnnnnnnnnnnnnnnnnnnnnnnnnnnnnnnnnnnnnnnnnnnnnnnnnnnnnnnnnnnnnnnnnnnnnnnnnnnnnnnnnnnnnnnnnnnnnnnnnnnnnnnnnnnnnnnnnnnnnnnnnnnnnnnnnnnnnnncacacaacatatgccgctttactaaaatgtacatccgatgctaaacgtgtcacaaatagagtgaacagatgcagctctgytttttcagcatgagatcatacctggccaacactggaagttttgtaatccttgtctggggggaaacaacagaactattgatgaacagtgcagttctaaaacattattgaattgcactrtcattaaagtagtagwgagtatgatgtcttcacctgacctgacatccagtatagcactgttacaccattttatatttcagttgtgctttagagagtttcttaactcagtgtgtagattagtttatttcatgaacctgctaaatggcattttgacgtcctggggaaatgattcctccacaag

SEQ ID NO: 21606 - DNA, 600 bp, Bovine  MMBT02847
tccaaatacttttatgcatgttcatttctgcaactgttttctgagcttatctgtttagtaatatcttactaaaagtaaaactcaaaatacagtattactttgactcttttcaactatttcytcctattgagactctactgggtcacaatctcaataggtggataatatgcttttaaattatcatgggtaactgtttaaacacctcttttgccactgcaaaacatgggtgtccttccgttctctgatgccagtatctctaacatctgctacatcaccaaggcaatgtaacatattttaggktactgttttagcagtactccacttccagtaccaatttctgggttagtcatggtcattcaagctytggaacatctgaattctcaaatctcaattttctctcatacaagaagtccaaaaaggagtgtttctaatttggaaatatctatattccaagtagtaatttagccactcatgatctttctctggctctggcatcttcaacatactcactagcttcaagttgatggagaaagagtgaggatgcaaggacttcattaagcctggaaatgagcacatcacttccacttacatttcacaggc

SEQ ID NO: 21607 - DNA, 600 bp, Bovine  MMBT00868
agaaataagaaaaactctctagaatatggaaatttctggaatttcagaaacatggaaaactgtctactatggtggctgaagtctgaatttgttacagatcttccttcagaaaataatattttaattatttgggtctaccctgtagttatgttctcaacattaacaaaaacaatcattaggtttaaactaacattttyagactttkagctgccaccataaaactgtttctaatcacaggccaagctaatcttatatttaaaggaaaaaaatgatcacttctagttagcatattcagtgtcmgaaatgatactataggaaagtaacagttttccaaaaaattaaatatgaccaaaggcatcctttcatggctgaaaaacttccactccccactgcyttccacccacacgtgacttaggaagcagcaggcaagcaagacacttgggaataccatttttggaaagccaagtcaaagccgtggtttcgtccttttctttgcttttcttttgggtcagaatgagtgcaatcattgtcagggtttttcctaaccccatatcatccgctggaaaatgaaaacaaaaataagagaggtaattactttgg

SEQ ID NO: 21608 - DNA, 601 bp, Bovine  MMBT05705
  misc_feature (1)..(1): n is a, c, g, or t
nttaaatgattagaaattcccagttaattactaggaaggaaaataatttaattatagttcagcttttacgtgggttactggagtgaatgttaagaaggaccctttcaatcacttttccattaaaataaaacaggcacactgagagatgtaattctccttttttttttttaccctttccaaattatatcatttaaattgtgttcaatgtctcagttgcttatacaaacaactgtgagcattgtaattgacttgtgagacaaaagctcaacttatgcatatggtgagaaacactggggatttmtaagtaaatattcaggttaaaatttatagacatcttgatatcctggttatattgccttagctgagagtacttgaggacttataatggactttggtcattctgaaggggtctttaagaaactgcctgctctgtatctaccaggataatcacaacacagcaccaacagttaaattttgtttagaatagcaaatacattttattaaacctagatatgaggcaagtcaacaaaatctcttaaaaaaaatcttaccgtgcatttatttcataatgtttaaagaataaaatgggaaaataaaggta

SEQ ID NO: 21609 - DNA, 600 bp, Bovine  MMBT13758
tttagttcagtcatactatgattgtggtggcattagatgatgctggttgagagatgcaaagaaaaattaagtagaatgaggttagcaatttatttttaccttctcccagttaaaaattcccaatacattcaaatcaacaataattgcaaaactgtctcctgaagtagaagtagattttactcccaagtcttagcacttgttgtatttcaaagtcagccactaagccttttaaagcttgttggtgactagctgttgcagcagaaatcagaatattaatcttgaggctttatttcagagttygtggccaataatgaggtgtcatcaggtcagaagactttcagctgtgccatttctcaaggttggggacggagggagggcaggggacacctctagaattaggaccacatgccctacattccttgataagaaggtcctgaggaacacagacattagttttcactgtgagattaaatataacataagttgaaattactcttgagttattttataactgaacttgctgtgaagtttaccgtctgaagtttccattggtactcacatcttaaaacagggttttcccagacagcttacatcattcct

SEQ ID NO: 21610 - DNA, 600 bp, Bovine  MMBT06430
taaaaccacaggatatggatagtaataaaactggaattattctactggcaaagtccataaaagtaaccaataatttcaaaatcaaacagaaaaacatatccagggtctgatactgaacaatattagcagtaatattttccccaagttcacattaatttcctctctccatttctgatatatggctcatatttgaaaacccgcgtgtcatttgcttactccccaggttgggaatgctgggaaactttctcacattatgctagagtcattgtcttaattctcctccctcttaattgattaatragtgaggagtgaaggaaacaatgttagagaaatttcattaggtataaattgcaagacatttgtttgaatgaatataatatctcagctctgtcttgatgggccttgtgggaatgctttaagtattactgtaagtgccagaccaagcactgaacaatttaatggtgccattcgagcatggccttgtattcggtttttgtttcaaaacgttcttggggaaaacttcactgcctgataatagggaaccaaagaattctttcaagtttatgtgttgccaataatatttctgaagggagtcattta

SEQ ID NO: 21611 - DNA, 600 bp, Bovine  MMBT07407
tttgtagatggaggactgggatgatttggaatacaaaccacagaagtacttcactgttgagtcctcagctggaggtagctatcctgagcgctggccacagggaacctcccccagtttctagctggattccaatggttcctccctgatgccggggttggatgactttcctgccactcagccaaagatatggcctgtccttttcatcatctgttgctcttaatttttctaactgacatctgtgcccatggaatggataatgagagatgtctatacatccatgtgtttatcaaagatcatccytcacccaccttgggaccttgtttaaattgtccatgtctcattcaagttaagcttctcagagacagaatgtgcagtgtctttgtcaagttttaccaacagaccaacgagggaaagccaatccatgactctctctgtaaagatagcttgctgttgtgctatgctcagtcctgtccgactctttgcaaccccaatggactgtagcttgccaggctcccctgcccatgcacttgtccaggcaagaatactggagtgggttgctatttctttctccaggggatcttcccacagcagggactgaac

SEQ ID NO: 21612 - DNA, 600 bp, Bovine  MMBT10056
acctgttagcataaccataagctcctagaacttaaaaaaaaaaatagaactttttcctttttctcacacattgcccaagttacccaacacacacccagacagtaaataattatcaacaaatagatttatgcacttgggtggagaatccagggaagaaagaatgatggaagggaggctctttaattgcgcgagtattttttatacacaggcttttttgtttggcttggttttcccaataaatcatttacattattgaaaattcaaatcagtcctttcaggacctgtttgctgggcaggaargggcatcaacggtcaaccctctggctggtggtgcagcagtcagtcacaatgaagccgcttggccgggaacacagtgtcccgtcctgagattcaaaagtgctccawctggattagggagggaagcgccgcagcggcggccgtgagcgggggctccctggaaccggtccactgagtgatgccgccatctagtgaccgccctcgggatcgcggctgggcagggccctgtccgcgcaggcgaaggagcctcagaattgcagtcctgtctttagaaactgtgggtgggactcggagtgaggggcg

SEQ ID NO: 21613 - DNA, 600 bp, Bovine  MMBT03676
aactctttgtgaccccatggactatatgaaccgcacagtccatggaattctccaggccagaatactggggtggataaactttcctttctcaagggaatcttcccaacccagggattgaacccaggtctcccacactgcaggccaattctttgccagctgagccaccagagaagcccaagaatactggagtgggtagcttatttcttctccagtgaatcttcccaacccaggaattgaaccagggtctaccagtgtcactggtctgtgaaaattctgaaattcagcagggcattttttcayaattccttgattgggagttaagttttggtaataattctctggctactgacttcaccctctgggctcacgtttttgccctctgaggcatcattcccttcccaaaaaggtttacagttcaatagctttctcagacttcttcctgcctataaagtttggggtccttttcttcattttatattatttttctctttttcagctcaagcaggagatggttttgccaatacagtactattctcttaaaactttttcaataatctataaatattattgatagtcattatattagtcaaaaccatgccc

SEQ ID NO: 21614 - DNA, 600 bp, Bovine  MMBT07901
gcagctggacatagatgcacggctagggggttgtccagaatttcatttagcgacgaagtttgggccaaggctgggaccgaggtccctgggtcttgcctgcactcttctgcctgcctcaggctccccatatgtccttcccccacactggaaccagcccgcacgcaccctacacgtgcttggaatctccgctttggatttgccttaagctccttttgctacaaggttgggatgttttagagcttcctaagtgtacatcagctcctcccattaccacccccaacgagctcctcggtgcccccygagcgcagcgtccagagctacatccatcacggacactgggctgtcagcgtggccacgtgcccctctcaaaggcccgaatccagaatgaatttatcccagggggaaccttgttatgcttttatgtcttcaattcattagattctctgtcagcagcataaatcagggccggaccctcttctcacacactcgggaatggggaagacacgcagagaagagagaaaatgcgcagggggcttgggtgtgctggacagtggcttccccacccccgtatttattcctttgtttttttttttttagcca

SEQ ID NO: 21615 - DNA, 598 bp, Bovine  MMBT10761
  misc_feature (1)..(66): n is a, c, g, or t
nnnnnnnnnnnnnnnnnnnnnnnnnnnnnnnnnnnnnnnnnnnnnnnnnnnnnnnnnnnnnnnnnntgccagttcagttgttagtcagcagtatgaccttgggcaactcccttccttctttcctggggccttactttttcatctattaaatggggcaatcaatatagtggaatagataacaataacaataataaaactttccactaaaaaatccctagaaaagctggataaaataaatgtttgcattgctgatctttcaagaaaacaaaacattatgaatatagggttcccaaatgaagmaaaacttggggaaaagagtgataaatggatagagaagccataattcccatggggacatttgccaatcacagtattcaagagccttgagcttttaaaacataatagaaatatgagatgaaaccttaggtgtatatagggtagggatttatctgggaccttcaaaggactacatcctcaataaaattataaactaaaaaatatatccacaggcaaagggaaacaataagaaaatatgtctgcctcacttttggtagaaaaaattaggaaaagcctccactaagaatgtataaccccaaac

SEQ ID NO: 21616 - DNA, 598 bp, Bovine  MMBT04497
  misc_feature (1)..(8): n is a, c, g, or t
nnnnnnnntaactcaagagagcatataagaaccaaacaagtggtcagatgtagattttgagttcaaaggagaaaacaagtcaaagttagtatttcttttcaagtgctttcttaagtgttttaccagtcctctctcatttaatccttaaaatgcaactctgtaaaatagttattattatgcccactttacagatgcaaacatgtcaatagttttgagtgatgtgcacaagataatacagctgcaaagtggtcaaacttaggcaatgactccaactattgtaccccagtgtgggaaggatarcaaaactttggttagaatatgagaggtgcactaggacataaagcatgcatagtatttccagttattagaaagagaaggagtatcatggacaaagagtgaacatattgtaggcatcaggaaaaacatgacattgcagcgacagcaacgtgatgagtccatgtaaagcagtgttagaaaattaagatggaacgttaggaagggatcaaaaccaaggtcaagtgctgggctttctattgtaggcagtgggagataatacaactgtctgggtacaggaggagtagatagaaaacagactttt

SEQ ID NO: 21617 - DNA, 600 bp, Bovine  MMBT05803
cagcactaagggccctcagcactctgaccccggcccgcccccacatcggcacccacaactccatttgtgacccccaaactaagtgcagcttcaccactcagtcttctctcagggccacagatagggtggtcactaggtgaaattctgaatattattgattcttcctttttcttcagattctaatatggctcacgacaataatggcattattactgatcctttatctaaaattttaatattttgtctatcatgaaatttttcactgtgatttttttaaagacactattaagatatcatttrtttctgaatttcatggcagctccttaaattgtacatctgaagtaggtgcctggctggcctcacccaagtcccagccctactcctcctgcctcatcttttctgtgcttccctttttactccacatgcacttgccaactctcccatttcccaggtctggtcctcttctccacaaagttctcaggctgtctccctagaaggggtcctctctcctatggcaccaagctggtcacgctttcctggcacaaactgaatgttgcctcagacacctgaccaaatgctcccactggacaccctgaagtt

SEQ ID NO: 21618 - DNA, 600 bp, Bovine  MMBT02995
aagccccaccagatcagagggctaacggaataccttacaacttcttattgcaccaagggaagccataacaacctaaggggttgctgagatataacacacttgacttcccaattctcttgtgatcacgactgattcagaagggagtagagagggcatgaccaaggacccaactaccaagcgatatacaattcatcaaaacacaccgtaccacatggcaggggcaaaaggaaagagaaacttcttaattttcttgaaataaaagctccactcagaaaagctccaggtttcagtcccaatccraagatgcagaaaggaagtgaccaggcagcaaaccaaaggagccagatttagtacccaaggaccagcaagaacgtgatcagagagggatgggccgggggctgccacaaaatgcrtccatcagcaagcagaagtcttgactgccactcgacctgtcaccctaaatgccaactagttggggccagcagaaacctagaatatcatttcttactccttgtgctttcaaatttattcctggccagatctgttgtatgacttttaataataacaataaaaaaaagcatccctggctctttaacccga

SEQ ID NO: 21619 - DNA, 600 bp, Bovine  MMBT05295
agttaataactgttgttggatcctgttgtgagattagagtttactgggagagtatttctagagaaaataggrtgctgaaaaaatagagaaaagaaagatacataaacacaaatctgagactctgtttaaagggatggactacagtgaagatgcccaggaccaggtgcagtgacactaggcaagaagactggacttaaatcgacttcctccggttcaaactctggctgcagacagcagggccgtcccatcttgggggctggcaaattcctgtcccctgtgttttcctatagtaagcaagcygagattgttttctacagtttttaaatggttgagggaaaaaactcaaaataggaataatatttcattgcatgtgaaattacttgaaattaaaatttcagtgtccatttttgttgttgttcagtcattaagtcatgtctgactctgcaaccccatggactgcagcatgccaggcttccctgtctaccaacagctcctggagtttgcccaaacccatgttcactgagtcggttcactgatgccatctaaccatctcctcctctgtcgcccccttctccttttgcattcagtctttcccagcat

SEQ ID NO: 21620 - DNA, 598 bp, Bovine  MMBT10506
  misc_feature (1)..(17): n is a, c, g, or t
nnnnnnnnnnnnnnnnnaaatgaatggtagaaggaaagcttcatggtatttagccggctccgatccctttaatgcctgtagcttttggatacagccctgcacccctctcccctgacctctctcccctagtttacactgcactcccctgtccactgactgctgcaaagtctgataaaagggctgaaattagaccttgtctcccagcacagccagcagggcccggctctgccaaaatggcagtggttgatagcaggcaaaaggcagaaaactgatttcccatctctcttctccattttctargatccaagtgagtcctagttcagagaagaatgactgtctcccggctgggagcagcaggtacgagctcctgcctacgctgtgtcacgtgggctgtgagacctccattccttctcgactcctgcctgcccactgaggtgagctcttyggggtttctctgactggtgggcaccggcctasagtcatttcttcgggaaggaggctctccctggaaaagctgatctgcaattcggctgggatcgatgccgtggagactgcataaattggtaagtcgtaagcagctagttttgtctcagctgac

SEQ ID NO: 21621 - DNA, 600 bp, Bovine  MMBT11568
gccaaggcctctctatgttgacttattagtgtcaccaaaaggaagtaaattgttggaaatacaaagaaaatagacttatagccctcatgtgaattattcatgctcagtagatatataacagtttctcttgaaatgtaaaaatctgtatatagagagatactcacatactgtcacactcaacactttaatattatttgcccataaaatatttcatactggtacaattatgaataattaagaaaatagaaactaggaatcttaagaaggaccaggctgtttctcactggtaagtaaaagaayttaaaagtaatctgtgcacttatctaatccatcactcacatcctcaacwgatatttctacaaggttttctcttrtgcttatttttctttctcatcctttaatatagaacagtcagtaaattaatagtaagaactgaaataaacattttcaatcaattaaaaaaatctttgttattaactaatttattattgatcatcttattccctcagttagaagacatttcaaagaaactttggaaaagacaatagcagtttttcatcaaactaacacaattcataagacctgatgattaaatcctgc

SEQ ID NO: 21622 - DNA, 600 bp, Bovine  MMBT11976
tttcaaacactttcaatgacaatgttacattgttgataccttatgtattttgaaaataatttttatctcttttcatttgaaacttctgtactgtatagtggggtccctagccctggtctggtttccagaaatttacttgcatgattctgggagtggctagtagggtgttctgtggaattggtatggctggatgcactgggatttgcagaagccacaccagagacacacagatcctcagcctggaagaaaccaagtttcagtttgatgaatttgccctggaccatctccagcacactttasgtactttatgtactattcctcagacactgtggtgatacaaataacatcttctgtatccaccctaaaatagctggagatactgcagctccttcttgggggctctgctggcaagtrgaggccaggtgccaagaccatcagctgcatcctagctgccccagctgggcctgagccctggrgtgctgtcacccagcctgtgcctggacwggagggagtcttcttcacccttctaggtctgaacaatcctttctggaaacagtgggactaaaccacagtaactgacaatttccctgggctctcttc

SEQ ID NO: 21623 - DNA, 600 bp, Bovine  MMBT10937
taaacaggataaattacaaagcagtagacgtttttttctttaaaggagtaatttagttaacattttgctgaacaatattgtaaagttaaataaaattaaaaacattttgctgaacaccaagactcatagatgaaaaattatttttgatctataaagcttttatggcaatatttacagaatctttggaaaggaaaaagaaagtctggcccccctcttaaccatcatcacagctttttttttttaacctagcattgtaatcagtgtactatattacttttgaattctacctttcccatctgytttgttctatgaattattcccagtagccacatagtcttcatacttaaaatttttcgtggccgtgtaacttacccatggtattttagatgctccaggtagttctgtgggcagaggggaaaagttgaattttgtttttagtggaaatttcatctgtcagctttttatcttgcaatcttgtacactacattttatcctgaagtaaaaaacattcttctaagctggctttgatcttttttttatgtggacagctatgtgaagacactgtgattaacacttccaattgctaatcatgagctatcc

SEQ ID NO: 21624 - DNA, 600 bp, Bovine  MMBT11592
gatgttctaagagatcaacgtataatactaggaaatggttgtagcaaagaagttaagacgttggagtttgagattgaatcttaactccactgtattctagcttcattgatcaagatctttcagccataagagatggcagttcaaggcaagctcgctgaagaaaaaaggggatatactatgttacataactggtaaggtcactgtgataatttacaggtcaatgaaccacagccccgggacccagaacttaagaccatccatctatttgtccatycttctctcatcactgtctctctgcaygttggcttcactcttactgtaacaaggtctctctatatatcaaggaatgtagccacagactgttycagctttgtaaacccagggttcacatagcccaggaagagccttgattggccccaccgggttcacgtactcagctgttgaccaatccctgtttccagggacgcagggtattataaacggccagcgtgggtaaggttcccagcctaccatcaaggatctctttccaagtggaggaagcaagttactgcagtcactacactcacccgtgaccttacaaacatgacttaacccccgctg

SEQ ID NO: 21625 - DNA, 600 bp, Bovine  MMBT13177
gtcacacttaaaattaaatctggggactgactttctgcagagtgccctgtactcagagatattaagagtctgcataaatgaagccatggaggccctctggctttcacagagtgcctcaagttggcaactggctgttctaagcctatcattttctctttcaaaacttccaatatcattaacaaaagccagcccaatccacagtccctataattatcattgtccccatatcgtataagcaatacagccactgcacatcctaaagtcttatcttccacctgcaccttatcccaattaaccacragggaaagycttagtaatcgtgatgtcatggcattcctgagctaatcaccatccctctcagcactagcaatgggatttttattgctgtgagaatggtcagtaatgcagttttcaatttatttccctaagggtccactttctggggccatttctgataccaactgttttagactaagttttttagaaacagagcctgaaacaaagtcttacgtgttaagactgtattcaagagtatgatcctagggagcaaaggtgagagcaaagggaagtaagacagagaaacagggaaagctgataagt

SEQ ID NO: 21626 - DNA, 600 bp, Bovine  MMBT10080
ctatcttttctttcttgctttatctctctctactttttgttactctcatgaaaacagtccacttcaagaaagcataggctgagaaaaaacagggtccagggagcatctggagaggtggagtctgtcactgtgatccttttctgctttctgaaaacacacgtgacgcagtgtttggatgaaaagcaggaaagagcttttcaccgtgcctgcgctgttacccttttcattctccagggtgttactttagcacttaactagagaaaatgtacacacatttatagaaagagcccagggctcctygcacccccatcaggcttcaccatttgatttacatttagtgaaataaattataaacttttatgaaagtcatccgagcaaagtaatggagagttctgaggaacagaaggaaaggaatcgatttcttaggtgggaaatacttgcctcctgggcctgtgaggaataagacacaaggccttccaggtgcagctggaaatgctgtggatgttttgggtgccagcctccagacaggtcttgtaaacgtccaaatctaggttacagttgatttccatttgtgaggacctcgttcatcatcatttcaag

SEQ ID NO: 21627 - DNA, 600 bp, Bovine  MMBT05105
tgttaccaatctcctttagtttaaatggtttaactttagaaatatttttggaaatgtactgttaccacaaaaatattggataggtcatcatgagtttgtttgaaataatgaaaaaactaacttatgccctgccactgcctggcatctggactgatttccagccctgtggccagtctccttgctggtgttaggaggtaaagggccttatccaggccacctgcagcgctctcagctgcagtgaccagcagctcgggggtcaggtgcacgccccgatgcatgaagctcttcttgaaaaggtarggtcggctgagatgtcaaactttgaaccttttctttgttttcggttttcatgtagtttttcatctctagcctctaaaaaatttgtgctaataaaagttttcatagatttatacaacattagagcagaaattaattttagagactcatctcaacactggatgttatagattataaatgtatgtataatcaccttaatatatttaatgttatacagtgatatttgatgaaagttttcattcatcttcctgtgaaaataaataatgagtataatcttttttcatcttattaatttgaacatcc

SEQ ID NO: 21628 - DNA, 600 bp, Bovine  MMBT10492
cctcatcacaaggctgctgagtgtcaaggctcagctccaggctgggctcgtgacaaccaaccaaggcctctttcaacaacactatgaaagatttatgaaaggctgggcaacactaaaatgagcttatgcaacacttcccccaatgcaaattaagaaactgatttgaggaacagaaacttggttaaggcttgcctacctgcaaacagcaccgcagagaaagttgaatacttaaaaaagaagaaaatggtctctcaggggactgggagcattatttctgctctgaataactgagaagttgcrtgtgaaagagcttctacccaaattgagaaacttcaaaatctgacgttaagtttctccagtgtcgttgtcattgttgtttagtcactaagtcatgtccgactcttagcgacccgtggactttagtcctctaatctcctctgtccttgggatttcctaggcagaaatactggagtggattgccatttctttctctaggggatcttcctgacccagggatcgtgtctcctgcattggcaggcaggttctttactgctgagccaccagggaagctcaagtttctcctgtagactacaaaataaa

SEQ ID NO: 21629 - DNA, 600 bp, Bovine  MMBT03382
ccagtaccggtgagtaattaggctctttctgctggtctggtagtaagggaaggggcaaagcttcattcaggggttggatttgctgtgcaacattaacttgtttgattactaagaagttttaaatattaaaaactgttaaaagtgcattttttctgtccagattacctgtctatggttccattcactaatttatcctacttgtaaagctagggctgagattagaagccagggagtgattccatttccaactctcttagtacaccctgttgtttattcttttccaagaagcacaacagagcmattaaaaatgatagcctttcaaggactgtgtcttggtctaagaggggtcactttacatcagtcttttgctagcacgtcaatcctatggaagaatatctgccctaaaactggcagtagaaattggggtaaagtgtaattgatttctcttttttcttccctttattcacaatacagaattaataggctttttctcctttttcgtgtttggtagtattgagtgaactggggagaaataaaaggaagctctgtaaagtaaataagtgagctcagaagcaattttctgacactatatagtaatga

SEQ ID NO: 21630 - DNA, 598 bp, Bovine  MMBT09407
  misc_feature (1)..(175): n is a, c, g, or t
nnnnnnnnnnnnnnnnnnnnnnnnnnnnnnnnnnnnnnnnnnnnnnnnnnnnnnnnnnnnnnnnnnnnnnnnnnnnnnnnnnnnnnnnnnnnnnnnnnnnnnnnnnnnnnnnnnnnnnnnnnnnnnnnnnnnnnnnnnnnnnnnnnnnnnnnnnnnnnnnnnnnnnnnnnnnnnntggagtaggaaagtgaaagggaaagatttctgttgaggaaggcaaagatggttcctttcacatgccagctgcaaatccttggtttcctagagcactgcatggaggacgatcctgaagatctgacygggacgggcgctgggattccttagcgatgtctgcacagtgcacagcctgagggcacagcatcacgggagtctgccttccgagtgcacgggctttactgacagatccagaaggaccaagacgtgggctttcccttctccttgtctacggcctttattttcacaagagaggcatttcacaagaaatttcttgcaagggcaagaaatatggagaagaaacattcaataaaatctcataggtcctaacaccaggctctaagtgctgttttgttttgctgatcaatagagtaaaatatggtct

SEQ ID NO: 21631 - DNA, 598 bp, Bovine  MMBT09908
  misc_feature (1)..(73): n is a, c, g, or t
nnnnnnnnnnnnnnnnnnnnnnnnnnnnnnnnnnnnnnnnnnnnnnnnnnnnnnnnnnnnnnnnnnnnnnnnnggtggaccgcggccctcgcgcagggcgtcaaagggtatgacccagagcagtgtctggctattatcacgtgaggtagcaccttaatttccagtgttaatcctaaagcttggccaacccaaaccagttagtgggactgtcacagatttcaaagaaccacaggtataacaagcaagcaaaggaaaagcacagaaggggaggcaggggcctgcctcctgacccctggggayggattagtagctagagctgaatctccatcgtcactgcaaagcaaggcaggcccagagagagagcacatggaatcaaaacgaaaaaaaacgggaagagacttttcataatcacttggaaatcagcaagaaagtggttttattggcattgggttttagaaggggaaaaactgaccccaagaatctgggtaatgaaggaaaacacatctaccaaggaagctgmaagtttctcacgatgagtctcgtgtttggcaaagataaggaatttgctttaatattattgccttgaaaagtcaaatgt

SEQ ID NO: 21632 - DNA, 598 bp, Bovine  MMBT05627
  misc_feature (1)..(34): n is a, c, g, or t
nnnnnnnnnnnnnnnnnnnnnnnnnnnnnnnnnnaaagcaactagatgctaatgtctatcccctccctccatggcaatgtatgatgaagcaaactttaaaatttaaaaataaatttaaacacattcttaaaatagagttccttaaaagtccatgaagtctaaggaagcaaacaaccaacaaaagacctttattgggaaaaaaaatttgcagtgccatttctctcccccactttctcctatgaaagaaaggagaaggcatcaagactaatgattgaatactggggagaagatgaaggtttygagaaagtgctgggttatataatcgcaccaatagtgcctaggatttttgtgtgatctgcacaacattgcatctttttacctgtgtaaagtgaagtaaaaatatttgaggcaggtcttttgggtgtgtttgcctggtaggagaaagaaaaatagaagatatattttgggttttccagaagtgaggacaaatctgtaaaackaaattgatttctctcaacacacaccaccgctttgataaygctggtctgaggaagagatggcatggtttttctctctcatctgttcctgtcagccttcc

SEQ ID NO: 21633 - DNA, 600 bp, Bovine  MMBT06971
aagtgctatttccttatttaactataaacattatatagttagacatgcttatttcttttgaaatttaacttgttattctgtaattaagatttaagagttttaactgactgactcactaataaagattatccccattctgccatacaaagaaaatcccagttcactaatcataaattctcattggcctctggctagagttgccctcattatttgcaagttttctagaaattaaaaaatgcttggcagttagtatggggattcccagagcttttctaaattgtgggggatatcaggaatgcyctgctaggtacagtaagacttgagactgcttacacaaagcaattaagcaagtgaagacactgaggtgaaaggaaaatrtatagtttttaaaacaaagtgagtcttttttttttttagccaagagggaaacaaggtgagccaggactactaaacgtaaaatggagtcttgcttggaatcctggatgagaaaaaggccattatataaaaaactaaggaagtctgaataaagtatgcacttttacggatgcattattactaatgcatcagtattagtccattaattgtagtgtaattaaatgt

SEQ ID NO: 21634 - DNA, 600 bp, Bovine  MMBT01612
tagattaaacatttgaggcaattaagatttgaaggtagtttcaatttatttttggctttggaagaacagttcacaggtaacaagaggtccatttacaagtgcaaaggatgagtttacagaatatagcaataaaagaaaaacaaatacattttgcttccagtaaattaagataagccctgtttcacattaaaagcatttttaaattctgaagctttgtttttcattaatcagtagaatataatgcacctgtttaaaccaaatgcttttgattcaagaagacttaggcttaaaggctattcrctagctgtgtagttctgatacattccttaatctcattgagtttctaagtataaggcataaataatagtgtgttcttaattggtttttcatgaatattaacatcttatttgtacaatatctaacaggtgtagaaatattataaggaaagaatgaatagcattcatctttaacttaattttcatcatgattaagtatttattaaatattcaactttagtgtccccataagaataatagaataactagaacattattatacactaaaacactctacagcatttttaaagattatatattgttt

SEQ ID NO: 21635 - DNA, 598 bp, Bovine  MMBT08921
  misc_feature (1)..(92): n is a, c, g, or t
nnnnnnnnnnnnnnnnnnnnnnnnnnnnnnnnnnnnnnnnnnnnnnnnnnnnnnnnnnnnnnnnnnnnnnnnnnnnnnnnnnnnnnnnnnnncctcctaccttttttggaaatagtaacacaaggaaacatgataggctaagcaaaagaaattcacgattttactcttggtgactagagataatccctggttaactcatgctgtttttatttttccagatagtcatgataaaacatatatcaactcctatatttagaaataaaactatcaccaccaacacagtaggaacgtcatctcttyggggaaaagtttttttacaactttcatcagaaaaaggtgttgaggagaccaagcagacataagaaacctggagttgtgcacgcatgcatgctcaatcactcagtcctgtccaattctttgtgacccagtggacagcaggccactaggcttccctgtccatgggattctccaggcctgaatactggaatggrttgcaatgccctcctccaggggatcttcctgacccagggatcaaacccacatgtcttctgtctcctgcattggcaggcgggttctttatcacgtagtaccacctgcg

SEQ ID NO: 21636 - DNA, 598 bp, Bovine  MMBT02557
  misc_feature (1)..(102): n is a, c, g, or t
nnnnnnnnnnnnnnnnnnnnnnnnnnnnnnnnnnnnnnnnnnnnnnnnnnnnnnnnnnnnnnnnnnnnnnnnnnnnnnnnnnnnnnnnnnnnnnnnnnnnnnaatagcttgacaatgatgccaaatgacagattttatttattagtatttaattgaaagaaaaatgagatctctattaagaaggctttgtaatttgtcagatgctttcaagagccttttaaaacatacttgtgaaaatgaaagtctgtgaaaaagtaaatactataaaaatacgtagattcatataatatacgtttcttyttttaggtagcttctgctgctttttgatatgccctgattaagtttttttccttatataaactattaggaaagtttcattaattaaaattgctcatttttattaaggatattttatgtgctatttaaataaaaaattggctttctttaaatagttaaaattataaatattttactatttgatcatctattagctttttatttgtttttttttaactaaggttggatggtgtgtctattttttttacttattagtctatagaagatgttcttattggaaggtgtgcaaataaatcctact

SEQ ID NO: 21637 - DNA, 598 bp, Bovine  MMBT03470
  misc_feature (1)..(60): n is a, c, g, or t
nnnnnnnnnnnnnnnnnnnnnnnnnnnnnnnnnnnnnnnnnnnnnnnnnnnnnnnnnnnncacgactgagcgactgaacctgaacctgaacctgaaggcaatagtagtaataatgaaagtatataatattacataataataatgaaataagactaatggcagtgcggttggaggaaatgaagatgctcttattgagagagattgattttagccgtgagtgcagttattcctcgaacagcttggtccttctccccacctcccaggctgggagatcccctgaagacagcaaggactatattrtaaaggcatgtracccaatgcgggacatggagactgcttgataaataattattaagtgggggcgtgaacaaaggaatgcaagacgtaacagaaaacatacgtgcctcatgcataagaattattctacaggagctgtttcccattyaagacaaaataagaaacacttgttgagtggatggatgggcttcctccagggcagcagggggcgggcacccgtgtgggagctggcctctgcctgtggagatagagtccatcttctctgagtcagtgctctgggtgcatggtgggcagggctcca

SEQ ID NO: 21638 - DNA, 600 bp, Bovine  MMBT10045
cctcagcctctaattggctgagtcctttagggcccttccagctgccacgtgcctctgcccaaggtttgggaaatttagggcccaggagatgctgagacttgaggccctctgacgaacagcccttgttctgctgtgcaatcacttaggtgagaaggactcgcagaagcaaagtctaggctggtatggacaggggcgacggagcacttgcttctgtgccttcactttacagggcaggatgccaagaccggggggagggttcagtggctgtccagcatctcccgacttgtccctgccatcatygaaacagtaacattgattgtcaacagtttgctaagcatcttgctgagtggtttacattttctcgtgtaaggcttctagtcatcctctgtgattagacttttttttttaaccaattgctcatttatctaagtaaggaagctaaagcccagagaggttaagttacctgaggttgggcagctgaatttgtgcctggacctgctcttcatgattcttcattagaaaccagcgccgttggcttactcttcctggagtcctgctctgagtggtcctcaccacactcacctcgccttgtctttcctc

SEQ ID NO: 21639 - DNA, 600 bp, Bovine  MMBT07057
acctgtcattcgggcttcctgggtggctcagatggtaaagaatccacctgcaatgcaggagacctgcatttgattcctggggggaagatcccctggaggagggaatggcaaccaattccagtattcttgcctggagaattccatggacagaggagcctggcaggctacagtccatggggctgcaaagaatcggacacgactgagcgactaacacatatacacaacctgtcattcagttctctttaattggaaatgtcttctcattcctatattacagaatttacaagtttaggaaaaatkttgaaatggttcaaattcatcccattttcaggatgagactcttcttaaattatcttaaatttaaggatctattttattttgattttcttctgtaaaaaaggacattgaagaaaaatattcagtaatctgtttctttgccaaattattttcagaatattcttccttatagatagcaaaaaaattcctcatgccaatgactggtttttttttwaaattgtggtaaaatatatacaacatgaactttattcttttaaccacttttaagtgtacatcagtgacattaagtacattcccagtgct

SEQ ID NO: 21640 - DNA, 600 bp, Bovine  MMBT05958
tcccaatgcataaagtgaaaagtgaaagggaagtcgctcagtcgtgtccgactcttagcgaccccatggactgcaggcctaccaggctcctccatccatgggattttccaggcaagagtacactatacacacatattatatataatgtatatataatatataattaacatctctttacattatatacatatctttatatatgtgttataaggttcataattttcttaatgatgaaacacttttatctatgggaagtccygtgttagttggtccacatgtgaatcagaagtttcaaaatgygtgtgaattctccctgactctgccttcacctgatgggctaagtgaacygtcacaaagctaacagcattatttcagtcagcctggcaattgataccaatcatcrcagctgacttttccacctagcaatctgtgccaattgttaccgcgagcgaagtgagccaattgcttgagaccaggttttattaatttatattaaaatttagccttagacagattggggaattaaaagggcaagccgaaaatgccacaaggaatctagaatattttgaagccagtgctttcattttaaaacagaaacct

SEQ ID NO: 21641 - DNA, 600 bp, Bovine  MMBT09968
agccctaggaatagcaactgggaaaagccgcaaaaaacgtatataccagcactttgggtccaaaagaccacaggctcttagtgacagacagtgaggtcaattacgaaggtcatggggctccactctggtgtccctgatagaagctcattcagtctctgcttgtgtccccaggactggggaacgcctgcaccttctttatcattttttaaaacagttttattggggaataatttacactgcctgaaactcacctgctgtaagtatacagttcagtggtttttttgatgcgtttacacagtygtgcagccatgaccacagtccagttttggagcatttccatttgccacagagtttcctcgtgcctgtttgtatttatttcttgtttcttgtcaagcctcagactaccactgacatgctttctgtctctagatgtttgctttttctagacatttattgtaaacggaatcatatcaacatttgtgtctaacttcttgagtataatatagttaagtttcatccatggcatagcgtgtaatttgttccttttttgggctgaataacgttctgttgtatgcatataccacgttttttagtctgtct

SEQ ID NO: 21642 - DNA, 600 bp, Bovine  MMBT11382
tgaatctgccctttgggtccaagctgaaatgtttgttttcattgggaatttatgtatgttaacagagtttatattttctgtggtaatggaattttgagggattgttgcttcattatatttataatcttacgtaaaaagcctgcaggggcatctaactgaatttaagctagaaataacgataatgcagtaatttcaaatagtcatgtgttcaagatgaagattttaaagtgatgattccacagtgaattttaatggttattgtgtacaatggtacttacggaacatccgttcagtcactamatgaatataactagtatgttagattatggatttgtaatgtgagatgagaacttttaataagctttccctataatggtttgtgctacaaacacaaagtatgagacacaaccctaaatcatagcagggtttttgaaatcaataggctcatgtttcaaatcaagatgagtttcaaatttttaaaaacacagctaagaagttagggatttgggataagatgtttctttttataatgtaaagaaaattttacttttgaagggatcaagtataaaatggaattgaagttacactttgagaaaaact

SEQ ID NO: 21643 - DNA, 600 bp, Bovine  MMBT06300
aatttagctcacagagatttactcgctcctacagggaatagcatatgtacaaagttagtccccgaagtattatgtatattagcaaaggactggaaacaatggaaatgtctatacaggggactgattaaataaattgtggtggtcagtataggggatgctctgctggtgtaaagagaacagagacattttatgtattgatatctaggaaacactatataaaaaagtaaaatgaaaaaaaatgtgtatttttttatacaaaagaaaggggcaaagagaacacagaactattttcttacatayatatatcaattctctggaaagattacagcatttttttaacttacctggttgtggtaaagactccatacactacaggatttctttcatctctcgtggggagtaagtaaatgtcttctattaatgggaaaaaataacgattcactgtaatttgtatttctcaatatcacgtttgctttttccttaataatgcaatatttctgagactctaaatagtatgtaaaattaagataacagtgacagtcattaccttatgacaaaagaaattaaggggaaaggtccagttctcactagctatctggc

SEQ ID NO: 21644 - DNA, 598 bp, Bovine  MMBT09735
  misc_feature (1)..(108): n is a, c, g, or t
nnnnnnnnnnnnnnnnnnnnnnnnnnnnnnnnnnnnnnnnnnnnnnnnnnnnnnnnnnnnnnnnnnnnnnnnnnnnnnnnnnnnnnnnnnnnnnnnnnnnnnnnnnnntgggattttccgaaagagtctggcatgtgttgcctttccttttccgggtatcctcccaatccagggatggaacctayatctaatgcattggcaggtggcttctttaccattgagcygcctgggaagcccaaaagatgctttaggataacttaaacctgaaggcagccagtgggggaatctctgctgggatgkggtcaagaatctgagcttgctttggggaaaccggaaagacttgtgttgagctcagcagagaaataaagacccaccaaatgtcaacaagggccttgtctgccctcataacctttttttttgagctgctgtttcttcttctccatttaaaaataaaagtcaagtgggaaataacaaagcatacagtaawataataataagcygaaagatgactcaataaaaagaagtgataaaataataaaagcaggctgatacagtaaaaaaaaaacaamaaacccaaaactcaaccaaacagaatcac

SEQ ID NO: 21645 - DNA, 600 bp, Bovine  MMBT05224
tggggtgagggaggcaaacattcaggccacagccatctagttgcaggcaacagtttgaaccttggctgtgtcataggaaatgtcctgctaaagatgtcagagcaccgggcttggaggagcccctggtgctgctctggtgatgggaccctaccccttgaccgtttgcagttgaagtgggaaccatctggtctgctgacggaaaggagtgatgctcggaggtcatttaaagaatctgagggagaacctcggatcccttagtttctgcagagcttgtgtcccctggagaggagtgctgacttmctttcctcagagcttcaggccccttcctgaggggaagcccagggaaggctgctgtgggtcccaggagaaagagggccccagggggctctgtgccaaggatgagggtggctgatgctggagttccctcacagctggagctgatgtgtgcatgactctctctgcagattgggaaaaaacaaaataacaagcgaaggaggaaagagtctcgctctggctgtgaagaacagcaaatccatctttgaagtggggtgagtagaggcgaatgcccgtgggtgtttgtatacgacctgctctgtgtac

SEQ ID NO: 21646 - DNA, 600 bp, Bovine  MMBT08550
tcgtagagagtttatgtgatttttatttcttaagataaaattactactggaaaaagaaaacatgaagatgatgagccagtatttgaacaaattgaaaatacagccaatccttctagatgtcctgtgaaaatgtttgaatgctacttgtctaagaggtgagtatttatgatacttgatttttttaaatggtagcaacagttaggtgctgtgaatttatcagaggtgactttttttcattgatcctttttaaaatttttctcttttcttatttcaattatgtttttagtcctgttataaagyacccagcttgtatctcttaagcatatgttaagaaattgctctctactaaggaagttattgctgttgtagagggtgagacagtaaacagtgtaaagtttgggggctgtgagtctctcttgcagccagtgaaatttttagagatcacaaattattttatgcttgttcattattttatatatgtaccctctaatttttaaaaggtaaacatgaactcagaatgtattttcttaggtaatcagttttataaactgtccccaggttagctgtcaagaaccataaaaacagtaatgtcacctctag

SEQ ID NO: 21647 - DNA, 600 bp, Bovine  MMBT08747
ttaggaggaaaattttgcaactgaataccaaggttacaccatactgattcctccagttctttccaaaaagaatctatggccattcacttggtttactttacaataaggaaaggagaataattttatattttgacaactaatgaacacagttttgagatggcatggattcccagagacctagtatatcagcatggacatcatggtggaggcagcttatggggaccaaataataaatatcatagttgaccatgggccctgcctgtgggggtaagagttaacactgcagaaattcacatcccygtctccgagtttcacaaagcaatattttctgtgctttggtagaaaaatgaatgaactaacctggaagcaaagagagaggaagatactgtgatccagccaaaaaaaatgtgacagaagtagactaaagataaattgagaattaaatttaaaaatatgctttaacaactgtgtctgcttcaaaggattagaggaacaacaagggaaattaaacattaaaggaagatcataagtatatctaattgttatggtaaaggaggtctcaagtaaagagtgtttatgcagtcactgatgttctgcaag

SEQ ID NO: 21648 - DNA, 600 bp, Bovine  MMBT05790
tctctctgaatttcaaaatatattgaataaaattatttaaaattttttgtgaacaataatgttgagacattaacaatagagcaaagagaatacactttatagattatctgataatattttgtcatttcctttttctatggtaaaaaaaatattaaaaccacacttagactcatataaaggtatgatatttgacagaaaaaaattagaactgctgataataaatcaattactttaaatatcctaaatgtaagtatgaatgtatataagtattgttatgtgctttaaatttagtttgattamtccagtccacatatgtttattttctactgtaatagataaatcacttattcgtgtgtcaaygttttgatcttctggaaggtatgtaccaartgcattgatatattaattcttaaatatgtaatttgttttgctgtagatcwacygatacctataaattaaaggtcttcttttgtctgaggaaaactaaaccttgaaatatacggagattgtatagaagatcttgagatgatacaaacatgaatatgatcatagtcttctcatgggaagggaggcagaaagatattggctccagattataac

SEQ ID NO: 21649 - DNA, 600 bp, Bovine  MMBT09687
aaaatatttatttaacacactaacattcacacttcacaagagcactaacctgcccacctcataatttccagatgatggaggcagaggtgctttttttgcttagaaatccccagtaagtcttttaattatctcctttgccacagggaattatagatagtctgtaaagcaggttattttgttttaaacttgtgaggccacttaacatatatgaagctgaattcagttactacacagcatcttccctccttgtgagtttggccaagttttccattttgggattaatgagaagaaaagtcattwggattattgatccagtgtgagtcatacagaatggggaagaatgggcaatcaccactattttgaatgtcctccatttactgtctctaaactttattttggaaggtgcagactttgattgtattatttctatagggaaaacaacctctgatctctctctcagaacaactggaaggcaaagtttcctgggtttgggtaatggctctgatctggttggttttctttccctactaaatcgtttgtgtcccctctgtatatcttcatctggttgattgggaacagggagcctgccaggacacacac

SEQ ID NO: 21650 - DNA, 600 bp, Bovine  MMBT05427
ctgtcttttttcccaccgcctctgcacagggggtttcctgactccagaacctgcttttcttgtgatgctaccatccactgcaaacagggggtctgcttgctagaaattcctggttttttttttaaaaaacaaattcctggtgacttaaggattctgctttcagacacctgccctggggcaggctcatgtcctctcagctgtgagaggacagctcggtctttgctcttcctgcacccatgaattttctagaatgtctgatgttagtcactccgtagccattgtgtgcatatcccgagactrcacagagctcctagggttacgtgaaccctgacaccatctgggaggatgggcgtggggccccgggtggtggcagggggcccgggccccacctctgaagcatgttaactagactgttgtctcgtaaggctctacaggcgccgcagggccccggctcttcaccatccacctgatcgacgccaacacggacaacctgcccaaggcccacacctggtaaggaccggcgccccacccggcggtccgtgtgcgggacagcccgcacgtcagggtcagcacgaggctctttcaggagcgcagttaagt

SEQ ID NO: 21651 - DNA, 550 bp, Bovine  MMBT07155
tactttcattgtacagagatgttcaacaatattaaatgtttgagtctcatcccttctctcaggagtgttttctagatgattccaattcaagacacgacagcgtctctaactaaggttgatcctgtgggttcttcacttcctgagtccaacccaagacccaggtcctgcccaggctgccttcccagactcctctgagcctgggtctcacccctctgtgtggacttcccaaccccaaatgtccccggctgtcccccagtgccctcttccagatgtaaccctgccgcatgtcctgcccctccyctggggcctccttccactgcttctgtccagaactccctgccttgagccctgcttgccatcccccacctggagcactgttgctccccacacctgccccccatctgctctctgtcccagtcctcagccccaggcccggagggtggacaggcaggccctctggactgctctggtaccctcccttggctcacagggccgccagggccaaaggcggagcaccgagccctcttggatgtgcacagggacgtttctg

SEQ ID NO: 21652 - DNA, 600 bp, Bovine  MMBT11381
aagaaatttagaaatgacaataattcaagtaatatgtcacatcaccagttttttttttaatggtcttatacctttactaagtaggttttaaaatgcataaacaattaaacattactattggtttttaagttaaaaggttagacaaagtaacacttgcattacaggaagacacagagtatatgaaaagcataagaaaaaaagcaactttaataaagactaagaagataaaaagtcttagaaccccttaaaaacgcttaataaagaatgaaaaatatataacacattaaaattattatttayttgcagcagagtgttctttgatgactgttaggaaggaaagttttaacaaggaaaaaatttggttacataaaatatttctcttttcaaagttttatttaataatagtgacaatcatcttaggaaagaaaggaagatttggcttgagaggtaaagaggtcaatatggctttgttatcattgcttgccttcattttctaagaaactaattgattttaaagttcttaataagccccagatttttcacaacagctcttcatgaacactgataatagaatacctgtaacagagttgaaggtaaata

SEQ ID NO: 21653 - DNA, 600 bp, Bovine  MMBT01695
tttaattgtgtgaattgtgtagatacaccataatatatctatccactctcctgttgaggacatgtggattttctctttttcttggctataataaataaagctgctataaatatttgtgttatgggtctttttctgggcatttattttttatttctctttgataaacaccttgaagtaaaatttctgggatagaatgttagatatttgtttaaattttattacagacagctttccagagttaatgtgcaattttacacttctatcagcaatataagaaagttctagtttctctacaacctyaccagcgtttgctgtcatttcatttaagttattctagtgagtatgaaatggtttggcttttatttccatttccctagtgtctaatggttgagcatcattagtgtctattggccattcatactacttcccttgtgaaatgtttgcttaactgcctgtttgaaaagttcttttttgtcttttcattatttgcagacattttccttatatatgttctgaatataagtatcatatatatatatatatgtgttgagaatttctgcagtctgtggcttgccttttcatttcataatggtgtatttt

SEQ ID NO: 21654 - DNA, 465 bp, Bovine  MMBT09727
attaaaaatgcaataaaaatttaaacttaaaagacatataaagaaggaacagttttagtgaatatttaacaaactgttcattagtagaaaactaaaataattatacagttaaaagtcttctatgagcaggaaagagaaatttatcttttgtacatcagaagttagaatctgacttagctaagtcaaaatcaacattagtttcaggataaaatcatgggggtctaacgcacaccagcagtactaacagagggagaggaaaagaaaaggagaaaagccaaagaaggctggaattcatttggygctacaaccaggtgatgagtccaataaaacagacagcaggactagagcgggcgtgagatacatccaggtactccaagtcaaactgcactggggcttcaactagaagaaaactgagaactgtctactaatacaaaggaagccattgtttgaattaagagacaaaca

SEQ ID NO: 21655 - DNA, 600 bp, Bovine  MMBT07216
aaatgagaaagatgatgaacaatggagcataatgcaatggttaactgggaaagaacatgagaaaaccagtaagactcactaattgtataatgttagctgaggtttcgaatccaggaaattatgttttcactggaaaaaaaacaaaacaaaacaaacagcaacaaaacatggttaattagtgaataagagctttgaggcatttgatttctaacagtcttacaactacctaaatttaaatgtttagaatcctattttaaatactcactgagacattcatttgaataaaccccttgttatctkcctccaacatcttagcaatatatggaaaagaatatatttagcatatatctgggaggtacctatcacttttatcttcttagttattaaaaacataaagataacccgtaagtttataaactcctggtgagagtttaccataaagtcatcataaagtttttataaaattagtttttccaaaagaaactcactcacatagttacactgctggggatgaagtattatcctaagatgttatctctcctttcagacaacataaaccaccatctctcggacactgaagagacttatgactatgaaaaa

SEQ ID NO: 21656 - DNA, 600 bp, Bovine  MMBT08918
tcaaatatttttacacattttgtacttccctagctagtctccatactttgattcttgatttttaagagcttcaaatttcacagaaatagcatccaagggaagggaggaaaaaaggtgagatatttatgtcaaaatcagtgtaatcttaaaccaagaagatatttaggtcttcccagtggctgctttacttgtgataggatcctctccatttaagtcagctcaagctgttcatgaatgcatcctctgcaatagcaaatggtttctccttttaccagctgtggctacccactaacttctgckttataaaaaatgctttraatctgaaataaaacacacaattagaagtttmtgtacatagagtacttttattcattgcatgaactttctgaagtattatatacaaaatggtatcttttctgaattcaagaaaatgtaaacatatgagggttagttaattactaacagggtaattaagtagctgtatatacccctttgcagatattcatgtaactcacagttgaaaattcaagcctgtatttccattaaacttaagagaattgttaaaaacttgattttccccttaacttcttttgcaaggaa

SEQ ID NO: 21657 - DNA, 600 bp, Bovine  MMBT10857
atcctcagaaattcagaaaaaaaataagtactagaattatcaagataggtttcaaggagaaaaatgtcccaaagattagtgatgggagtggatataaattgagatgggagaaataattctcttcttcagcctcacaaagttggaaaactttttattatataataggctagagaggactcagaacagtgttctatttctcagatatggaagaaagtgattgtgaggttaaactcaccatagaagatgaactttcagcctgaaaaaaatagtcctccataaataaactccagtagaatctargccaagggtagaaaaagcaaagcactatggggaaaaggagaaaagtggatgacatggatattgtcctagaacttagtatctagtactaaagttactggtttgtcactccttcccgsagtctatatctccctgtatcagttctgtgaaatcagtgcgcctagaaaaacgtaatgacaaacttcaattccaaaatttaaactgacaagctgctgattcagtgacatttctcagggcactaaaacattaggaaacaaccttacaaagtgcctttccagtaccatcatcattttatttagttat

SEQ ID NO: 21658 - DNA, 600 bp, Bovine  MMBT09796
gcctgcttgtggggatatcattaatctctgtagcgtttctgctggtcactgtacttgcatgctctaagaaccattttctatattttagaggtttaatgttgtggtttcttttgttttctaactcaccaagataaaaatttgatttgttgagatttctgcttcgtgtgtggtttttaaatggaggttcataatgtatagcttttattatrtaaatgtttacttaaaactcaactcctaattgtggacttaaaaagaaattaaagtagtaaatttcctcatcctcatgttcaacattaaagyccagaaattraatttcatctgtggtcttaaaacttggtcatttatttatttttttcctgattttataaaaactgggagcaatctttttgctttgtgtacattttagtacataaaggatttgtgtgtatgtatatataggcttaggaaattgaaactcaagaacataagattaattttaaagggctgtcctaggtttcagttccatttatgaagccagtactatgctgtggataagaggttcagagttggactaccaggctacaaatgctctgccacacatgagctatgggacttttggca

SEQ ID NO: 21659 - DNA, 600 bp, Bovine  MMBT09836
agtccatggcccggaggttggggacccctggtttaaatcactccagaaatacttgttccccactcttctctcttttcctcaggtggctttagtctttgccagagcctgaatccccacccagaagcatttcagacagcttcacatgcacctgggggctccccatagaccttgttctgcttgggggctcctgcctgcccaggggagggctgggggactccgggtggctctctgtgggcaggaggaaggcttgggactggggtcatctgcctctggcccccggccaatgctggttctggtagrgtgcgtgggagaaactcctttctttctgctcatttccatgcaataggccttcagcctttctacattccatctatgatgccctgagacccagcccctggtgcctgggcacagggcactgaatccaggctccaagcccagccggcactggtggggcgaaaaccggctcagctctggccacctggcctccgggacggctcgctgaatccatgaatgaacgggccactctccagagagtggtgtcaggccttctcacaacctcttcttgtcagatcagagatggcttgctcccaggtgtcctgg

SEQ ID NO: 21660 - DNA, 600 bp, Bovine  MMBT06021
taattttttaaattacaaaagcaaattataataaataatattttaaaaattaactcactttccatatatagctataatatatattttaaattttattttcatgccatactctttttatatataaattgatcaaataatacatgttattctatatcagaatttcttcwtatgatgttaaattataaacactgatccacactgtcaatagaatactgaagagaacattcattgaaaaaatatcctgcagtttacttagtcaactttgtttgtagacatttagataatgtttagattttctcygcctgtattattacctgtctgcttgatctttaagagactccatgcattttaaatattaaagttttcttaatgattctagaaataaactatgggcaacctctactagtgaacttattttctatgtctccatattttaacatggatcatcatctaaagcctcagctttatttggatgcatgaaacaacactccattatttttaaaacaatatttactattatttaaatagtatttaatatttgctattgctaagtcacttcagtcgtgtccaactctgtgcgaccccttagacagcagccca

SEQ ID NO: 21661 - DNA, 404 bp, Bovine  MMBT10333
gtcagcccaagcatcaggtgggtcacacacacatgcacacacacatacacggctcctgtctcatgaagggtctctgttaccatggcagaaatcactgttgcatgtgtatatggatttattacaatatgtctctactgagtaaatctcacaaaagtaggactgacatagattattatccctacacctcagtgtgagcagagaggactgaccagagggtagaggggacatggtccctgctccccacaggcctgcagacgcctgctctccacacagggctgctcaagggccctcagtcatgtygtaatagaacacggacaattaggtttcatagcaaacagctcagacggaagattaaaaagtacatttacaaagcggtttgccaggggttggatgaagtttagaaa

SEQ ID NO: 21662 - DNA, 600 bp, Bovine  MMBT11303
gatatacatgtttgcttgaaagctagggagaccagaatctactttttgctctaattttgaattacatagcacttggcatattggtacttgataaatggcagcaattaacatgtagtttttatttagctctgttaccctgggaaaattatagtctcactttacctcaatttgtgcataagttaggattaacctatatttcttcaagcattttctgtgttctgagcattattggagcacatctgattcctgaaggaacttaagagtttagttgcacaggtaaaaccaatgtataggaacaamtagagataaaaatgrgtgtaaattctcataagtgcataggggttcagaaaacagataaggtaaaccattgtagcaacaaaaggaatgacaagggaaaacaatggtacttactctaggcattgaaggttacttaagatttggatgaatgaggaaatggtggagaggcaaaagggctttttgagtggcagggggacagcctgagccagggtgtgaaggtaaaaatgaatgcatctggtgattgcatttctgagacatggagcttatgatctggtgtaacgtctgaggattgcacataagtat

SEQ ID NO: 21663 - DNA, 449 bp, Bovine  MMBT12529
gaccttcataacagctccagctgaatttccttcctcaatccccaaagagaatccaccatcttaaatttttgcacagttgtcctaaaaaactgaagaactgaagtttgtaaaatagacttattttcaaaaatattcaaatgtattttgcagagattaatatgaaatctactcagcagtattcttttggaaaagcaactcctttaaacagtgagatgttccagcaccagagagaatttttcaaagcctgtgcatgtctgcacaaccccatgccagcaaaattcacatagcaaagaagctatyaagttagcttttagggcttacctaaaaatccatatagtattatttaatatggtagaggaatgtacaatttagtttaagatggctcacaattcccaaaaatcaaagcataaatcaccttggtaccgtaatcatttagaccaaatcatcat

SEQ ID NO: 21664 - DNA, 600 bp, Bovine  MMBT04623
ttacaaaccagaagcagaagattgtctgaactgcctatttctggcaaattactataatgamagaatctgtaaagttgtgaaagactttggtcttgttataagggtctttggctttctttttctcttcatcmacattccaaatcacttatatttgaattagggattttttttcccaatatatagtgtatactgttgtgcatcttgccagttttatttatttattttwtttttttacaacaatgaatacagatgggagcaatcacaggatgaggcaggatcatcagtccttccatgttttakagagagaaaaaaatgtttgactcctaattagcctttcttaaagggtcttaggaaagaaatagagatcccatgaaataaatttcctacaactctggggtataatcagaatcaaagaaccagaaagcaactgaaaccacacatgttcaataacagtcactaccactctgcttcccactctcttggccaacattgttaattgatcacattagcccaatggacccagatatgagtgaagaattgttctcaacataaagctttaggtatctatttccaactgacagttgatttaagttgttgaat

SEQ ID NO: 21665 - DNA, 600 bp, Bovine  MMBT05599
gaaaacaagttagagctcttattagagttgaaatagagagtaacaaaggcctgctttaggtggggtggtgtggagaggcttcttggagaaggcggtattgaagttgagaccggaaggaataaaagagctggctctgtgagttgtggggtgggggagaatattctaggcagaggaaacagcacaagcgaggccctgacttgtttggttgtgtaaaagaccggtcttctcagagtgaaccaagcaggggagagagtggggccagacgagaggtggcgaggggaggtaagcagaggccgatcmtacagagccttgagatctgggccggaagctggtttaacgctgagtatcctgagaagcccctgaaggtttctatgcagaggagtgatttgatgtagattaaaggagcagcaaaggtgaaggagagggacagatctgggcttgctaaccaatgggaaggatgtggaaggggggaggatggacacggcccacaggggtaatgcgtgtgctgctgcctcaggtgggaagactagaggaggaatgggtttggggtgggagggaagcaagtgtttagtctgagatactaaggtgcccggatcccag

SEQ ID NO: 21666 - DNA, 598 bp, Bovine  MMBT06778
  misc_feature (1)..(20): n is a, c, g, or t
nnnnnnnnnnnnnnnnnnnntgactgctgaccagagccgtcctcttcctgcactcccagcatggctctgctatcgccagtgttggccacgtgaaggtcaacgccatccacgtgggccacgcaagctgtggccccagaaaatgccactcgaagcactaggtagttgaggaaagaattgggatcaccaacttgagcctccaaggagatgtcattatcaagcctcttgaaagcattaatcaaagcctccttaacatcaatatcagtcgactccccagtgttgaggtcaataagctcttgccartaagtcctcaagctgttgaaatataacttggatgcctccttactgaagtaatcgttggggtgcttgtgccactggagaatgggcagcagggctcgaccactctctacagcattttcgatctccagcaaagtctcgtggggtaacaaagagacagcaatataataaaagagtctttcactaactgcctgggagcaagcacagcctgcgtggccatcaaaaacccccaaaagcatccctctggtctgcaagcaggttgctgcactcctccggtcctcaatgggtgcgtttgccggcagct

SEQ ID NO: 21667 - DNA, 600 bp, Bovine  MMBT03168
gtactttctgctcagttttactgtaaatctataactgctctacaaaataaagtctctttttaaaaaattcaggtgaggtgatgacactcttctgtatgtagagttcagtccatcctggggacacagagacttggactggcgtctgagccccaccacgatcagctctgcaactttgggaaagtccttaacccctctgacctcagtttctctaactccacaggattgtgttgtcttcctcagagcatttggaagattaaaaaaccatatgtaaaatgtctaacagtacttagattatacaastaaatatatacaaacccctccccaattcctcatttaatgactctgattattaaacatcctgatggctactaatttcaaagtcaggccagtggaggaaagtcatctggggtgaaagtgaccttctcccaggaagtgcacctgtgtatgggactggacatgtgtgtgctcacatgctcggtcacagatgctgaccacagagtgccaggcatggacttgagccccgagaggcagcctcaagcccctcactcagctttctcctgtgaaaaggtcaggatgatggaagtctgtcatatttagctg

SEQ ID NO: 21668 - DNA, 598 bp, Bovine  MMBT13089
  misc_feature (1)..(170): n is a, c, g, or t
nnnnnnnnnnnnnnnnnnnnnnnnnnnnnnnnnnnnnnnnnnnnnnnnnnnnnnnnnnnnnnnnnnnnnnnnnnnnnnnnnnnnnnnnnnnnnnnnnnnnnnnnnnnnnnnnnnnnnnnnnnnnnnnnnnnnnnnnnnnnnnnnnnnnnnnnnnnnnnnnnnnnnnnnnntttttagctataccatactgcttcctccaagctaaaatgatcaagttttgaaaaggatattgcatgaataatgtactaattatcattttaaactgtgaaatttaattacctaatgtaattaaaggcatayattaatttggccaattcttattcttgtaattaatggcaaattagatatttaatgtataattatctgaaaattattaacctcattcttcaatgtcttttcttttaggaaaatctctgaatattgattaaccaaacatatcagtaaaacctgcaacagaaaataaaaatacaataatattccttttataaaaaaccttttataataaatataaaatttatgtttagagatcttgaagctgctaaaaaggaatgcattcatcaggatagattaatatctataatatacaattgtaacttca

SEQ ID NO: 21669 - DNA, 600 bp, Bovine  MMBT09428
taggctttattacctccctctaaaattcttgggccttaatcagtgcagatttattatagatatcaccagactgtcatgtgtggattatctgtccccttccagcacattcctgtgtctctaacataaaacttgtgtggctcagagtgttgtttctcaggagctattaaatagtatttgggcaaaaacacacattccttccccatctccaccctcaaatttccctctgggtataaacacagtttctctgagtaactttctgatggtcacttctrtttttttaaggtaagtatgtggtgttayattaatatttgaaagwtctaaacctcggtaatgtgtaatgggcgatgagcttgccctgaagagatccctgtgtgtctttttttggaaatagggtgcagatggctagcagggagtgtaggccttgaaacagtgtgtacccaagcccgctgcccagaggtagacttagctcgatgtgacattaaaatcacaagagttcccttgaattgagtacaaatgtcgtttcaggttatgtgggtgtgcagcactgtcttacactactggttttcttagttttatagaaagattgaaaggacatgaaag

SEQ ID NO: 21670 - DNA, 600 bp, Bovine  MMBT02841
ggctcctgagacggggggcacagtaagaggaatagagttgggatccaaattaccaggacaatgctaaacaccataagcattcagtttaccacagaaagaaggccattatttctgaagattctgccagtgattttcatcaaagtaaaattctactgcttgatgccaagaagaaatttcattattaactttggaattgatatctgcagctagaatattacatttgcttttcctccagtctctctcattcacatgtggacagacatactaattcaagtagttagatcttcagtggtctccaakaattaaattcaggcattgtttggtcgaataaaagtggtttactcttatctgcatgaaacattctccatcagttttgaatgaatccctcctatctcagaagtctcccgtaaaaccacagcctcagcagttatttgggaggccttgaactgataaccccagtcctttctcactatgagaaaagctctcttcctccatctatgagggtgtgcaagaggtgaatacttccttcacactggccttgcatagttttacataactctcagcactgcccaaaaggacacactccaagtcaagcccaca

SEQ ID NO: 21671 - DNA, 506 bp, Bovine  MMBT06075
gggcgtggggggaaggatgagtcatgccaaatgctccccaagctcacgggttaaaaaagccaagaacattcaattcctttcatgtttgcagaggagtttggtcacatccaaggtgaaagccccgagaagcacatccttgcagggaggcacatctggctgctggagctgtgggaacagagggccgaccgacccaggcagacgtggccgcccacacagacctgatgcacagctgaagaaatgatctctgggcctttgtaaacagggctcagaaaagcctccctttcaaaatagtgtgtgaaygtgctttgcagatggaaatgtatggatacaaatataagctgcctccacctccgctttcacaatggccatactatcggtgaagtcctacagtccttgccacgtgggcaaaaatgcaatattctgatgtaacaacaaccctgaatgtaggggtgggatgtacgtctgaggagctcaacatttaaccatagctttttcaaaacatcatc

SEQ ID NO: 21672 - DNA, 598 bp, Bovine  MMBT06113
  misc_feature (1)..(99): n is a, c, g, or t
nnnnnnnnnnnnnnnnnnnnnnnnnnnnnnnnnnnnnnnnnnnnnnnnnnnnnnnnnnnnnnnnnnnnnnnnnnnnnnnnnnnnnnnnnnnnnnnnnnncattgttgacagtgggcagggcacagcccgtcctagcccaggcactttctgctcctccgggaggaagcagcccttccccttggggacccagcattgtgggggtgagggtgcagggtagggggcttctgactggcacaggcctacgagcgccacaagaccaggttggcaggaggcacgtcgaagcgcttgcgggtgtggtcsgtgtcccggcggtacaggtagccgcaggtgggcttctgcaaggtgtagaaggggttcagggagttggagtactgggaggtgtagaaattgaacctgagcttttccgggttctgccctctggggtccaccaccacgggcacgtaggctgccgccagagtctgctcacggtcctgcttccacgacagggacaggggacggtgtggagccttcaccttttggcctgagggtgtcttcggcccatgactgggtactgaggatttctgtgagtcctgggaggaggaaagaaggggagagctgg

SEQ ID NO: 21673 - DNA, 600 bp, Bovine  MMBT14262
atcttaatagatgattgtttttctatatcatcgtaaccaataacaattattgtctattcaatgatatttcctcaaaaattctattctcactgttttattgagctattacctggccagataaaacaggttgtctctttctttagatcaaatatttatacattgcctttgtgttaactactgtctcataggcttgcagggagagagagagagagagaaagaaagacagagaaagagagaggcagagaatcaatgtatctgatttaaaatgaatacatttgatgctgtggcttgaacccaggytgtgagttgtgttgatttttggcctggtgtatatcatcaggaggcatttgaagtccctgttatctgatcaacataaaccttcctcactgccttgcgcaatgaatttctgtaatcaccagaacttggctgaggagttgcctttgtccttcaagaggccacagtttcttgtctgaacttccttttgttgccaattggggagggcttcagagaggaggaacatgaaggcaggggtgcatgaggaggtgggtttatgtgggtgatgaatgcagtttcataaaatgagttttgctaggagaacaa

SEQ ID NO: 21674 - DNA, 600 bp, Bovine  MMBT07528; identical to SEQ ID NO: 4674

SEQ ID NO: 21675 - DNA, 600 bp, Bovine  MMBT20488
gtcaatttcaactgtaaaaacaactgacaaacactagttttttaggcttggttatttctaagacaggttcttgaaaatgaatgaagtgttctttgtaacacgaaggaaatgaactgaaaatacatgttgtaaatggtaaaatttgagctttaagttttcggagaacttgtatctaccatcttgacagcttccaaatacttaacaaattttctcaaaaagattagtgatgacattaacaaatatrcatttttatattttatagtgaaatatgtcagccctaaataaactaaggttttccartctcagcactgtagacttttggagctctataatcctttgctgtgcactgtaaaatgtttcacggtatctctagcttctatccagtagatgtcagtagcagccccaaagtttgacaaccgaatctctaaacattgccaaatatttcctggaggataaaatcatacccagctaggatctactgagttaggtaactcagtaaatagttattttccaaatggccaatgtgtgacattacaaagtcatacatgagttcaagatccattgggggaataagacagacaaatagattttggtggctca

SEQ ID NO: 21676 - DNA, 600 bp, Bovine  MMBT09733
tcccccaagactgatgttttccagggagaattccgggctcctttctgcttctgggtaaatggaagggagctttgaaagcactgcaggagtggccctcaaaggagccctgtggcgaagtcttttgtaaagtgaacagtccttttgtaaggtgaataattgtgctctgattatctgctttggaggttcagagtgttcagagattctcaggggaaagagggatttgtctgaaggccatctggcccaccccgcttccaatgcttgattctctcaagcacccgctctgagtgatgcgaagccccyatgtggacccctctgtgatgggaaactcaccatcccatggatcattccatctttggacagctcagctgattagaaatggaagcgtatcctgagcttaaaaagaaaagtctgtctctgaagttttatccattgtctctgcttacaggttacactaaatataccttttgcttatgttgactcacttgatagctgaccacagtgaacttgacctcccccagatcttctcttcatttgtttctcgaatgcaggattttgagttctcctatcgtcctgatggttctgttttgacttggcttgctt

SEQ ID NO: 21677 - DNA, 600 bp, Bovine  MMBT02057
agagcttaacccagggcattcagctgatgttttataaaagaggtagtgaaaaaataaataaataaaaataaaagaggtagtaagtcagagaaagactttaattttgttgttgaacgttttatttaccttattttaaatgaaatgatcacaaactttgcagcaaaaatcatattaaaattcataagtcagtcttcctcattcatcacctacctcaccacctctcctctccttcccttcctccaactacctccttttctcctaacctttgaccctagacccccaaattcaacgtgttagctyggttcatactgatgggtgtcatttccctcgtggaagattttccatgcaaactcccttctttctgtgcacaaaattaggaaacatgtagcctgctaaagtgttaagatgatatatccagtgaaaagaggtcatttttaaggtctcaaggcaagactcttttttgggaatgtgatataatattgctctcattcatccagacccctttgatctagaatttgtaaccttttaacaaagattgggctaaaggttgctattacatctatgaaaataatatcataaggagtttgatgacattattta

SEQ ID NO: 21678 - DNA, 600 bp, Bovine  MMBT10193
agcctgagcttgaaatgttttacaagggcaatagggagccatgggaggtgtttgagcaggggaggctcatgttcagatcaggtgttataagaatctccctggggcaggtgtggaggattgcactggaggggtgaggtgggaggtgagagcccagagtggaggcccaaggaggtcataagcagaggtcaagtgtcagaaccttgttttgaggcatcgtcacctcttctctccccacagctgccgttgcccccaaggatgaccttttctatggcttcctgaaaccttggctgggtgagctcrggactgggtaggctggagctggggcttcagggaagagggggtggggcatgaggtttcctggaaaggtccttaacctcgatctcctgggtrtaggagatgggctgctgctcagcagaggtgacaagtggagccggcaccgccgcctgctgacgcctgccttccatttcgacatcctgaagccctacatgaagatcttcaaccagtgcgctgataccatgcatgtgagtcccaaggtttcttggggagaggatatctggaagtggggctggtccagactccagcttgtgggcaagtcatgcg

SEQ ID NO: 21679 - DNA, 600 bp, Bovine  MMBT09711
aagtctaagaaagaaccaaaagaaatgctggaaataaaaaacaggaacagaagcgaagaatgcctgcaatgggctcattagtagaccagactcagttgaggaaagaatctctaagcttgaggatacagcaatagaaacttccaaaactgaaaagcaaagagaacaaagactgagaaccagaacagaatatccagatcgtgagacaactacaaaagctgtaagatacacatcatgggaataccagaaggagaggaaagagatgaaagggacagaagaaacgaatgagaaatgactgagaamttccsctgcattaatgtcagacgccaaaccacagatccaggaagctcttagaacatgccagataaattaaacacacacatagaaaacaaacaaacaaaaaactacacttaggcatatcattttaaysctgtagaaaatcaaaggtaaagaaaaaaatcctgaaaaaaagagagagaaaaaatattacctgcagaggaacaaagataaaaattacatccaactgctcctcagaaaccatgcaagcaaaaagagagcagagtgaaatatttaaagtgctgacagagaaaaagcaccaaacta

SEQ ID NO: 21680 - DNA, 600 bp, Bovine  MMBT07562
atttgaggggaagattcaggccctaacacttctcatattggtgtgtctgattttacaccttctatccatttgtattcagccctatctttatgggggtcttggtgaatgatcagcagagatcccaaaatggaatgaatgtcccaggggtgttggagagggggaagcagaggggcctacccatgaccaccctgacctttgccccatggtggacctgcttagtgaggatgggaggacccagtctgctcagaatgcacgtgtttggggccggcaagggagctggtagtccttctagggagcgtrgytgattaatataatcatattaactggccctcaaacagacatatttatagccatggtgacacattattaaggatctaatttggatcaggactctgggaatcttayttttaggtccagaggagagccctgcagtcaggtgaccaggaggtctccccggagygttgtgtttattctgtccagttggaaactctcagggttggaagaaatttacaaggtcccatcaacccacccttccacatgatgcctgtatcactgcatgtgtccccactgagggaccatccaacctcctctaaatgccac

SEQ ID NO: 21681 - DNA, 598 bp, Bovine  MMBT20200
  misc_feature (1)..(127): n is a, c, g, or t
nnnnnnnnnnnnnnnnnnnnnnnnnnnnnnnnnnnnnnnnnnnnnnnnnnnnnnnnnnnnnnnnnnnnnnnnnnnnnnnnnnnnnnnnnnnnnnnnnnnnnnnnnnnnnnnnnnnnnnnnnnnnnnncggatgcgcgaaagccgcagcgaggacgtgatgcgcatcaccgtgggcgtggacggctccgtgtacaagctgcaccctaggtgagcccgcgcggccttctgccggtccaaccctggtccagcctgccccttgtgagtttgcatccttaggggagaacccgggcgttggtctcyatctatgatactcagagagggaagctctccgaggtcccgagaactcttaaactctccgaactcccttggcccccagacacaggaggagggttcccttgttttaccccctgccgtgcattcagcgcggtaccggcagccaagcttcccctctacgcagcttcaaggagcggttccacgccatcgtgcgcaggctgacgcccagctgtgaaatcaccttcattgagtcggaggagggcagcggccggggcgcggccttgatctccgcggtggcctgtaagaaggcctgcatgctgggcca

SEQ ID NO: 21682 - DNA, 600 bp, Bovine  MMBT10278
gcctgaaaattcatcagtggataagaatctggacttgtcctttacatcccagcagtcacctgccaggctgtgtgacacccacctcagctggagacttggagtgcccccctcccgttctgtcctcagcctctcactggggccaaaactcgtcctggtctgctggggcctccagcgtcaggtcccggtctctttcagcccaggctttcttgcatactgctttcttcccttcaagctctgttcagttgtggacatcagggaagaagggggttggtaacttgcccaactccaggagtgagggasctggcagtaacttgggggttgaggtgaattctgctggacctctgatttccatcagagcagggattctgtctggtcactccttatgtcagtagcagcaaacagcaccagacatagcaaatgctcagtaaaatccttgacaggattccactcctgctggggctttgtttctgttcatgtcctgatgcaatcctctctcctcagcactgccccccagatattgaataccagctctccagcacagcaggcagaaaatgaagccaaagccagctcttccatctcaatcgatgagtcacagcctac

SEQ ID NO: 21683 - DNA, 600 bp, Bovine  MMBT21351
tgatctcctttagaayggactggtttgatctccttgcagtccaagggactcacaagagtcttctccagcaccatagtgttggcttaaggagcgtgcagaagaatggaagaatcagagtgaggtgaagtcaatccagaaatattccaagcactactgagttcaaaatttggtcctgagaagaggtaacaaatgagtgagtaataggtcctttcttgccattcctagccatgtgtggttgcccttaaactgactgcccaaacacatcagtgatcagcttgagaagagtgatatcttgagacytcaatcaaaaatataatagagrcagtgcacaggggcagcctgttggtatttctatctttctctctgccacatccgatggagagttgctgtagttcagtggctaagtcatgtccgactctttgcgaccctgtggactgcagcacaccaaactccctcgtccttcactatttccctgagcttgctcagactcatgtccatccagtcagcgatgccatccaaccatctcatcctctgtcgtccccttctcctcccaccttcaatctttcccagcatcggggtcttttccaatgagtcagctct

SEQ ID NO: 21684 - DNA, 600 bp, Bovine  MMBT05196
agatcaaatggctccaataagcgtagtctgtcaaaattcttttcatttgctttcttggtaatttattttcacgggtgagtggtttcgttattgcagtgcattttgttggcgagtgttggaaagtaaaactgaggtagatttttctaactgctcctaagtcaccctatactcatgatttctagacttcagagtttgttttgttttttctttttttataactgaaaaaagaaaaaggcattaagcttagtatttttggaagcatttagaccatttcctttcatttgattatatttacatagyagaactctataaaaaggatctataccaagccaattaccattccaccttgacataacttggggatgttctagaaacctttgtgctttgtagaaataaaatggaaatttttagtgttttatacacttaaagtgatagaaataaattaatttatgcataaaagaaaaatacattcaagtaaaatcaaataaaaatagacaattcttttcttacgcctttaagtttaaaaagtagcagatgatcaggaaaagttctgtattaattaacatcatggctaattatagacataaattttagagctat

SEQ ID NO: 21685 - DNA, 600 bp, Bovine  MMBT06418
catacatgactactggaaaaaccatagctttgattagatggacctttgttggcaaagtaatgtctctgctttgtaatatgctgtctaggttggttataggttttcttccaaggagcaggcgtcttttaatttcatggctgcaatcaccatctgtagtgattttggagccccccaaataaagtcagccactgtttcctcattctacttggcaaacaatttatgcttatgaacaacctagagtctgtaatgcataggttgtcactgaggaactcctggctccagccaatctgaatccacacytccaaaggtgtacccagaacatgccaagggcagcccactgcacacccatgctggtactggcttccttacccaggaggccttttcacactcccatttgcagatcttaccccttcttcaaggtctagtttaggatctgcttttctcatgaaacttcctataaatatttgagcttttttaaggatcttgaccgtccaacatctcaataatgatatccagcgtgcgttctcagtcacttcagtcatgttgaactctttgcaatcctgtacactgccaagctcctctgtccatgggattctccag

SEQ ID NO: 21686 - DNA, 600 bp, Bovine  MMBT10917
ttgtccccttctactcttgccttcaatctttcccagcatcagggtcttttcaaatgagtcgttctttgtatcaggtggccaaagtatcggagtttcagcttcagcatcagtccttccaatgaatattcaggactgatttcctttaggatggacttgttggatctccttacagtccaagggactctcaagagtcttctccaacaccacagttcaaaagcatcaattcttcagtcattgcctttgagctcagaatccagtggcagaggcagcaaagtctgtatcactgcactacaatgaagsaagtgtcatagtagatacatatggaaaagttttgtttcatccagggtggaatggaggaagtgttaggtgggtagtggtgatcagggaagtttcatagaagggacaacatttgagctcagtgttcagggatatatagttaaatgtcaggtgaaaaagacaaggaactaacaacagtccaggcagaggaaatgggacaccaatgactggaaggtatgcaagattatacagtatgggaacaattgttaaatcctgaagtgatttccatcaccccattccacgaaacatttgaggcagttttta

SEQ ID NO: 21687 - DNA, 600 bp, Bovine  MMBT04878
aaatagcagatgtccttaggaaaaaagtgatcctaatcgccaagcttacctgtctaagtctcagcttcttctccaatcttggccttcaatcctttgttagttttttagtacattcaaatagtatttagctactttttctgatctttactcagcttttctagagtttttagcaggagtgttaggagttatttaatccactattaccagaaatagatgtctgaagtttatrctttgtaaataaccaaataaccaaacttcaaagatgtaaattgctataacacagtcacataaaataagtargaccataatactaaagttgtcctagaatgttgtacctttgctagaactacactaatatatagctgaatggggagccacttttcctgagagtgaagcaagattttcagtcttacctaatggtcagagtttctttctattgggttgtcagtttctatataagatattactaaaataaaagaaaaagaacacatattcaagagaggatacacactctcattcatagaatgtcaagcttttttatcagttccatatgatgagctatcatcatatatggaataatctgtgttgattttcttgatt

SEQ ID NO: 21688 - DNA, 600 bp, Bovine  MMBT03282
ataaggcagaatgactgcaacaacatcttttgattccatctatttacaatgaagactttagcactcatttctttaacctcttatcttgactccaattatttgttaagaggagaatttagtattagatctgtgtttttaaatgactagtttttatattatataaattttcttttgtgcatattgtttcttcacatttgcattcattttttggaaacaatacttccatatttggcttcttaacacaacatcagccagaagaattctagtgtggtgatgggctgggtgcaccaggagagccarttagtacccccttgggatattttaagagaaaagyctgtaacaaggtactggaagacatatctctgtaggcagtctcctagatttscccytaataatgtgtgtgcctaactgaagagaagttactatarcagatccttttatttcagtatttcagcatccctaattgtggtgtcagaaagaatcttagaagcacagagataaatgggagactaatgtgaagggaagctgattaaaaacattcagtgaattgagtttggaacgttttttatttgctacaaaagcacaaagtggcagactgac

SEQ ID NO: 21689 - DNA, 600 bp, Bovine  MMBT04511
ctgttacccagaagcctctttggacttctggaaattcctgtcaactacatttgaagaacgattctcttccagttgggaagggccttctcttaaactgagcatatgaaaccgagatttatcaaactcaacctggctaccattgtggtgacagatgtcccagctcaaactccctcagacaatcctggagtggctctttgcagttctacatgtgccaacagtcgttttcaaacactgcatttttttttgctcatgttctccttgcttttcatgtgaacttcatcaggtagctctttcccctgwatatgtgatttctgacttttaaaaccgggaagagcaattctttcctcttagatcactgaaagtctgacaagttgaatatcttggtgaacgtttatcagtatttgggagtactgaccctcctgctccaagtccagaggtcctagtgttgttcacctcctagccccaaagcaaaagaaccttcctttgtctcttttttgaatactttggagaattcctagccagtaacttcatttccctggaggaaatgcatgagagccagctgctaagtgccggtgtttgcatgcacctgtttgtttattt

SEQ ID NO: 21690 - DNA, 600 bp, Bovine  MMBT09493
ggtcaggggatcagtgtagtatggtggtcaggaacatgaactctggagtcagccttcctgtgttcaaaccccacactgacctttggcatttaacttcacttctctaggcttcaatttccatatttgtaaaataggacagtaatagtaatggtaacaatcttggaatgttctaggtcaggtagagatgaattgtgagaactagagcattgagggagcctctgtgactgttatgtgctaatgatgttgacccagatccttgcttcttgcagcctggcctttgttcatcatagtcctcaattrggggaatcagcttcccacctcattggccagtggaggtcttaccagtccccaacccataagatagaccattttaaccaggatccagtcaaaagtgtagaaatcacaccaggtcttccaaacagaatcaggtttattatggagaactggtgacaccggtaatgcaagagccaagaagccaaacaaaggacagtgaggtgagcmagaaatcagcatcggcaagaagtcactatcgtctgaggactggaaggacatgagaaaatacagctctacagatcccagaggccaggcttccaggtaggt

SEQ ID NO: 21691 - DNA, 598 bp, Bovine  MMBT09292
  misc_feature (1)..(150): n is a, c, g, or t
nnnnnnnnnnnnnnnnnnnnnnnnnnnnnnnnnnnnnnnnnnnnnnnnnnnnnnnnnnnnnnnnnnnnnnnnnnnnnnnnnnnnnnnnnnnnnnnnnnnnnnnnnnnnnnnnnnnnnnnnnnnnnnnnnnnnnnnnnnnnnnnnnnnnnntttcatgaatactaaatttaacaattaatgaggttgatataatgttacagttggacatttgattaaggatttattgatttcaattttgcagtgttcttattttagagcaggtaatttttttccagctgtcaaatattcaaatgatgcccytgtgkaggctcttgtgggcaatatgtgagcaacctgggccaatacgtcttggccatcctccacctgaagcatacatccctttatacacacagacacagacacacagacacacacacacacacagagcctatgtatatggacacgtaattgttaggaattgtgttaagctactataacaaataaacttccaaatttcagtggcttaacacaatagattatttttcatttccaaaaacagtctgatttggttccaggacaatgatatcaaggatgagggtgtgttaaagagggggtagac

SEQ ID NO: 21692 - DNA, 600 bp, Bovine  MMBT10072
ccacacacacacacaaacaccctgtgggagtggaatggcctaagctcagatgccaacaaaaggcaagtgtgtgtgtgcgcgcgcctctatgtgtttttatatatgtgaatgtgaggaatggagataaaggaaaggtacgtgaatgactaaatagttacacttcagtgtgttgtaacattttttaaactgggggtataattacttcacagtgttgtgtgagtttctgccatccagtgaagtgaatcagttataacacacacatatcccctcttttttagatttccttcccacttaggtcaytggtgagcactgaatagagttccctgtgttatatagcaggttctcattagttatctatttgatacatattactgtatatattaacattttttttcagtgtaaagagcattctagggtggaaagtcaaaagaagtctattaacaaggcaaaaagggagatagatgtacttccagaaaaaggaaaaacagaagaaaaracaaagacagtaaaacaagtgaacactgttctcacatctttctcctcttccttatctgtaatttttgaatcattgggtaattgttcaggtctcctttgtctagt

SEQ ID NO: 21693 - DNA, 600 bp, Bovine  MMBT11562
ttcaagtttctaatctacccccatcttccctggttatgagtgtgacaatattatttctaagcaagccatgctcaatrgatctcatcttttgttcttctttttctttcaaatacctcagataagaagtaatggtctgctgctacagacgtaggcagtttcaatatcagtcactcagtaaatatttattgagtatttgctatgtgactggcagtgtgctaaggactgggtctatttccagagacatacaaggtacacagtccaaggcaccacaattttcctgatctcggaggacatgtagtrctaacatatatttattatgcagtcgctgcaatccaggaattgtgctagaaactgggaatacaacatgaattttaaaaagaaagatatctatctttatggagctcatagtctaacaagggagaaagacacatgttaaaaattatttacagttcattcaaatatgtacaaaatgctctgggaacagagaggagtgaaagggattagttctgcctcgggtaattgtggaaagcttcacagagatggtgatatttaacatggagtttaataaattagtgttaattaagcagagaattaataata

SEQ ID NO: 21694 - DNA, 600 bp, Bovine  MMBT15103
tgatttaatgagagactgtagtcaaatggagtctgagattttaagaagcctaggctatacttcatctgttgtgtgaccttgggaaaattatttaacctcattgggtctaaaaaaatggtaacaacagtgggttaattgtgatgattaaatgaagcctaaaatttttttgagagcagggactttctcttcagtaagtatcacatatgaacagtgtgttaactacagtatattcaataaaacaaatacttgttgaatgaatgaataatgtgtgtaaaatacctagaccagtacaggcaaccrataaatggtatctaaataacaattattagcaaattagctatatatctttatatatgtgttatatagaacacatagaaatttgagagcatatagtagatcctagttgactttaactgtttattttttcattggacaggattgaagatgtttgattgagtttactgatcagaatttttttttccctttttatcatttgttttttctttttgtttttggccatgcctcttggcatgtgggatcttagttccctgaccagagatggaaccatcacctccagcattggaagtgcatagtcctaat

SEQ ID NO: 21695 - DNA, 600 bp, Bovine  MMBT09885
agaggagatggttagaaaaaacgttttttaagaaccagtggaaagatgccggcaacccttcaccagtgacacaaccttcgctagtgtaacaacacacaaatgcagtgcatagggcaaaaactcctgtcttcccaacaatactggcagtaatttttaaccagcattctgcagcaaaaggtcatctattccacatacttttgcgtgaacttatcattttctctccgactcagagaagctaccgcctgatctgtatttttctgaggggaagccaggggtcctgtgcagggatttctgtgcccrtggatgcgcatgtactggctaggaaaaagaccctgctggtatcagtggtgacttctgccactaggaaatggatcacaggctcttccggagagtggggactycttcccagccagaccagtcatcacagaatccygtgcaggtcgccttcgtctcccagattaacttctaaagtgccctcccctgaaatcagaccactcaacaccccgggcagctaaaacagtccaggcctgattctcgccaagaaatgttttcttgaaggagaggaggaggaggagatgamataggggtgaaagatacaag

SEQ ID NO: 21696 - DNA, 600 bp, Bovine  MMBT12595
tatactcaaccagaacaacatatcactacagaattgaatgcaaaaagcatatatgagaataaagctgacttctgttaattcagacattaaagctttgcaaaaatgtaaatcattgccactcttctcaccaaatctttttgttttggaaagtagttatgttttcctaaaatgttatttatgttaacatgtaatggattttcttttttgttaagtgaattaatatttttaaatgtttgcagttttaatttcaaacatgataaatattgataggaataatcaactttggagtcctgagtaaayagtaggaatataaagcggtcctacttgtgagtagcatataaaagcccaaactagaagttctgacctgaaagaacagagttctagtactggctgccatgaacctgctgagtggccttaaataatgatttaacgtctcaacatgttctaattcatttagtcagtccatgtcatagggctatcagaaacaaattaaaggtaaatagtattcactaggatttttttttttttttttttacatcgctcagttgtgtctgactctttgcgaccccgtggactgtagcccaccaggctcctctgtcc

SEQ ID NO: 21697 - DNA, 600 bp, Bovine  MMBT22298
aggagcttctggacgctcggggattggcggagccctgtgtgagccccggggcatgctgggagccgcagtggcctgggaacagcagtagtgtctgagccccggagcccggcgctggggggggtaacccgagccctcggagcccttgaagctccgggggcggcttagcttcagtgttttggctgagaacatccttaaagcttaaaataaaacctgcctgcggggtgtgggggaggacagaggagtatgcaagtcagcgtcatcccactccctcagttctagtctgtaggacaggatgctgarggcttggaccaaaggagccgctgatttggggttgcccacgagcagattctccagatccccccaatctacagcccaggctagcccctagatgcaccccccctccccccaccaccgcgcaacatacttacaaaggaaatgcaggcggccaggagaaggatccgcaccaggaggtcttcaaactgctctaacaccagctcccacagggacttccctgagggcagaggcaaggggaggggagggaagtgccgggggggggggggggacggcggtgttaaggtctaacggatgaatgcagggact

SEQ ID NO: 21698 - DNA, 601 bp, Bovine  MMBT05362
  misc_feature (1)..(1): n is a, c, g, or t
ntagcttttcttccaaggagcaagcatcttttaattttgtagctgcaatcactgtccactttccasttgcaattttcttgataatattaagtcctttgaatcagaaaattttgtcaggaaaaaaaatttgatagcctcagtcctttagattaacagtttaaatgagttaatagataccttatatttatatttcacaaccatttgaaaacagatggtaaacatgaattttccatcagtgagatttcttgatggtagaaaggattttactggtatggaaataattggttttggtttagggaayactacttcctgacctgatgaattaatcactgatgaaagatagtactacaggatttttatctgaagcttatgttgttcgattatacttggctcctttttatcagggaactcactggctagagtgatattgacagatttgaggttttgtcttaggacaagccactcacaagcaccaggagcccactgaatatgagattacagacttctttgcagccagtaaaatgcaagatgaaatttgggccttgagacagaaaatgaagaaactaaagatgggaaatgagacacagaccaaataagaatt

SEQ ID NO: 21699 - DNA, 600 bp, Bovine  MMBT15293
tgcgaccccatagacggcagcccaccaggctcccctgtccctgggattctccaggcaagaaccctggactgggttgccatgtgcttctccaatgcatgaaagtgaacagtaaaagtgaagtcgctcagtcatgtccaactcttagcgaccccatggaccacagcctaccaggctcctccatccatgggattttccaggcaagagtactggagtggggtgccattgccttctccagggaagctagggaagagcaaagcacatatgtccaaggtaaccaaactagttgttatattgtttgamcttgaaaccagatcccctgcctctggttgtgatgcccattccagctgcctactcwccatctgtccctacaaaaaaacagctggaaaacacaagttgtttaaacttcagtcaattatattaatatctccatattaaaatgactaaaacaaagcaccattttatgctctttaccaaccccccccaaaaaaaaatatttccaagtttcttaaaattccctgatgtggcagagtaagatagccagggtgggtattagtatctccatattagatatgggaaaattgaggtttccaaaggtttagt

SEQ ID NO: 21700 - DNA, 600 bp, Bovine  MMBT03613
tgaatcactgaaataacattaaaaatggtctcctgagtgctaagatttccctttccaaatcattgtctggatttggaacactgctccaaatagctttgtgctttcctgccttctatgtcttctttaagatgttcagattgttctgatgcttagaaacctctttcccactcccatacctgttactcaaagtactgaatcatttcttgctgtctagctcaaattccatgaaccatacccaacttttactccttgcaattagtctcattccttagctgtttttcctctaaaacattgttgtayctctattattgttcttactcartctgttgcaagttatatatcatctttgattcacccaaaacatctatataagactttattcatagtagaggggcaataaatgctattttaaattttacctcaaatggcacaaagttggatcaaatcagaatatctgataataccaaaagtaagacttataagatgcttactttgcagccattgtaactcgtatatttccataattttattatttttaaatttatgtatcttacagccatttaaaatgggtcttaaacttcaagatcctacttattattt

SEQ ID NO: 21701 - DNA, 600 bp, Bovine  MMBT15977
cctcttgagtgcataccaaattgttactctactctggtactcttgacataaaaggtttgttcagtgcaccccttaaaatgagamtaattccctctaactacatttgcttaacattagacccaaaggagtgtttccttatgcctctgacagaatttttagggaaggcagcttcttctatttctatttgcagctcctctgctcaaaaatcagatatacagccatggatcttagtcactagtgattcaacaaaggtcaccatgttgcacttaaactttcctactttcattcattcagggttgyatctttccaaggagattaccaaacttttacctagaaagacctgtggtagagttccacacttacctgaactagtgattacagcagtgcttattgagagctagcttttcaacaggtagaaatttgcaccatttgratttatattgagatcttttattctgacctaagcacctgaattgtcaactatgctagaaaaggattctctggcctaattctgaatttaaatgtagaatttgccttttcccacatctcttatgtgttccctttcggttcttaattttcctgctgatcacttgttattcc

SEQ ID NO: 21702 - DNA, 600 bp, Bovine  MMBT11786
acactgacttgtgtccctgtatctttgaactgatgcattttatgttatgttagcttaactatttcctcctcagttagtaaaggctcttctcctgagaaagttagattttattttcttcccagaaagctaaccccatgaccttaatacctttctgattttaagaggcgggatctctttaagtgtcaatgcctgtaaagttttctttaagaagctcaaatagaattatctaccgacatttctgataattttctgaagcaataagaagaggacaaagatggacacatcctttaaaaaggggascctttatcgtagtagcattggttcatctctttctatagaacttgaaagcctgtgctcagtaatttatgttaatgctttattttcgaagttttctttcttccataagctcttcatactttcaccaagaaagtatgacctttcccctctttgaaatttaccctccaacctacccccactctccaggctagcttttcattagggaactggggagacataccctcacgttgctatgcattgcgctctggtggcaggccttcctgacaaaaatcaaagagctgctagtgccggaaggatgaactc

SEQ ID NO: 21703 - DNA, 600 bp, Bovine  MMBT13675
gaagcccccgttccttcacctgtcctcatttataaagacgagttattaaaataaatagaaagcttgcctggctttttaaacggtgaggctcgccaccctccataaaagacgttagaacacacatcaccgacagggtagaaggtgtttcaacttcatcaaaagccttgaaaaggaggacatcctttgtatccatgctttcggaagttttgcaggactggtatttattttaaatcagaactgctcacaaagcgaactccctttacaaaatgcataggatgaagccatcctagagatgacctytaccgttcgagcctggacagagatattatttttatagaaaaaaaaaaaagaggatatctttaatcagctttaaaaaaacattgtgaacagtcacttctcttatttaaaagtttaactttactttcatcaatttataatcagagttcctctggtatgtttgattcctgacaaacaaggataaaagtcttgtgcccccattgctaatgagatgataaaacagcagggatcaagtttttaattactacaggcaatgcactggagaggtagcgatgatattttctattgcatgtctaagttgta

SEQ ID NO: 21704 - DNA, 603 bp, Bovine  MMBT00818
  misc_feature (1)..(3): n is a, c, g, or t
nnngatattatctaatgagcacatggataaagaacacagatttgagtcatttaacctaggactttaaggtttttgcttcatttcttcatttgctcattcagtaaatgttgacaaattccatatctgaacaggcacygtgctagttgatagataggaaaggataaaatcatgaccacaaatgacacagagcctgtcctcagctacattataatttagtagggaaaacacattatggtaaatacccatttgtttkttttttttttaatttgtttgttgttttaaagaaagtggtaagtataatamgggtgattggagagagtgttttacaagtctaggaagaggagaaatccaatttattctgtgttcactgaacacctattctgtgtcaaacacagtgccagcrgctgtagatgcaaagataaataaaacatgattcttttcttataagagttcttagtttatcaggattacctcctcctggggtgcagagagtgtcaggaaaggatttctggaagaagtgacattttaagttgcatcttaaaatgtaggtaaattttgacaaggggaagaaggatagagctttccagggagaggcaaaagcaa

SEQ ID NO: 21705 - DNA, 600 bp, Bovine  MMBT03118
aacccaggtcttctgcattgcagtcagattctttaccacaagggaagctaatggatatgctaatggaacgccttaactatttgattatttggaaactaattggaagcagtatgtatgttctaaagtacattaaaaggatattgagaaacatgaacttttgaccattaagggactgttttcatctataaaataatgagggttagtctaaatgagcttaagctctgacatcgagagtctmtgattatccagcgtgtgtttctctgggccacttaccttttgttcacctattatagcaacttyatttgttggcagtacttctggaggctacaggcaatcattactaatgtcatagttacctcaaagtcccaaagctgcttactcgmattggaatacaacgtctgttgctgctgctgctgctaagtcgcttcagtcgtgtccractctgtgygaccccatagatggcagcccaataggctcctctgttcctgggatcctccaggcaagaatactggagtgggttgccatttccttctccaatgcatgaaagtaaaaagtgaaagtgaagttgctcrgtcgtgtccgactcttagcgaccccatg

SEQ ID NO: 21706 - DNA, 600 bp, Bovine  MMBT10902
atttatgggtttcttaggaaatgtgaattgtatgatatttcatgggggttcttagatggaaaatttcttagaagatagctgaaagagatacagttttgtgactaaggagaagtagtattagaaaagaaagaaaagggtctagtttagagacttgtttgaagttaaactgattctgtaccatactttgaaaattaagtcttgtagatgaatgtgtcacttcataaaattaatagttctcttttatttttgataacttttgcagttgctttgtattcccagtctgtttatgtttgtggtatrtcccctccaaaaatgaatactgtaggtgaattcaaacctttggagaaatgatttcagcataatggcagattttactattttgtaaactaaggtttcttttccctctttttcttcttctagtgagagtgagtagtagacagctgatcttaagaggactgtgcattttattttcatacttagctgttattttaatatttcattgaggaagttgtgtgttttcccccctagctagttcactttagaaaattttgttggtgtcagtatataaacaactgagaggttattaagtaggtctattca

SEQ ID NO: 21707 - DNA, 598 bp, Bovine  MMBT13402
  misc_feature (1)..(13): n is a, c, g, or t
nnnnnnnnnnnnntgaacctccctccacctccctccccataccatccctctgggtcatcccagtgcaccagccccaagcatcctgtatcctgcattgaacctggactggtgactcatttcacatatgataatatacatgtttcaatgccattctcccaaatcatcccaccctcgccctctcccacagagtccaaaagactgttctatacatctgtgtctcttttgctgtctcgcatacagggttatcgttactatctttaaaataagtttaggaaaggccagttcagtggtgttcaacargattttttactctaggcctttttacttcctggtcttgaagtgcatcatgtatctttatgaatctccaggaggctcaactactaagcccatgtgcctcagctactgaaggctgagtgtcctagaacctgtgctctgcaataagagaagccagcacgatgagaagccctcgaagtgcaaccagagatagcccctgctcgctgcaactagagaacgcctgcatgcagcagtgaagacccagcacagccaaaagttaaatacataggtaaaattatatatatatgtatgtatgtatgtatat

SEQ ID NO: 21708 - DNA, 600 bp, Bovine  MMBT10301
ccattgttgtgggctggctgcttcttattcaagtggtgtgtttgtaggaaataactagtgccataaagcttcctgacaaaaatcacatttctattttgcaaataagaggtttttatttttttaatgtcacagcaaatgagttcttctttggaattcgcctgtgcttttcttaatattatctgctggcagtggctttgtatacttcattgtttccacagaacatattttgctatatgtatctgaagctgtataattgcacctcctggttgtaaatcaagagttggcgttaattaacagttrgtgctgtaatgccccactgatraaacaaatgtacccatttcttctctgaagaatcagaagtggcaggctrtcacttcgcagaactttctcatttccctaaactcrtaataaagccagcctcgttgtctcttcaggctactcagtcagcatccagcagyttgtgtctgtgctcattccatatctactctcgctcttctgtttactgaagcgctatagctgatttcaggatcactttttaaaaataaacaattacagtactttcgaatttgggrttttacccaaaagaggatctaattatcc

SEQ ID NO: 21709 - DNA, 600 bp, Bovine  MMBT13522
actgttgcctcttgacctgcatacaggtttctgaggaaacaggtaaggtgatctgctattcccaactctttatgagttttccacagtttgttgtggtccacgcagtcaaagactttagtgtagtcaatgaagcagaacagatgtttctctggaattcccttgcttttctatgatccaatggatgttggcaaggtcttacaaaggatttacaaatcgcttcctaaaggcctactccaacttgaagatgcattttgttctgtttgtacartgacgtttaaaacttgtcattatttaaaataygaatttgacaactttcaggtcatgccatctcccctccaagctcaccacaggcctcaccattgtttatggtcaaacacgcctgctgtttcaagtgtttatattatctgctgagcccctagaaacatttgagttcacagcctgccttggtcttgcaaacagtccctctgcagtacactctggttaaccaacagatccccacaccacctctgcccagcacttactctctgcttctcatttaaaaaacacgtctcatcccaatagctccttcctttctctgtttttctgttctcttccctcaga

SEQ ID NO: 21710 - DNA, 598 bp, Bovine  MMBT16875
  misc_feature (1)..(50): n is a, c, g, or t
nnnnnnnnnnnnnnnnnnnnnnnnnnnnnnnnnnnnnnnnnnnnnnnnnnaacataaaactggatgaggagaagagggtttagaggctggtgctttagtgattacttgcacagggacttccctggcagtccagtggttaaaacatcgtgctcccactgcagggggcatgggttcaatctctgttcagggaactaagatcctatatgctgctcagcaaggcaaaaaagaaaacggacacagatgccatagactataactcactagagtcacaggaacagtcctcattggaatatactttcrgagagctattttattattcgtttattttcatatttatgtatttaaatatttatttatttgtctgtgtcgagtcttagttgtggcacatgggatcttcttgagtcatgtaggatctttctaggtggcacacagactctctaactgtggcacaggcttggttactctgtggcatgtgggatcttagttcccagaccaggaatcgaacccccatcctctgcattgcaaggcagattcttaaccacttgaccatcaggaaagtcccctcttagtagtattttaggcttttggctcagcttct

SEQ ID NO: 21711 - DNA, 600 bp, Bovine  MMBT14191
gtcttaggtaagtccttcatttgttttcagccgttatttgtctcctggacatccattagccttcatcagtccttgctattttgaaatcaattaagatctgatacataaaagtttactaaaggagaaaatttcagagactgacaaatcatattcttaactgcctctttcccaaacttacccccaatgcagctgtttcactgatagggttggggtccctttagacgggatgtcatggtgtctccagatccaggagatcttgttccaactcaaccactgtgtagccatgagtaagctcttccytctcattctccctcattctcctcrtctgacaatctttagttggtgggtctagaattatagagtcactttgtgtaaagtttcgtataaaccaagaggatctatcttaatgctttcccatcaaactctcaaatttacctgcgactctttctatcttccttcctttctccccatgagagtgagcagctttcttcatacctaagatcaactgtttgactgttgcttgggatcacagtctccatcttctaggaaatgggtcttaatcatgactgcacattaaatcactttgtgaacttttatttt

SEQ ID NO: 21712 - DNA, 600 bp, Bovine  MMBT06673
ttgacaaatacgtcatgaaattcttagtgaatgaaaacaagcctaagattagaagccaggcttactctatctatagtctcttaaatctgcatctgactcccaggcatcagcctgctgtattccactctgtatctgtatttgactggaagcgttcacaaatggggaagacataaaatatttagagcccatgaagcactcaggactgtcaaaaatgatctatttcacatacatggccatgtgctggcgcttttagggcgaatttgtccatttatgttgaatatacctacagtctttgttctyttggatttcattgagttctgtcataaaactaacaataagctttgagatgcacttgagttctgtttctttttcctttcttttyccccccccagcctttgagtcatgtatatgtgattgagagaggcagattgtgtcttcagaatgagtgagttttaagtatttaaatacggtaaggtttgtctatagtggctcagacrgtaaagcgtttgcctacaattrcgggagatctgggttcaatccctgggtggggaagatctcctggagaaggatatagcaccacactccagtattcttgcctgg

SEQ ID NO: 21713 - DNA, 605 bp, Bovine  MMBT10011
  misc_feature (1)..(5): n is a, c, g, or t
nnnnnaccttcccagattagaacaatgtcttttcaggataacccmatgagggatggcgggatgcccaggttcaggtcagggcagagraagtgggtgctaccctcctccagcaccagcacacacagaaccctttattccaaagggctgacctcytgcaggcaggctgagagcrgagatggggagccagaggagagatgagcaggagcagtctgaagaagacccatcccagcccttcccaaccctgagtttgtgctggtatcacctgcatagcttttgaaaaacaccataacaaaaatatggatgcmtggaccaatttctgtctcaggggctgrctgggaacatctgtgttttgaaaccccccaggtaaattttatagcagccagggctgagaactagcatcttgcaagatccaagactcctgctgttacccttggaaggctgtgctttaagcggttcttcaggggcaggacttgggctctgtctgggcagggactccagggagcaaaagagggaattttcttccaagctgcctccygagcctgacatggggaggggtcagaggctggggtcttctgccagggtattcaagcagtgtcatccccacc

SEQ ID NO: 21714 - DNA, 600 bp, Bovine  MMBT03068
agtgactgatctgatctgatctgatgcattagtactagataatcataagttaataaacatcagggaactcactgtaccccccagagctaggcaccttaaactctttggggaaacagcttccataaatctaacagtcaatgggtcagcctctctggcagaagtctaagaggttatttatcacttcctagatcccataaggactaaggggtcaaactcccttttagtgatgtcactgttggagaaatgtgtcctttcttaggttaaaaaaaatagtcttcctcagcagccatacagcccaayactgtacctgcagtataagyatttcatacagccactctgagatccttcttacattaaatggctcattcacaaccatagccaggctaaaaaggatgcaggtcagatttcatccagtggaattaacactgggacaagaaaatgtctatataaggctaagttgtccctggggtcctaatagaaaactatttcaggattgttttcagggattctcccctacccccaccccagtctgggcagtaagatacatttaatcacccctttccccaacaagttttattaattcatccattcttgagttat

SEQ ID NO: 21715 - DNA, 600 bp, Bovine  MMBT01363
acagagttgtcagacttttcttaacctcttcaaaaaaaaaaaaaattctaactctatctataattaacaagagacttaaagatcacagtgttactttcaccaggcaagcactgggatcaacagagcaacagaaaggtattaaagtaaacttggcttctatttcttctgacaggatcccataaatgggaatgaatcatggccttttttctgtcctgttttcactcatttaacttattttactgaggacttactctataatgaaaatacataatgaataagacacgatctctgtcgttacgkatattaatgttacggaataataacagctaatatctactaagctcctattatgtgcccagcatcatgttaagaatttcatatgcataattccatttaatcccgacagcaatctcagtacrgtgttacctttccctttttacagagragaaaactggatcagaaagggtaacttgcctgagaacacataacaaaaacacagatctagggcttccctggtgactcagtggaaagaatctgcctgccagtgcaggagacatggrtttgatccctgatctgggaagatccctcctgcctcggagc

SEQ ID NO: 21716 - DNA, 600 bp, Bovine  MMBT11890
tgtcaagtgagctcaaaagtcccttatgagctgcaaaaaggacaagcacttattacctttgaaaaagaagaaggtatgactaatgttcaaaaacttgaccgtgttacctttagaaagcactgggacttccaaagagtttttgtagatatttggccattgctttagaatttttatatcatttcgtctcatcctcacaggggtgccctgaggtagatatgattatccctgttttacagaccagaaaacaagactctgagatgttgagtgatttgaacatgatcactagcgcagaatatgagygctctagaaagcaaacccgtgttgtgatgtccaatagcagcatttttatactmctcctgctacctgcaaatgataatactagtaataatgtttcaaggtagcaaagcagagagttctgacagacatgatctcattttatactcacatgactctgtaaaagtaataagatagagatactatttacatcattaagaaaccagattcacagatgtttaagtgatttacctaagtgcacaaggcatgagggagaaggcaatggcaccccactccagtactcttgcctggaaaatcccatggatg

SEQ ID NO: 21717 - DNA, 600 bp, Bovine  MMBT04856
atcagagttttcaatatttatgtcagtgcatttatttatttttcttaacaatttataacagtataacttaatgtatccaatgacaatattaccaagaaaggagtgtatgaaatcaaaccacattttcacttagattcccatcctgaccaatgcttcatcactaatgaagcattagcgatgcttcatctttttctttttttggccccrtcatggagcatgtgggatctcagttccctgactagggataaaacccatgcctctgcagtggaagttcagtgatgcttaatcttaatttttaayagattttagttggaagtggctcctcacatgtcacttctggtccctgtcactttgcttttagtcatggcttttattattgtttcacaatgaactgtttatacccctcattatttttattacaagtaatcagtgaatcaccatcaacagtacaaaccataccatagaaatataaaggaraatctacattttcacagtattttacaaatttcaataaagacatctttagattattgttttatctgtgaaatccaatcaaagtagtattattgttcaaacacaacttcaagttgccctctctgt

SEQ ID NO: 21718 - DNA, 600 bp, Bovine  MMBT22916
ttttagctgacacaataaaaaaaatgccattaaaaaataaataatgcatagtatttgaatccttctttcaagaaaaataaaaacatcctgtttcagttatttcagcagctcttctaactgctgaatgcttgcttctccaacttgyctcttctccctcctcccagaaatttgtctggttcatgaaattctttcctggtccatgttcacactgctattgtgttctattaaatgtgggatatcattacagcacgtgtcagtcatcagaaaaaacccaactccgaggctctgtatgtgtgtacrctagctcaataaattttagacaacagatgtagccgcaggttccaccttctgccactttcccagttcaataagaggtccagatggttygctttgccctggtgtcttgaatcttggtatgaagatgctgactctggtgatctttctctggaaccttcctttgacccataggtccatggcaagctaagtgtcaatggagactgccttgcacgtatctggccatttggaatcctgggtcccttaacagttaaaaagcatcttgaagtctctcttagcattctgcatggagaaactgtcgaatta

SEQ ID NO: 21719 - DNA, 600 bp, Bovine  MMBT01700
tataaaagaatctcccttggtgcttcaaaagctaaaatgttccagtccatacacatgtagctattatttttcaaattcttttcccattgaggttattacagagtattgagcagagttccctgtgctctacagtaggtcctcgttgattttctgttttaaatatagcgtgtaatgcagtgacttttaatggagtttggcagcaaacttaccaatatcagcatacctgtaacaggagacttggtggtactaaactcatttgtgcaaacatctcagcctctggctatggagacgtgtgctgaragacacttggctatgcagaatacagaaaacatttaaactaatcacagtacctctgaggattttgtcctttgtaacgcttttactcatggcacaatcaaaacacaaaattgatatttcttgtggtggtttgtgctcttagcaaagtcctctgtttatcttccttatggttgatatttcatccccctacccaaatacttacgctctcttagccaaaccccagttctttacacactcaaagcagtgaattacttgttaaaacatttcagataaacagatataatcacatctctgtttggactt

SEQ ID NO: 21720 - DNA, 600 bp, Bovine  MMBT01884
aattttaagcacccccagctctttcgcaaaagagacagcagaatttgtttctgtatttcttgtgttttgaaaatatttattgaggattttttgcatcctagtttttattccaagaatgctgaatcatgatcactgtaataggccagagcaagctgtcagcccccacacaagctgttatcaagacactcttgaaaatatgttctatttctaaacagttgagaaacaatttttaaaaattatttatcataaagcgctttccaattgaattgccctattcaatatagtgcatacttaataacygccactttcgcttcaagagagactacaagggaaatgcctgtttagttagccaattacttaattctttgttgcctagcatagggttccattgtacrtgaaagacacagaagcagcactcccatcctgaatgatgtgtgcagtgtttttatttttctattttaaattttattatttatttatttrtggtatcaaaacgttttattgaggggctttagaggaggatctatgagcttgggagaacaacgagatcacacatcctcgcccagcctgtatattccaagctccagggtgcaaaaagtg

SEQ ID NO: 21721 - DNA, 600 bp, Bovine  MMBT12808
taatgttgacaataatttcccttgttctttttggcaggcacaatcagggtctgatattcaggttatactgccagcagcatttttcaattagcatttaatactccccgacaaaatgctcaacctttcgctggcactgaacccagtgtttcagtgaaaaattgctcagaagcaaaggccttttctttcattgatctccttgttcccctacagtttctgtacttggaatactctcagctttcagggacactgtagatctcaaaaatgttattttctagtttgtgcttgctttatttgtagtgyttactgcyctgattttaaaagttgacaggcattgccttgcaagtcctggaaaaatccattatgaaggtgttaggaatagacattcacacagactcactgtaccatcattaatgcatcctccatgaagagctccatgtttttcacctatcttactgtgattagtgagtcagactctaacagaagccaggactttttgcaaagatgttattaaaatttctaaattttcaaagcttgtattcagaggacaccactcttacgagttattttttctaattcaagtaaactattctgctgagtaaa

SEQ ID NO: 21722 - DNA, 600 bp, Bovine  MMBT19603
atcgttttcaagtgttttcaattaaatcataacagcatattctaaaaccaatcttcctaaaaggtctgcttttattgtatagtttatttaacaataggcaccgggtttgtgttacatatttatattttttattttatttttataatatagacatcacctagatgaaacacctttaccctgtcctgtaaaatactaaagttacatttttcaccaacttaattggaaagaaggggagtgagaaagcaaacagcctttaatgtgctgtggatctaatctagcaatgtatccttgtgccaacaygtaatcattaacgacggatgaaaaagcaagaaaacagccactcattataaaattccagcactaaacattcgtaaaatgcttttcaccatagcaagcctgtcagagagtatatgtgattagaatgttgtgggtttcacactgaatcgaacctcactggaaaaagagttcactcgttttgaacaaatcttgcctatgtaagctgtcacttgtacgaatttttaatatgctcattcttgccaaatatgacttttaatgtgtacattccttcagaactcaatgaaaatcctctccggttcatgt

SEQ ID NO: 21723 - DNA, 598 bp, Bovine  MMBT03310
  misc_feature (1)..(28): n is a, c, g, or t
nnnnnnnnnnnnnnnnnnnnnnnnnnnnttttgcacatagtataatccccagtgctttgtacacggcagatctcaataaattttggttgactgagtgggggcaaaggtaacagaagaagttaaggggatttatgttaacatggttcccatagattagtttatataataacatgagaggctgtttagcacaggaatttcctgtctttagcttttccatatgctgtagattgagcaagtcatttttactgacttcagtttgcatgtctattattagcctttcttaactggagctcctcatawgaactacagaacacagaaaataatttcagtgactattttcttgattcttcccgggatgatatataagtagtgtcattcttaatacatagggggaaaatattggttgaatgaatcatttcataggagtaaaagaagatgggaatgaagaaatatgaaagcaccttgaagttggaaatgggtgaggtcggtccagaccaagagaaaaagcattagcaaagatgggaaagtaaccgggggtaagtaggctggatgcatgcagaatgggcacaaagacttcaatgaagacatttggaggaga

SEQ ID NO: 21724 - DNA, 600 bp, Bovine  MMBT11629
accttttctgctctcttaagttagaatatgaattagaataatsagctagaatgacttattaataacaattagaatataaattcttccataagaaacatatttctatgatgataaacaagggaaagatcactaagatggagcatattcatatttttgtatgactgatcctctttacaatttttatttaaaccctcggcaatagaatgagttgcaatttcataaataagatatataataataaatgtttaaaaaaagtgctagtagattcttttgaacgaaggtacagaggagctacaggaytatctattttgtaggggttttttttttttttttcagttgagtttgtcaaactgttatttttcttcctgttttgagtagtggcagcttgaatagatctaggctggcatagcttctgctcacgtcacatcatttgagcctaacatgcatttgacagcatgaactctcgggccagactccttgtgtttgaattctgggtttaccattaccttagaagaggcttattattttaatttgtgaggaggtcaaaggaagcatgaatctgttctgcaatcaaaaaatggtagcagtctggtgtctgta

SEQ ID NO: 21725 - DNA, 600 bp, Bovine  MMBT05819
aggtttacattcgccccaggagatctggcaaaatcttctcccagtgagcatgtaatggggcagtagttcttatctttagtaggaatcacaaaaaaatgaagatttgttttgttttatagttttattctaattcttctcaaaagttggctttcyctctaattgaaaacactgctttcaccctgtctgatatacatgatctaattagaaccttttcccccagtgcactgagttatataactactttcagtaaacttggaccttggaactagttctcaaaactaaaactccaacatttgtaamagttctttggtagtaacacagcctgtctaaacaaacaataactggttaatccacattaattgctggcatctgccttatcctggatctgccttcttctgcctcctcaccatttcaaactcttgcccacagtgaaaaaatggaaataagtttgagcaaactcgaggagatagcaaaggacacggaagcctggcacgctgcaatctatggggttgcaaaaagtcagatatgacctagtgactgaacaacaacaaaatgtggatgaaagttttctgaggaatgatgtgtttcacaattttaatg

SEQ ID NO: 21726 - DNA, 600 bp, Bovine  MMBT12110
attttttgctgtttgatgtaaaggtccaaactataaattgacaagaagccagctggtacagtgatgaaattcaagacaatgcaactaatgaaaaaagcccctgctctgttagctgaacgttttgattagccactttgtgtgttttgtttctctaaactgtaatgcatactaattttacctaggaattaattaaagtctatcacagcctccatgctatggatgttatataactctttgttgatacaaagtttatgtatatatgagaataaggtgcagttttaatgagaattaaaaaaaaamaaacacttttgctcctactcctcttgatggtaccaaaaactaactctttaaaggaagtatctattttaamatcaaatgctttgacctttctcaaggccatcaagtcaccaggaggttgttgttcagatgctaagtcgtgtccaactctttgtgacccatgaactgcagtgtgacaggtttccctgtccttcaccatctcccttaggttggtcaaactcatgtccattgaatcagtgatgccatccaaccatctcatcctctgctgcccccttctcctcttgccctcaatctttcccagaa

SEQ ID NO: 21727 - DNA, 600 bp, Bovine  MMBT11290
cggcccctggttgtttgcagtaagtggtctggtctttgtgttagcaaatgtggccacagatccaccatgtttcagggtgtcctgggcatttggtgtccaaggggtgaattaaaccaacagcttaatcctcgaagagtttactgtcctggggggaggaatctggacagatatgaaaactatggcagaaataggtaacatgaaagcagtaaagagtgggggtgcgggctcaaggcaggatggacgaggtgagaacacatgagacagtatggagtcttccagatctaacagctgcactttgtkttgaaccctaattcaaaatgcttactttccccccagatgtgttgacctattcactagccaacaatataatcttattaaaaggctgctccccttggaaatcaaaggaaattactaaaaattattaaaaattaagaatttaattactctctattctcagctatagagtattatgcaaaggcctttcttctggctttcaggaaaagtcgagcttttgagcgcctactttgtgctaattagtgttgtctttttgctgagagctggggaaggaatggttaccgtgactcctgtagctgaaggaag

SEQ ID NO: 21728 - DNA, 600 bp, Bovine  MMBT12726
acaggtggaaaatctaaattctgaaaatgaattgaccttcattttctgatctgtttatctccaacagtgttagcatcgcccatgyaacaagtggtccaggcatttgagaacccctgttatttacttactcagccttgggtcatcattccttcaggggagactccctggctccccagacctcgtgtagcccctctggtcacacatttcagtggatccctctactcttccatggccatgcttctcacctttgcaatgaaatayttgctgcatgtaatgrtttgtttaatgtctgcccccttyactaggctctagacttcatgaaggacagaactaatgtctagcttcttgtgaagaagaaataccttgaaatatttttttcaacatagggtacctgacacrtgctcggtgtttgatgaatattggaaggaaggaatgcatcaatggaaggagtttgtgyaaaaytgtgtttgtaaagttgtgcagtgtctggcacacagctgacacacgtaacagaagcagtaactattgttgataccttgatcagaatcatgcagtggccattgataaactagcttatgtgatttcacggtacttaaatct

SEQ ID NO: 21729 - DNA, 600 bp, Bovine  MMBT05283
tcaccgaaggcaggtgtgagtgaagctctagaattatttttcttttttatatttttaagaaagaactttattcaggcaatttaaaaataagattgcagagcaacacacattccaaacataggtaatgagcgcttgtcaatacttgactgtgttaatattttaatactactgatctttctcatttgctttgtaggttagtatttatttaccagtcctgaagactatgaagagcgttgtggagaagatgaaaaacatcagcaatcaccttgtaagttctgacttctttgaaaagagctcccwagtgtgcagttttggctgcatgtcctyggaggagccttgtctggtggggacttgatgccctccattcatcatgtagtgtctgcgtggggtgtccctcagctcccggctctgggggcttggcttgttgttgatagcctacggttttacaggtgaaacctgctctggatcttctcaactctcctctctgatatttggcgtagtctctcatatttatgrtatttacagtatattaacaatacattcagtggttttaactttctttccatatgttttggacagcatattatgtattttatccga

SEQ ID NO: 21730 - DNA, 600 bp, Bovine  MMBT12880
ctagaattatttttcttttttatatttttaagaaagaactttattcaggcaatttaaaaataagattgcagagcaacacacattccaaacataggtaatgagcgcttgtcaatacttgactgtgttaatattttaatactactgatctttctcatttgctttgtaggttagtatttatttaccagtcctgaagactatgaagagcgttgtggagaagatgaaaaacatcagcaatcaccttgtaagttctgacttctttgaaaagagctcccwagtgtgcagttttggctgcatgtcctyggaggagccttgtctggtggggacttgatgccctccattcatcatgtagtgtctgcgtggggtgtccctcagctcccggctctgggggcttggcttgttgttgatagcctacggttttacaggtgaaacctgctctggatcttctcaactctcctctctgatatttggcgtagtctctcatatttatgrtatttacagtatattaacaatacattcagtggttttaactttctttccatatgttttggacagcatattatgtattttatccgatagtgtacattttttttttatgatcac

SEQ ID NO: 21731 - DNA, 600 bp, Bovine  MMBT05533
agaggtagactggaataaatttgagcacacaagcaatgccattggaaggcaggtgaaatttggaagaggggagatgtgcagatgagcctaggaaccagttattttattgcaagaaaaagtcttcaatgtgcacactactatctgtgatttggggttttaggaaagagagcaggagttggaaaaggaagaggcaagacagatcaagaactttgagatgtgccaggaatttgaacagaatgccagtgccttccttaattggatcttggagacaaggtttgctgtgatacccccaaactcacratccttatgccgcacattccactctggggatggaatatatagctgagggaagaggataattcttacagtacttatgctgtcctaaaatcaccatatcctgcctgtgctttgtatctgaaattgactgtattctaaatcagtcactgcaaaattgagaaatgagaatttcatctcattgcccattctttattcactatytgaaagtctcactttttttcctcttgcctataattacagccccaaaataataacattcacttacgtttgccttcccctttgcactttacactgtaattttat

SEQ ID NO: 21732 - DNA, 600 bp, Bovine  MMBT00950
gtgcaaaacactgggactgtttaaaggtcactgggtgggygtgcctactttctgctggctccaggrttgggctctgtcttcccacctactctcccctggccccattccaggggagaatggaaaataaaatcggtttaaaagcaaacatttacaaataatggtggtgggggcggaacacagcagagagcagcatggttttccacctcctactggctcctgtccaaaaggaaacactagtatttactgccgcagctttgttctctttcaatctcgttccaggaagtcaagagtaaagatacrttsgggagggagaaagaaagaaatgaaaacccaagaagacgagtatgcaatgagcattagaaaatacattcccacccaacactgtaaagcaactatattccaataaaagaaaaaaaaaggaaagaaaatacattcacaggtgtggaatcagaagacagctgttcaggtttaaaaacaacacacatcatcagaaagtgcttttctacctcattccacagccaggctcttcacaggctcatgttcaaatgtcaggatggcagcttgttcctggacaccaaagtagaagtatatccatgttgt

SEQ ID NO: 21733 - DNA, 600 bp, Bovine  MMBT02939
acttgaatttcaaatcagtacagttcaaatcaatgtgagttttctatgagtgtgtgacagtatgtgtatttttagttacaatgtataagatgagatgagctaaaggtattcagtggcatagtccagagcccccactgaacaacaaatggatttcatttgccgtgtctgttagatcaattatcccaatctccttccttccatgactattcacgctttaaaaaccttaaagcttctcttttaagtacagctgggactcattagcttctttctgccaatctaactatcattctgtcacttttycttctttctctttatgtcctcaatcaaataagtgtcattttcctgctttcattttggctggaaattcaactgaatctgctttccaaccaatctggtgtataaaattccaatcttccctattacttttggctcacaaatcaaaacaatgaagccaacttctagtggtgctctgactctgctgtttatttgggttctgcattcagagttggaacaggtgccattttttcctggggcctaaacatcaaaatatttgtgaaatgggctttgcactctgctgatctgtatcaagtcggttacagt

SEQ ID NO: 21734 - DNA, 600 bp, Bovine  MMBT03429
tctggcgtgctgcagtccatgggatcgcaaagatttgttcatgactgagtgactgaactaacttgaaaatttgaatttctgtagcccaacctgactcagaaggactgtctgcaagtgaagttaatttaacctaatggagttatgttaggaagaaggataaagtgtatatatcagatagtctgtcatagtagccattagatacagatttttgtcatcgtgctcaaaattccacttcaggatactccctttttaatttttttttttttttaacatctggaaacattgatcttggtttgtcgytagttcatttaaaggttggtggtttatatcatttatcttaattcaccctgctggtctcagtaaccactcttgaacattatttatcttcatttgattcacatttgctcagcagtcgctttctgacatggctcttccttatacacttttcatttattaagcggcagatgtatgacatggtttggtttagtctttccaatccaattcagcagtagttgcctcaaatcatctttcttcattgatgcatctttgtcctatggcattctccttctctcacttgtgtactttagcaatgatcatata

SEQ ID NO: 21735 - DNA, 601 bp, Bovine  MMBT04638
  misc_feature (1)..(1): n is a, c, g, or t
naaatacaccactgttgacctcccaaatttcttccttaattgtttttctgagcattgatgtttccaaatcaatgaagagagggattgatgatggaacaattctactctggctaccacaaaaaataacagttatgtattttagggacagagtttaatgttttggtgagtaccttcttaagagtgtgatgaagagttatttctgtgtactttcagatgcactgactttttctgtttgtggtgacatagcatggatgctgccttcattgacctttcaatacagtttctgaaacttcaaatttartggcagttaatccaaaattcgtagacagttgrctcttagttctacttaaaaacatgagaatggaaatagtgctatgcctgggttgagccattcatgccttataatattttaagtgttttaaattgccaggtaatatttattattttaatagttatactcaaggcacaatttatttgctctggctctaatataaaattcatttagattgtgttagagacaaattcagtagaatttgctatgtgatagaaactatcattcattctctttttcattcattttgaatgattgaagaacatagat

SEQ ID NO: 21736 - DNA, 600 bp, Bovine  MMBT10130
gtgctctctcttttcatttcataaattctgaaagggaaattacttttccttaaaatttagcctactctagaggtaaaccgtagtgactcaggggtttacatggtcatcagcaacaygattaattagttggacttccattatgccgaaacatgtaattcaagaggcagtctgtaatagagaaactaattatactttgaatcccaataaacttgaaaaggcaattgcaatactgtaaaatgtatccatcaaaatgatctttggagaacttgaataaaatattcatttgttctgaaaattatyatttttaaagcaaatggatcttaggataaagccgtctaatctcttttttagaaatgcaaatccctaagagttgtgatgaaaggaaaagtgagccccctagcagcccagtattcatttgcaaggcctggcacacattatctgttattatataattatccgttctatgtcaattttccttttaaactgttaatattaaaaaaggcctatgatgttgactggcttactttatgatgagctatcatttgttacaataaaaattgttatcacattttaaactttgtgaacatcatgctgcagcaa

SEQ ID NO: 21737 - DNA, 600 bp, Bovine  MMBT15336
ttggagtgttcagcgccacacatggctaccatattgcccagtacaggcctaaagagtgacaagggaactttggctactgacgccttccaccatcagcatttcgtatctacttactgttaaggttttccaggtattaacatggataacttagcaagtactattacagcgggtcctactggtcacatcctcactactgtagctttctttctctaggccagtgccaacatctgtgaaaaaggaatcttcaaagactacacagaattgctatcaagtacctgacacgtggaatgtgctcagaaratggaaccsacgcacgcacggaataatgcacttgctgcggactattttgtatctattttcctgtggttcagctgtttattacactctatgtacaatgaaytttttaaaagttacctattttcaattatttatttattagaggcattataatgttaaaagcttcagctctggagtcagactaagaggattcaaatcctggttctatcattgattagatgtatgatcttggggaaatgcccagtttctcttgtgtctcagttctctcctgtgtaaaacagtgtacacacttccttggggagc

SEQ ID NO: 21738 - DNA, 600 bp, Bovine  MMBT23139
tgagaactatctgatccaccaaggtataaaatcaggcatccccagcagcacaccaccatcaagcagaatcggaatgaatagcactaaacccaaacacgtcacaagcaggttccaggagcaagtctcccacgctacccgatagccttccccttctgttctgctcctctgcccttgaccacacacattcatggcctcacgagtcctctgttcctagttccctgggaagtgggaaatgagaaacaggctatcaagtgtctctaaccagcatgttggcacagccaaaattgaagttctatagcrttactgctccactcaagggttcaaggccctrtctatatttcttcctttactctgatccaaccacatggggctttttgctgtccttcaagcacccccagccccacaagtttgtatccatctcagcatgtcacactccctgttyattcatttcaccacaaatagtcttggggttgtatacagcagactcttggtcggctaaaccaacactcattcctaagtcctttctcccttgcctgcctccactacagaaactggaaaactatcaccgcaccccccccaccccaccccagagtaccttag

SEQ ID NO: 21739 - DNA, 600 bp, Bovine  MMBT23137
tcaggcatccccagcagcacaccaccatcaagcagaatcggaatgaatagcactaaacccaaacacgtcacaagcaggttccaggagcaagtctcccacgctacccgatagccttccccttctgttctgctcctctgcccttgaccacacacattcatggcctcacgagtcctctgttcctagttccctgggaagtgggaaatgagaaacaggctatcaagtgtctctaaccagcatgttggcacagccaaaattgaagttctatagcrttactgctccactcaagggttcaaggccctrtctatatttcttcctttactctgatccaaccacatggggctttttgctgtccttcaagcacccccagccccacaagtttgtatccatctcagcatgtcacactccctgttyattcatttcaccacaaatagtcttggggttgtatacagcagactcttggtcggctaaaccaacactcattcctaagtcctttctcccttgcctgcctccactacagaaactggaaaactatcaccgcaccccccccaccccaccccagagtaccttagagcaagaagtattggccatgaaagaaaggca

SEQ ID NO: 21740 - DNA, 600 bp, Bovine  MMBT07312
agctccaggcccacagccgccgctgaccctgagctgtgtaagggttgcagcacgygtcactcagctccccaccttgtccagaccyagcgactcacctcaatatacgcagtgtcattatttgcatcyttaatgtgcgggaaccaatctcgaggaggtttagagagatgttttgactctgtgacaaaccataatagttttggccaaccttggaaataaagaacaagttcctttcaggcaagcatcactcagaagacaggtgtgacaccaccttcctgctaatggcaagatccacagcagcamaggccagatcaagtctctgtgtttccaagtctaagggcatggtcaaggtgctgtgagcctccaggagccgaagtctgccacatgcaggctaggagacctcctgtgtggacagcgtgttagcacaggccatggggcacaccctccccacccagcccgggctcacctttgaactgcgggatctccccmgtcgggctctttggcagccccttgtggcaagcatcgctcgtcaaggctacagtcaccccacagcttccaagcaagaacccaatctgctggcttcctgcatcctggagacagcag

SEQ ID NO: 21741 - DNA, 600 bp, Bovine  MMBT00614
cattttggcaccgtggtggccatgtgatcttatccatgcgggtttatttctggtctgtytactctactccattggtctatatgtctgtctttatgccagtaccactcttttttgattactaaacctttgtagtaagtttcaaattcaggaagtctgagtcctccagttttgttctttttctcaagattgttttggccacttggggtcccatgagattatgatggctttttctatgtcttcaaaaacatcatttggaatttgatttggattacatggaatctgtagattactttggctggyatcaacatcttaacaagattaggtcttccaatccatgaacacagtgtaagagacagcctctttccttacaccctsttgtcaattctaaacaaaaaaacaaacagaaaacttttgcccaccttataggtgacacttcatacctgtttttcattggaaagtcttcgatcagtattaaactggaacataggcttaattcttaatgggcattcatatttcttttgtgagttgtcattatgttctttgcttatttctctattggaatagttatctttttttgtattgtaggagcctatatatata

SEQ ID NO: 21742 - DNA, 600 bp, Bovine  MMBT20064
atgcagtaaagactgggtcagaagcattagtatattttcaagaaaagtctatgcaaagagggtccaaggaaacaggaakgtgaaatctggaggggttgtgaagaktcttgagaatttaggaaaatggaagcttctgccattaaaagtcctagacaaaacaaaaagtatgatggtgcattattacatattatggttatatattatatttaatacatgctatatgtgtgtatattcagcattccaaaataactatatgaatctatattttaacatctttcttgcttttcacaactttgcatsacatcaaagtytgggaatcagtggaatttcatttcactttcaaaattctaatgactctttcataatcctcacagtggaatagtaggaaatgtgctgcttaaatgtaaaagaaaataatatrcaatattcttaataatgtatgtagttataaataaagtgtttttttagaccaatgacatgctaacaaagagattacctactctgctatttgagatgtgaatttaatattcagtgttcttttatttattttttgtttcattttctttaaaacattctcctgttatttattcttgagtttat

SEQ ID NO: 21743 - DNA, 600 bp, Bovine  MMBT09066
aactgccaatgaatttgcaaatgacattgttgagctctgctagggagagcattaccatctaatgggtatatttagaaaatatttattcaggacctgatactttccacagtgaaatgacagtgttggcaaataatcatccaaagacattcttaggtttggttatacaaggtatcaccttgaactttaaagccattgctcaaccaaggccattttgtaaagaagtctttcacrtggctactctgtagagagacgtttgagtcttgatcttttaaaatgctacttttaaaaattcaacgaaargacaagtgcagtgtgatttcacttatctgaaatwcttaagagtagtcagactcatagagacagrgagtaggatgatgattggcargtcataaaagggactggatgggggaatcagatcagatcagatcagtcgctcagtcatgtccgattctttgagaccccatgaatcacagcatgccaggcctccctgtccatcaccaactcccggagttcactcagaatcatgtccatcgagtcagtgatgccatccagccatatcatcctctgtcgtccccttctcctcttgcccccaatccctcc

SEQ ID NO: 21744 - DNA, 600 bp, Bovine  MMBT06541
cagaataactgatcaaatgcaacacattttttgggactattgtgatgcttggagatttttatctgaatctaaatctagtcttttctctacttgtgccttagattcccttgaaacctcccctcttcatgaaggttttgggttgaagcaacagcatggcagttcttctcaagatgaaataaaaagttggattcaagttttgaagaggccctaccaagggtcactcatttgggggctgccccattgatgggacctcatgaggttttatgtaagctgtgccggtggcctgagccgagtatgtcyagtgagggcaacagtgcatagtttatggaagcaattactgagccaagttcttaagtagccatgatgccttcagttatgggcaaaattgggaggggtttcaatagaatgagtgtttgtattttcagggccctgggaatccataaagatcactgtagtatattatttcactcctactctgccttcctagtcctctcatctgatttaaaacgttctcagcaccggggtataaaattaaacactcatgaccaagctggtgctagcacacagaataaaagggaaaaaagaaaaccttaaagatac

SEQ ID NO: 21745 - DNA, 600 bp, Bovine  MMBT01671
taagtgcaccataatggtgaatacattaaatatcctaaagtagatggaatagttaggtagctaatttactatatcatgaatggttagggataattcatcttctactgtttctgttaaccatccttttgcctttttgcaggtctcaggtgtcaaagagtgaactaggacacaaggcagttaagaaggcacaatggtttagcagggagaactttgtctgagcccaartttgccagtatgtttcaaggttttgaccttggaaaatcaatttaaatccccctgagctctgttttcttacttgtwaaagagggaaattggactaaagtatcttgtttccaccttgatcttttcatgtattgataatgcactaactcatcaacaagacaatcattgataattgcatttttcagatgaagttgttattaaattcttagaaaacagccaaaaaacagctgtgccctaagttctgtttactttattatcctcaatgtcactaagagttaccattaatgatgcacctacagtgttcagtgcatttgtgctggcagtgataatgttacttcccattaggaacaaatttacattatgataccaaggcagtcc

SEQ ID NO: 21746 - DNA, 600 bp, Bovine  MMBT07111
tagaggaacctagcaggctatagtccacaggtttgcagagtcggacacgactgagcatgcacacaggcactgtatgttgtagcacgtaccaataccttacttattttcatggcagaataacattttatggcatagatatgtcccactctgaatatccattcagcagttagtggacattgggctgtttccactgtttggctactatgaagaatgctactatgaatgtttgtgtacaagattttgtgtagacgtgttttcatttctctttggtctatacccagaagtgaaattgctggatcytgttgtaactctatgcttaagcttttgaaaattgcagttttctaaagtggcagaatcatttttcacccccaccagcagtgtaggagagttccaatttctccacttcctcacctacatttgttgttatctgactttctgatgatagccatcacagtaggtgtgaaatagtatctcattttggtttctatttgcatttccctgatggttaatcctaggctttcgttgaagtgcatcttaaaatatttattacagttattcaattcaatgttaaagcccttgctcttaaagcaattaaaatat

SEQ ID NO: 21747 - DNA, 600 bp, Bovine  MMBT01398
tagagacaactactgaacatgttgtgtatttgtatgtttacattttgtgtaggagagttacatattagaactcaccttcaaggcattttggacattaatttaaatgagagagagagatgcaattgagaagggacaattaaggcgatgtctccagttgcttaatagtctgtagccactttttttcaaatctattgaacaatgtgttaatttcattggacattttatctgatgtgtaggctcctgtctgatttagtgaaggtcacataaatcctgatttactgtgaggmaacaacctataargtccttcatagcccaggcaggtggttggtgacaggatgctgagtgatttgaagcctagaattgtaactggttgctgattgtgcatgcaaggctcaagttctggattttatatttcctgtttgggaatgattgtacaaaaatgagaaatatcagaaaactccatagtacttttgagcaattctttttcttttacttgagtgcatgtgtatggtggtatgccctaaattaaacatcaacagctcttattattttgttgaaaaacagtactgacaactatccactgaaatgtaataacagctc

SEQ ID NO: 21748 - DNA, 600 bp, Bovine  MMBT10093
aaggatttccagtaagacattctgaacctgtagtatataaatcacttggtaacttttagtccctttccttctcccaacacctgtttttgaattttatttaataaaggattgtgagtatttaggatcagcctcccatttttatataatcaggtaaagaatatgattctctcgctatagactgaatgggaaccagaaactcatgggttttccttgcacaggccaagcctggatggggctctctgacttccttctcggtaagataacttcaggggcaaagagttccagtgagaagcttagcaracttagattagtatttgtgtgtgtgtgtgtgtgtgtgtgtttaaaattttgcctgcgctgggtcacggtggagctcgggctctttagttggggtgcgtgggcttagctgccctgaagcatgtgggatcttagtttccagaccagaaattaaatctgagtccccatcatgggcttccctggtggctcagatggtaaagaatctgcctataatgcctgccggggagacctgggttgggaagatcccctggaggagggaacagcaacccactgcagtgttcttgcctggagaatcccatggac

SEQ ID NO: 21749 - DNA, 600 bp, Bovine  MMBT08947
cccacctcgttccttctgactactgggaatctttcggggaatacatctccactaccaggtcacaggtagcatttcaggacttggcttatctcctatgccccacaaaaatacatatcagggccattcttttctgagcacatgggttaagccaaagctcaacgtagtggggccttggagaaatgaagcatggggaatgttggccacagagagaagtatttcagcaagaagctgcaagctcccagctcgctggcttggtagggaccccagtaaatcaggataagccatggaggctggcactgratctcagcggcagaatgtggtcaggggctgcggacccctcaaaacaacagcagcagcagcagcaacaaaccaagttcaagctaagaaagcagactgtgtgtgcagaagggggctgaaagcatgagggaatgagggggaggaaggaacagacaggaccaaagggacctggaacaaaaggggagagaggattctagtcacatctcccagagactgggaaagggctccagtgtgccctgaaatggaaggagagggaaagaagtaagcagctcacagtaagctagaggaggaagtgggagatgc

SEQ ID NO: 21750 - DNA, 600 bp, Bovine  MMBT07902
agagccttccagggaagcctggtttccatagaaacagatggactgcagagcagtccccttcctgaagactgtgcccccacaagggctggcttaggaacctaaccggcaggggagggggcccaaaacacccaccagctgccaagcctctggtgattcagtggggagtcactgctgctgagtatcagagccaagagctgcttcctttgcaaacatgaccctctgcaagagggccagtgcacctgtaaggagaaacgccccccgatcatccatgccaggaaaggaggcagtgaacaagtactyccagaccaggaactccgcrctcacccccagagcccaatgagaacggttgtattacagataaggaaactaaggcccaagtgacttatgcacatgtgtatctcgggctaagtgacaaagccgaaattccaaccaagttaatggtgcctaatggatattcagagaggagctcatatgtgtgtgtgtgtgtgtgtgtgtgtgcgtccacatgcccatgtgtgggctgggggtgtggtgtgctgaacatgacatccaacaagaaccgagctctaagctttcttccccatcacatctccccttgaa

SEQ ID NO: 21751 - DNA, 600 bp, Bovine  MMBT18144
gagatctggatttatgttcagggtaatgatgtaagatttctttctgaagcagaaacacttaagtatatttctcattttagaatgagctgacttaaatacaactactaagtccataataaaggctcacaatccaccacggtagaggaggggtcttctagcctgggtgagtgagcagcacagcagtaggctccccattgtcccccaggagtcctttgaactcaatagggaaaagtggcctccctaggagccacctgggacccttcaacaggctgccttcatctcgcacgcatgctggggggragctgagtctccactctcttgatttgaaccgtgaaggagacacttgggctcgtgagggcttgtccccacggctttcctcgtctctccctctgcccttgggtttcccagagctatacagctccctctggactcaggctttcaaactatcaccttcattcccgcggcagcaatgaagttaaagaacaaacagtacctgtttactcacctcggggttctgatgtactttgctccattaataatttagtgaggtggactgaattggattgattccccccccaaatcaatatacaaaatgattac

SEQ ID NO: 21752 - DNA, 600 bp, Bovine  MMBT06460
attagcttgagacaaagttcagaattcttaactataattcacaatttatagtaagttacctaaaattgacttcagtgattatcttagaattaacacctttgttttccttaaatgtttcttttgactttcagatgataaagttttattttttagaaattgtttttagtaggacctgcccttagcgaagcagtctagagcagtgggaagcacagtttggagtcagacctgggcttaggcagacctaggttttacagtgatcagcactgacttctgtgagttcgtgcgtcctctgctgggtcrcagggacgaggagcccttggcacagttcctggcacatagtaggcaggcaataaatggagctgttggttctggagtgaaagcctctgtcacagcataagccatcgcatctgcgtctcagcttcatcacttgcgtgcgcaagcataggaattacgccttttatgcttgcctcattttctgtgtgcttggtaattatgttttcccctgagcttatacgccactgtatttttgtcttttatttttaattcatttcataataagcatttatttgttatccattaattcttaaggaatcctttgaa

SEQ ID NO: 21753 - DNA, 598 bp, Bovine  MMBT05300
  misc_feature (1)..(182): n is a, c, g, or t
nnnnnnnnnnnnnnnnnnnnnnnnnnnnnnnnnnnnnnnnnnnnnnnnnnnnnnnnnnnnnnnnnnnnnnnnnnnnnnnnnnnnnnnnnnnnnnnnnnnnnnnnnnnnnnnnnnnnnnnnnnnnnnnnnnnnnnnnnnnnnnnnnnnnnnnnnnnnnnnnnnnnnnnnnnnnnnnnnnnnnntgtataataggattccccaaaagcaaaaggataggggcagaaataatatttgaagaaataacagctaaaaactccccaaatttgatggaaaacattaactgaaacattgaagaagccygataaacttcatgtagaataaattagagagacccataccaagagaaaaaatgaagatgaaatcaagacattgccagataataaaacctgagcaaattcattgttaaaggacttgcccaatatgaaactaaaacaaatcctttgggataaaataaaataatgctagatagtaattcaaatatacattaaaaaaatatgcaccggtaaaggtagtcacatagtcaaatataaaaggcagtgtaaatgaatttctgtttataaatcttttcttcccatatctgatgtaaaaataactgcat

SEQ ID NO: 21754 - DNA, 600 bp, Bovine  MMBT03416
atttgtataaacctccatggggttgcccctctgctctctatattgaggtattgcagtttttttcactttgtttctatagtgaattttctcttccttttgtccctttaaaatagacaagataatttagcctaaataaccactttagaaaatagtcaagtttaacgactacatttatttctattaatagctctctcaactttgggagaattgtgcttaaagatcttccctcctcttcacccactctctggcccttgaatgatcatctggcagtttgagtctctttcacatggttccttcctycttaaagtgaagttgcttagtcatgttctatctgcaaacctgtggactgtgtccaggtattttccaggcaagagtactggagtgggctgccatttccttctctaggacatcttcccgacccagggatcgaacccgggtctcctgcattgcaggcagacgccttaccatctgagccaccagggaagtccttccctttatgttacacacaattttgatgatgtgatgactgacatgcaggcagaggaaaccttgcttttatcatggattggtttcttgtggctattctctggtctcttaggt

SEQ ID NO: 21755 - DNA, 600 bp, Bovine  MMBT02933
tattttgatttctaagtaaatgacatggaacttaaggagcaagtgagagagagagagaatctgtgatgacagcacattggcccctggaattattaaaatgtttaatcagatagaagatttggggcccctaaataaaggccaggagcataggtaatcagcacagtcttagcagcaggagaaaaccaaatcaaaccaaaccccacttcattctcccatccccatgcccatacacacttgcacagttggaagcgagaggcaatttactggcacccmgtacaagtcctttctggaagtgattaytgtcacaaatccacttttagtcaaaggtgttaaaaaatgagatggagaccatccaattcttacttactttttgtgaggaactgttaaagagtgatacaagtggatagaaaagaaggtgggaagggaaagagacagaatagactacaggagaccaaataaaaagttcaaagtggaragcaaaagtaayacttcatcattcccaatttcctcttgggctctgttgactaactggagtttcatcattacctgatgagaggccagctttgaagagctcagaggattcctttaaagtctttggat

SEQ ID NO: 21756 - DNA, 600 bp, Bovine  MMBT17780
gtagcattttagtgatgagaggaaatttagaattcagcctgcatagtggataaaacaatggactaagatttgaaggcctgagtcctaattacagctctgacattagtcagattacttttgaaaattatagtattyttatatgcaaaatttaaaagttgggatgacttgaagtggagggaatagactgtttctatattggtcttattccaagatacatagctagcaaatacatggaaatagaacattaattaacatatagaaaaatcctcaaataattggggctacaaaaatgaatttacktacatttaaggcatttcaggctttgtctggttactcatttgctatgacgggtatggttagaggaggacagattcaataagggctactcaacagagatgcatgtcaaaatcatcattgaggcttataaatcaggtaccatggatctggggcctacagacacttctagagtttcatgtatgattctggtacccactccagatagaaaatgaaggcgttaattatctccaatattttcttcagttataaaattatttcctaccactgtatagagttatctcttaaaaatagtgttaaagcaat

SEQ ID NO: 21757 - DNA, 600 bp, Bovine  MMBT01912
aaaaaagttactgagctctgatagcactttcatttttgtgaaggttactcagctatagttaattcccattttctccttctgaagagtatgacaaagggacttttaagagctaatcaaataaacaacgagtgttcaaaaataacttaattatcatatttcattgaatagtacattttgtcaagttttttgtttgcttgttgccaagtcagatgttcaggcctgtgttctgtttatagaatgtgtgatctgaaagcccaaacagcactggtcattttgacagccttaatgagtcatttagaytggcaattactaaaataattacatgaagacaagctcactgtggtcatcacaaacggtttcacctttttcaatagactctcctctatctcctgttgttaaactaccatttgggtgtttaacataaagaactgactcgcttccctacttttatatgtcaggagagggagttatgctgaaattgaataaggaaaagtgactattctcacatttagcagcacaattaaaggaacttctgatgatctgggtccattaattctgctattctcagaggcagacattcccaccaaaatccaattgcaa

SEQ ID NO: 21758 - DNA, 600 bp, Bovine  MMBT08054
tacctakcaccatactatctcatttaaacttttctttaatgattttgaatagtttctagccctattgttcattacattatatgtgtatgttcatttgtgaatttgagaagtctctgcataataagctatcaactgacatactgtaaatgtttcctaaaattttccactcrtctttcaaatttatttatattatggcayaccaaatatatacaataatggagtcaactctaattccatttaaaataatttttcaaattatgtgtttgaaactgattgtttagaatgcctctaagttaaaastcttttccatctctacagaaatatatacataggttctttcctgaatttaacagcttcttgtttcrtttaacacctcaatatatatggaatttattttaatatatagatagtatataatgtatatgaatattaatctatagatatgtatgttcaaattactattcatttgttagatatatatatagacatatagatattatatattttcaaattattactccattttttaaaacattggttgactccttttatctcctaattacttgcagtttattatttaataaagtcaaacatatgcac

SEQ ID NO: 21759 - DNA, 600 bp, Bovine  MMBT02266
acttccctcccatagcatatttgttgctccataagtaatttagctagaaaattcttctagcaaaaggcctgttaagtttcaytaytgttttcactcattaagttgagacagtkaaggaataaaaattccataacaaaactgaatagcttatactctgtaaaagccrttgttcattgcatattgaaaattttatattgaagtcttagaaaaattctagttttgaatgctattgtaaggtaattttccattgtaaaatacagacttagagctatatatgtgtggatacatgtgcatttcttygtcctcaaactcatatagacgtttccaatcttcaatggccatagtaccggttatactttcatcacacagagatgggaaccagcccactcttccatgtgatatgtgttaaacagtgataattttcattccatgaaataaactattgcagaggtgagtacaccctaaaattacactgagtcaggaaaaaagattacataaaaacattaccttaatgagtaactgttcaataaatatttctcatggaatcagataaatccagggtttcttttgcactcttattaggtagtttggaagagatga

SEQ ID NO: 21760 - DNA, 600 bp, Bovine  MMBT03939; identical to SEQ ID NO: 4685

SEQ ID NO: 21761 - DNA, 600 bp, Bovine  MMBT11938
ttagctaatggtgaacaaaatytagcactattttatgaaatacaacaaaattcagtgcccccaaacacaaaattcatccaataagaattgctgaggttgtaagaaacaagaaaatattaccctgaattatatttctattgctgtataacaaactacccccaaaacttcgtggcttcaaaccatgatcatttatcctttcktatcatttctctgagccaggaattctgacagaggccatagagaatgcttctttcygcttcacagtgcttgaggcctaaactgcaagatttgaaatctggrggctggaattttctgaaatctcattcagctacatatttgrcagttatggtattagccaccttttgtaaaggaagagttaacagagcaggtctggtggcttattccttgcgtatatccaagagaacctggagtcatgaatgacacttggacaaccactgggaatatgtcccttggatgtcagagattactgatttggttatgtacacctagagcaatgagctgtgctatatcagctgtcaagttgctctgcatagatatcaagatgaacgaggtgcacctggtttcattgttagggtcccg

SEQ ID NO: 21762 - DNA, 600 bp, Bovine  MMBT04963
gagatgtgtctccctgaggcatcagcagacaagagttggagaacaaggtgtcctgaaatgatgcagggcccaacagagttagtcttgagttccattcatttttgaccactgacgatgcacaagacatttcgaatataaagcttcatgttgacttttataattctttaaaagcaatgtctgtccttgtacgttacagtggttaaagatgttggttaatgaatcagacagaattggattcagattctagctgtgtgtccttgggcagcttaattggtgtccttaaatcacagtttcttcatstcaaaattttggccagtcttagtatctaccctctagggtggtaggattttaaggattaaatggaatttggtagataaaaagtagaacatagaaccaggtggggacatattattaaaggtattatattcattgtttccataataattcaatgttcttttaacctgtcactaccatgatttatttctttttattatttagtgattccttagcttaactctccttaggctaattcttgatatcatatcttaacaatctaatcatccaaaaggaataaagataaaaatttgctaagatctgagg

SEQ ID NO: 21763 - DNA, 600 bp, Bovine  MMBT14019
ttcaacatcaactctttttttttagaaaatattcttactaagctaggaacaatagtttattgatgtgattgttaaaaatctgtctcaagtgaataaccagcaccgtacttgacagtacaaggcactcccttattgtgctaagtgccactgtattttgacatcgttctaaaaggtgtagctcttacactagtaacacatggaaagagaaggacatttggcccttgaayaacaactcttacacatgcagtgcttgggggagcctgtttcctgagtgagaggctaagagtatttaagaaagargatgtwctaggtacatacactagaatattatccaaaaattaaattttaaaatatatatttgtgtatatacatatatgtacgtgagcacacacacacgtatatatgtgcatcattctcagaagcacactgaatgggaaaaaaagttgcccaaaaagcccagaatatactgttcatattttaaacttagaaaacatcaccatatgtatatatgtatgtgtgtgtgtgtatgcacatacacgtatgtactatgtatagtaaaatataaaaacattaatatgaaatgcatatggttgccttggg

SEQ ID NO: 21764 - DNA, 600 bp, Bovine  MMBT07086
cctaaaaataaataagaaaatggggctattaaagataatccaataaacaaacccaagaaaagctatcttccactgttatttgttgatatttttacaggggacagaagatcaaataaaatgcagtgctgaaattaattttcaaggttgataaacaaagacaaaacatgtgatttttaagatgtcttttaaatcttatactggctaagaaatcaatgggctataatcagatgaagcatttgttttattctttgagcaagtttagccaaagacggttgtgatttaatgaacaaagaatatgcrtactaggtgttagaacaaggctaagagaatgtcactgagaaccagtagcttctgactttaatcactagaagacaaagaagccccaaaacacattatatactggacaagatcctgggtattttatgattacctaataaaaatgagagttaagatggttccaaatatgaaaggaggcagatggttagttcagattgaagggaatgttgaagaataaaaatcttaacctgggctgatgcctggacatccaagtcacaacatgttcaggtaaaactcttcacatttgggcttcagggaaaagta

SEQ ID NO: 21765 - DNA, 600 bp, Bovine  MMBT08817
tcttttgaatatagccattaagaaatagaaatcactggcatccatttttgtataagaagtaactaaagttgtctatgtttaaaaacataccattacttcctggttcaattagagcgattagcacttggccttccaaatcaagtttcactgtaatgacaataacaactgactgaatctatatatttccaccagaaagcaaaatgatttttttctgaactgtagtaattatttgtatccagccatttgccatattctaagtacttgaggaagctggttttacctggatctatttttccgtayatctgcctttctggaaggactsttgtttcyattcttggatcatccagatctttatgaaagacacttttttcccttaaagaaatgggtacagaagagagttcccaaaccagctaattcctcatagaattgttaagccagcagttagttaagctttctgaatatctttgaggttgtcaatataagaagcaagtggtcctagagcagatgtctgttttatgctgtgattcatcagtgagataaactcctgactttagttctgttcaaatatcctctctgctgttcctctctgccctctgctga

SEQ ID NO: 21766 - DNA, 600 bp, Bovine  MMBT01887
taaaagagctggacatgaccgatggactgagcaacattaaagacttataaagtgccaaacttctgcgtgtatataaggactgaagggagtgtggtaactggttttaaaattaagaacagagaatattaaattatctgagcaacactataaatttacagttgagttttttattatggccggttaaggactggtggtatacaataagaatacagagaaagcagtagaagaaaacaaggtaggagagggaaaaacaaacctggaacccaaaagaaatggctgtatcaggaagcagaaagtgaracaaattgaaaagaaacagtcagagagaaaaaaaaaaaagggaggggggttcccagggaaatgagttgtcccaaagtcacagcttaattttcctttgaggtatgttactctggaagattagtgattatcattttctactcacaattgatctgttttttcttactgtctaactcataatgctagaatattttctcctaatgggctaactagtgaagattatgacagagaaattgttccctgggttgcagtagtagttatcagggcagctgtctttccaaaggctgcaaataaattcagctg

SEQ ID NO: 21767 - DNA, 600 bp, Bovine  MMBT01515
aacctcattttcttgacacctactctctcccattcccggcagccttgccctgtaattcaggggtttcttgggccttgcctagtaaaaggtgacagacacagatcttggaggaagcatcgccaccctctggtttctttgctgctgctccttgcatgatccattatccagcgctgtccccgctgtgtttttgaaggtcagataaggcagatccaggtgctggttacccttcagcacctaatacaatactcaacacatagttcatgctccatagatatttgctaagtaaataagtgtcaagaygtgataagagatcctacatatcgtaaagtgggtgacagtagaaggatattgaacacttggaatgtgttaggcagagtcacaggtgttgttttattgaactcttgctaaaatatgtgcctcagtattaccattgtcaccctgaagataagataattcagtgcctgagtaactaatcagtaagtgttaaacccacacttctaattcagatctgcttgacaccaaagccacatcacaccatctcccaggaatttgcccaacagctagaatgaaatgcaggaactgaccaattttccataatga

SEQ ID NO: 21768 - DNA, 600 bp, Bovine  MMBT08003
gaaaaaaaaaaaaaggatgatgatggtggcagataaaggcccaagagcctccagaagatcttgtcattgccttccgagacataatatctgcaaagattaatggaaatgttttgcacagtgatacttaatctctgagtttggggagttaaatttaaatattcaagcaaaatttctcatcaaagatgggatcctgggtcacagatcctggttcacagagaatgtgcagatgggagaaattcggatagcacrgcaaggtattcagacaaccacgcctcatcttacctaatcactgattctggraagactttctctcagggaggatgggccaggttaacaccctgaataatattctcaccttacaggacaatgcaacaaccatggattggatggctccaaactggggctttgcgtttcgagggaacaatattctcttctactggaagagggatattgtcaggtatcgttacaaattttctcaatcattttcatacaaaagaagcataactctgcttrggaaccatgtgtctatctgaaagccggggagactcaaagctcccaccaagttagcaagcagacagccctcttcctgcctcctgcaaa

SEQ ID NO: 21769 - DNA, 596 bp, Bovine  MMBT06632
ggaaattagcatacaaattcaagtcttaaatttgtggattttgtataaaggaccacattctttcactgccagaattctatccattagcagtagcgtattatgcatctaagctacaagattatttaaaaacaactatttcaaacattcatttgatttgtgtattaatattttattgttgccctaacacagatatatatctctgttgttatatattcttgtttcttggggaaaaaataactgtcaaaatgatggaactatatttgcttatgcttttcatttgttcaatgcatcaagctttcygactacccagtcagtaattttgcaatgtctcattattattcaaaattgtgaatctttggttctgcaaaatttcacatttttcttagtctaaaattactcaaaaaaatactgctactgctaagttgcttcagtgtccaactgtttgccaccttatgaaccatatgtccatgggattctccaggcaagaatactagactggattgccatttgttcctccaggggatcttcgtgacctaggggttgaatagaaaaaatgctctaccataccaatttaatgctttcttgaccatcttcaa

SEQ ID NO: 21770 - DNA, 600 bp, Bovine  MMBT02232
attatttttttccctgtttcaattcagtgtgtgtgtgtgtgtgtgtttttactttacaatattttattggttttgccatacatgaacatgaatctgccacgggtgtacacgtgttcccaatcctgaacccccctcccacttccctccccataccatccctctgggttattattaaatcagttttaatgtctgattcaacagtactcatcctaaagcacaaggcattcttcatttctcctttctccctaattcaagttgaaatagacatagccaaaatggcctgccagctgttcacagaaygctccacctttcagtccccacccacctagttccctctgcttagatggagagtgtgtcatatgacaaaaaatgtggctcataattacttttacagttcatttgtcctgtgtcctctagcattaagcctaatgactttgacaagaaaaccatcacctggctccatttcctattctgttggatgtcaatttaacatgaccatggggactgttcattagcctctgaaatttccaggaagaggcatttttttttttcctcttgctttcactttaaatcacttaaactattttaaaacaacttgaa

SEQ ID NO: 21771 - DNA, 600 bp, Bovine  MMBT02874
tattcgttttctcctttccatgatacaaactatttccgatttagtattcccagatattcccagatattccttattatctgttaatatataaatgttattttatatgtattagtatttatatctcctactgtgatattctttatctaacttgctagatcaaacytttctggaaggaagagaggtatcaataaaacaacatgaaaacatacttgcaacatgaatctctgcatgaactgacatgaacatacccccaaattaatcacataaaactttagatcacatccctttgaagtgggatcrtctaatcagctctgtctggmacaccaarcagaacagtactctgtggagaggacttgcccaaaggcagaaacccagaggaagcagaggagatgccagtgtacaagtcagcaccacttcccaactaaggccctgcctggaaatccaaatgactctactcaatttaggttaccaacctcctcgccactggctattcggtgagccagatcttttaagtttctcatcattctttcatcccgaaaatcataaggaaatgtttctgtccattctgtcaggagctgaagaattttcggtgcaattttt

SEQ ID NO: 21772 - DNA, 600 bp, Bovine  MMBT08969
gaactacttaataagttacaggagactgaaacgcaatcacacctgtaacacagcagcagacacccagggtgaaacctgatgaccaggaagagaaaacgtgctcggcaactggaaatcccagcacagcagaggcccaggtacctcacggctcccgtccctacttcccgatctctcatcccgtggatgagctgatactcactggccacggcaaacagctcatttcagtttaccacttagctccgagaccatgacatggccttcctctaggtgcagactccgcaggttccagctcaaacgtcrctactacggtgagaccaccccctgtggctggcttctcctccttttgtgaattttttcatactatgttttaaattgagagatgatccacamcccataaaatgcaccyttttaaacaagcaaacaatgtagtagtttttggtaaacgcacaaatttgtgcaaacaccagcaccatctaattctacattttcatcacccaaagggagagctggttttcaccggtcagtcctcagagggacccaggtcccaaatcactcagatccccaagcctgaaaggcccacagaagctggagcctyggtgt

SEQ ID NO: 21773 - DNA, 536 bp, Bovine  MMBT10051
gaactacttaataagttacaggagactgaaacgcaatcacacctgtaacacagcagcagacacccagggtgaaacctgatgaccaggaagagaaaacgtgctcggcaactggaaatcccagcacagcagaggcccaggtacctcacggctcccgtccctacttcccgatctctcatcccgtggatgagctgatactcactggccacggcaaacagctcatttcagtttaccacttagctccgagaccatgacatggccttcctctaggtgcagactccgcaggttccagctcaaacgtcytcttttactttttccctgaataatgagaataattcctttatagctttcaaaagaccataacctatttctaccaataagtgaataattgtcatactgttaaatataaattaaatttagagagagcagccagcttacttttgacattctgctgaaagttttagttctttgggttctagaaaggaagaccttaattagtgcaccaaggtttcctgttcgaggattattttcaactgcaa

SEQ ID NO: 21774 - DNA, 600 bp, Bovine  MMBT07236
cttgactacatctttcccttctcctcccccaccccaagcccttaggttgcctttcaaacagccagaattcctttaaagagtaatctaggtatgcttcagctgacattcaaaagtgcattgtaattcaaatggaaatgcagaaattcattcccttggacagtcttgggaaattataatagagataaaacatcttttaaaggtggcgacaggcatttatctgtggggacatctctatgcgatagactctcctgatgcaaactcaagagcggtccaaccttcacacggagtatgtcctttcgkcagggtcaccgagtctctaaatttgggaaagacattaattgcatccatcttcgcttctccactttgtccctccatttgtctttgtggattttggtttccccgtgtctgtccctcttcatttttctgtctcctcctatctccctcagtctttgtcactctctctcacacacagaatggacaattcctttacatgcatacatcctttaccttccatagttactttctcccatgcaaaagaagcaactgtgaattcaggaaacctaccagattggttatttctgcatgcattgccatcccttc

SEQ ID NO: 21775 - DNA, 600 bp, Bovine  MMBT03528
tttttccactatcttcaaaactctgctctaataaatgaggaccgtggagctttggagtccagaatactttcattcaattccaaaacaacttaatttattaacaattgcttaagcttgaatcatattttccctactgcaaaaataaagaatacaaggtctaactagtaggatatgcagattaaattaatcaacctgtgtttgagttcttttccatgtaaaatcacagatctccatgtctttggagtcagttattggaagattaatgtgctcctttggcactgtcacagttgcttggttttmgcgttcctttcatgtttagtgttgacccaggatcyggtcaaagacttttcattacatttaaatgttatatctctcaagtatctttgttccaggacattcctcttttttttctttatgacactgttctgttgaagtcagctgttttacagaatatttctcattttggatccacctgcttacaggtgtccttgtggctgggttcgggtraagcatctttggtgtcaaaatgcaaaggcgcagctctgtcccagtgcccctgtgcacacgaggggctcagggttcactttgcccagtaactgg

SEQ ID NO: 21776 - DNA, 600 bp, Bovine  MMBT06988
cagggaaggcccaggctgaatccgctcgagttcgtgcagccctcaacaccatcaggatctctcttgccccggaatgaggagttcattgtgctccaagacattatgttgaagcccttaactgtgaactctcaktcaagatgctagacttgccagttagttacacagaaactattctgtctgggctggaatgtggcagttaaggaagggaactttgatcttcaagataaagtggatacagacactagcgcactgtggccatttcaccacagctttaatttgtatagtttttttctcactttwatctaagttcattaaacctgtatctagtgaatggtgggatggcacaaatcaatgagtattttgttaggaaacattaaggacagccaatgcagttcatcccccaagacctgcccacccccacccccgaccccagtcaagaattacagggatatttagtcatgtcagttagttttcttttagaatgtgtgccagactttaatctctggatttgatatttatgcggttatttatttaatcttttaaccctgtcaaagttgttttagccagctctaagatggyggtaaccataacaaagtcaca

SEQ ID NO: 21777 - DNA, 600 bp, Bovine  MMBT15694
tataaaatcatatcatataagaacaaaagataaaatcaaataaaatggcttgaatatctactatccaaatagggtgcactttcccttccatgagccatcccaagacagatataaactgagtgttcgggatgctgacagatgtgctgtattatgcagggagacattttacgactgaggctactgccctctggagatgcagcggactccatggaccacttcacctgagaccacagatcacactcaagtcgccggccccagaggccttatcatcccagggaaccactaaagtccatttttggyaagatctcaattcttttcctttccttgaggtcaatagagtcaagggcacggaggtggcccacccagacctacgcacattcacttttggggggaattcaccttagtaaaatctatctaccttaggtcaatttaaattccaccatggaacatgaaatatcagtaagtatccattacttacagaatctttgaatccttagagaattctctacctttaaaataataataaaaatgataagataaaaacactatgaattttccctaaagagcatcttaagcagagttcctgccactgcttttttt

SEQ ID NO: 21778 - DNA, 600 bp, Bovine  MMBT02963
ctggggtttgatccctgggttgggatgatcccctggcgaaaggaatggcaatcccaatccagtatttcttgcttggaaaagtccatggacagagaagcgtgaaagctatagtccgtgggatcacaaaaagtccgacacgactgaacaactaacacaaacacagtatcaggctgtgatctcagtccttgacacactaacctgaaaatgattattcatccactagatccatataacatttatataattttgtggggaaaaaaagtaattttctgatactgtcaattgtatcccctccagtawacatagtttacaatggcacaatgaaactctaaatatattctgcagtgggtaacaaatagtgcctgccaaagtgtratgctagtgtctcccttcartgaacaagtttcattaatttgctttaaatttggcagagggctggcttttgggaacaggatggcagatacttcmttatgagtccagctggtactcataaatagttgaattcaacctagtatatatacaccagacatttgtccttataagactgtatgtcaagtatagacatgcaatctaatagacacatccagaggccaaatagga

SEQ ID NO: 21779 - DNA, 600 bp, Bovine  MMBT04342
tcagggcccctccagctcatttgaaagagaatctttgccttggcctgatgaccggctgaaggtagaaaaaaagaccagttggaatacacacacacgggaggcttagaatccacagtaaaagaggttgcctccccgacagctgggatttctccacttcaataactagggtggagtacttagtgtttttctgcactgctcaaagttacaggagcatgctggaaaggcagaaaattagactttgaggggagctgctctctggttttgctcaatacagatcctcttgtgaaatggaggcaggtkcagagtaattcttctagctggggttaacactgccatgattcacaatcctaatgagaatggagtcagcacagcagkgtagagatgacctagacacagagggggacagagaaaggaatactttccccaagcctacctgagctgcggagaacttactttcatgctcctctgagcagacacacagactttcttcacttaacagttctgtttgactactaactagggcaactcatctgcagatctagtgcccctcattcaaatggaagtatgtgtctccaggaaagaagatacaggacacagtta

SEQ ID NO: 21780 - DNA, 597 bp, Bovine  MMBT13357
tcccagagctccggtcctcctgcatcggagacagaggggaaccctgcgccagttaagccaccgagagctgcaggctgtgctccagctgggaggtgggtcaccagcaaaagggctcagagagagattatctcccagctctctcctcacaagcctaccctgggggcacggctgctttgtttcgaggtaaaacacgactgtgtctcttcagggtggcaggaagagggaagggatttacagggattccatcaagctagtgacttatgatgtcagttacaatctgagggtggaaacaggcacaasggttgaatgatcacaagtttgaggaagtgctgaccaccgaccactgtgagcgggagatcccacgccagggttcacaatgtcacaatgcccrgacaaaaattgcctgctactgcatgtgcggtgtatcagaaccttgtccaggtgtcgacatcaaaaaaataaagcgcttcctgcttgtacatattttttctgctttaacatttcactctcccatccatgctgcaagggaagctaatttctactttgtatgctctagaaattaaccaatagatgcatgcacatccattatcccatctt

SEQ ID NO: 21781 - DNA, 600 bp, Bovine  MMBT06486
tcagtgcgctgataggatgctcttggctgtagataatagaagagctgactaaaagccaaacgtttttagggaaatgttgtttcatgcaatgaaagggcagagccatggagattccaggtttaattaagaagctgagggctctggtgtgtgcctttctctctgctttgctctctgagtaatgatcacatacccctcaggtcacaagatgctaccataccatcacgttcaatgctcaaggaagaaacactgcatgtcttcctgagaaatggcaggaattgtctagaaactcctagatgctcyccttaagaccacctgagctagatgtccatgctcaagatactgagcagctggaggaaagaaccatctggaagtcagagaaagggccagtggttgttggtgacaagtcatgtctaccacacacagataagcaagaggtcgagggaagagttttcagttatcaccagattcctcttttgcttttgaaatgtttcaygtcccattatcttcctgttccactggacaccagtgggctaagattaattaaaactcatgaaattttttccttggtattttgaagttgattttaaaacctggccaagc

SEQ ID NO: 21782 - DNA, 588 bp, Bovine  MMBT07295
ggaatgtgtttaaataaatgtattgctagattttgcctttttttttaaagaagtttacatttatgaggacagaagagatgaatgtataattttttctaatattatccttttctgattaaaggaacaagttttacatgagaccatacaagcgatcagggagcttttgctcttatagtgttccctggatatgatatggatgatctgattcatgaatatttggtgtaactcataaaatggtcagtcaagagagttcttggtgtgttcgtgtgtgtgtgtgtgtggtgaggtgtgtgttattcragtgtattacttattcttgagtcagttttgacaagttatgctttttccaggaaactatttttcacacttagagattcattaacagatattgatagtattttttattttctatcaagcttgcatttgtaaatatacttcaccttttttttttaacttccaacattgtttgttatttcttttctcctctttattcttgagaagtctcaccaaagatttgtttatttttattagtattcaaagaataagctattaatttggttggttttctctaaggcattcaagtaatct

SEQ ID NO: 21783 - DNA, 598 bp, Bovine  MMBT08044
  misc_feature (1)..(18): n is a, c, g, or t
nnnnnnnnnnnnnnnnnnattagatgctaactagatgcttggatgtgagtcttaactatggaactaaaagcttctaaatgtaatttatgaatgttttttcttggtgattaaaggaaagagatccaaaaccagaaagaaagagagagacagagaatagagaactaaacagctgtgaatttctccagaaagtactattcagtcctccctaattttccctgagcaacaatcagcaaacttctcattagaaggaattttaaaaggtttgctgatttgcaaaacatgacatgagtgatgtatatrcactacttgtataattggttttgtgcatacatatggcacgtgctattttggaaatgtatcccctctgtggtccttatagctattgctcactctattccctgataattatttatagttacttgtcacrgttttattattaggaaagtaatgaatcagcagttttatgcactctcctttaacaacctagtcttagaagtttccaaaccacagtgtatatatagtaatagaaagcaagcagattgcccaaagttatttatagatattaggcagaacatttttcaaagatcatctaagcttt

SEQ ID NO: 21784 - DNA, 600 bp, Bovine  MMBT00549
ccccaccccccaccccccacctccggactagggcaggggagaagatgcagagaggagagcaggttgcttttgccctgagtctcagctgagctcatggatgtggggaacagccaggcttatttatactgagcctggttatattgtttcatttatttttgtctatttgtctggctctgccaggtcttggttgggacacgcaggatcttttagttgcagtgtgcgaactcttacttgcagcatgtgggatctagtttcctgaccagggatcgaacccaggccccctgcaccagcagcatggcrtcttagccactggaccaccggggaagtgcctggttattttgcttccggagagatggaagctgccactggggttcagctttgcggtcctgccgggctgcgtgagaggagtagggctgaccctcctgtttccgctttccatcctcttttctccctccccaactcttctggggaacccgaaggaggcagagatyagctcaggcctggatttgatttgaagcagtgggaggaaaagggcttccctggtggctcaggtggtaaagaatccgcctgcaatgcaagaggcctgggttcgatccccrg

SEQ ID NO: 21785 - DNA, 600 bp, Bovine  MMBT00649
agacttgtcttctaaatagcttcacttctttttgtacagcaatcagcagctccagatgtccttacacgatttgtaaagagctgaagacctctttagaaaactcaaaatagatatgtagacgttataatccataatatatgtataaacctttcctctactttttcaagatgttgattaaaaactttaccagaagtacttggatagttaagtggcttaattttttttcctgattggggtttaattttctaactgggcagtctcctttgttgtttcatgtggtgacatcattatctagtgttwttcttttctcattcctatgtaaatccgtgtctcaccacaccagaaaaacctgatcacaaatgctggttttctgaataaaacccatcaggggcctttcatatatgctggtaaagtccagtcttttcatgtggcttacagaagactccatgatttatccctcacattcatattccaggcctgtcaaacacaacagcttattcacacctctctgccttagctccagttgctctctctgcaacccttcccccaaggtcagcaggtgagcgtgtaatcctctttgaggactcagctgagctgtat

SEQ ID NO: 21786 - DNA, 600 bp, Bovine  MMBT01549
tatttaagcactcactgtgaaaactgatttcttctttataaaaaagaggatctcttttttcagtctgttctttgctcttataaatcttacttggccaagtcactaatgaaaaagaaaattgggtaaggtccatctgaatattctgagtccttcacaaaaactaatctaaaaggaagtcatctttgcagggaagaaggtgaaagagaacaaagatgtgaaggcaaaatagagtatttttattaatgcaaaggagagagatggtgcagagatagttattgtgttttctgcatggaatggacmaaagtgttatggacgagaaaaagaagcagagagagaaattggaagaaaagaaaagggagaacagggaagttgtgaggcagatactgctgagggcaggaagaagggaagaaaaggcactggcaagagctgagaaatgattgagattcacagcacaacacgacggatcccgtctcctaccgcccagctaggcctggaagactagaaatggcagtccacgcgtgaattcatccctggctctgtatttcctccccttcacagcctgtcttgcaaaaaccatcagggagccctaaacatccctgc

SEQ ID NO: 21787 - DNA, 573 bp, Bovine  MMBT22114
ttggtggtttagtctggggaacaacaggatcctggtttctagcactcctctgaccaagcacaggtctgacctctccacacctcagcgttcttacctgtgtattgggatagcaagaaaatcttgctttgcagagttcttttaagaatcatgggactgtgtttgtaaagcaaacaaaggttattgtaagttcagttggaatgtcagtaacgtgcattcccttgaggctccttttcccacaraagctcttttataatgagggttcagttccctttgatgcctagtaaacccccatgtaccaasactagtgatcacagcactgaagctgtgctgacagctgtgtccagcattgtttctagggctcgttaggccccgccccctgcaggggagctttgggtccctaagcccaggcccatctgagatgcttccagaaggcaggcactgactctccagcctgccttctaacagtcactgttcacagcaaaggcagtgggcagaacacagtgccctgcttaagtcttttctcagacttgcagataccagggggcactgtgtacttaattaactcaccaactc

SEQ ID NO: 21788 - DNA, 600 bp, Bovine  MMBT01882
tgcaatgcttctttcctttgaccacaccccccaatcaattatattctatctgatacagtcttggtcacacctaccctttttgatatgattatttaagcctactttaaaagcagttactcagctgccctgcagatgtcagactttctggcaccagaggtgtggcagacctgctgcccccaggatgttggggcagagaggaacccagcactatgctcagtgctcagaatagtgggcaccaagaatggtttgtagctggacatcaccaggaaaaaagaaaagctgcctcagttcccagtatgygttcataactaacacttaccccaaaattaacaaagacacatgtgtccaaaatagtgtctgaaagaaggaaaaacaaaatgcaaaatataattgcatttctttttagggtgagagagagggaggagcaagcagaagagctggaaagagggaacaatgtagagagagagattaaggttgattgatgtgacaggtacaaatctcttcccaaaactcacatatggaagacatataatttcttttttttttttttttgcaacaaactgaagctatcttaacctaaagttaagtttcattttgagc

SEQ ID NO: 21789 - DNA, 600 bp, Bovine  MMBT13515
aagctctataggccaaagcacataggtatgttaaagtacctgagaagtctggctggaaagaagcagctttaactgcctgtaagtatttaatcatggaactttaggttgagtcaatattcattaatacctgtaaaacrcatttcgggaaactgctgtaaagttgtgagagtgactgttttttccctaaatgttccataacgtaaacccgagtgctgtcttgtagaagagttctcttaggaagttgtrtgctaatttcagtgatgctgcgttagctcaaaatatttttaaaacttagatctytagaatctccttcaaagccttttgtaaaccacatcattaatccaaaaagaataattttacctgttattctatactagtataatttaataatgtgattattatatataatatacaattattaaatattttataaattatattataaataagatttgtagattataataaatatatattatttataataattgtaattgtcactatttgtggagtgcttttatgtgctagccacttatatatagtacctcctaaaagtcctgtgaatttgatcccacatatctagggtctaaagctttatag

SEQ ID NO: 21790 - DNA, 600 bp, Bovine  MMBT05416
gtgtctgtggatttgtttctgttttgtagacaggttcctttgtgccatactttaggttccacatgaagtggtatcatacggcatttgtcgttctctttctgaccgacttcactgggtgtgatcatctcggcgatgatgagtgtgatcaacacgtgaggccacacgtgttgctgcagatggcggtgtttcactcttttcagtgatggagcaggagtcattgtgtgtgtggatcacatcttctctctccattcctctggtgatggatgtttagttgttcccatgtcttggctatttgaatarcgctrctctgaacataggggtgcatgcatctttttgaattatagttttgcccaaatattttcccaggagtgggattgctggatcatgtggtgaattctatttgtagttttctgaggaacctccttattgttttccatggcggctgcacctacttacatttccaccaacagggtaggaatggaatctgggactcttagttcccaactaaatgcctttctgctatatcgtgtgtctttcctattatctcaatccaacaaatagcttatttttaattctctggtttgttgtggtggtgtagaa

SEQ ID NO: 21791 - DNA, 600 bp, Bovine  MMBT09726
ctgtgctcctggcggctacgagcattcggcactggctgcctctggtcctcgagcggttttgtacattttgctctctgggacagtgtccatttggactcacagcagaggggtagaatgtgccacaggtccaaggccaccgatgagatcatgccctgcacaaaggcaggaagggaggcaaaatccagcccattcyccttctcaaggcttgtgccacaccagggytcccttagccagaagcagattgtctatttctacctggtctgtccagggggtgaatctttttgcaatttatactaagastctgtacaccctgtggtcctgcaaggacctgaaacgagtgagcttctcggccaagaagaccataaaaccccaccagcygatgtgttgctatttcagaagcagaggaacccacaccttggtctctggggccagagcgagggcggctgaccttgttcctaatactcaggcactttgttttctagaatgcatcagaatcagccctcaagagataatgaaaataaccttacctgggggtgagatggttttcccatcggccataaattcctgtctctcatacttagctcgaatccactgttcttt

SEQ ID NO: 21792 - DNA, 600 bp, Bovine  MMBT02215
tgacacacggcgctgcatggtttactcggtaattaaaacatgttctgttaattagatgatgaccactttatttcagggctcttgtgtttgggttttctagtgtgctctgtttgtatcatgagccaccagacgctcttctaatgagtccttgttttgtttcaattaccacctgctgttcaaaagcaaagcttgttttaactaaacaaaattaatgcttgtctcttcctttgtaagaacttaaatgttagacaaattaatatgcttattatcgaagtgctaagctctggttttaaagactgstaaggcaattagaagaaagttataaaatgttgtagagtgtggcataaatattgtttagcgtattaagaggcattacaaacaatgaaatatttgctggggttgaaagggagcagagagacttagcctccccaccyccaaattaaattagctcttgcaatttgcacagggatatccagaaactaaagatactagtgacttcctaagagaaggaactgaatgaagtcagacatgaaagtatgtggcacggctataaataaacccatgaatgatgttggattgccctgaatggttttcaaaact

SEQ ID NO: 21793 - DNA, 600 bp, Bovine  MMBT02161
aatctcttttctacattagagtgctacaatccatggactcgtgaatatatttttgtaagactggctatgcttctgttgaataaactctgtaagttaaattgctacactgaaggacagtctgcacagaattaggaattatcagaatatccactaagtagggtataatatttacatacttagaaattgtattgtcagctccatctgatataactaaataccaaatattgagtggcttaaacaacattaatttattttctcctagttacagaggctggaaagtttaaaatcaaggtctggcargacttagtttctgatgaaaattctcttccttgcttgcacatagccactttctggtctgcacattatggccttttctccctatgcttatgcagaaagagaaagagggcaagctctctcatgtcttctgttatcagggcatagtaccaccacaagagtcctaccttcctgacctcatctaactgtaattatatattatatatggccataataatatctcccaccagtcccatcttcaaataccatcacactgtggattaagggcttcaaaatatgaattaagtggaggacacaaacattcag

SEQ ID NO: 21794 - DNA, 600 bp, Bovine  MMBT03199
ctgtatcattgccaggtggcgctagtggtaaagaacccgcttgctaatgcaggagacataagagacttggattcaatccctgggtcaggaaaatcgcctggagaaggaaatggcaacccactccagtattcttgcctggagaatcccatggacagaggagcctgacrggctgcagtccayggggtcatgaagagtgggacacgactgaagcgacttagcaygcacgmgtgtgtcattgccagtaggaygtcctttcagtcatccttgtgttattattcccattttcctaatgagaaaacsaaaacgcagagaagtggagaaacktgccccgtgagataagatttgaatcatggaccgtccaacttcaagtccataccttttctaccgtatcgttctttttacaaaagatgacacattttttgaaataaaatgaatagttgctcttgttgatctctaagcccatcttgttgaatagctgaaaaggctcccattcccataatttggaatttttccccagagactccccgtgggagttaattcatttgatggatggccctctgcacccctgtgtactcatgtgtgcctgctgctaaatgctgc

SEQ ID NO: 21795 - DNA, 600 bp, Bovine  MMBT03096
gttggtgtgaaagtcgccccacatgaacccatcagtcatcaggcaggatcttttagcctcaccgtcagggctgagattcagtaaacatcttaaattctcccctggaattatgagagtttctgtaaaagaaccacacacacacacacacctatatgaaagatacacacaacaatatgaaaaccaagcccatactttgctctgcttatctagcaagggcaataggtctgcaaaatattgtaaaaaattaagaatatgacatttccaacattatttcatgatcatctatataataataaataycagatatcttctggatagactacaccatgcaagtggttgtgttrataacattaaataattcttacctgtatcctatatcttctctcaaaaatcacttgtgctcatcatctaactacattacaggcctgctcaaaagkcatttaaatcatgtttctctcttccttaaagctcttcaggggtgcttataacatataggttacaagataaagtctgaatgtcttagcatggtgccagggctccttgtcttacttctttataaatattgcttatattttctcctttttaagaygttcatttcac

SEQ ID NO: 21796 - DNA, 583 bp, Bovine  MMBT19004
gtctccaatgatgaggatgataatgaggaagaaacagtaacgtaaagctttccagggctctgaaaaggtgtggggttatctgattggccatcagtgcagccttgttacagctttcctgtctgctttttatagccttctcctacctgatggtggaatctggccggtcacgttgtgctgctagttggggatgtgccttttcgacccttgacaaattgtccactctcagatgctttggatgaggaaagctaagagccagaagtgctccagaagaacaaataatctctgatgtggggcaggagrggccaygttttgatagaaatkaaggcaattaggactatgaattgtataggacctattttgactgcttagagaatttgtttcctgtttgggtcaaaggtcctgcctggtgtttgaggttactgagaggacagggtggtgatgttgagtttatgtttagaaccctcagtgcttccaaggttctggtcttccccggaccctgtgagagcccccgggatggagggggatggcaaagcgcaccgcagaggagggccagggccagctgcagagcccctccggtgacgca

SEQ ID NO: 21797 - DNA, 577 bp, Bovine  MMBT19005
aatgatgaggatgataatgaggaagaaacagtaacgtaaagctttccagggctctgaaaaggtgtggggttatctgattggccatcagtgcagccttgttacagctttcctgtctgctttttatagccttctcctacctgatggtggaatctggccggtcacgttgtgctgctagttggggatgtgccttttcgacccttgacaaattgtccactctcagatgctttggatgaggaaagctaagagccagaagtgctccagaagaacaaataatctctgatgtggggcaggagrggccaygttttgatagaaatkaaggcaattaggactatgaattgtataggacctattttgactgcttagagaatttgtttcctgtttgggtcaaaggtcctgcctggtgtttgaggttactgagaggacagggtggtgatgttgagtttatgtttagaaccctcagtgcttccaaggttctggtcttccccggaccctgtgagagcccccgggatggagggggatggcaaagcgcaccgcagaggagggccagggccagctgcagagcccctccggtgacgca

SEQ ID NO: 21798 - DNA, 600 bp, Bovine  MMBT23226
agcacgctgtggttttgtccctttgtgtttaacatcctccccatcccagatgatatcatcttcccaatgcagctgtgtcaccatcaggaagttttcatcagccagaagatcggtgccactgctttcctcaggtatcctgtattcctacagaagtaggggaagaacaacaaatccctgaatggtcactggtcagagttcccatttcaaatcccacagcagataaatcagatacatcaaatgtggtcctgacttgagagacacacacctgataatgaaggaatacctgcctcctcccactcytagtctggcacaacactcatttcacaaacaagaatccttgcaatagggccaagttgccagggcgatataccacaccaaacaaaaggtttagacacctcaatctcccaccaaagaaaccctactcagtgtctccccaattgaaaagtaaagtaatactgatagggctctgggcacagtgattcctttcttacataccgtgttgcttacatccgccattctacatttcatcacaggttcctgttccatctttcttagtttgaagccatagtcaaacccactgccatcttcagggacacccag

SEQ ID NO: 21799 - DNA, 446 bp, Bovine  MMBT12044
tgaggggaacaccgctcacttcacacactcccatactatttgaatggttttataatttgaaaagtatataaaccttttacaagtctggcaacactgagcatgtactgttttaacccaaataaaacgtatacggatctttaactgggaatataaataaaacctgacatttaaactcaactgctgagagggagggttccatctacgcccctgccaggagggaaacgggggcggattcgaggcgccctctcccgcctcctccccgttgacactaaacttcccagtgagttggttccctctttscattcccgagattgggattcagatctcttttacctcaatccattttttgaaagaatctgctagaaacattcagccctgaatgtgggaaaactttcagaagagtccattcaaagcctttaaaaaaggaaggcaaagaatacggcccg

SEQ ID NO: 21800 - DNA, 600 bp, Bovine  MMBT08674
ttttggcaaccatagatttagtaatttgctctactcacatgaaaaccaaaaggtgaactcattttgcaccctttgcttttttttctagtttcctttatagtgataatgcttttcattgtatgaattacaagtgcaagtaaattaagaatgatgtgattgacatttgagctatgaatgagcattgttcaagttaggatacatgtcttaattaaaatgttggtgaatggtaaaggtagacctctcagtgactttcttttcttttttgttctgaatcattgtagagatactttcatttttgcyaatctgtttatgtactttgcctaaagtgtagatatcgaattagattatattagtttagattcagtctgcaatgacttgaaactgtaatgaaaacacacacacactttgtgtgtgtgtgtgtgtgtgtgtgtgtgtgtgtgtctcctttacagagatgaatggttgaaagcagcccatgtgtatctcctatgcaaggtgacacccctctctcctaccgaatctcttttaggattgttttgtatagattcctgtccaagggctgaaggatgaattacatgacctttcgacatcaattccatc
